United States Patent Application Publication US 2011/0277190 A1 - sequence listing, part 2

SEQ ID NO: 3654 - protein, 376 aa, Microcystis aeruginosa
MKISKLAADDNFNQIIALETNPLELDSVDFGERTDEDLTESLPETLKNTRGSSGTGYDKGSNEDTVGAFFKEMARYPLLSAEEEIELAYSVKFLMEAEEVRQKLQENLHRPPTKTEWAIALELDNERQLENRLYRGRTAKRKMIRSNLRLVVSIAKRYLNRGVPFLDLIQEGAIGLNRAAEKFDPNKGYKFSTYAYWWIRQAITRTIANDARTIRLPIHIVEKLNKLKKAQILKQDLQRNPNERELAERLEITPEQLRQLLQLRRQSLSLNHRVGKGEDTELVDLLEDDDLQLPEDKMNEMMMRQEIFAVLSDVLTEREKDVISLRYGLATSQPYTLEEVGGMFNLSRERVRQIQTKAMRKLRRPQVARRLKGWLH

SEQ ID NO: 3655 - protein, 370 aa, Oryza sativa
MEKYEPVREIGAGNFGVAKLMRNKETRELVAMKFIERGNRIDENVFREIVNHRSLRHPNIIRFKEVVVTGRHLAIVMEYAAGGELFERICEAGRFHEDEARYFFQQLVCGVSYCHAMQICHRDLKLENTLLDGSPAPRLKICDFGYSKSSLLHSRPKSTVGTPAYIAPEVLSRREYDGKLADVWSCGVTLYVMLVGAYPFEDPKDPKNFRKTISRIMSVQYKIPEYVHVSQPCRHLLSRIFVANPYKRISMGEIKSHPWFLKNLPRELKEEAQAVYYNRRGADHAASSASSAAAAAAFSPQSVEDIMRIVQEAQTVPKPDKPVSGYGWGTDDDDDDQQPAEEEDEEDDYDRTVREVHASVDLDMSNLQIS

SEQ ID NO: 3656 - protein, 1100 aa, Rhodospirillum rubrum
MSDFLWYKDAIVYQLHVKAFFDSNGDGFGDFKGLTEKLDYLSDLGVTAVWILPFYPSPLRDDGYDIADYKAIHRAYGTMGDFRRFVREAHERGLKVITELVINHTSDQHAWFQRAREAKPGSKARDMYVWSDTDQRYLDTRIIFTDTETSNWAWDPLAKAYYWHRFFAHQPDLNWDNPRIFEEITRVMKFWLDCGVDGMRLDAIPYLVERDGTNNENLPETHVVLKRLRAWLDAHYEDRMFLAEANQWPEDVREYFGEAGDECHMAFHFPVMPRIYMAVAQEDRHPITDIMRQTPEIPAACQWAIFLRNHDELTLEMVTDRERDYMNTFYANDSRARINVGIRRRLAPLLDNDRRKIELLNSLLMSMPGTPIIYYGDEIGMGDNIFLGDRDGVRTPMQWSPDRNGGFSRADPASLYLPTIMDAVYGFFAVNVEAQSRSPSSLLNWMRRLIAVRKRHPSFGRGTLRFLYPGNRKILAYLREFEGEVILCVANLSRAPQPAELGLAEFSGRVPVEMLGNSVFPPIGELHYFITLPAYGFYWFRLSKGEGPSWHEPPVEPLPDLSTLVLPRIWDSLGSDGPLRQIQGDILPAFLPKQRWFSGKEHSLRGVEMTDHAVISAPGAASGWMLALWRADYKDGAPGQTFQLPLDIAWESREDDPLSRLLPFTLARVRRVNRVGALYDAMAGPAFPLALVQAMAEGANVTTAKGGGLRFTRTQAFPAGPLPGPEAVARLGREQSNTSIKLGEDMVLKLYRRVEAGIHPEIEIGRFLTDVAGFANAPPLLGALEHIDAKGAISALAVLQGFVRNQGDGWDYMLAYLDRFLDDRAQAPAEVGEGGGPAGSPHGIIHAQADILGQRVAELHHAFATPTEDPAFSAEAVGPEDLASWREQVRTQAAQARQALDTALPGLSAEVAGLVTRLLDCWERIDARVDAPISLAEGLVKTRIHGDLHLGQVVVVRDDFHILDFEGEPVKGLSERRDKHCPLKDVAGMLRSFDYAAWSAALSFRQTHAEVRIDVLPALGVWQEEIREAFLAGYDRAIAGCPSVPALEEGRRDLLSLFMLEKALYEVSYEAANRPDWLRIPIGGVLRLLGEGPSDEIKPR

SEQ ID NO: 3657 - protein, 803 aa, Catharanthus roseus
MRILIQEMLIRTLFFFYLIISSLEFTPENNYLINCGSFNDTSIDDRIFLADNLNSTVLSTPETIFANSSNSNSVLDLYKSARIFNGSSQYNFSINKKGWHWIRLHFFPFPISNEKFNLSSAKFSVFAQNFTLLKDFQPLNNVPVVKEFSLNVNSNNLLLKFTPSRNSLAFLNGLEVISLPDELIPFSIGNQNLEKNALETVVRVNMGNVTVSSKDDPLGRIWLSDYNYLSNVNLVVFVSNIHLVNYTKGEEKVSENIGPSSVYGTGTKLHSVFDPNTQINATWLFNVDSGFGYFIRFHFCNLLNPIPNNNFFFNVFLNSEFVVKDLNLSTSGAPMYKDVVVVTNVVPQIRISVGPSNVRNSYPDGILNGLEIMKISTSDGSLAAVDADFPSSSSSSKLKVWIIVSLAIGISLILVVFTVVFLFRRRKRHVMIHSTPDHLTEEDDSNSSIFSRSKIGYRFPLAVVQEATDNFSENRVIGIGGFGKVYKGVFKDGTKVAVKRGISCSSSKQGLSEFRTEVELLSQFRHRHLVSLIGYCDEKNEMIIIYEFMENGTLRDHLYGSDKPKLNWRKRVEICIGSAKGLHYLHTGTMKRIIHRDVKSANILLDENLMAKVADFGVSKTGPDHFDQTHVSTAVKGSFGYLDPEYLTMQKLTEKSDVYSFGVVMLEILTGRPVIDPSKPREMVNLVEWAMKCSRKGEEIVDSDIVNEVRPESLIKFQETAEKCLAERGVDRPTMGDVLWNLECALQLQGKQKENEQPEEMRDVSATEISLGSMADLAAVSMSKVFSELVKAQGTRSEFGSAP

SEQ ID NO: 3658 - protein, 499 aa, Glycine max
MVLTSTATHPDEQDQSLNYTFASRYVREPIPKFKMPEKSIPKDAAYQIINDELMLDGAPRLNLASFVTTWMEPECDKLIMASLNKNYVDMDEYPVTTELQNRCVNIIANLFHAPISDDETAVGVGTVGSSEAIMLAGLAFKRKWQTKRKAEGKPYDKPNIVTGANVQVCWEKFARYFEVELKEVKLKEGYYVMDPAKAVEMVDENTICVAAILGSTMTGEFEDVKLLDELLTKKNNETGWDTPIHVDAASGGFIAPFLYPDLEWDFRLPLVKSINVSGHKYGLVYPGVGWVVWRSKDDLPDELVFHINYLGSDQPTFTLNFSKGSSQIIAQYYQLIRLGFEGYKNIMENCWENARVLKEGIERTGRFNIISKDIGVPLVAFSLKDSSQHTVFEIADHLRKFGWIVPAYTMPPDAQHIAVLRVVIREDFSRGLAERLAADIEKVVKLLDTLPSPLTTKAVHITAITSETGEKIKKAAIETQKEIAFYWKRLVDGKRLGAC

SEQ ID NO: 3659 - protein, 235 aa, Gloeobacter violaceus PCC 7421
MALRAVLFDFNGVLVDDEPLHRALTLQVLGEAFNLEVSRAEYRRHCLGRPDREAFRAVLEARGLAVGDGALAALMRRKTELYRERAAPKDLLVVGVQALLADLVGRGMHLAVVTGSGGEEVSWLLENTGLREYFALIVAAEDIQRGKPDPEGYRTALGRLGREPEEALAVEDSLAGIEAARRAGLRVLALTTAVPMHLLQRRTQWVVDRYEQLDLDAVVQFYGRAAPLPPSGGSA

SEQ ID NO: 3660 - protein, 268 aa, Haemophilus influenzae R2846
MSRFETQFATLKAKNEGAFVPFVTLCDPTFDRSFEIICTLVDNGADALELGFPFSDPLLDGPVIQAANNRALTAGHSSEDSFKLLEKVRSKYPEIPISLLLCANLIFAKGLDDFYQRCAEVGVDAVLVADIPLLAKEDYVQAAKKHGIQPVFICPPNADEKTIQGVAENSEGYTYLVSRAGVTSAENQAHAANLDTLVEQLKAHNAPPILQGFGIAQPAQVKEALALGAAGAISGSATVKIIERNLDNHEQCLAELAEFVQTMKAATK

SEQ ID NO: 3661 - protein, 222 aa, Arabidopsis thaliana
MGLFLLYSKLQSEAVREAITTIKGKSEEKKRNFVETVELQIGLKNYDPQKDKRFSGSVKLPHIPRPKMKICMLGDAQHVEEAEKMGLSNMDVEALKKLNKNKKLVKKLAKSYHAFLASESVIKQIPRLLGPGLNKAGKFPTLVSHQESLEAKVNETKATVKFQLKKVLCMGVAVGNLSMEEKQLFQNVQMSVNFLVSLLKKNWQNVRCLYLKSTMGPPQRIF

SEQ ID NO: 3662 - protein, 418 aa, Dechloromonas aromatica RCB
MDIKHYMHTVGRQARAASRRLAGATTAEKNAALLAIAAAIRRESAALVAANQEDLTAARAAGLETAMLDRLTLSAKGVESMAEGVEQVATLADPIGEMTDIKYRPSGIQVGKMRVPLGVIGIIYEARPNVTADAAALCLKSGNAAILRGGSEAIRSNRAIAALVHEGLKAAGLPAESVQVIDTTDRAAVGELITMREFVDVIVPRGGKGLIARLLAESRVPMIQHLDGNCHVYLEAEADPAKALKIVENAKTQRYGTCNTAESLLVDRSVAAMLLPPIAAMLTAKGVEIRGCAETQAIVPNAIAATEEDYYTEYLAPIISVKVVSGIDEAIEHINQYSSHHSEAIITDNHPKAMRFLREVDSASVMINASTRFADGFEYGLGAEIGISTDKIHARGPVGLEGLTSQKWVVLGDGHVRG

SEQ ID NO: 3663 - protein, 484 aa, Agrobacterium tumefaciens
MIKLKNAALLRDACLVNGRWLKAADGKTIAVENPANSMIIGHVPSLSADEVEAAVESANKAFSEWSRRAAKDRAAILRRWFDLMVANADDLGALMTAEQGKPFAEARGEALYAASFVEWFAEEAKRVYGDTIPSPTTDKRITILKQPIGVCAAITPWNFPAAMITRKAAPALAAGCTMIVKPAEQTPLTALALGVLAEEAGVPAGVFQVVTGAARDIGKVFTESDTVRKISFTGSTEVGRLLMAQSAPTIKKLSLELGGNAPFIVFDDADLDAAVEGAIVSKYRNAGQTCVCSNRIYVQDGVYDAFAEKLVKRVESLSVGEGTEPGVLIGPLIDQDAVAKVEDHVADALGKGAKIVTGGKRHALGGTFYEPTVLTGATQAMKVAREETFGPVAPLFRFGTEDEAVAMANDTEFGLAAYFYTENVRRTWRVAEALEYGMVGHNTGLISNEVAPFGGVKQSGLGREGSHYGIDEYLEIKYLCSAIG

SEQ ID NO: 3664 - protein, 373 aa, Sulfolobus tokodaii str. 7
MEIKKGLEDVYVKETEITYIDGELGRLYYRGYSIYDLAEFSNFEEVSYLILYGKLPNREELNWFQEKLREERYLPDFIIKFLREVRKDAQPMDILRTAVSLLGIEDSKNDERTDIKGIKLISKFPTIVANYARLRKGLDIIEPDPKLSHSENFLYMLYGDRPNEIKSKAMDVTLILHIDHEMNASTFASLVVASTFSDLYSSIVAGISALKGPLHGGANYEALKMFKEIGSPEKVNDYILNRLSNKQRIMGFGHRVYKTYDPRARILKQYAKLLAEKEGGEIYTLYQIAEKVEEIGIKYLGPKGIYPNVDFFSSIVFYSLGFEPDFFPAVFASARVVGWVAHIMEYIKDNKIIRPKAYYKGEIGKKYIPIDSR

SEQ ID NO: 3665 - protein, 883 aa, Salmonella typhimurium LT2
MNEQYSALRSNVSMLGKVLGETIKDALGEHILDRVETIRKLSKSSRAGNEANRQELLTTLQNLSNDELLPVARAFSQFLNLANTAEQYHSISPKGEAASNPEVIARTLRKLKNQPDLNDATIKKAVESLSLELVLTAHPTEITRRTLIHKMGEINNCLKQLDNTDIADYERHQVMRRLRQLIAQSWHTDEIRKQRPSPVDEAKWGFAVVENSLWQGVPNYLRELNEQLEENLGYKLPVDFVPVRFTSWMGGDRDGNPNVTADITRHVLLLSRWKATDLFLKDIHVLVSELSMVDATPELLALVGEEGASEPYRYLMKKLRARLMATQSWLEARLKGEKLPKPAGLLTQNEQLWEPLYACYQSLQACGMGIIANGELLDTLRRVKCFGVPLVRIDIRQESTRHTEALGEITRYLGIGDYESWSEADKQAFLIRELNSKRPLLPRNWEPSNDTREVLETCKVIAEAPKGSIAAYVISMAKTPSDVLAVHLLLKEAGIGFAMPVAPLFETLDDLNNADDVMTQLLNIDWYRGLIQGKQMVMIGYSDSAKDAGVMAASWAQYQAQDALIKTCEKAGIELTLFHGRGGSIGRGGAPAHAALLSQPPGSLKGGLRVTEQGEMIRFKYGLPEVTVSSLSLYTSAILEANLLPPPEPKDSWRHIMDELSVISCETYRGYVRENKDFVPYFRSATPEQELGKLPLGSRPAKRRPTGGVESLRAIPWIFAWTQNRLMLPAWLGAGTALQKVVEDGKQSELEAMCRDWPFFSTRLGMLEMVFSKADLWLADYYDQRLVAKTLWPLGKELRDLLEEDIKVVLAIANDSHLMADLPWIAESIQLRNVYTDPLNVLQAELLYRSRLTEEQGKSPDPRVEQALMVTIAGVAAGMRNTG

SEQ ID NO: 3666 - protein, 436 aa, Catharanthus roseus
MATRNVVQVPQQNRDAAPAGMKQKNMAGEGKIRRALGDIGNLVTVRGVEGKPLPQVSRPITRSFCAQLLANAQAAAVAENNKKCKAVNVDGAADGGIIPKGARKPAQKKAATIKPKPEAVIEISSDSEQVKKEKKPSKKDAPTLTSTLTARSKAACGLSKKPKDQIIDIDAADADNELAVVEYVEDIYKFYKIAENESRVHNYMDSQPEINDKMRAILIDWLIEVHHKFELNPETLYLTINIVDRYLAVQTTLRKELQLVGMSAMLIASKYEEIWAPEVNDFVCISDRAYSHQQVLVMEKRILGGLEWNLTVPTPYVFLVRFIKASVPDSNMENMVYFFAELGMMNYSVAMMYCSSMIAASAVYAARCTFNKTPSWDDTLKLHTGFSEYQLIDCAKVLVNLHAMAADNKLKVIFRKYSSLERGSVALLPPAKSLLA

SEQ ID NO: 3667 - protein, 690 aa, Arabidopsis thaliana
MMNPSHGRGLGSAGGSSSGRNQGGGGETVVEMFPSGLRVLVVDDDPTCLMILERMLRTCLYEVTKCNRAEMALSLLRKNKHGFDIVISDVHMPDMDGFKLLEHVGLEMDLPVIMMSADDSKSVVLKGVTHGAVDYLIKPVRMEALKNIWQHVVRKRRSEWSVPEHSGSIEETGERQQQQHRGGGGGAAVSGGEDAVDDNSSSVNEGNNWRSSSRKRKDEEGEEQGDDKDEDASNLKKPRVVWSVELHQQFVAAVNQLGVEKAVPKKILELMNVPGLTRENVASHLQKYRIYLRRLGGVSQHQGNLNNSFMTGQDASFGPLSTLNGFDLQALAVTGQLPAQSLAQLQAAGLGRPAMVSKSGLPVSSIVDERSIFSFDNTKTRFGEGLGHHGQQPQQQPQMNLLHGVPTGLQQQLPMGNRMSIQQQIAAVRAGNSVQNNGMLMPLAGQQSLPRGPPPMLTSSQSSIRQPMLSNRISERSGFSGRNNIPESSRVLPTSYTNLTTQHSSSSMPYNNFQPELPVNSFPLASATGISVPVRKATSYQEEVNSSEAGFTTPSYDMFTTRQNDWDLRNIGIAFDSHQDSESAAFSASEAYSSSSMSRHNTTVAATEHGRNHQQPPSGMVQHHQVYADGNGGSVRVKSERVATDTATMAFHEQYSNQEDLMSALLKQEGIAPVDGEFDFDAYSIDNIPV

SEQ ID NO: 3668 - protein, 324 aa, Dechloromonas aromatica RCB
MPHAIRFHQTGGPEVLSWEDVDLPAPAPGEATVRHHAVGLNYIDTYHRTGLYPLTLPSGIGMEGAGVVEAVGEGVGEVKVGDRVAYAGGPLGAYAEVRNIPAHRLLKLPDSISFATGAAMMLQGLTAAYLLRKTYRVQPGDAVLIHAAAGGVGLIACQWAKALGATVIGTVGSSAKAELAKAHGCDHVINYSSENFTQRVREITAGEGVAVVYDGVGKDTFIGSLDSLRPLGMMVSYGNASGPVPPLDLLLLSQKGSLFITRPTIATYTAKRADLEALGAELFDAVVSGKVRIEVNQTYALKDAAQAHRDLEARKTTGSTILLP

SEQ ID NO: 3669 - protein, 379 aa, Cryptococcus neoformans var. neoformans B-3501A
MISRPELTLLEQLEATGVKIDTDSMDPKVAANLPIKAHDMTSNQLLTDEQLKNPENKELVEKTIRELKGANWFDVQTVLTARFAKRVIPYIQGRVLAQTTPTKAFDKDAIISHARAYDKAFQAEGISRDRYCVKVPATTAGVQAAKILNEEGIRTLGTSLFSLAQAIACSQASMLSISPYYNEVRAHVDSSLWPDVADPATQHPMSFRVRHIRETYDRLAKETGKVQPLIKGASYITAREVMAMPELGVEHVTLLVGPMEDLCSTSRLPEYRKGGEWQVRVRSELDKPNVKWATWSAPEPSVSKKRMAEMAKSDPYSDLMQKDWKMASTDVDYLADGVLDKYNEEDEVTKVRLRDALELFKGGEAESKVEIERLQKLYA

SEQ ID NO: 3670 - protein, 223 aa, Glycine max
MSSADPEHREEEEAPAVGDDEDTGAHVAPIVKLEEVAVTTGEEDEDAILDLKSKLYRFDKDGNQWKERGAGTVKFLKHKATGKVRLLMRQSKTLKICANHLILPTMSVQEHAGNEKSCVWHARDFADGELKDELFCIRFPSIENCKSFMETFQEVAESQKAEDEKESADAAGLIEKLSVEEKADAEKKDEEKSEDKTVEKESASGKESKAVEDKKAEEPASSA

SEQ ID NO: 3671 - protein, 424 aa, Xylella fastidiosa Temecula1
MSNSPQTPLVTRQRLSEVRYEIRGELARRARELEAEGRKLIKLNIGNPGAFGFRAPEHLQRAIADDMGRTDPYTHQQGLPIAREAIAAAYARRHYPDVDADRVFVGNGVSELIDLSLRALLNPGDEVLVPSPDYPLWSAATILNDGRPVYYRCAPENGFQPDAVEIETLVSSRTRAIVLINPNNPSGANYSQELLERIVAISVKHHLLLLVDEIYDQILYDGAVFVPVAPLAGTHPCITFSGLSKVHRACGWRVGWALLSGSSIQVDNLRNAMDLLGALRLCANVPGQYAIDAAVNGPDTITPLCSPGGPLYETRRAVIDACAASEHLSLVVPAGALYAFPSVVGPAARHFDDYAFALELMNEEGVLVVPGSSFNVPYRDHFRVTLLPDAGLIREVFSRIDRALSRRAEVAEKVVPLKSRSAAA

SEQ ID NO: 3672 - protein, 474 aa, Arabidopsis thaliana
MVFFRSVSAFTRLRSRVQGQQSSLSNSVRWIQMQSSTDLDLKSQLQELIPEQQDRLKKLKSEHGKVQLGNITVDMVIGGMRGMTGLLWETSLLDPEEGIRFRGLSIPECQKVLPTAQSGAEPLPEGLLWLLLTGKVPSKEQVEALSKDLANRAAVPDYVYNAIDALPSTAHPMTQFASGVMALQVQSEFQKAYENGIHKSKFWEPTYEDCLNLIARVPVVAAYVYRRMYKNGDSIPSDKSLDYGANFSHMLGFDDEKVKELMRLYITIHSDHEGGNVSAHTGHLVGSALSDPYLSFAAALNGLAGPLHGLANQEVLLWIKSVVEECGEDISKEQLKEYVWKTLNSGKVIPGYGHGVLRNTDPRYVCQREFALKHLPDDPLFQLVSKLYEVVPPVLTELGKVKNPWPNVDAHSGVLLNHYGLTEARYYTVLFGVSRSLGICSQLIWDRALGLALERPKSVTMDWLEAHCKKASSA

SEQ ID NO: 3673 - protein, 318 aa, Listeria monocytogenes str. 4b H7858
MTASVFVAGKLLPETMEALSEWDVKAFSGEENITEAELIKNVTEVDAIICPLSSPISAKVLESAKNLKIVANIGAGFDNIDVKKAQELGIAVTNTPDVSTEATAELTLGLILDVARRISEGDRLCRETPEQFKGWAPTFFLGTELSGKTLGIIGLGRIGQAVAKRAAAFGMKIIYSGHHPKEAAKEWNAEFVSQEELLKRSDVVTIHAAYSPSLKYLLNETTLKTMKSSAFLINAARGPVVEEAALIKALEAGVIAGAALDVFEFEPKIGEDLAKLDNVVLTPHIGNATVETRTAMGKIAIANVEAVLAGKAPLHSVY

SEQ ID NO: 3674 - protein, 481 aa, Mesorhizobium loti MAFF303099
MAENYDVIIIGSGPGGYVTAVRSAQLGFKTAIVEREHLGGICLNWGCIPTKALLRSAEIMHYSDHLKDYGLKLDGKVSVDTSAVVDRSRKVSLRLNGGVAFLMKKNKVDVIWGEAKLSKPGEVVVSKTAKTPMEPQPPVPKGVKGEGTYTAKHIILATGARPRALPGIEPDGKLIWTYFEAMVPKEMPKSLLVMGSGAIGIEFASFYRTMGADVTVVELLPAVMPVEDAEVSKFAQKQFEKQGMKIILEAKVTKVEKGANSVTAHVEMKDGKVEKITADRMISAVGVQGNIENLGLEALGVKTDRGCIVVDGYGKTNVPGIYAIGDVAGPPMLAHKAEHEGVVCVEKIAGFPGVHAIDKLKIPGCTYCNPQVASVGLTEAKAKAEGKDIRVGRFQFAANGKAIALGEDQGFIKTIFDKKTGQLLGAHMVGAEVTELIQGFVVAMNLETTEEELMHTIFPHPTLSEMMKESVLDAYGRALNA

SEQ ID NO: 3675 - protein, 997 aa, Arabidopsis thaliana
MTMMSDLSLDLVEEILCRVPITSLKAVRSSCKLWNVLSKNRILCKTEARNQFLGFTIMNHRLYSMRFNLHGIGLNENSEEFIDPSIKPIGNLLNQVEISKVFYCEGLLLCVTRNHSSKLVVWNPYLGEIRWIKTRNDYHIGVTYALGYDNNKNHMILRFFSEQGYYEIYDMNSSDSWDCFYGIPNKGLKCYQPGASLNGNAYFLTEGREVMEGYDCLLGFDFTTKKFGPLLSLSFSHDFIETGRLSCVKGEKLAVLYQRCYTYEMEVWVTTKIEPNAVSWSKFLAVEMEPLTSLKFNDDSGSFFIDEEKKIVVVFDIDESERNNTAYIIGDYGCLKEVDLDEVVNPQESVEVGDRIYSFSPFVCSCSYVPSLVKFKEDAEHERKDKKRKSKRKRTNKDGYDFILCFDFTTERFGQILPLPFKHSFRDTWTLSSVKEEKLAVAVLYWKNTCVMIEIWMTIKIDPNVESWSKFLRVDRKPCIDLRFDDRNDSFFIDEEKKVVVFFSSDKVKTSTAYVIGDNRYLRTVDLEKAANSQESVEVGERVYCFSPLVCSCSYYVPSLVKINHNAGRKRKEKKTKRKSKDKQMKLSNKEPGFCFPQCYVLISSNTWYRDVDGEPIVDFDDFGNDREPSTEPLQDFDEDLADDIGDWDGEGSQTPVYDNDKVAKPRKRLVKKSSSERVTIDVPELIDEDVDDAEFDEFMGGRGGGSTDYDDKVGRKRKKEKERSSSGSGKEKRHKFPNRGERKSEEIDEMWKSIAHNPENDEEGVRTMDDDNFIDDTGLDPSERYGGDAGDRSPTHYPQAEEGEDEDEVNNLFKMGKKKKKTERNPAEIALLVENVMAELEVTAEEDAELNRQGKPAINKLKKLSLLTDVLGKKQLQTEFLDHGVLTLLKNWLEPLPDGSLPNINIRAAILRVLTDFPIDLDQYDRREQLKKSGLGKVIMFLSKSDEETNSNRRLAKDLVDKWSRPIFNKSTRFEDMRNLDEDRVPYRRPPEKNPS

SEQ ID NO: 3676 - protein, 105 aa, Oryza sativa
EPFDYYMFGQNYIRPLVDYRNSYVGNISIFQDMEQKLQQGHNVVLMSNPQTEADPAIIALLLERSNPWISENIVYVAGDRVVTGSLCKPFSMGRNLICVYSKKHM

SEQ ID NO: 3677 - protein, 515 aa, Saccharomyces cerevisiae
MFQRKTLQRRNLKGLNLNLHPDVGNNGQLQEKTETHQGQSRIEGHVMSNINAIQNNSNLFLRRGIKKKLTLDAFGDDQAISKPNTVVIQQPQNEPVLVLSSLSQSPCVSSSSSLSTPCIIDAYSNNFGLSPSSTNSTPSTIQGLSNIATPVENEHSISLPPLEESLSPAAADLKDTLSGTSNGNYIQLQDLVQLGKIGAGNSGTVVKALHVPDSKIVAKKTIPVEQNNSTIINQLVRELSIVKNVKPHENIITFYGAYYNQHINNEIIILMEYSDCGSLDKILSVYKRFVQRGTVSSKKTWFNELTISKIAYGVLNGLDHLYRQYKIIHRDIKPSNVLINSKGQIKLCDFGVSKKLINSIADTFVGTSTYMSPERIQGNVYSIKGDVWSLGLMIIELVTGEFPLGGHNDTPDGILDLLQRIVNEPSPRLPKDRIYSKEMTDFVNRCCIKNERERSSIHELLHHDLIMKYVSPSKDDKFRHWCRKIKSKIKEDKRIKREALDRAKLEKKQSERSTH

SEQ ID NO: 3678 - protein, 373 aa, Bacillus anthracis str. A2012
MADKPARSKQIETEMTLEQVKEQLTELGKKRGVLTYEEIAERMNGFEIESDQMDEYYEYLGEQGIDLVGDNDEGPNNHQITKTEEEFDLNDLSVPPGVKINDPVRMYLKEIGRVDLLSAEEEIRLATRIEEGDEEAKRRLAEANLRLVVSIAKRYVGRGMLFLDLIQEGNMGLIKAVEKFDYRKGFKFSTYATWWIRQAITRAIADQARTIRIPVHMVETINKLIRVQRQLLQDLGREPSPEEIGEEMDLAPEKVREILKIAQEPVSLETPIGEEDDSHLGDFIEDQEATSPADHAAYELLKEQLEDVLDTLTDREENVLRLRFGLDDGRTRTLEEVGKVFGVTRERIRQIEAKALRKLRHPSRSKRLKDFLE

SEQ ID NO: 3679 - protein, 242 aa, Gloeobacter violaceus PCC 7421
MRGAITIFPDLESLSLEAAQLFEEAAHAAIALHNRFCVSLAGGSTPKRLYQLLATEPHRSKLPWNQIHLFWGDERFVPPDDPQSNYRMVKEALLDHVAIPVANVHAMPVGSDDIEEAARLHSAQLSEFFGGDIRLDLALMGMGADGHTASLFPGDGALTVDDRPVAAARPASQPTARLTLTYPVFNRSRKVLFLVAGADKAEVLTRVLAGDTTYPSALIDPADGERFWMLDQAAAAKLPLPS

SEQ ID NO: 3680 - protein, 282 aa, Geum montanum
GLPPAMAAYGHRVMTVSPRYDQYKDAWDTGVTVELQVGDKIETVRFFHCFKRGVDRVFVDHPLFLERVWGKTASKIYGPVTGEDYKDNQLRFSLLCLAALEAPRVLNLNSNKYFSGPYGEDIIFVANDWHTALLPCYLKDRYQSKGIYMSAKVAFCIHNIAYQGRFAFADFSLLNLPDSFKSSFDFIDGYDKPVKGRKINWMKAGMLESNIVLTVSPYYAKELVSSTDKGVELDNIGRKVGVLGIVNGMDVQEWNPLTDKYTDVKYDATTVMDAKPILKEAL

SEQ ID NO: 3681 - protein, 465 aa, Solanum berthaultii
  misc_feature (178)..(178): Xaa can be any naturally occurring amino acid
  unsure (1)..(465): unsure at all Xaa locations
MSSSKNSVHILIFPFPAQGHILALLDLTHQLLLHGFKITILVTPKNVPILDPLISTNPSVETLVFPFPGHPSLPAGVENVKDVGNSGNAPIIAGLSKLRGPILEWFKAQSNPPVAIVYDFFLGWTLDLAQQVGVPGIVFYGVGALLVSILVDLWKNLWAYKGWTLLSLMGFLKAQGLXMEHLPSVFLKFKEDDPTWEIVRNGFIANGRSFGSIFNTFEALDSDYLGFLKKEMGHERVYSIGPINLVGGPGRTGKYDDGANEKIFTWLNECPNESVLYVAFGSQKLLTKAQMEALTIGLEKSEVRFILVAKQLTAQQEEQGFGSVPKGFEEKILGLRPNDKGLGPQVEILGHRAVGGFLSHCGWNSVLEAIVAGVLILGWPMEADQFINTWLLVDNMKTSVRVCEGSNSVPDPIELGRKINEAMSNDLFKERAKKRRVEALEAVKIGGSSKKDLDSIVKELGQLRS

SEQ ID NO: 3682 - protein, 540 aa, Arabidopsis thaliana
MDSLRFLRILLLLSSILLLSLRSTVTAGDIVHQDNLAPKKPGCENDFVLVKVQTWIDGVENEEFVGVGARFGKRIVSKEKNANQTHLVFANPRDSCTPLKNKLSGDVVIVERGNCRFTAKANNAEAAGASALLIINNQKELYKMVCEPDETDLDIQIPAVMLPQDAGASLQKMLANSSKVSAQLYSPRRPAVDVAEVFLCLMAIGTILCASYWSAWSAREAAIEHDKLLKDAIDEIPNTNDGGSGVVEINSISAIFFVVLASGFLVILYKLMSYWFVELLVVVFCIGGVEGLQTCLVALLSRWFQRAADTYVKVPFLGPISYLTLAVSPFCIVFAVLWAVYRVHSFAWIGQDVLGIALIITVLQIVHVPNLKVGTVLLSCAFLYDIFWVFVSKKLFHESVMIVVARGDKSGEDGIPMLLKIPRMFDPWGGYSIIGFGDILLPGLLIAFALRYDWLANKTLRTGYFIWAMVAYGLGLLITYVALNLMDGHGQPALLYIVPFTLGTMLTLARKRDDLWILWTKGEPERACPHHVRLEQCSEK

SEQ ID NO: 3683 - protein, 608 aa, Antirrhinum majus
MATVTASQLVSHVHGGATSSPDTKTNLAQVGLRNQQFTHNGLRSINMVDKLQMRNNAKQSRSLVKKTDNGSPLGKIICGTGMNLVFVLAEVGPWSKTGGLGDVVGGLPPAMAGNGHRVMTVSPRYDQYKDAWDTSVVVEIKVGDSIETVRFFHCYKRGVDRVFVDHPIFLEKVWGKTKSKIYGPNAGTDYQDNQLRFSLLCQAALEAPRVLNLTSSKYFSGPYGEDVVFVANDWHTALLPCYLKSMYQSKGMYLHAKVAFCIHNIAYQGRFGSSDFCLLNLPDQFKSSFDFFDGYEKPVKGRKINWMKAGILESDRVVTVSPYYAMELVSGAEKGVELDNVIAKTSITGIVNGMDTQEWNPATDKHIDTNYDITTVMDAKPLLKEALQAAVGLPVDKNIPVIGFIGRLEEQKGSDILVAAISKFVGLDVQIIILGTGKKKFEQQIQELEVLYPDKARGVAKFNVPLAHMITAGADFMLVPSRFEPCGLIQLHAMRYGTIPICASTGGLVDTVTEGFTGFHMGAFNVECATVDPADVQKIATTVERALAAYGSVAYKEMIQNCMAQDLSWKGPAKNWEKMLLSLGVSGSEPGVDGEEIAPLAKENVATP

SEQ ID NO: 3684 - protein, 357 aa, Frankia sp. CcI3
MDAVMLVGGQGTRLRPLTMSAPKPMLPVAGVPVTAHMLARARDAGIDRVVLATSYRAEVFEEYFGDGSAHGLQLEYVTETEPMGTGGAIRNVAERLHGGPGDPVVIFNGDILAGLDIQALVARHTGTGAAVTLHLTRVVDPRAFGVVPVDDDGRVTAFLEKTPDPPTNLINAGCYVFRRSVIDTIPTGRPVSVERETFPGLLAAGTAVMGYPDDTYWLDLGTPAAFVQGSRDLVTGRMASPALPGPVGDCLVLPGAVVAADAKIGGGATVGAGAWVGAGAAIDGAVLFDGAVVEAGAVVRDSVIGRDAVIGSGVALDGVVIGDGVRIERGNELRSGARVFPGVVLSAGAVRFSSDRT

SEQ ID NO: 3685 - protein, 406 aa, Escherichia coli K12
MKRAVITGLGIVSSIGNNQQEVLASLREGRSGITFSQELKDSGMRSHVWGNVKLDTTGLIDRKVVRFMSDASIYAFLSMEQAIADAGLSPEAYQNNPRVGLIAGSGGGSPRFQVFGADAMRGPRGLKAVGPYVVTKAMASGVSACLATPFKIHGVNYSISSACATSAHCIGNAVEQIQLGKQDIVFAGGGEELCWEMACEFDAMGALSTKYNDTPEKASRTYDAHRDGFVIAGGGGMVVVEELEHALARGAHIYAEIVGYGATSDGADMVAPSGEGAVRCMKMAMHGVDTPIDYLNSHGTSTPVGDVKELAAIREVFGDKSPAISATKAMTGHSLGAAGVQEAIYSLLMLEHGFIAPSINIEELDEQAAGLNIVTETTDRELTTVMSNSFGFGGTNATLVMRKLKD

SEQ ID NO: 3686 - protein, 138 aa, Zea mays
  misc_feature (45)..(45): Xaa can be any naturally occurring amino acid
  unsure (1)..(138): unsure at all Xaa locations
EGVQQIIRTELMLDANPRLNLGSLVPRWMEPKCDKLIMDSTTKNXVDMAEYPVPPEPQNPWVNIKAPLFNAPIKEDETAIGVGTVGSSEAIMLAGLAFKRKWQNKRKEQGKPCPPPNMVPGANVQDPGPPNNGCKCWV

SEQ ID NO: 3687 - protein, 338 aa, Polaromonas sp. JS666
MKVFYDKDCDLSLIKGKTVAIIGYGSQGHAHAQNLNDSGVKVVVGLRKGGASWPKVEKAGLKVAEVADAVKAADVVMILLPDEQIGAVYANDVAPNIKQGASLVFAHGFNVHYGAVIPRADLDVWMVAPKAPGHTVRNTYTQGGGVPHLVAVHQDKSGKARDLALSYAMANGGGKAGIIETNFREETETDLFGEQAVLCGGTVELIKAGFETLVEAGYAPEMAYFECLHELKLIVDLIYEGGIANMNYSISNNAEYGEYVTGPNIVTSATKEAMRKCLKDIQTGEYAKSFLLENRVGAPTLLSRRRLNAEHQIEIVGEKLRAMMPWIAKNKLVDQTRN

SEQ ID NO: 3688 - protein, 238 aa, Triticum monococcum
MGRGKVVLQRIENKISRQVTFAKRRNGLLKKAYELSLLCDAEVALVLFSHAGRLYQFSSSSNMLKTLEKYQRYIFASQDAAVPTTDEMQNNYLEYMELKARVEVLQRSQRNLLGEDLAPLSTIELEQLEGQVGKTLRQIRSRKTQVLLDEMCDLKRKEQILQDANMTLKRKLGEIELEATPDPPQQPQQQQMWQGDRGVPPHTPPQPEHFFQALERYPSLQPVFRGMDVNQPPPAWMA

SEQ ID NO: 3689 - protein, 502 aa, Arabidopsis thaliana
MAQVLSTPLAIPGPTPIQFMAGLLARIVTKNTNKETSTPESPRSPRTPQGSILMDKYEIGKLLGHGSFAKVYLARNIHSGEDVAIKVIDKEKIVKSGLAGHIKREISILRRVRHPYIVHLLEVMATKTKIYIVMEYVRGGELYNTVARGRLREGTARRYFQQLISSVAFCHSRGVYHRDLKLENLLLDDKGNVKVSDFGLSVVSEQLKQEGICQTFCGTPAYLAPEVLTRKGYEGAKADIWSCGVILFVLMAGYLPFDDKNILVMYTKIYKGQFKCPKWFSPELARLVTRMLDTNPDTRITIPEIMKHRWFKKGFKHVKFYIENDKLCREDDDNDDDDSSSLSSGRSSTASEGDAEFDIKRVDSMPRPASLNAFDILSFSDLSGLFEEGGQGARFVSAAPMTKIISKLEEIAKEVKFMVRKKDWSVRLEGCREGAKGPLTIRVEIFELTPSLVVVEVKKKGGNIEEYEEFCNKELRPQLEKLMHYQADEVEEVMCLPPEIEQ

SEQ ID NO: 3690 - protein, 291 aa, Triticum aestivum
MPFDFPWLNKAASTSTPTPSLSKPNNPNPFLPIQTHLTSFLSSLPLPRAIAPPWARIPSPSSSAALPVAEIEDRLAGVPVYALANSAQEFMLVSKTHRGGGGDVAGGVGGSARHPPALGMLCFRREDADMLLAQMDDDMRAGSTVVPVALNKVIQLKSDGVAFRFLPDPSQVANAIKLMQDGGEFLNEGFPGVPVFQSRSLVLRNDNKRYRPVFFRKEDLDKSLHRASSDQQNPIPAVRIGDTQVCSLEDIITSMKDSSSSKWDDAVFVPPGFRTRGSTISTSSGAGTSLL

SEQ ID NO: 3691 - protein, 318 aa, Pachysolen tannophilus
MTLQYYTLNNGRKIPAIGMGCWKLENAADMVYAAIKEGYRLFDCACDYGNEKEVGEGINRAIKDGLVKRKDLFITSKLWNNFHAKENVKKALMKSLSDFNLDYFDLYLMHFPISFKFVPFEEKYPPGFYCGDGDKFIYEDVPIIETWRAMENLVDEGLVKSIGVSNVSGGLLEDLIKAARIKPASLQIEHHPYLQQNKLVEYAQLKGIVVTGYSNFGPLSFLELGNETAKKTQPLYENKTITTIAAKHGKTPFQVLLRWVNQRGIAIIPKSTFPNTLAVNLHVDEFDLTKEDFEEIAKLDRHLRFNDPWTWDKIPTFV

SEQ ID NO: 3692 - protein, 335 aa, Cyanidioschyzon merolae strain 10D
MQTAVQTQTTVQTLLTPRFYTTDFDQMAKYDISKNRAEIEAIVNEFRKDYNQTHFIRDDEFDQVWTQMPESKRQWFKEFLERSCTAEFSGFLLYKELSRRLKDTNPLLAEGFGYMSRDEARHAGFLNKAMADFGVSLDLGFLTKHRQYTFFAPKFIFYATYLSEKIGYWRYITIYRHLEAHPKWSVYPIFKFFEKWCQDENRHGDFFAAILKAQPKWITGWASRLWCRFFLLSVFVTMYLNDLQRKDFYQLIGLDARAFDWHVIRKTNESAARLFPVVLDVDHVDFVRLMDECACAYAHWRETQSVLSLAKIFACLFKLYVIKPINTQALWNTIK

SEQ ID NO: 3693 - protein, 598 aa, Raoultella planticola
MSFITLRTGVAVALSSLMISQACPAVSAAPSVNQNIHVHKESEYPAWWKEAVFYQIYPRSFKDTNDDGIGDIRGIIEKLDYLKSLGIDAIWINPHYDSPNTDNGYDISNYRQIMKEYGTMEDFDNLVAEMKKRNMRLMIDVVINHTSDQHPWFIQSKSDKNNPYRDYYFWRDGKDNQPPNNYPSFFGGSAWQKDAKSGQYYLHYFARQQPDLNWDNPKVREDLYAMLRFWLDKGVSSMRFDTVATYSKIPGFPNLTPEQQKNFAEQYTMGPNIHRYIQEMNRKVLSRYDVATAGEIFGVPLDRSSQFFDPRRHELNMAFMFDLIRLDRDSNERWRHKSWSLSQFRQIISKMDVTVGKYGWNTFFLDNHDNPRAVSHFGDDRPQWREASAKALATITLTQRATPFIYQGSELGMTNYPFRQLNEFDDIEVKGFWQDYVQSGKVTATEFLDNVRLTSRDNSRTPFQWNDTLNAGFTRGKPWFHINPNYVEINAEREETREDSVLNYYKKMIQLRHHIPALVYGAYQDLNPQDNTVYAYTRTLGNERYLVVVNFKEYPVRYTLPANDAIEEVVIDTQQQATAPHSTSLSLSPWQAGVYKLR

SEQ ID NO: 3694 - protein, 514 aa, Verbena x hybrida
MTFSELINILFWDLTAAILLYVALILVCSLYSKPSTVSRNLPPGPKGFPVVGALPLLGTMPHIALAKMAKTYGPVMYLKVGTWGMAVASTPDAARAFLKTLDTTFSDRPPNAGATLLAYNAQDMVFAHYGPRWRLLRKLSNLHMLGAKALEDWADVRSSEVGHMLQAMLTSSLRHEAVALPEMLIYSMANMIGQVILSRRVFETKGKEVNEFKDMVVELMTSAGYFNIGDFIPALAWMDLQGIEKGMKSLHKKFDDLIGRMLDKHLESAHKRNAKPDFLDVILANRHNSEGESLTTTNIKALLLNLFTAGTDTSSSTIEWALAEMIKNPTILKTAHNEMDRVIGRDRRLLESDLPKLPYLQAICKEAYRKHPSTPLNLPRISSQPCIVNGYYIPENTRLSVNIWAIGRDPDVWENPLDFNPDRFLSGKNAKIDPRGNNFELIPFGAGRRICAGARMAMVLVEYILGTLVHSFDWELPVGVDEMDMEEAFGLALQKAVPLAAMVSPRLPPHCYAP

SEQ ID NO: 3695 - protein, 76 aa, Zea mays
  misc_feature (36)..(36): Xaa can be any naturally occurring amino acid
  misc_feature (41)..(41): Xaa can be any naturally occurring amino acid
  unsure (1)..(76): unsure at all Xaa locations
ILAEKGVVVLPDIYANSGGVVVSYFEWVQNIQGFMXAEEKXNDELEKDMSSAFQHMKAMCKSLVLPKCVVTLELRV

SEQ ID NO: 3696 - protein, 570 aa, Candida glabrata CBS138
MAGEKVELSSMDSAIEIRHVNQHAKEISSENKSESYDDNKEFEGSNRVVIKPVNDEDDVSVMINFNQGVSHFIIMLTFVASLSGFLFGYDTGYISSALISIGTDLDNKELTYGEKEITTAATSLGALIFALVAGFSVDIFGRKPCLMFSNIMFLIGAILQVTAHKFWQMTAGRFIMGFGVGIGSLIAPLYISEIAPKMIRGRLTVINSLWLTGGQLIAYGCGAGLNHVHNGWRILVGLSLIPTVLQFVFFIFLPDTPRYYVMKGDYEKAKSVLKRSYNGVSDELIDRKIEELLALNQSIPGKNHVERTWNAVKELHTKPANFRALIIACGLQGIQQFTGWNSLVYFSGTIFESVGFKNSSAVSIIVSGTNFIFTLVAFFCIDKIGRRNILIIGIPGMTVAHVMSAIAFHFIGIKFVGNTAIVEHSGFSSWGIVIIVFIIMFAAFYALGIGTVPWQQSELFPQNVRGVGTAFATATNWAGSLVIASTFLTMLQNITPTGTFGFFAGLCVVSFFFCYFCYPELSGLELEEVQTILQDGFNVQASKELAKKRKRQIAVLKKAKHQPTEEIIEE

SEQ ID NO: 3697 - protein, 437 aa, Corynebacterium glutamicum ATCC 13032
MTTDKRKTSKTTDTANKAVGADQAARPTRRTTRRIFDQSEKMKDVLYEIRGPVAAEAERMELDGHNILKLNTGNPAVFGFDAPDVIMRDMIANLPTSQGYSTSKGIIPARRAVVTRYEVVPGFPHFDVDDVFLGNGVSELITMTTQALLNDGDEVLIPAPDYPLWTAATSLAGGKPVHYLCDEEDDWNPSIEDIKSKISEKTKAIVVINPNNPTGAVYPRRVLEQIVEIAREHDLLILADEIYDRILYDDAEHISLATLAPDLLCITYNGLSKAYRVAGYRAGWMVLTGPKQYARGFIEGLELLAGTRLCPNVPAQHAIQVALGGRQSIYDLTGEHGRLLEQRNMAWTKLNEIPGVSCVKPMGALYAFPKLDPNVYEIHDDTQLMLDLLRAEKILMVQGTGFNWPHHDHFRVVTLPWASQLENAIERLGNFLSTYKQ

SEQ ID NO: 3698 - protein, 394 aa, Mesorhizobium loti MAFF303099
MFEDLQPAPADKILALIGLYRADPRPNKVDLGVGVYKDRDGKTPVMRAVREAEKRLLNSQDTKTYLGLAGDTGFNAVMAKLAFGPGADMTRIRAAQAPGGSGALRLVAELLKRTRSDATIWLSDPTWPNHMPVMRAAGLQIREYPYFDAASGAVRFDDMLAALRTAKSGDVVLLHGCCHNPTGANLDAAQWQAVTDLMVERGLLPFVDIAYQGFGDGLEADALGLRLLAAKVPEMVVASSCSKNFAVYRDRVGAAMVLARDSAQADVAMSQMLSAARAMYSMPPDHGAAAVRIVLEDASLRADWEAELEEMRLRMLRLRVAFAEALRRQSNSDRFDFVASHRGMFSRLGLTEAQVERLRAEHGVYMVGDSRINVAGLPEDGMDALAKAIVSVLD

SEQ ID NO: 3699 - protein, 473 aa, Leuconostoc mesenteroides subsp. mesenteroides ATCC 8293
MKKTKIVSTLGPSSSDVETIVKLIQAGANVFRFNFSHGDHEEHLGRMNAVHEAEKITGKTVGILLDTKGAEIRTTKQADGKIEFHTGDTLRIAMDENLEGTKEKIAVTYAGLFDDVKEGGQVLFDDGLLGTTVIEKDSATRELVVRVDNDGILGSRKGVNAPGVSINLPGITEKDADDIRFGLDHEINYIAASFVRKPEDVLEIRGLLKEKNMEHVQIIPKIESQEGIDNLDAILEVSDALMVPRGDMGVEIPAENVPLVQKDMIRKMNKAGLPVITATQMLDSMEENPRPTRAEASDVANAVFDGTDATMLSGESANGDYPVESVATMAAIDEKAETSLRENGRHEDIFFDETDSTEAVAASVARIARNVNAKAVVVSTNSGYTARMVSKHRPDVNILAVTYSERVQRGLTLNYGVVPVVYDAPKTIDEMVDLAKKAVKDQGLANSGDTIVIAAGVPMSQSGTTNMLTVQTV

SEQ ID NO: 3700 - protein, 371 aa, Kluyveromyces lactis NRRL Y-1140
MSESNELRKRQAEFTKELHGNNVTKSGFSALVSKNKSAQTEAVAKYLKHWDGKTDADAERRRLEDYNESTHSYYNVVTDFYEYGWGSSFHFSRFFKGESFSASVARHEHYLAYKAGIKENDLILDVGCGVGGPARTISRFTGCNIIGLNNNDYQIQKANYYAKRDHLDSKLSFVKGDFMKMEFDENTFDSVYAIEATCHAPTFEGVYGEIYKVLKPGGTFAVYEWVMTDKYDETNPEHRKIAYEIELGDGIPKMYSVDAARDALSKVGFEILEENDLADNDDEIPWYAPLTGEWKYVNSVADLATFFRTSRLGRAFTTSMVTVFEKLGLAPKGSVSVTNALEEAAVGLVAGGEKKLFTPMMLFVAKKPEQK

SEQ ID NO: 3701 - protein, 398 aa, Leuconostoc mesenteroides subsp. mesenteroides ATCC 8293
MNSGDLAWVLVSAALVWVMTPGLALFYGGLGERRNLLHTMFIPVMIIGIASLVWFVVGYTLSFGGSGNVIGNFKHLFLTNVSFTHSTKDLTIPDGAFALFQGMFPIITAAIITGSVIGRVRIKALLVFIALWLIFIYSPLAHMVWGGGFLAQLGAIDFAGGTVVHISSGVTGLVLALMIGHRHIDKHIPVRPSYVLIGGALLWVGWFGFNSGSALAANGTAVLALVNTWLASAAAVLTWGLVEYKYHGRATLSGITSGGVAGLVAITPAAGFVAPWAAVVMGLLAGFIGFAGITFVKNSFGYDDTLDAFGIHGIGGAVGAILTGVFADKSVGGVAGLINGNISLVGKQLVAILFTIAFAAIGTYVLAKITELIAAPLRLTADEEAEGYDAIMHDLTVE

SEQ ID NO: 3702 - protein, 367 aa, Pasteurella multocida
MKIDKTLVVKFGTSTLTQGSAKLNLPHMMDIVRQLAQLHQAGFRLVIVTSGAIAAGRHYLNHPQLPPTIASKQLLAAVGQSQLIQTWEKLFAIYDIHIGQILLTRADIEDRERFLNARDTLRALLDNQIIPVINENDAVATSEIKVGDNDNLSALVAILVQAEQLYLLTDQQGLFDRDPRKHPDAKLIADVDKITDHIRAIAGGSGTSLGTGGMSTKISAADVATRSGIETIIAPGNRPNVIVDLAYGQAIGTKFSVQADRLESRKQWLYAAPSAGIITIDAGAENAMLMQHKSLLPAGIVNVEGRFSRGEVVKIRTQQGKDVALGMPRYNSDALHLIQGKHSQDIEQVLGYEYGAVAVHRDDMIVL

SEQ ID NO: 3703 - protein, 134 aa, Triticum aestivum
  misc_feature (81)..(81): Xaa can be any naturally occurring amino acid
  unsure (1)..(134): unsure at all Xaa locations
MVSSMKQYRDQAAGVPMSLSLSLSLGAVADRSKKMRRGGADGEFVCKTCGRSFPSFQALGGHRTSHLRGRHGLARRIRSAXTRKTTDQKQAHRCHICGLEFEMGQALGGHMRRHRDEAVATTAQAPPVLLQLFV

SEQ ID NO: 3704 - protein, 459 aa, Bacillus subtilis subsp. subtilis str. 168
MIGNSSKDNFGQQQKLSRGLKNRHIQLMAIGGAIGTGLFLGSGKSIHFAGPSILFAYLITGVFCFFIIRSLGELLLSNAGYHSFVDFVRDYLGNMAAFITGWTYWFCWISLAMADLTAVGIYTQYWLPDVPQWLPGLLALIILLIMNLATVKLFGELEFWFALIKVIAILALIVTGILLIAKGFSAASGPASLNNLWSHGGMFPNGWHGFILSFQMVVFAFVGIELVGLTAGETENPQKVIPKAINQIPVRILLFYVGALFVIMCIYPWNVLNPNESPFVQVFSAVGIVVAASLINFVVLTSAASAANSALFSTSRMVYSLAKDHHAPGLLKKLTSSNVPSNALFFSSIAILIGVSLNYLMPEQVFTLITSVSTICFIFIWGITVICHLKYRKTRQHEAKANKFKMPFYPLSNYLTLAFLAFILVILALANDTRIALFVTPVWFVLLIILYKVQTQQRT

SEQ ID NO: 3705 - protein, 676 aa, Candida glabrata
MSHIEFLERAGCSQYADLFEEYSLTDINDLMHIDRDILLEIGVKKLGDRIRILKESKKLQEPKDDAKHVQQLQELISNISELSTTSTNINEEVITERHCVIFILNDGSAKKVNISGCFNADSIKKRLIKRLPSNLLAVNTDGQTTQESSDYDVFIVDYSKNVLRLLYDIELVTICHSNDRVEKNRLIFVSKDQTPTDRAINASKKLYLKTITALNHIESYYDAQSGMPNTPVTQDGTLRIHKEGKDKLRKIFDQRPPSEFISTNIAGYFPHADTKRLEKALRESYRQSARISMKSNNSRHISSESNRVGDILLKHSNAVDMALLQSLDNNNAPSSKPEVIPPSTPQEEDNEGKIKLMEETESIDDYYMNSDEEHGTVSLPTKIVTPKNWLKGARIGSGSFGTVYLGMNAQTGELMAVKQVEIKPAIAATADANVEDKNAEKNVAKAPSTNLHRKMIDALQHEMSLLKELQHENIVTYYGSSQEGGNLNIFLEYVPGGSVSSMLSNYGPFEEPLIVNFTRQILIGVAYLHRKNIIHRDIKGANILIDIKGCVKITDFGISKKLSPLNQENQDKRTSLQGSVYWMSPEVVKQTATTSKADIWSTGCVVIEMFTGKHPYPDFSQMQALFKIGTNVTPEIPSWASPQGRDFIRKTFELDYQRRPTAIELLQESWLESHII

SEQ ID NO: 3706 - protein, 1076 aa, Candida glabrata CBS138
MTYSDEHASNSRPLLPTDEFALNRQLAKKRTEHEHGPGEIEDYEFNNSLRSSSNKNVADLLYERKNFHPQVQKALTDTDNFIAMYSHHDDNNGEEQDDQLSLGSEDNTEPQVIEEEDEELADDSSSTDNLSYATAGLELDPVLKKRQEEWARRGAAQIVKESVNPKTGEREKKIIRKGIKDFKFGEMVGDGAYSTVMLATAKDSGKKYAVKVLNKEYLIKQKKVKYVNIEKNALQRLNNSRGIVKLFFTFQDESSLYFLLEYAPNGDFLSVMKKYGSLSEDCTRYYSAQIIDGIKYLHSKGIIHRDIKPENILLDKDMKVKITDFGTAKILEPKNEDEDNPEFNLLTRSKSFVGTAEYVSPELLNDSYVDARCDIWAFGCMVFQMIAGKPPFKATNEYLTFQKVMKVQYAFTAGFPVVVRDLVKRILLKVPEQRLTIPQIEKHHFYKDISFEDGSVWTAPAPEIQPYKINAKSMQPVPELKDAPNKRTIINIPKRQLQKAHTNSSSTPNLPTIERPETPQRLESDVDVPKRTTDERTAQILENARKTVNNRKLQLSKRQASGAASAASIALSRKTSQASSISTTRKRSTPTTPVNDSTSRFADSQAGSRSHSTISTKEASPASFSNSPSAPIMHQQPEASNYSPISTIIESPRLDHGTHSENVSSDPNSKDYWQQYLDSNEHIIKKEEIGLTIVNTDVLEKRVHKTNSVLADPQSSVPIRSTLLSQVARSGGSTTGFRFEGGYLPEQKYYKKLNIEVPNIDEDHKSPAGIITPLMSENVEAVANNEAADDGNNTEDNKISGKFKKLFHNNKLANLGEFRNLERYKYFKREVIITNSGRMIILVKMRNKFDQHYYSQLYSINLAQHGCKIKELHFPITTDSQIDNVSYIVIETPYNSFVLICSKGDTKTWLSALIKASTVESHSQVKKSNRVKSESISRTSLPQPRFHKTSSSSSVLSPKQNMPVSPRSVSTNEIETSDPSHSMHKSGRLFDTFVNSRERKQKSHSSQVPINSKLINGLPTSIGNASAAVFGLGINSGSNSTQHNLPQPPEPKAHKKTITANNSRLLSRSEKILRNK

SEQ ID NO: 3707 - protein, 378 aa, Pirellula sp. 1
MTKAAMKTYLDRSFSPTSAIPTLFPRTKKTNNMSIGIGIVGAGMISNFHAKAIADSTNGHLVGCYNRNTERAEEFVAKHGGRVFKTLEEMLADPEIGAVSVCTPSGAHAEPAIQAAEAGKHVMIEKPLEVTQERCDQIIAACEKAGVQLGVTFQSRFHESSRLMKKAVEEGRFGKITMGDAYVKWYRSQEYYDSGAWRGTWKLDGGGALMNQAIHSVDLLLWLMGDVSEVSAMASTMTHERIEVEDIVVATLKFKNGALGVIEATTTTYPGALKRIEIGGSEGSAILEEEDLTQWEFANETDEDEAIRKRMAGMTETGGGASDPSAIGHHGHTAVFNDFLDAITEGTSPQINGTEGRRSVALINVIYESARTGKTVQL

SEQ ID NO: 3708 - protein, 337 aa, Alternaria alternata
FNEASNNKFVPRAVLIDLEPGTMDAVRAGPFGQLFRPDNFVFGQSGAGNNWAKGHYTENAELVDQVLDVVRREAEGCDCLQGFQITHSLGSGTGAGMGTLLISKIREEFPDRMMATYSVVPSPKVSDTVVEPYNATLSIHQLVENSDETFCIDNEALYDICMRTLKLHNPSYGDLNHLVSAVMSGVTTCLRFPGQLNSDLRKLAVNMVPFPRLHFFMVGFAPLTSRGAHSFRAVTVPELTQQMFDPKNMMAASDFRNGRYLTCSAYFRGKVSMKEVEDQMRNVQNKNSSYFVEWIPNNVQTALCSIPPRGLKMSSTFVGNSTSIQELFKRVGDQFTA

SEQ ID NO: 3709 - protein, 340 aa, Pseudomonas putida
MSRMIRFHKFGAADVLRCEEQAEPSPAADEVQIRVEAVGVSWYDVLWRQNLAPSQARLPAGIGHEMAGVVTAVGEGVDDIAVGDRVASFPATSANDHPVYGDVIVLPRTAITRYPNVLTPIEASVHYTPLLIAYFAYVDLARAKAGQTALVTDASHCAGPAFVQLGRALGLKVFAATKDAAQRDYLLGLGADKVIVTEEQDLLLQIGKYTDGRGVDMVLDGMGGPQMSLLGDVLAPRGSLVLYGLQGGNQTPFPACAAFQKNIQFYVHCIGNFTGKPELGISQDQVALQRALRDINQFTADQLLTPQIIKVYPFEQVVEAHRYMDQCPCGGRVVLDMAQH

SEQ ID NO: 3710 - protein, 295 aa, Panax ginseng
MTYMFKYDTVHGQWKHHELKVKDNNTLLFGEKPVKVFGIGNPEEIPWGEAGADFVVESTGVFTDKDKAAAHLKGGAKKVVISAPSKDAPMFVVGVNEKEYTPDLHIVSSASCTTNCLAPLAKVINDRFGIVEGLMTTVHSITATQKTVDGPSAKDWRGGRAASFNIIPSSTGAAKAVGKVLPALNGKLTGMAFRVPTVDVSVVDLTVRLAKKASYDEIKAAIKEESEGKLKGILGYTEDDVVSTDFLGDSRSSIFDAKAGIALNENFVKLVTWYDNEWGYSSRVVDLVVHMASVQ

SEQ ID NO: 3711 - protein, 337 aa, Alternaria brassicae
FNEASNNKFVPRAVLVDLEPGTMDAVRAGPFGQLFRPDNFVFGQSGAGNNWAKGHYTEGAELVDQVLDVVRREAEGCDCLQGFQITHSLGSGTGAGMGTLLISKIREEFPDRMMATYSVVPSPKVSDTVVEPYNATLSIHQLVENSDETFCIDNEALYDICMRTLKLNNPSYGDLNHLVSAVMSGVTTCLRFPGQLNSDLRKLAVNMVPFPRLHFFMVGFAPLTSRGAHSFRAVTVPELTQQMFDPKNMMAASDFRNGRYLTCSAYFRGKVSMKEVEDQMRNVQNKNSSYFVEWIPNNVQTALCSIPPRGLKMSSTFVGNSTSIQELFKRVGDQFTA

SEQ ID NO: 3712 - protein, 341 aa, Gossypium hirsutum
NSTQESHLRSDNAVTYESPYPLYAMALSSTPAVTHLNHQRIALGSFIEDYANRVHIISFDPESLTLTTHPSLSFDHPYPPTKLMFQPHRKSPFSSSSDLLASSGDYLRLWEVGHSSIELISILDNSKTSEFSAPLTSFDWNDVEPNRIGTSSIDTTCTIWDIEKGVVETQLIAHDKEVYDIAWGEARVFGSVSADGSVRIFDLRDKEHSTIIYESPQPDTPLLRLAWNKQDLRYMATTLMDSNKVVILDIRSPTMPVAELDRHGASVNAIAWAPQSYKHICSAGDDTHALIWELPTVAGPNGIGPLSMYSASSEINQLQWSATQPDWIAIAFSNKMQLLKV

SEQ ID NO: 3713 - protein, 468 aa, Chromobacterium violaceum ATCC 12472
MLRNTKILATLGPSSSAPEKILELARSGVNIFRLNMSHGSHDDHRARLAAIRAAEKTLDRPIGVLVDLQGPKLRIGKFPQPTTVKTGDRYEFVLDETEGNAERATLPHPEAFEALEPGHLILVNDGKLAFEVAEMHPRRIVTRVTVGGELSSNKGFNLPHTVLPLSAITGKDRKDAEFALEEGADWVAMSFVQTAADVKALRDIVGKRVGIVAKIEKPSAVDDLEAIAELADGVMVARGDLGVELPPEDVPVVQRRIVHHCRHLGRPVIVATQMLESMITAPTPTRAEANDVATAVYEGADAVMLSAETAAGQYPLEAVQIMDRIIRRVENAPDYRKVMALDYSAADEPDRTDAIAACVRKVSTLLPVTVAVAFTTSGASCLSLARERPSTPILGISPRLETARRLTLVWGVVAYHGPDAENLEDMVVKTTFCATKLSLAEQGKPMVIIAGVPFGTPGSTNLLRIVYP

SEQ ID NO: 3714 - protein, 181 aa, Rumex obtusifolius
MASSIMSSATVARPSAAQATVIAPFTGLKNIATFPTTRKSSDLSFPSNGGKVRCMQVWPPEGKIKFETLSYLPPLSEADLLAQINYLLINGWVPCLEFDVGPGAVYREHHHSPGYYDGRYWTMWKLPMFGCTDATQVVAELEEAKKAYPHAFVRIIGFDNVRQVQCVSFIAYKPPRAEGTY

SEQ ID NO: 3715 - protein, 418 aa, Escherichia coli O157:H7
MPGGRFREVYYWDSYFTMLGLAESGHWDKVADMVANFAHEIDTYGHIPNGNRSYYLSRSQPPFFALMVELLAQHEGDAALKQYLPQMQKEYAYWMDGVENLQAGQQEKRVVKLQDGTLLNRYWDDRDTPRPESWVEDIATAKSNPNRPATEIYRDLRSAAASGWDFSSRWMDNPQQLNTLRTTSIVPVDLNSLMFKMEKILARASKAAGDNAMANQYETLANARQKGIEKYLWNDQQGWYADYDLKSHKVRNQLTAAALFPLYVNAAAKDRANKMATATKTHLLQPGGLNTTSVKSGQQWDAPNGWAPLQWVATEGLQNYGQKEVAMDISWHFLTNVQHTYDREKKLVEKYDVSTTGTGGGGGEYPLQDGFGWTNGVTLKMLDLICPKEQPCDNVPATRPLSESTTQPVKQKEAEPTP

SEQ ID NO: 3716 - protein, 346 aa, Gossypium hirsutum
MAASSDPNPEGSDEQQKRSEIYTYEAPWHIYAMNWSVRRDKKYRLAIASLLEHYNNRLEIVQLDDSNGEIRSDPNLSFDHPYPPTKTIFIPDKECQKPDLLATSSDFLRIWRISDDHSRVDLKSLLNGNKNSEFCGPLTSFDWNEAEPKRIGTSSIDTTCTIWDIERETVDTQLIAHDKEVYDIAWGGVGVFASVSADGSVRVFDLRDKEHSTIIYESSEPDTPLVRLGWNKQDPRYMATIIMDSAKVVVLDIRFPTLPVVELQRHQASVNAIAWAPHSSCHICTAGDDSQALIWDLSSMSQPVEGGLDPILAYTAGAEIEQLQWSSSQPDWVAIAFSTKLQILRV

SEQ ID NO: 3717 - protein, 345 aa, Gossypium hirsutum
MENSTQESHLRSDNSVTYESAYTVYAMALSSTPSSTNINHQRIALGSFLEDYTNRVDIISFDPETLSFKTHPKLAFDHPYPPTKLMFQPNRKSASSSSSCSDLLASTGDFLRLWEVRESSIEPVTVLNNSKTSEFCAPLTSFDWNDVEPKRIGTSSIDTTCTIWDIEKCVVETQLIAHDKEVYDIAWGEARVFASVSADGSVRIFDLRDKEHSTIIYESPQPDTPLLRLAWNKQDLKYMATIQMDSNKVVILDIRSPTTPVAELERHHASVNAIAWAPQSCKHICSAGDDTQALIWELPTVAGPNGIDPLCVYSAGYEINQLQWSAAQPDWIAIAFSNKLQLLKV

SEQ ID NO: 3718 - protein, 231 aa, Chromobacterium violaceum ATCC 12472
MGEFIGTALLVLLGNGVVANVLLKNTKGHNSGLIVVAFGWAMAVFVGVFSVAAISGAHLNPAVSVALAVAGKFPWEKVPGYVAAQMLGGMAGAGLMWLIYRKHYETTDCADTKLATFCTGPAIRSLPGNLVSEIVATFVLVFAILSMVAPKMSLGAIDALPVALLVLGIGVSLGGTTGYAMSPARDLAPRIMHAILPIPGKRDSDWGYAWVPVVGSLIGGALAALAFTLPL

SEQ ID NO: 3719 - protein, 539 aa, Yersinia pestis biovar Medievalis str. 91001
MLSLLKPLLDDGFGNSNSSILKWMPLAVIGLMVVRGVTGFVSSYCISWVSGKVVMHIRRRLFSHMMGMPVSFFDQQSTGTLLSRITYDSEQVAASSSSALVTVVREGASIIGLFIMMFYYSWQLSLILIVIAPIVSISIRLVSKRFRNISKNMQNTMGEVTTSAEQMLKGHKEVLIFGGQKVETERFDAVSNRMRQQGMKLVSASSISDPIIQLIASFALALVLYAASFPSVMETLTAGTITVVFSAMIALMRPLKSLTNVNTQFQRGMAACQTLFSILDMEQEKDEGKLEVERAKGDIEFRHVTFYYPGKDTPALNDINIHLEAGKTVALVGRSGSGKSTIANLLTRFYDVSEGSILLDGHDLRDYRLGALRNQVALVSQNVHLFNDTVANNIAYARNEQYSRAEIEEAARMAYAMDFINKMEHGLDTVIGENGIMLSGGQRQRIAIARALLRNCPILILDEATSALDTESERAIQAALDELQKNRTSLVIAHRLSTIEKADEIVVIEDGRIVERGVHAELLVQQGVYAQLNRMQFGQ

SEQ ID NO: 3720 - protein, 318 aa, Cyanidioschyzon merolae strain 10D
MWQLKLYRDMVLGRKFEDQCAQMYYRGKMFGFVHLYNGQEAVSTGVIQALAEHDYVCSTYRDHVHALSKGVSPKEVMAELFGKQTGCSKGRGGSMHLFSAPHRFLGGFAFIGEGIPIALGAAFSSLYQHNLWGVPMSVTACFFGDGTSNNGQFYECLNMAVLWKLPMIFVVENNQWAIGMAHHRSTSEVEIYEKAKMFGMPALEVDGMDVLAVHEVAKEAVERARSAKGPTLIEALTYRFRGHSLADPDELRAKQQKAIWMARDPITQLSSWLIEQELVTQEQLDKIHREIDIIISDAVQFALSSEEAKDLYQYVYAS

SEQ ID NO: 3721 - protein, 346 aa, Gossypium hirsutum
MTATSDPNPEVSDEQQKRSEIYTYEAPWYIYAMNWSVRRDKKYRLAIASLLEQYPNRLQIVQLDDSNGEIRSDPNLSFDHPYPATKTIFIPDKDCQKPDLLATSSDFLRIWRISDDGSRVDLKSLLNGNKNSEFCGPLTSFDWNEAEPKRIGTSSIDTTCTIWDIEKETVDTQLIAHDKEVYDIAWGGVGVFASVSADGSVRVFDLRDKEHSTIIYESSEPDAPLVRLGWNKQDPRYMATIIMDSAKVVVLDIRFPTLPVVELRRHQASVNAVAWAPHSSCHICTAGDDSQALIWDLSSMGQPVKGGLDPILAYTAGAEIEQLQWSSSQPDWVAIAFSTKLQILRV

SEQ ID NO: 3722 - protein, 609 aa, Schizosaccharomyces pombe
MIQTASTISSNGGTNQGMESSSANSPEMHGTQNSMSVGMSGSGSSQNRKITQFSNKLYNMVNDSSTDSLIRWSDRGDSFLVIGHEDFAKLVLPRYFKHNNFSSFVRQLNMYGFHKVPHIQQGVLQSDSPNELLEFANPNFQRDQPELLCLVTRKKAGSQPVEESNTSLDMSTISSELQNIRIQQMNLSNELSRIQVDNAALWQENMENRERQRRHQETIDKILRFLASVYLDGKQKPPSKVMPKSRRLLLEAKYPTVSPTNEPSAHSRPSPQGTTANSSSASISSLHNTTPDGEGKYRSVQNGRALNYVSSFNSDSHSPKDYISQSYTNEPGLKKESADSFNNSIDSYISPNQSPNTDVPSLNRDDTTDPKVVNTGDIINMLDDANSIEGSNMNSLSPLLFDYPNSLYPVNNTSSEQHHNSYRGSVSNSQPSGNLSESTNLQPVQPVDYMSNSNPSYGSYNAEDQLTNFHPGYAMDQKRISKLSDGITKQDQNIQALADILGIPLGDGKIDDAGFSANSPTNLNLPVSSDLDSVLNIPPNEDVFPDSNPVFDEFTNISNLTSPIEASNGNTFGSNPVSLPNQQKSVNPSLMTVSSPRQVRKKRKSSIGA

SEQ ID NO: 3723 - protein, 76 aa, Persea americana
CGGNCGCGASCKCGSGCGGCNRYPDLSSSGESTTSETLIMGVAPQKRHFDGAEMEAGAENGCKCGSNCTCDPCNCK

SEQ ID NO: 3724 - protein, 541 aa, Psychrobacter arcticus 273-4
MSKTAAAIENNANNNDGNNHQPHYLMWFRRDLRVHDNTALAAICERANTDNAKLSAVFFLTPEQWQTHDMSLTQLDHIARTLPILAQKLQALNITLTVQICPSFTDCIAALSALCESNNISCVMANHEYEGNEIARDEQLTKQLAKTDIEFIRWHDQCILPPQTITTNDNSMYQVFTPFYKKWRHTLEVGDIQIHTAPAITNNEQINLISSEFSANTIQAIEALCKETVHDYQQYLQTHECYQYIDTDKQISQARTAYPAGEAEACHRLTQFISDDINHYDVSRDVPSLHATSHLSAYLTIGALSPRLCYLQATKALGELHRNDGDNFDSGDNNDINRWISELAWRDFYRHVLDYKPELIRHQAYKHETDKKINWSYDEDAFAAWREGKTGVPLVDAAMRCLNATGFMHNRLRMVTAMFLTKDLLIDWRWGERYFMQQLIDGDFASNNGGWQWSASTGTDSAPYFRIMNPFSQAKTHDSDGIFLKTWLPELEPIPASILHSEDKMRKALSKNGAFADIDYPIPMVEHKLARQLAIAEFKKE

SEQ ID NO: 3725 - protein, 364 aa, Streptomyces coelicolor A3(2)
MTDVNGAPADVLHTLFHSDQGGHEQVVLCQDRASGLKAVIALHSTALGPALGGTRFYPYASEAEAVADALNLARGMSYKNAMAGLDHGGGKAVIIGDPEQIKSEELLLAYGRFVASLGGRYVTACDVGTYVADMDVVARECRWTTGRSPENGGAGDSSVLTSFGVYQGMRAAAQHLWGDPTLRDRTVGIAGVGKVGHHLVEHLLAEGAHVVVTDVRKDVVRGITERHPSVVAVADTDALIRVENLDIYAPCALGGALNDDTVPVLTAKVVCGAANNQLAHPGVEKDLADRGILYAPDYVVNAGGVIQVADELHGFDFDRCKAKASKIYDTTLAIFARAKEDGIPPAAAADRIAEQRMAEARPRP

SEQ ID NO: 3726 - protein, 546 aa, Xanthomonas campestris pv. phaseoli
MAAKDIRFGEDARTRMVRGVNVLANAVKATLGPKGRNVVLEKSFGAPTITKDGVSVAKEIELADKFENMGAQMVKEVASKTNDNAGDGTTTATVLAQALIREGAKAVAAGMNPMDLKRGIDQAVKAAVVELKNISKPTTDDKAIAQVGTISANSDESIGNIIAEAMQKVGKEGVITVEEGSGLENELDVVEGMQFDRGYLSPYFINNQQSQSADLDDPFILLHDKKISNVRDLLPVLEGVAKAGKPLLIVAEEVEGEALATLVVNTIRGIVKVVAVKAPGFGDRRKAMLEDMAVLTGGTVISEEVGLALEKATIKDLGRAKKVQVSKENTTIIDGAGDTAAIESRVGQIKTQIEDTSSDYDREKLQERVAKLAGGVAVIKVGASTEIEMKEKKARVEDALHATRAAVEEGVVPGGGVALVRALVAVGELKGANEDQTHGIQIALRAMEAPLREIVANAGEEPSVILNKVKEGSGNYGYNAANGEFGDMVQFGILDPTKVTRSALQNAASIAGLMITTEAMVADAPKKDEPVMPAGGGMGGMGGMDF

SEQ ID NO: 3727 - protein, 492 aa, Arabidopsis thaliana
MDPYKYRPASSYNSPFFTTNSGAPVWNNNSSMTVGPRGLILLEDYHLVEKLANFDRERIPERVVHARGASAKGFFEVTHDISNLTCADFLRAPGVQTPVIVRFSTVIHARGSPETLRDPRGFAVKFYTREGNFDLVGNNFPVFFIRDGMKFPDIVHALKPNPKSHIQENWRILDFFSHHPESLNMFTFLFDDIGIPQDYRHMDGSGVNTYMLINKAGKAHYVKFHWKPTCGVKSLLEEDAIRLGGTNHSHATQDLYDSIAAGNYPEWKLFIQIIDPADEDKFDFDPLDVTKTWPEDILPLQPVGRMVLNKNIDNFFAENEQLAFCPAIIVPGIHYSDDKLLQTRVFSYADTQRHRLGPNYLQLPVNAPKCAHHNNHHEGFMNFMHRDEEVNYFPSRYDQVRHAEKYPTPPAVCSGKRERCIIEKENNFKEPGERYRTFTPERQERFIQRWIDALSDPRITHEIRSIWISYWSQADKSLGQKLASRLNVRPSI

SEQ ID NO: 3728 - protein, 278 aa, Psychrobacter arcticus 273-4
MTRIESTFEILKAQNKKALIPYVMAGDPNPSNFVGLLHDLVKHGADMIEVGLPFSDPMADGPTVALAGERALAAGTSTRDALKMVAEFRQQDTQTPIILMGYLNPVEIIGYDNFVALCEQSGVDGILMVDLPPAEAGSFTQHLTEHSMNEIFLLSPTTLPERREQVLTHCGGYIYYVSLKGVTGSATLDTDDVATQVQAIKAETDLPVCVGFGIRDAASAKAIGAHADGIIVGSALVQNFADIDGNDATAVAHAQQKIMAKMTELREALDSLSVSSNG

SEQ ID NO: 3729 - protein, 273 aa, Pseudomonas syringae pv. syringae B728a
MDNKLTSRIAIITGAAQGIGAAIARRFLQEGCFVYVTDINDVLGRETARALGDRACYLHLDVRCEEDWQRVTAHVVKAHGRLDVLVNNAGITGFEQGAVQHDPEHARLEDWQAVHHTNLDGVFLGCKYAIRAMRHTETGSIINISSRSGLVGIPGAAAYASSKAAVRNHTKTVALYCAEQGLKVRCNSIHPAAILTPIWEPMLGADAGREERMAALVRDTPLRRFGMPEEVAAVALLLATDEATYITGSEFNIDGGLLAGSAATPVVLDDSET

SEQ ID NO: 3730 - protein, 106 aa, Methanothermobacter thermautotrophicus str. Delta H
MVGIDVPEPKSKCSDPNCPFHGDLPLRGQILEGTVVSDKAERTVTVERSFYKFIRKYERYEKRKSKIKAHKPDCIDVRVGDTVKIAECRPLSKTKNFVVVEVKGEE

SEQ ID NO: 3731 - protein, 468 aa, Bordetella pertussis Tohama I
MTPAAAPSPGFGATMRDIARQAWPVLISQWAGISFGVLDTAMTGHASPQDLAAMSLSVSVYITVFVGLMGVVHALIPILAQHFGAGQQREVGSTWGQGVWLALGLSVVGAILMLFPDAWLSLSGDVDPAVRDRVAAYLRALVLALPATLVFRTIYALGTAVSRPKVVMSINLAAVFVKAFCNWVLIYGKFGLPALGAVGAGLATAISGWLSLAAGLWIITHDRYYRRFRLRVGRPDWRALKELLRLGLPMGGSYLVEVSAFTFMALLVAREGTYVSGGHQIMSNLAALCYMMPMALGVATAALTAQAIGAGRPDLAHRTGMAGLALGLLGAALTAAVLLVGRPLIIAAYTDDLEVAAVAASLLAIIPLFHLCDSMQCINSYLLRAHKVAVMPLVLQTVALGGVGLLGGWWLGFGPGRGGLDPLRTALMPGSPAGAGTMWLMAMAGLGLSAVLLHYWYRRIARLALARG

SEQ ID NO: 3732 - protein, 1054 aa, Bacillus subtilis subsp. subtilis str. 168
MKQASAIPQPKTYGPLKNLPHLEKEQLSQSLWRIADELGPIFRFDFPGVSSVFVSGHNLVAEVCDEKRFDKNLGKGLQKVREFGGDGLFTSWTHEPNWQKAHRILLPSFSQKAMKGYHSMMLDIATQLIQKWSRLNPNEEIDVADDMTRLTLDTIGLCGFNYRFNSFYRDSQHPFITSMLRALKEAMNQSKRLGLQDKMMVKTKLQFQKDIEVMNSLVDRMIAERKANPDENIKDLLSLMLYAKDPVTGETLDDENIRYQIITFLIAGHETTSGLLSFAIYCLLTHPEKLKKAQEEADRVLTDDTPEYKQIQQLKYIRMVLNETLRLYPTAPAFSLYAKEDTVLGGEYPISKGQPVTVLIPKLHRDQNAWGPDAEDFRPERFEDPSSIPHHAYKPFGNGQRACIGMQFALQEATMVLGLVLKHFELINHTGYELKIKEALTIKPDDFKITVKPRKTAAINVQRKEQADIKAETKPKETKPKHGTPLLVLFGSNLGTAEGIAGELAAQGRQMGFTAETAPLDDYIGKLPEEGAVVIVTASYNGAPPDNAAGFVEWLKELEEGQLKGVSYAVFGCGNRSWASTYQRIPRLIDDMMKAKGASRLTAIGEGDAADDFESHRESWENRFWKETMDAFDINEIAQKEDRPSLSITFLSEATETPVAKAYGAFEGIVLENRELQTAASTRSTRHIELEIPAGKTYKEGDHIGILPKNSRELVQRVLSRFGLQSNHVIKVSGSAHMAHLPMDRPIKVVDLLSSYVELQEPASRLQLRELASYTVCPPHQKELEQLVSDDGIYKEQVLAKRLTMLDFLEDYPACEMPFERFLALLPSLKPRYYSISSSPKVHANIVSMTVGVVKASAWSGRGEYRGVASNYLAELNTGDAAACFIRTPQSGFQMPNDPETPMIMVGPGTGIAPFRGFIQARSVLKKEGSTLGEALLYFGCRRPDHDDLYREELDQAEQDGLVTIRRCYSRVENEPKGYVQHLLKQDTQKLMTLIEKGAHIYVCGDGSQMAPDVERTLRLAYEAEKAASQEESAVWLQKLQDQRRYVKDVWTGM

SEQ ID NO: 3733 - protein, 463 aa, Puccinia graminis
MGKEKNHVNVVVIGHVDSGKSTTTGHLIYKCGGIDKRTIEKFEKEAAELGKGSFKYAWVLDKLKAERERGITIDIALWKFETPKYYVTVIDAPGHRDFIKNMITGTSQADCAILIIAAGTGEFEAGISKDGQTREHALLAFTLGVRQLIVAINKMDTTKWSEQRFEIVKETSNFVKKVGYNPKSIAFVPISGWHGDNMLEESTNMGWFKGWTKETKAGVSKGKTLLDAIDAIEPPSRPTDKPLRLPLQDVYKIGGIGTVPVGRVETGTIKAGMVVTFAPANVTTEVKSVEMHHEQLEAGMPGDNVGFNVKNVSVKDIRRGNVCGDTKCDPPKEAASFVAQVIVLNHPGQIGNGYCPVLDCHTAHIACKFDTLQQKIDRRTGKALEEAPKFVKSGDACLVKMVPSKAMCVEPFADYPPLGRFAVRDMRQTVAVGVIKSVEKTDGKAGKVTKAAVKPVPRSSYAR

SEQ ID NO: 3734 - protein, 147 aa, Brassica napus
  misc_feature (130)..(130): Xaa can be any naturally occurring amino acid
  misc_feature (143)..(143): Xaa can be any naturally occurring amino acid
  unsure (1)..(147): unsure at all Xaa locations
MPAATTEAESIEPQSLKKLSIKSLKRALDLFSPVHGQFPPPDAEAKKIRLSHKMKVAFGAVEPVSQPPRQPDRGNEQTGTSSALALPGPEGSKSTQKGVTENALVVGPTFQPKGLNSIGTSGKSTTIIPXANVSFLRKNFSTXALME

SEQ ID NO: 3735 - protein, 241 aa, Glycine max
MKGKTCELCDQQASLYCPSDSAFLCSDCDAAVHAANFLVARHLRRLLCSKCNRFAGFHISSGAISRHLSSTCSSCSPENPSADYSDSLPSSSTCVSSSESCSTKQIKAEKKRSWSGSSVTDDASPAAKKRQRSGGSEEVFEKWSREIGLGLGLGVNGNRVASNALSVCLGKWRWLPFRVAAATSFWLGLRFCGDRGLASCQNLARLEAISGVPVKLILAAHGDLARVFTHRRELQEGWGES

SEQ ID NO: 3736 - protein, 337 aa, Alternaria lini
FNEASNNKFVPRAVLIDLEPGTMDAVRAGPFGQLFRPDNFVFGQSGAGNNWAKGHYTEGAELVDQVLDVVRREAEGCDCLQGFQITHSLGSGTGAGMGTLLISKIREEFPDRMMATYSVVPSPKVSDTVVEPYNATLSIHQLVENSDETFCIDNEALYDICMRTLKLHNPSYGDLNHLVSAVMSGVTTCLRFPGQLNSDLRKLAVNMVPFPRLHFFMVGFAPLTSRGAHSFRAVTVPELTQQMFDPKNMMAASDFRNGRYLTCSAYFRGKVSMKEVEDQMRNVQNKNSSYFVEWIPNNVQTALCSIPPRGLKMSSTFVGNSTSIQELFKRVGDQFTA

SEQ ID NO: 3737 - protein, 756 aa, Nocardia farcinica IFM 10152
MSQAEAPESADDLHTSPSSPSRDRLRGILRHDLPSSVVVFLVALPLSLGIAIASDAPIMAGLIAAVIGGIVAGAVGGSPMLASGPAAGLTVVVAELVAKFGWQVTCAITVAAGALQILFGLSRIARAALAISPVVVHAMLAGIGITIALQQVHVLLGGTSRSSVWQNLSQLPAQLTRLHWGDLTIGLIVIVTLLSWKKVPGALGRIPGALVAVVAATAVSLVVPLGVERIVMNGSLFDAIALPALPDGKWLAVATGVLTVALIASVESLLSAVAVDKMHSGARTDLNRELIGQGTANIASGMLGGLPITGVIVRSATNVAAGAKSKASTILHGVWILLFSVLLAGVVQQIPKAALAGLLIVIGIQLVKLAHIRLAHRTGDLWVYLITVAGVMFLNLLEGVLIGLIVAIALFVWRAARADIHAEPVGDLDSLRWRVVIEGSCSFLSLPKLSSTLDSVPEGADVTIELTVDFIDHAATEVLHEWQRRHRDAGGTVLIDELGSHALSATTQGPPQRASSAQARGVEPWKAWQDTNAQAVPHFDALRPMLDGISRYHRRHAPLMRAHLSELRDRQDPTTFFLTCGDSRVVPNLITHSGPGDLFTIRNIGNLIPSDGLDTSVDAALAFAVEELGVSTIVVCGHSGCGAMGALLGKPTKNSPAVRDWLAHAEPSLRAYHDNHPVAAAAEAAGFDAYDQLAIVNVAVQIATATQHPSLVSAVAQGQVQIVGLFFDIATATVWHVSPTTVTAHHNQLATSTVHA

SEQ ID NO: 3738 - protein, 337 aa, Lewia infectoria
FNEASNNKFVPRAVLIDLEPGTMDAVRAGPFGQLFRPDNFVFGQSGAGNNWAKGHYTEGAELVDQVLDVVRREAEGCDCLQGFQITHSLGSGTGAGMGTLLISKIREEFPDRMMATYSVVPSPKVSDTVVEPYNATLSIHQLVENSDETFCIDNEALYDICMRTLKLNNPSYGDLNHLVSAVMSGVTTCLRFPGQLNSDLRKLAVNMVPFPRLHFFMVGFAPLTSRGAHSFRAVTVPELTQQMFDPKNMMAASDFRNGRYLTCSAYFRGKVSMKEVEDQMRNVQNKNSSYFVEWIPNNVQTALCSIPPRGLKMSSTFVGNSTSIQELFKRVGDQFTA

SEQ ID NO: 3739 - protein, 531 aa, Alkalilimnicola ehrlichei MLHE-1
MSQYRNDIEEVAGLRQAHEGTWDAINPEYVARMRAQNRFKTGLDIAKYTAKIMRQDMAEYDADPAQYTQSLGCWHGFVGQQKMIAIKRHFGTTNKRYLYLSGWMVAALRSEFGPLPDQSMHEKTAVPALIEELYTFLRQADAREMNHLFRELDAAREAGDEAKANEILDKIENFETHIVPIIADIDAGFGNEEATYLLAKKMIEAGACCIQIENQVADEKQCGHQDGKVTVPHADFLAKVRAVRYAFLELGVNDGVIVARTDSLGAGLTKQIAVTDEPGDLGDKYNSFLDGDYIDSAEDINNGDVVVKSEGKLLKPKRLASGLYEFRKGTGFDRVVLDCITSLKNGADLLWIETEKPHVGQIAEMVNAIREEVPNAKLVYNNSPSFNWTLNFRQQVFDAWKEEGKDVSQYDRDNLMSAEYDDSELAAEADRWVQEFQRKASAEAGIFHHLITLPTYHTAALSTDNLAKGYFGDLGMLAYVDGVQRQEIRQGVPTVKHQDMAGSNIGDDHKAYFSGEAALKAGGKGNTMNQF

SEQ ID NO: 3740 - protein, 337 aa, Alternaria brassicicola
FNEASNNKFVPRAVLVDLEPGTMDAVRAGPFGQLFRPDNFVFGQSGAGNNWAKGHYTEGAELVDQVLDVVRREAEGCDCLQGFQITHSLGSGTGAGMGTLLISKIREEFPDRMMATYSVVPSPKVSDTVVEPYNATLSIHQLVENSDETFCIDNEALYDICMRTLKLNNPSYGDLNYLVSAVMSGVTTCLRFPGQLNSDLRKLAVNMVPFPRLHFFMVGFAPLTSRGAHSFRAVTVPELTQQMFDPKNMMAASDFRNGRYLTCSAYFRGKVSMKEVEDQMRNVQNKNSSYFVEWIPNNVQTALCSIPPRGLKMSSTFVGNSTSIQELFKRVGDQFTA

SEQ ID NO: 3741 - protein, 498 aa, Corynebacterium glutamicum ATCC 13032
MESSMVENNVAKKTVAKKTARKTARKAAPRVATPLGVASESPISATPARSIDGTSTPVEAADTIETTAPAAKAPAAKAPAKKVAKKTARKAPAKKTVAKKATTAKAAPATAKDENAPVDDDEENLAQDEQDFDGDDFVDGIEDEEDEDGVEALGEESEDDEEDGSSVWDEDESATLRQARKDAELTASADSVRAYLKQIGKVALLNAEQEVSLAKRIEAGLYATHRMEEMEEAFAAGDKDAKLTPAVKRDLRAIARDGRKAKNHLLEANLRLVVSLAKRYTGRGMAFLDLIQEGNLGLIRAVEKFDYSKGYKFSTYATWWIRQAITRAMADQARTIRIPVHMVEVINKLGRIQRELLQELGREPTPQELSKEMDISEEKVLEIQQYAREPISLDQTIGDEGDSQLGDFIEDSEAVVAVDAVSFTLLQDQLQDVLETLSEREAGVVKLRFGLTDGMPRTLDEIGQVYGVTRERIRQIESKTMSKLRHPSRSQVLRDYLD

SEQ ID NO: 3742 - protein, 591 aa, Listeria monocytogenes EGD-e
MEKAGIYHQPASSYAYSYDAKTLHIRIRTKRLDISKVTLIAADPYLWKDGKWQSESYTMRKIAETEEHDYWFFAITPEHRRLQYGFLLTDTEGETTFYGGRGFFEPTEANLATMDYYFKFPFIHAVDTFEAPEWVRNTIWYQIFPERFANGNPAISPENTLPWGSKDPNTTDFFGGDIEGIIEHLDYLAELGINGVYLTPVFEAPTNHKYDTIDYKKIDPHFGDKETFRKLVKEAHKRGIRIMLDAVFNHIGDTSPEWQDVVEKEEKSAYRDWFHIHSFPVRQNENGNIEGEPTLSYDTFAFTTHMPKLNTANPEVQKYLLDIATYWIREFDIDGWRLDVANEVDHAFWKEFKKAAQAEKEDIYILGEIWHDSWIWLLGDEFHAVMNYPFTQTIIENFIEEKITPEQMVSGINEQYMRYPNQVNEVMFNMLDSHDTARILTRANNDEDKVKQALAFMFAHTGSPCIYYGTEIGMDGGNDPGCRKCMEWDEAKQNQDMLAFTKQLIALRKDNQAIITSGELTWLEASSETGITAFSKELNGEKLHFLFNQTKKDQDFTISFANTAIDIWNNQAVSDNLTIPAKGFLVIKENS

SEQ ID NO: 3743 - protein, 205 aa, Triticum aestivum
  misc_feature (24)..(24): Xaa can be any naturally occurring amino acid
  misc_feature (36)..(36): Xaa can be any naturally occurring amino acid
  misc_feature (41)..(41): Xaa can be any naturally occurring amino acid
  unsure (1)..(205): unsure at all Xaa locations
RSWVFNPKGTKRWVCEALEAMGEXEPRGMKPSLRVXGDVEXKVCTPGKDVTIKRNMVSITWEKKKEHQRKFTPSVIEPSFGIGRIIYCLFEHCFYQRTGKTDDEQLNVFRFPPLVAPIKCTVFPLVKVEKFDVVAKKISKALTTAGISHIIDITGTSIGKRYARTDEIGVPLAITVDSTTSVTVRDRDSKDQIRVEVDEVAFGCE

SEQ ID NO: 3744 - protein, 337 aa, Alternaria linicola
FNEASNNKFVPRAVLVDLEPGTMDAVRAGPFGQLFRPDNFIFGQSGAGNNWAKGHYTEGAELVDQVLDVVRREAEGCDCLQGFQITHSLGSGTGAGMGTLLISKIREEFPDRMMATYSVVPSPKVSDTVVEPYNATLSIHQLVENSDETFCIDNEALYDICMRTLKLNNPSYGDLNHLVSTVMSGVTTCLRFPGQLNSDLRKLAVNMVPFPRLHFFMVGFAPLTSRGSHSFRAVTVPELTQQMFDPKNMMAASDFRNGRYLTCSAYFRGKVSMKEVEDQMRNVQNKNSSYFVEWIPNNVQTALCSIPPRGLKMSSTFVGNSTSIQELFKRVGDQFTA

SEQ ID NO: 3745 - protein, 287 aa, Arabidopsis thaliana
MAMQERCESLCSDELISSSDAFYLKTRKPYTITKQREKWTEAEHEKFVEALKLYGRAWRRIEEHVGTKTAVQIRSHAQKFFTKVARDFGVSSESIEIPPPRPKRKPMHPYPRKLVIPDAKEMVYAELTGSKLIQDEDNRSPTSVLSAHGSDGLGSIGSNSPNSSSAELSSHTEESLSLEAETKQSLKLFGKTFVVGDYNSSMSCDDSEDGKKKLYSETQSLQCSSSTSEDAETEVVVSEFKRSERSAFSQLKSSVTEMNNMRGFMPYKKRVKVEENIDNVKLSYPLW

SEQ ID NO: 3746 - protein, 113 aa, Zea mays
  misc_feature (26)..(26): Xaa can be any naturally occurring amino acid
  misc_feature (52)..(52): Xaa can be any naturally occurring amino acid
  misc_feature (61)..(61): Xaa can be any naturally occurring amino acid
  unsure (1)..(113): unsure at all Xaa locations
RFSFYDANKPTYTSRRNLPPSIVNNXTDSIISHGCFLDYCGVKYSVVGVRSXIGTNMHLKXCIIDKNVRIGKNVMISNSEGVEEADRTSEGFYILSGITIVLKNSIIGDVLVI

SEQ ID NO: 3747 - protein, 457 aa, Thiobacillus denitrificans ATCC 25259
MTSFVFVLAAPVAEAVDVADLVEKQGPAVVNISTTKLVKRGAEGFPFAVPEDPEMQEFFRRFFPGVPGRAPGAPAQEFPAHGAGSGFIVSSDGYILTNAHVVKGADEVVVKLTDKRKFIAKVVGSDPRTDVAVIRITARNLPAVRLGDPEKLRVGEAVAAIGSPFGFENSVTAGIVSAKGRSLPSESYVPFIQTDVAVNPGNSGGPLFNMRGEVVGINSQIYSQSGGYQGVAFAIPIDIAMEVVDQLKAGGKVSRGWLGVMIQEVSADLAESFGLDRPRGALVSQVQDGSPAARAGVQTADVILSFNGKPVENSGDLPRIVGSTKPGSKIPMQVWRRGKMQTLQVVLAELPSEEQVAGAGKSGKSYSRGGLALSELNPEQRRELKIDHGLLVEEVTGDAARAGIRVGDIVLAVNNARIATVDAFRQAIAAIPKGKSAALLVRRGEGSLYIPLKISGE

SEQ ID NO: 3748 - protein, 577 aa, Arabidopsis thaliana
MYRFASNLASKARIAQNARQVSSRMSWSRNYAAKEIKFGVEARALMLKGVEDLADAVKVTMGPKGRNVVIEQSWGAPKVTKDGVTVAKSIEFKDKIKNVGASLVKQVANATNDVAGDGTTCATVLTRAIFAEGCKSVAAGMNAMDLRRGISMAVDAVVTNLKSKARMISTSEEIAQVGTISANGEREIGELIAKAMEKVGKEGVITIQDGKTLFNELEVVEGMKLDRGYTSPYFITNQKTQKCELDDPLILIHEKKISSINSIVKVLELALKRQRPLLIVSEDVESDALATLILNKLRAGIKVCAIKAPGFGENRKANLQDLAALTGGEVITDELGMNLEKVDLSMLGTCKKVTVSKDDTVILDGAGDKKGIEERCEQIRSAIELSTSDYDKEKLQERLAKLSGGVAVLKIGGASEAEVGEKKDRVTDALNATKAAVEEGILPGGGVALLYAARELEKLPTANFDQKIGVQIIQNALKTPVYTIASNAGVEGAVIVGKLLEQDNPDLGYDAAKGEYVDMVKAGIIDPLKVIRTALVDAASVSSLLTTTEAVVVDLPKDESESGAAGGGMGGMVVMDY

SEQ ID NO: 3749 - protein, 475 aa, Escherichia coli
MMSTEIKTQVVVLGAGPAGYSAAFRCADLGLETVIVERYNTLGGVCLNVGCIPSKALLHVAKVIEEAKALAEHGIVFGEPKTDIDKIRTWKEKVINQLTGGLAGMAKGRKVKVVNGLGKFTGANTLEVEGENGKTVINFDNAIIAAGSRPIQLPFIPHEDPRIWDSTDALELKEVPERLLVMGGGIIGLEMGTVYHALGSQIDVVEMFDQVIPAADKDIVKVFTKRISKKFNLMLETKVTAVEAKEDGIYVTMEGKKAPAEPQRYDAVLVAIGRVPNGKNLDAGKAGVEVDDRGFIRVDKQLRTNVPHIFAIGDIVGQPMLAHKGVHEGHVAAEVIAGKKHYFDPKVIPSIAYTEPEVAWVGLTEKEAKEKGISYETATFPWAASGRAIASDCADGMTKLIFDKESHRVIGGAIVGTNGGELLGEIGLAIEMGCDAEDIALTIHAHPTLHESVGLAAEVFEGSITDLPNPKAKKK

SEQ ID NO: 3750 - protein, 328 aa, Glycine max; identical to SEQ ID NO: 1024

SEQ ID NO: 3751 - protein, 426 aa, Rhizobium leguminosarum
MNATSLTDRKNAAISRGVGMTTQIYADRAENAEIWDKEGRRYIDFAAGIAVLNTGHRHPRVIAAVKDQLDRFTHTCHQVVPYESYVHLAERLNALLPGDFEKKTIFVTTGAEAVENAVKIARAATGRSAVIAFGGGFHGRTFMGMALTGKVVPYKVGFGAMPGDVFHIPFPVELHGVTADQSLAALKKLFAADVDPQRVAAIIIEPVQGEGGFYSAPAAFMKALRELCDQHGILLIADEVQTGFARTGRMFAMDHHEVAPDLTTMAKSLAGGFPLAAVTGRAAIMDAPGPGGLGGTYGGNPLGIAAAHAVLDVIVDEDLCNRANLLGGRLKQRLESMRETVPEIVDIRGPGFMNAVEFNDRTTGLPSAEFANRVRLIALDKGLILLTCGVHGNVIRFLAPITIQDEIFGEALDILEASMLQASAAK

SEQ ID NO: 3752 - protein, 465 aa, Burkholderia vietnamiensis G4
MNGIDVGLEADLQALGKRHLLMHFTHADAYRDQALTVFDRGEGCWLVDRNGKRYFDGLAGLYCVQLGYSHGAEIGDAMREQMGRLPFATNWGYGHEPAIRLAHKLATLAPDGLNRVFFTSSGSESNESAIKLVRQYHQARGEPQRRKFIARRVAYHGTSFGALALNGMTNFRKHFEPLMAGVRHVSNTKRYGRPDGETEAQFTRHLLDEIESLIVQEGPDTVAAIVVEPLQNAGGSLTPPAGYAQGLRALCDRHGVLLVADEVICGFGRLGEWFGSTRYGLQPDLITFAKGIASGYVPLGGVIASDAVVDTVLAGPQQMFLHGATYGGHPVACTAALANLAIMERERVLENVGGNQAVFRRTLDGLLELPCVGDVRGDGYHYSLELVTDKAARRWAAGIGAQAFVSTLLAPAIFEAGLLCRAGVDHEGTPIVQFSPPLVMSRDEIVWFVAKIRDILADTYARAMR

SEQ ID NO: 3753 - protein, 74 aa, Brassica napus
MASNMEVFCEILIAILLPPLGVCLKRGCCTVEFLICLVLTILGYIPGIIYALYVIVFQNREGETPDYSTPLNSA

SEQ ID NO: 3754 - protein, 509 aa, Rhodococcus ruber
MTGTLSRDSGTTNQVDERLGAAAREFLGRPHQLFIDGQWVDAADGRTFGTYDPATGAEITQVAHGGPEDVDRAVAAARRAFDDGDWATMKPNKREQILWRIGDLLDARGEMLGQIEALDNGKSAAIATAVDVTFAADVFRYYAGWCTKIEGTTVDVSMPFAGDKQFHAYTQRVPVGVCGQIIPWNFPLLMAAWKLAPALATGNTLVLKPAEQTPLTALLLGEIMAEAGVPDGVVNIITGFGDAGAAISAHDDVDKVAFTGSTEVGKLIVDAAKGNLKKVSLELGGKSANIVFADCDFDAAVAGSVAAWMFNHGQACTAGTRLYVEDSIYEKFTQAVADAAAQATIGHGLDPATELGPLVDQDQFDKVSYYLRAGIEDGGRALTGGGRHGDTGYFIQPTVFVDVEPDHRVVTDEIFGPVVAALRFSDMDDAVRQANDSIYGLAAGVWTKDISKAHKVASRLHAGSVWVNQYNGFDTAMPFGGFKQSGWGRELGKGALDLYTQTRSVNIQL

SEQ ID NO: 3755 - protein, 680 aa, Geobacillus stearothermophilus
AGNLNKVNFTSDVVYQIVVDRFVDGNTSNNPSGALFSSGCTNLRKYCGGDWQGIINKINDGYLTDMGVTAIWISQPVENVFSVMNDASGSASYHGYWARDFKKPNPFFGTLSDFQRLVDAAHAKGIKVIIDFAPNHTSPASETNPSYMENGRLYDNGTLLGGYTNDANMYFHHNGGTTFSSLEDGIYRNLFDLADLNHQNPVIDRYLKDAVKMWIDMGIDGIRMDAVKHMPFGWQKSLMDEIDNYRPVFTFGEWFLSENEVDANNHYFANESGMSLLDFRFGQKLRQVLRNNSDNWYGFNQMIQDTASAYDEVLDQVTFIDNHDMDRFMIDGGDPRKVDMALAVLLTSRGVPNIYYGTEQYMTGNGDPNNRKMMSSFNKNTRAYQVIQKLSSLRRNNPALAYGDTEQRWINGDVYVYERQFGKDVVLVAVNRSSSSNYSITGLFTALPAGTYTDQLGGLLDGNTIQVGSNGSVNAFDLGPGEVGVWAYSATESTPIIGHVGPMMGQVGHQVTIDGEGFGTNTGTVKFGTTAANVVSWSNNQIVVAVPNVSPGKYNITVQSSSGQTSAAYDNFEVLTNDQVSVRFVVNNATTNLGQNIYIVGNVYELGNWDTSKAIGPMFNQVVYSYPTWYIDVSVPEGKTIEFKFIKKDSQGNVTWESGSNHVYTTPTNTTGKIIVDWQN

SEQ ID NO: 3756 - protein, 334 aa, Bordetella pertussis Tohama I
MDAFKQDSRIGVTVLTGFLGSGKTTLLNRLVQEPEYAEAVVIVNEFGDIGVDHHLVRNVDDRIVLLEGGCICCTASGGLVDTLRDLFMLVVRRRIKPFKRVLLETTGLAGPASVMFSLRHDPFLAERYAYHGAIAMVDAQHVREQLMVQPEAAQQIALADLVVFSKADLAGQVQLASAMRDVARANPGVPMCVVRRGEPLDERLHGDFLVRERRQAAPLGRWLGAFAAPPGGPHPNVAHFSLNLSVPLTRGMFLARMSEIQAAYDRGILRIKGLVCFEAEALPWAVHGVHRQLYPLEALPQWPGDDRQSRLVFILRGLDRDAVQADVARRLQQG

SEQ ID NO: 3757 - protein, 137 aa, Triticum baeoticum
FGLFLARKVSLIRALLYIIAQCLGAICGVGLVKGFRSSYYVRYGGGADELSAGYSKGTGLAAEIIGTFVLVYTVFSATDPKRNARDSHIPVLAPLPIGFAVFMVHLATIPITGTGINPARSLGAAVIYNKDRAWNDQ

SEQ ID NO: 3758 - protein, 197 aa, Rubrobacter xylanophilus DSM 9941
MLRAGAGTPAAWYPQRRMDGRLETATLGGGCFWCVEAVFDELRGVRRVEPGYSGGHVERPTYEQVCTGLTGHAEVVQVSFDPREISYRELLEVFFAVHDPTTKDRQGPDVGPQYRSVIFYHDEEQRRTAEEVISELEARGIWDGPIVTEVAPFTAFYPAEEYHRDYFRRNPDQPYCRVVIAPKVAKFRKEFLERLKA

SEQ ID NO: 3759 - protein, 306 aa, Haemophilus influenzae R2866
MRKTLTVLGSINADHVISVPYFAKPGETLTGQNYQIAYGGKGANQAVAAARLGAKVAFISCIGSDSIGKTMKNAFAQEGIDTTHINTVSQEMTGMAFIQVAQSGENSIVLASGANSHLSEMVVRQSEAQIAQSDCLLMQLETPLSGVELAAQIAKKNGVKVVLNPAPAQILSDELLSLIDIITPNETEAEILTGVAVTDEQSAVKAASVFHDKGIKTVMITLGAKGVFVSRKGKSRIIKGFCVQAIDTTAAGDTFNGGFVTALLEEKSFDEAIHFGQAAAAISVTKKGAQSSIPTRQETLEFLEHA

SEQ ID NO: 3760 - protein, 504 aa, Oryza sativa
  misc_feature (434)..(434): Xaa can be any naturally occurring amino acid
  misc_feature (455)..(455): Xaa can be any naturally occurring amino acid
  unsure (1)..(504): unsure at all Xaa locations
MNGGGSRRGGASCADESGSDQDGGSGGGLRKPLLNTGSWYRMGSRSSLAASSMAAIRESHVSAFLCTLIVALGPIQFGFTSGFSSPTQDAIIRDLKLSISEFSAFGSLSNVGAMVGAIASGQMAEYIGRKGSLIIAAVPNIIGWLAISFAKDASFLYMGRLLEGFGVGVISYTVPVYIAEISHQNTRGALGSVNQLSVTIGILLAYLLGMFVPWRLLAVIGSIPCTLLIPGLFFIPESPRWLAKMKMMDDFEASLQVLRGFETDITAEVNDIKRAVASANKRTTVRFKELNQKKYRTPLLIGTGLLVLQNLSGINGILFYASRIFRDAGFTNSDLATCALGAIQVLATGVTTWLLDRAGRRMLLIISTAGMTLSLLAVSVVFFLEGNISHDSHSFYILSMISLVALVAYIITFSFGMGAIPWVMMSEILPVSIXKSLGGSFVTLANMLTSWLITXMTAYLLLSWSAGGTFLSYMIVSAFTLVFVIFWVPETKGRTLEEIQFSFR

SEQ ID NO: 3761 - protein, 217 aa, Frankia sp. CcI3
MGILDPYKGFGVTFGTMFKKPTTEQYPEEKKETAPRFHGRHQLNRHPDGLEKCVGCELCAWACPADAIYVEGADNTEAERYSPGERYGRVYQINYLRCILCGLCIEACPTRALTMSNDYELADDSRQDLIFTKEQLLAPLREGMEAPPHPMRLGSSETDYYTRDPDAPLPWQASGQEQVAGQAAELEAADVIARRTAGEHSRADEVPAHGAGSERPR

SEQ ID NO: 3762 - protein, 236 aa, Carboxydothermus hydrogenoformans Z-2901
MARKILIVDDEPKIVTMVKSYLLKEGYEVITAFNGREALNSFYKEKPDLIVLDWMMPEMSGIEVLREIRKKSQIPIIMLTAKTEEVDKLIGFEFGVDDYVVKPFSLRELSARIKTILKRLEAKTINEEIVLTEGDLTLYPHKREVFLKGKPLDLTPTEFKLLEAFLKNPGKAYSRLELLEYAIGEAYEGYERTIDTHISNLRKKIEKDPANPEYIQTVFGIGYKLKPRGEKDENHG

SEQ ID NO: 3763 - protein, 370 aa, Triticum aestivum
PTRPREGNWDLLGNNFPVFFIRDGIKFPDVIHAFKPNPKSHVQEYWRVFDFLSHHPESLHTFFFLFDDVGIPTDYRHMDGFGVNTYTFVSRAGKSHYVKFHWRPTCGVSCLMDDEATLVGGKNHSHATQDLYDSIDAGNFPEWKLFVQVIDPDDEDRFDFDPLDDTKTWPEDLVPLQPVGRLVLDRNVDNFFNENEQLAFGPGLVVPGIYYSDDKMLQCRVFAYADTQRYRLGPNYLMLPVNAPKCGFKNNHYDGAMNFMHRDEEVDYYPSRHAPLRQAEPASFPVPTRPVVGKREKTRIKKENDFVQPGERYRSWAPDRQDRFVRRFADALAHPKVSHELRVIWIDFLSKCDKSCGMKVANRLNVKPSM

SEQ ID NO: 3764 - protein, 148 aa, Methanothermobacter thermautotrophicus str. Delta H
MNLTTQKRLAADILKVGVNRIWIDPERIDEVSRAITRDGVKQLIKDGAIKAKPKKGISSYRSKKIAQQKKKGRRRGPGSIKGAKGARRPKKDEWMTTIRALRKDLKEMRDNREINKSTYRKLYKMAKGGAFKSKSYMKTYARDHDMLR

SEQ ID NO: 3765 - protein, 179 aa, Schizosaccharomyces pombe
MGGARFINFIKPLSSLLPEVEGPKTHLELVEKLGWMAGCVVVYQILSIIPVYGAEKTDTLDPINNFRVLDGSSASGLMITGLAPIYLSSFLLQILASKKKIAVNFNLIIDRVLFQNAQKVVSALLYLILAVTYVSSGYYGSFSDLGIFRFIMLILQIFLPGIVCIYLCEIIEKGHGLGS

SEQ ID NO: 3766 - protein, 315 aa, Polaromonas sp. JS666
MKPRLLQHVAIPPLLATEFNTRYDAHPLWKEADPAAFLARHGHEFTGYVTSARFGVDDATLAAMPNLKVISSFGVGTETLPLEAAQARGIAVGYTPDVLNDCVADTAFGLVMDVARRFSASDRFVRARRWLQGAYPLATRVSGKQLGILGLGRIGQVVARRASGFDMEVRYHNRRPNPAVPYTYESSIESLARWADFLVVVSAGGPETRHLVTASVLRALGPQGFLINVSRGSVIDEDALIQALEEGTIAGAGLDVYADEPRIPERLLALDQVVLLPHLASATNETRQAMAELVVDNLDAFYATGKLRASVPLPA

SEQ ID NO: 3767 - protein, 474 aa, Arabidopsis thaliana
  misc_feature (97)..(97): Xaa can be any naturally occurring amino acid
  misc_feature (106)..(106): Xaa can be any naturally occurring amino acid
  misc_feature (122)..(122): Xaa can be any naturally occurring amino acid
  misc_feature (139)..(139): Xaa can be any naturally occurring amino acid
  misc_feature (152)..(152): Xaa can be any naturally occurring amino acid
  misc_feature (266)..(266): Xaa can be any naturally occurring amino acid
  misc_feature (274)..(274): Xaa can be any naturally occurring amino acid
  unsure (1)..(474): unsure at all Xaa locations
MVFFRSVSAFTRLRSRVQGQQSSLSNSVRWIQMQSSTDLDLKSQLQELIPEHKDRLKKLKSEHGKVQLGNITVDMVIGGMRGMTGLLWETSLLDPEXGIRFRGLSXPECQKALLPTAQSGGXTITGGLLWLLLTGKVPXSKEQVEALSKDLXNRAAVSDYVYNAIDALPSTAHPMTQFASGVMALQVQSEFQKAYENGIHKSKFWEPTYEDCLNLIARVPVVAAYVYRRMYKNGDSIPSDKSLDYGANFSHMLGFDDERLKELMRXYITIHSDXHEGGNVSAHTGHLVGSALSDPYLSFAAALNGLAGPLHGLANQEVLLWIKSVVEECGEDISKEQLKEYVWKTLNSGKVIPGYGHGVLRNTDPRYVCQREFALKHHPDDPLFQCCKLMKLASCLTELESEEPWPNVDAHSGVLLNHYGLTEARYYTVLFGVSRSLGICSQLIWDRELLLALERPKSVTMDWLEAHCKKASSA

SEQ ID NO: 3768 - protein, 438 aa, Corynebacterium glutamicum ATCC 13032
MGADQIAAVSGNSAWMLMSASLVLLMTPALALFYGGMSRQKSVLNMMMMSFGALGVVTVIYLLWGWSMSYGTQSIAGIFANPFEFFGLKDSIVDADGNYIEGAAGYPNIIDIGFQLTFAVISTALISGALAERVKFSTWLIFSGAWVTLVYFPLAHMVWGGGLLGHNVTGFASWLFGSTDGEANIAPIDFAGGTVVHISAGTAALVLAFIVGKRKTFGKAIARPHNLPMVMLGAALLWFGWFGFNGGSAFAADGLAGLAWVNTTAATAAAMLGWLATEKFRDGHATSLGAASGVVAGLVAITPAAGALTPVTSLILGAIGGILACLGVGLKYRFGFDDSLDVVGVHLVAGLWGTVGVGLLATDIGWFSGGGMDGLKLFIVQIVIALVAVVFAGVITALIAFALKATVGWRVDDDVEQQGIDTHEHAESAYDTTGPEIR

SEQ ID NO: 3769 - protein, 270 aa, Methanosarcina acetivorans C2A
METIMKAACIQMNISLCSKQENLERALSLAEEAVSREAELLVFPEVFSTGFCYDRIGDVAETTSGPTLETLRAFSREHGCILAGSMIEIREGDAPGSEKKVPSQYNLGFCIESGKLAGIRRKVQLYGPEKEYFASGDSISPIKLQKYGLSIGLIVCNELRYPEVARKLVLEGADLLVSAADIPDFYIYPWRIMSFSRAIENQLPHIACNRVGKDRYSIYPGGSFIVDGWGRVLAEAGTEECVLLGEIDLVKAKELRQTGSILEDRRPDLY

SEQ ID NO: 3770 - protein, 409 aa, Nostoc punctiforme PCC 73102
MKAVVFHGIGDIRLDNVPEPKIKESTDAIIRLTSSAICGTDLHMIRGTFTGMKPGTILGHEGVGIVEEIGSNVRNLKVGDRVVVPSTIACGYCSYCRTGYHAQCDNANPNGHNAGTAFFGGPEAAGPFDGLQAEYARIPYANAGLVKLPKEVTDDQAILLSDIFPTAYFGADIAEITPGDTVAIFGCGPVGQFAIVSARLFGAGHIIAVDTIPSRLEMARDLGAEIIDYNAEDPIEAIRELTGGIGVDRAIDAVGVDANAPDSGPAAEKARQEAQQFQQQLQQIAPKTNPQNGNWHPGNAPSLVLEWAVQALAKAGTLSIIGVYPPSHNFFPIGTAMNKNLTINMGNCNHRKYIPTLVDLVRNGTVDPTKVLTQVEPLMSVIDAYKAFDRRQPGWVKVELVPGATLANV

SEQ ID NO: 3771 - protein, 475 aa, Rickettsia rickettsii
MNLLKNITGKNYINGEFIEFGKQISVINPATLKEIATVPNLGLSEINSAINNTVTSFALWSQSSFEARIAILRRWYNLVIENIEELSHILTLEQGKVLAESKKEILYGASFIDWYTYAIHNIHSTIKPGNSNTHKIVTQYEPVGPSAAITPWNFPNAMIARKVVPAIAAGCSVILKPSSLTPLSALVLAKFASDAGLPSGVFNVITGSSDIIGKAFCEDFRLRKLSFTGATNVGKILYQNAANTLKRLSLELGGNAPFIITADNNLEKVVSDLVIAKTRNSGQSCTSPNRIFIEESIYEKFIEILKAKFTKLKAGDGFDKESDVGPLINSAAIEKIQKLLADAQSKGAKLICGGKTVDNFIEPTIIIDCLDNMDIFRIEIFGPVVACYKFKDLDEVIEHANNTEYGLQGYVYSNNISVAQMIASKLDFGMVSINDPLPANAKAPFAGRKASGFGVEGSFEGIFEYLNTKYINLQN

SEQ ID NO: 3772 - protein, 335 aa, Dechloromonas aromatica RCB
MAINGFGRIGRMAFRAIAKEAEFADIAVVAINDLLEPDYLAYMLKYDSVHGNFAGDVAVDRNDLLVNGRRIRLSAERHPEQLAWGEVKADVVIEATGHFLTHDGCLKHVHAGARKVVQSAPAKDSTPMFVYGVNHETYAGEDIVSAASCTTNGLAPVAKVLHDKFGIRRGLMSTVHAATATQKTVDGPSGKDWRGGRGILENIIPSSTGAAQAVGKVIPALNKKLTGMAFRVPTSDVSVVDLTVELEKPASYADICAAMKAAAESGPLKGVLGYTGDSVVSTDFRGCRLPSIFDAGAGIALDPTFVKVVAWYDNEYGYTCNLLRLVRHISEAPTK

SEQ ID NO: 3773 - protein, 467 aa, Clostridium perfringens str. 13
MRRTKLVCTIGPASENEEILTKIIEAGMNASRHNFSHGDHEEHKGRMVKVREISKKLGKEVAILLDTKGPEIRTGKFEPSKVELTAGTEFTIYAGAEDVIGDTTKCSVTYAGLAKDVKAGDTILIDDGLVGLEVVSVEGNAVKCVVRNTGLVGTHKGVNVPGVSIKLPAMTDKDRADLIFGCEMGVNMVAASFIRKAEDVKAIREVLVANGGADIQIFSKIENQEGVDNIDAIIEASDGIMVARGDLGVEIPMEDVPSVQKMIIEKCNNAGKPVITATQMLDSMMRNPRPTRAEVSDVTNAILDGTDAIMLSGESANGSWPVEAVETMVKIATKSEEMLSYELASSKAKKHIPAVPGVISRAACNAAHELKSAAIVSLTQSGATAKRISQCRPDAPIVTVTPNERVAKKVALCFGVYPVVAENATMENAVEIAKNAGFVKANDTAVVVAGVPANEGNTNIVKVEVVK

SEQ ID NO: 3774 - protein, 617 aa, Arabidopsis thaliana
  misc_feature (122)..(122): Xaa can be any naturally occurring amino acid
  unsure (1)..(617): unsure at all Xaa locations
MFMASLSFTQFLSFPRCNADVPCLLQSHGFVKFRGERWNGKQSFSMAAGRRKLSESAPLEEEGNDGNGAVVGKKPSKSVKRTTKKKVVVKDEPLEEISEFLVDNDDVLDKESIVSALKPKKXTRTRKKAAAASSDVEEVKTEKKVRRKRTVKKDKDVEDDLATIMDAEVSDVEEALAVESTDTESEEEEIDLSKHEGEDISHTYGWPPLVCCFGSAQHAFVPSGRPANRLLDYELHERMRDAKWAPEKYIRAPGGCAGGVAIALASLGGKVAFMGKLGADDYGQAMLYYLNVCKVQTRSVKIDGKRVTACSTMKISKRGRLKSTCIKPCAEDSLSKSEINVDVLKEAKMFYFSTHSLLDKKMMSTTIQAIKISKQLGNVIFYDLNLPLPLWHSSEETKSFIQEVWNLADVIEITKQELEFLCGIEPTEEFDTENNDISKFVHYPPETVEQLWHENLKVLFVTNGTSKIHYYTKEHNGAVSGMEDVPITPFTRDMSASGDGIVAGLIRMLTVQPDLMNNKGYLERTARYAIECGIIDQWLLAQTRGYPPKDDMEEEEDDEEEDEVESDPNGIRSITEKEYRTSKPYDEPDGPYVMKPVEEREYKKLELVGSMFEDGSL

SEQ ID NO: 3775 - protein, 457 aa, Gracilaria lemaneiformis
MQIFVKTLTGKTITLEVESSDTIENVKTKIQDKEGIPPDQQRLIFAGKQLEDGRTLSDYNIQKESTLHLVLRLRGGMQIFVKTLTGKTITLEVESSDTIENVKTKIQDKEGIPPDQQRLIFAGKQLEDGRTLSDYNIQKESTLHLVLRLRGGMQIFVKTLTGKTITLEVESSDTIENVKTKIQDKEGIPPDQQRLIFAGKQLEDGRTLSDYNIQKESTLHLVLRLRGGMQIFVKTLTGKTITLEVESSDTIENVKTKIQDKEGIPPDQQRLIFAGKQLEDGRTLSDYNIQKESTLHLVLRLRGGMQIFVKTLTGKTITLEVESSDTIENVKTKIQDKEGIPPDQQRLIFAGKQLEDGRTLSDYNIQKESTLHLVLRLRGGMQIFVKTLTGKTITLEVESSDTIENVKTKIQDKEGIPPDQQRLIFAGKQLEDGRTLSDYNIQKESTPHLVLRLRGGQ

SEQ ID NO: 3776 - protein, 288 aa, Zea mays
MGRPPCCDKAGVKKGPWTPEEDIVLVSYVQEHGPGNWRAVPVSTGLMRCSKSCRLRWTNYLRPGIRRGNFTPHEEGIIVHLQALLGNRWAAIASYLPQRTDNDIKNYWNTHLKKKLRKQQAIGAIFAPPTPSEPTAGHADCRRHDMTRSSKDSHACPADSTPAADEVVTQLIAQQFAATDGDTSSSSSYSYASSTDNISKLLDGFMKSASPARDDATDTIKPSSAIDIDPFDHKSGGAALPPPKKRQQQQQHLSSIENWLFDDATEQVVVQLMEEISGGSCSVPMLLY

SEQ ID NO: 3777 - protein, 175 aa, Glycine max
  misc_feature (18)..(18): Xaa can be any naturally occurring amino acid
  unsure (1)..(175): unsure at all Xaa locations
AAAKAAKDAGVVLSYDPXNLRLPLWPSADSAREGILSIWETADIIKISEEEISFLTKGENPYDDAVVHKLFHPSLKLLLVTEGAEGCRYYTKEFSGRVKGLKVDAVDTTGAGDAFVAGILSQLAVDLSILQNEDELRDSLKFANVCGALTVTERGAIPALPTKEAVLNAMLKPVS

SEQ ID NO: 3778 - protein, 235 aa, Triticum aestivum
  misc_feature (87)..(87): Xaa can be any naturally occurring amino acid
  misc_feature (197)..(197): Xaa can be any naturally occurring amino acid
  unsure (1)..(235): unsure at all Xaa locations
RPPLHNVKAKYQDKQGIPPAQQRLIFAGKQLEDGRTLADYNIQNESTLHLVLRLTGGMQIFCKTLTGKTITLEGESSDTIDNVKAKXIQDKEGIPPDQQRLIFAGKQLEDGRTLADYNIQKESTLHLVLRLRGSMQIFVKTLTGKTMTLEVESSDTIDNVNAKIQDKEGIPPDQQRLIFAGKQLEDGRTLADYNIQXKESTLHLVLRLRGWPIKVLGDGLCFGSGSQRLCFCTVH

SEQ ID NO: 3779 - protein, 330 aa, Glycine max
MASTNALPPTGNGLIVSFGEMLIDFVPTVSGVSLAEAPGFLKAPGGAPANVAIAVARLGGKAAFVGKLGDDEFGHMLAGILKENDVRSDGINFEKGARTALAFVTLRADGEREFMFYRNPSADMLLTPEDLNLELIRSAKVFHYGSISLIVEPCRSAHLKAMEVAREAGCLLSYDPNLRLPLWPSAEEARQQILSIWDKADVIKVSDVELEFLTGSDKIDDASALSLWHPNLKLLLVTLGEHGSRYYTKNFRGSVEAFHVNTVDTTGAGDSFVGALLSKIVDDQSILEDEARLREVLKFTNACGAITTTKKGAIPALPTEADALKLIKEA

SEQ ID NO: 3780 - protein, 216 aa, Petunia x hybrida
MVRGKTQMRRIENATSRQVTFSKRRNGLLKKAFELSVLCDAQVGLVIFSPRGKQYEFSSSSMQEIIERYKGHTKDKVQTENQAGEQNLQHETAGLMKKIEFLETSKRKLLGEGLGSCTLEELQKIEKQLERSVSIIRARKMQVFKEQIEKLNEKEKALAAENAMLREKFGGLQQRQASSGEKEGEVVCTEGSDKSDVETELFIGPPECRIRHRLQN

SEQ ID NO: 3781 - protein, 370 aa, Zea mays
  misc_feature (83)..(83): Xaa can be any naturally occurring amino acid
  misc_feature (174)..(174): Xaa can be any naturally occurring amino acid
  misc_feature (206)..(206): Xaa can be any naturally occurring amino acid
  unsure (1)..(370): unsure at all Xaa locations
GVSEGCRTCYVKAVKEIEPALKKQLIISTTLMTVGIAVISWLALPAKFTIFNFGTQKDVSNWGLFFCVAIGPWAGLIIGFVTXYYTSNAYSLVQDVADSCRTGAATNVILGLALGYKSVIIPIFAIAVIIYVSFSIAAMYGIAVAALGMLSTIATGLAIDAYAPISDNAGGIAXRTDAVDAAGNTTAAIGKGFAIGSAALVSLALXFGAFVSRAGVKVVDVLSPKVFIGLIVGAMLPYWFSAMTMKSVGSAALKMVEEVRRQFNTIPGLMEGTAKPDYATYWKISTDASIKEMIPPGALVMLTPLIVGTLFGFETLYGVLAGALVSGVQPSLSRGCDFLFHCIGYDLRPLSHPIRRPSACARLVFSVSPP

SEQ ID NO: 3782 - protein, 218 aa, Petunia x hybrida
MVRGKTQMRRIENATSRQVTFSKRRNGLLKKAFELSVLCDAEVGLVIFSPRGKLYEFASSCMQEIIERYKRHTKDKVQNENQAGEQNLQLQHEAASLMKKIELLEISRRRLMGEGLQSCTLQEIQQLEKQLERSVSTIRARKIQVFKEQIARLKEKEKILAAENAMLKEKFGGFQERQVSSGEQVGEALCAEGNEKSDVETELFIGPPEGRIRRPSQN

SEQ ID NO: 3783 - protein, 218 aa, Petunia x hybrida
MQEMVRGKVQMKRIENATSRQVTFSKRRNGLMKKAYELSVLCDAEVAVVIFSQRGRLYEFSSSSMQKTIDRYRECARETLTNNSIQAQQQIQYLKEETENMAKKIEVLEVSRRKLTGQSLGSCSMNELQQIDSQLERSLKNIRARKSQLFEDEIERLKAKKNLLLEENARLSEKCGQMSREPALAPPDPLIQQQEKGNCSLSIKNSEVETDLFIGLRS

SEQ ID NO: 3784 - protein, 607 aa, Gaeumannomyces graminis var. graminis
MKFLIVSLFALVCGSAALATPVNSSVSAWSGQHHPKPHHPHQPPHSGCKNGPKSRNCWGKHSIDTNYYETAPDTGVTREYWLSVEEGICNNDGYKRYCQTFNGSFPGPLIWANWGDNLVIHVTNNMKTNGTSIHWHGLHQRGSVEYDGVPGVTQCPIAPGKSLTYKFRVTQYGTTWYHSHFSLQYAEGLFGPMIFYGPTTANYDEDLGTLFLQDWDHGTAWHGWDNVASKGAGPLPANGLINGTNTFDCKNSTDTNCVGGGKKFSANFKKGKKHLIRIINNSADAHFQFSIDGHDLTVVANDLVPIKPFKTKSVRVSIGQRYDVIVEANAKPGNYWLRSGMSCVPGDTGALRKRVTGIIRYDKKSKADPKTTSDVVVDETCSDEDPKKLVPHLALDVTHTGEIVRSDLGFKPNGTPAEGQNWFQWTLNNSSLVLDWHDPTLERIFDGQSIFPTDYNVIKADCQLWPQQAMVHTGDSEQRPPTDPLPSHRLAHPIHLHGHDFWVLSQSKAKWDGTPRGFDTKNPARRDTAMLPEKGHLAIAFQLDNPGAWLVHCHIAWHAGQGLSLEFVESQDRIALGMPNHDVFRQTCREWDAVRTKMPFPQHDSGI

SEQ ID NO: 3785 - protein, 138 aa, Arabidopsis thaliana
MTEAMIRKKPGMASVKDMPLLQDGPPPGGFAPVRYARRISNTGPSAMAIFLTVSGAFAWGMYQVGQGNKIRRALKEEKYAARRTILPILQAEEDERFVSWKESDLEYEADVMKDFLEWKVGENVYNSGRWIPFLLREK

SEQ ID NO: 3786 - protein, 586 aa, Arabidopsis thaliana
MDSHSSHLNAANRSRSSQTPSPSHSASASVTSSLHKRKLAATTAANAAASEDHAPPSSSFPPSSFSADTRDGALTSNDELESISARGADTDSDPDESEDIVVDDDEDEFAPEQDQDSSIRTFTAARLDSSSGVNGSSRNTKLKTESSTVKLESSDGGKDGGSSVVGTGVSGTVGGSSISGLVPKDESVKVLAENFQTSGAYIAREEALKREEQAGRLKFVCYSNDSIDEHMMCLIGLKNIFARQLPNMPKEYIVRLLMDRKHKSVMVLRGNLVVGGITYRPYHSQKFGEIAFCAITADEQVKGYGTRLMNHLKQHARDVDGLTHFLTYADNNAVGYFVKQEIPQSFTSKSSVSTLSYQGFTKEIYLEKDVWHGFIKDYDGGLLMECKIDPKLPYTDLSSMIRQQRKAIDERIRELSNCQNVYPKIEFLKNEAGIPRKIIKVEEIRGLREAGWTPDQWGHTRFKLFNGSADMVTNQKQLNALMRALLKTMQDHADAWPFKEPVDSRDVPDYYDIIKDPIDLKVIAKRVESEQYYVTLDMFVADARRMFNNCRTYNSPDTIYYKCATRLETHFHSKVQAGLQSGAKSQ

SEQ ID NO: 3787 - protein, 148 aa, Colwellia psychrerythraea 34H
MTAVKYPPNVGENDCVILFDGVCKLCDFWTQFIVKVDTQQRFKLCSVQSPEGQSILNYFKMPTDHFDTMLLVEGNQCFDKSDAFLNTMSKLSYPWRLFTAFKILPKGIRNWLYDRIARNRYYLFGRYDSCMLPSKENENRFLKGDVGE

SEQ ID NO: 3788 - protein, 456 aa, Methanothermobacter thermautotrophicus str. Delta H
MEQLKEKFEPLFSVLPQVKSPGYRVPFREKLKWTGIILVLYFFLAQIPLYGLSANAVDQFAQFRAVLAGNFGSILTLGIGPIVSASIILQLLVGGKILKLDLSRHEDKAFFQGLQKLLAIVFTFFEALIFVLTGSLAPSAPQFVWVLILQLTIGGILIIFLDEVVSKWGFGSGVGLFIAAGVSQEIIVGAFNPLSAPTQPGVPAGRITGFLYLLFTGQSPDFQYYVLPVLALIAVFLVVVYAESMRVEIPISMGGGKRLSRGAVGKYPLRFIYASNMPVILTSALLLNVQLLANVFQKLGYPILGTVSNGQAVDGLAYLLTAPRSIDALILDPFRVVFYAVVFIGLCVLFAWLWVEISNIGPRHVARQLYQMGMQIPGFRSSRGQFEKILKRYIPTITILGGAFVGLLAFVADLTGSLGGGTGVLLTVGIVYRLYEEIAQEQLMDMHPILRSFLGD

SEQ ID NO: 3789 - protein, 475 aa, Corynebacterium glutamicum ATCC 13032
MDRRTKIVCTLGPAVASADGILRLVEDGMDVARLNFSHGDHPDHEQNYKWVREAAEKTGRAVGILADLQGPKIRLGRFTDGATVWENGETIRITVDDVEGTHDRVSTTYKNLAKDAKPGDRLLVDDGKVGLVCVSVEGNDVICEVVEGGPVSNNKGVSLPGMDISVPALSEKDIRDLRFALKLGVDFIALSFVRSPADAELVHKIMDEEGRRVPVIAKLEKPEAVTSLEPIVLAFDAVMVARGDLGVEVPLEEVPLVQKRAIQIARENAKPVIVATQMLDSMIENSRPTRAEASDVANAVLDGADAVMLSGETSVGKDPHNVVRTMSRIVRFAETDGRVPDLTHIPRTKRGVISYSARDIAERLNARALVAFTTSGDTAKRVARLHSHLPLLVFTPNEAVRSELALTWGATTFLCPPVSDTDDMMREVDRALLAMPEYNKGDMMVVVAGSPPGVTGNTNMIHVHLLGDDTRIAKL

SEQ ID NO: 3790 - protein, 96 aa, Colwellia psychrerythraea 34H
MSIRPLHDRVIVKRKKVESKSAGGIVLTGSAAEKSTRGEVIAVGNGRILENGEVRPLDVKVGDQVIFSEGYGVKTEKIDGEEVLILSESDILAIVE

SEQ ID NO: 3791 - protein, 114 aa, Glycine max
FACRNKQSNNASLSKHFSPTEFECKTCNRKFSSFQALGGHRASHRKPKFEAEELKEEAKKTKPKMHECAICGMEFSLGHALGGNMRKHTGAIRESEHNNNNNETLSFIKQGNRR

SEQ ID NO: 3792 - protein, 208 aa, Triticum aestivum
  misc_feature (34)..(34): Xaa can be any naturally occurring amino acid
  unsure (1)..(208): unsure at all Xaa locations
GGIPGRPGSHPPLGEMTLEDFLVKAGVVAEGHLXDPIDLPANMGAVGSSVIEAAAPSLNPGAHWLQQYLEPQHPRMAGPFMASHLGPQPLSVATGAIMEPIYPDGQITSPMLDALSDPQTPRRKRGASDGVTDKVVERRQKRMIKNRESAARSRARKQAYTNELENKVSRLEEENERLKKQKELDMMITSAPPPEPKYQLRRTSSAPV

SEQ ID NO: 3793 - protein, 377 aa, Meiothermus ruber
MHGRLPLTAQTHRRLVVKVGSAVLSGPQGRQHQLAIAAQVAALRAEGREVVLVSSGAQATGMQKLGLTEKPKSMPGKQALAAVGQPTLMLLWEQAFSWYDLKVAQVLLTAEDLAHRHRYLNARQTLETLLEWGIVPIINENDTVMVEEIKFGDNDQLSALIASLVGADLLILLSDIEALYEADPRTHPEAQPIPYVERVDAGVLRMAGDSPNRVGTGGMKSKLLAAEKAQAAGIPHLLLPGTRPQSIAEALQGAPVGTLFAGGQRRYSGRKLWLYQLPKPQGEVVVDAGAAKALRQGGASLLPAGILEVRGQFGVGEAVRCLDEQGNLIGVGLVNYSAAELARIKRRKTREIEALLGYKNTDEAIHRDYFALASELE

SEQ ID NO: 3794 - protein, 518 aa, Nocardia farcinica IFM 10152
MSSSQFPHPTSMTRRGFLALGTGVTAAAVLAACSKDSTASRTLVEPDSEAVRAAENTRRAADAAVRDVSLHAEPATVDLGGVQVQTWAYGGKLPGQEIRITKGDVLRAELTNALPVPSTVHWHGIALRNDMDGAPEVTQPQIPPGGTFGYEFTAPDPGTYFFHPHVGVQLDRGLYAPLIIEDPADGKDYDLEAVVVLDDWLDGVNSRDPDKQLDQLRAKGMSGMNMGGMNHGGMAMGGSSTMAMPTDPNAPLGSDTGDVSDYPYHLINGRTGADPVTIAARPGQRIRLRIINAASDTAFRVAVGGHQLRVTHSDGFAVQPATTSSLLISMGERYDAVVELADGVFPLVASAEGKTGQGFALLRTGAGAPPPAEVRPAELAAPPLTADRLVSAESVRLPLRKPDKTLDLTLENNAAKYLWMINGKAFPEHAMLDVTEGQRVRLRFVNKTMMFHPMHLHGHTFQVVTAAGTGPRKDTSIVLPMQTLEVDFEADNPGQWMVHCHNAYHGEAGMMSIVSYMR

SEQ ID NO: 3795 - protein, 405 aa, Pirellula sp. 1
MLFIGSIPMSYRLDGSSPPMSIFLEPSPFQDSSMKVFVVGGAGYIGSHAVALLLDAGHEVVVFDNLSRGHAKSVPEGLLVEGDLNDQAKLTSLLKEHSIDAVMHFAAFAEVGESVRDPAIYYQNNVVATLSLLEAMRAADVKKIVFSSTTATYGQPDTVPIPETTPQNPINPYGFSKLVIEKALADYAHAYGFAYAALRYFNAAGARPDGTIGEHHDPESHLIPIVLQVALGQRESISIFGDDYPTPDGTCIRDYIHVDDLGDAHLRALDRLKPGEGIQVNLGTGRGTSVREIVDACRAVTGHPIPEVMGERRPGDPAELIADAKLAGEVLGWKPRYTDIQDIVKTAWNWHQTHPQVTTPFERPLSPSNRGQDRVFTATRFRRSTYQSEGRVCPVISSDWLSSSN

SEQ ID NO: 3796 - protein, 337 aa, Geobacillus kaustophilus HTA426
MIRFAIVGMGHIAKKHIDAIEKADGAELAAVCDTNPERLRDVSDVPVYTDMETMLKENEQIDVVNICVPSGLHARLAKLAARYRRHIIVEKPMALRVSDAEEMIRAAKEYDVKLAVVHPNRFRPAIRKLKEAMERGMFGKLSHANATVRWNRNQAYYDQAAWRGTKEFDGGVLMNQAIHNLDLLLWLMGPVKAVQAMAATRLRKIETEDVAAAVVEFESGALGVIEAATTIYPQNLEESIAIFGETASVKIGGRTANFIETWEAEGVSEEERAKLIDEINADPFGKPGHQWIIEDMVQAIRENREPIVTGWDGLAPVRLIEAILRSAETGTRVQLSE

SEQ ID NO: 3797 - protein, 338 aa, Haemophilus influenzae 86-028NP
MAILVTGGAGYIGSHTVVELLNAGKEVVVLDNLCNSSPKSLERVKQITGKEAKFYEGDILDRALLQKIFAENEINSVIHFAGLKAVGESVQKPTEYYMNNVAGTLVLIQEMKKAGVWNFVFSSSATVYGDPKIIPITEDCEVGGTTNPYGTSKYMVEQILCDTAKAEPKFSMTILRYFNPVGAHESGLIGEDPNGIPNNLLPYISQVAIGKLAQLSVFGSDYDTHDGTGVRDYIHVVDLAVGHLKALQRHENDAGLHIYNLGTGHGYSVLDMVKAFEKANNITIAYKLVERRAGDIATCYSDPSLAAKELGWVAERGLEKMMQDTWNWQKNNPKGYRD

SEQ ID NO: 3798 - protein, 494 aa, Vibrio fischeri ES114
MSNYFNTLNLREQLDQLGRCRFMDREEFATEADYLKGKKVVIVGCGAQGLNQGLNMRDSGLDVAYALRQAAIDEQRQSYKNAKENGFEVASYETLIPQADLVINLTPDKQHTNVVETVMPLMKEGAALGYSHGFNVVEEGMQIRKDLTVVMVAPKCPGTEVREEYKRGFGVPTLIAVHPENDPKGEGWDIAKAWAAGTGGHRAGCLESSFVAEVKSDLMGEQTILCGMLQAGSIVSYEKMIADGIEPGYAGKLLQYGWETITEALKFGGVTHMMDRLSNPAKVKAFELSEELKELMRPLYNKHMDDIISGEFSRTMMADWANDDVNLFGWREETGQTAFENYPESDVEISEQEYFDNGILLVAMVRAGVELAFEAMTASGIIDESAYYESLHELPLIANTVARKRLYEMNVVISDTAEYGNYLFANVATPLLREKFMPSVETDVIGRGLGEASNQVDNATLIAVNDAIRNHPVEYIGEELRSYMSDMKRIAVGG

SEQ ID NO: 3799 - protein, 547 aa, Pseudomonas syringae pv. tomato str. DC3000
MAAKEVKFGDAGRKKMLAGVNVLADAVKATLGPKGRNVIIEKSFGAPLITKDGVSVAKEIELKDRFENMGAQLVKDVASRANDDAGDGTTTATVLAQAIVNEGLKAVAAGMNPMDLKRGIDKATIAIVAELKKLSKPCTDTKAIAQVGTISANSDHSIGDIIAEAMEKVTKDGVITVEEGSGLENELSVVEGMQFDRGYLSPYFINKPDTMVAELDSPLLLLVDKKISNIREMLPVLEAVAKAGRPLLIVAEDVEGEALATLVVNNMRGIVKVAAVKAPGFGDRRKAMLQDIAVLTGGTVISEEIGLSLETTTLEHLGNAKRVILNKENTTIIDGAGVKTDIDSRISQIRQQIGDTSSDYDKEKLQERLAKLSGGVAVIKVGAGSEVEMKEKKARVEDALHATRAAVEEGVVPGGGVALVRSLQAIEGLKGDNADQDVGIALLRRAVEAPLRQIVANSGDEPSVVVDKVKQGSGNFGYNAASGEYGDMIEMGILDPAKVTRSALQAASSIASLMITTEAMIADVADEKAAGGGMPDMGGMGGMGGMM

SEQ ID NO: 3800 - protein, 353 aa, Dianthus gratianopolitanus
MVSSTINETLDGKHDINKVGQGETVCVTGASGFIGSWLIMRPLERGYTVRATVRDPDNTKKVQHLLDLPHAKTNLTLWKADLNEEGSFDAAVDGCTGVFHIATPMDFESKDPENEMIKPTINGMLDILKSCVKAKVRRVVFTSSGGTVNVEATQKPVYDETCWSDLDFIRSVKMTGWMYFVSKILAEQAAWKYAAENNLDFISIIPPLVVGPFIMPSMPPSLITALSPITRTESHYTIIKQGQFVHLDDLCMSHIFLYENPKANGRYVASACAATIYDIAKTLREEYPEYNVPTKFKDYKEDMGQVQFSSKKLTDLGFEFKYGLKDMYTEAAETCRAKGLLPISLEHHENGSA

SEQ ID NO: 3801 - protein, 493 aa, Arabidopsis thaliana
MVLSKTVSESDVSIHSTFASRYVRNSLPRFEMPENSIPKEAAYQIINDELMLDGNPRLNLASFVTTWMEPECDKLMMESINKNYVDMDEYPVTTELQNRCVNMIARLFNAPLGDGEAAVGVGTVGSSEAIMLAGLAFKRQWQNKRKAQGLPYDKPNIVTGANVQVCWEKFARYFEVELKEVNLREDYYVMDPVKAVEMVDENTICVAAILGSTLTGEFEDVKLLNDLLVEKNKQTGWDTPIHVDAASGGFIAPFLYPELEWDFRLPLVKSINVSGHKYGLVYAGIGWVVWRTKTDLPDELIFHINYLGADQPTFTLNFSKGSSQVIAQYYQLIRLGFEGYRNVMDNCRENMMVLRQGLEKTGRFKIVSKENGVPLVAFSLKDSSRHNEFEVAHTLRRFGWIVPAYTMPADAQHVTVLRVVIREDFSRTLAERLVADFEKVLHELDTLPARVHAKMANGKVNGVKKTPEETQREVTAYWKKLLETKKTNKNTIC

SEQ ID NO: 3802 - protein, 97 aa, Pseudomonas syringae pv. tomato str. DC3000
MKLRPLHDRVVIRRSEEETKTAGGIVLPGSAAEKPNRGEIVAVGTGRVLDNGEVRALAVKVGDKVVFGPYSGSNTVKVDGEDLLVMSENEILAVVEG

SEQ ID NO: 3803 - protein, 73 aa, Arabidopsis thaliana
MKLSLRLISALLMSVMLLFATGMGPVEARTCESPSNKFQGVCLNSQSCAKACPSEGFSGGRCSSLRCYCSKAC

SEQ ID NO: 3804 - protein, 226 aa, Zea mays
THAGKVFVDMDKRGLEAEEPRVASDSEKDMAISTANSIVSALNSYSKLTGLVVSRKRCDSIGIPALSSSLKLSLGRIKQSFVLTDSRLPDMPIIYASDAFTSLTGYSREEILGCNCKVLNGPGTSLEVLEEINQHICSEQACTVDLLSYRKDGSSFCDHLHVSPIRDASGKVAFHIWVHLDMGAKHDFSGLTPEKWLLGAVGAVRVAVRGLSASGSLLRPPSQYQF

SEQ ID NO: 3805 - protein, 345 aa, Burkholderia sp. 383
MGRFDARQRGYRMPAEWESMDATWLGWPVLHDREDLWGSHYAQVCREFALVARTIARYQRCVVAAHHSQADAARELVGASVDVVPVAAEDNWLRDCGPIFLVSEQHGLGAAVFRFNCWGEKYQPYDGCQQAGQDIARAAGAEIFNSHMVLEGGSFYVDGQGTLVTTESCLLHPNRNPHLSRAEIEAELRRMLGVEKIIWLPGNPDEVETNGHVDGIASFIAPGRMLCQTALPEQGDYFHVMRENRRALELATDAAGRRFELLDLPSPIVTERFGSERYCDCYANYILVNGAVIVSAFGVEQDQAAREAFSRAFPGRNVEMLPIPTLSIGGGSIHCSTQQQPSVAN

SEQ ID NO: 3806 - protein, 370 aa, Burkholderia sp. 383
MTTRRQLLKRGLSVSGAALAASALGGLLGRAAHAQQGATWHMPDEGAPHTATWMAFGPSEDIWGARLLPVARANLAAIAKAIAAHEPLKMLVREQDYAIASRLCGSSVELVQHPVDDLWMRDTGPVFVKNASGQLGGVSFNFNGWGNKQEHDQDAEVAPFVAERAGARLLDTRLVLEGGGIEVDGEGTAIITRSCVLNSNRNPGVGQAQCEAELSRLLGLKKIIWLPGIAGKDITDGHTDFYARFTSPGVVVAGLDTDPSSYDHAVTRQHLEILRKSTDAKGRPLKVVVLPGPKSVRHQYENEEFAAGYINFYVCNRAVIAPQFGDSRADRNTRDTLVDLFPGREVIQLNIDGIAAGGGGIHCTTQQQPA

SEQ ID NO: 3807 - protein, 215 aa, Petunia x hybrida
MVRGKTQMRRIENATSRQVTFSKRRNGLLKKAFELSVLCDAEVSLIIFSTRGKLYEFSSSSMQEIIERYRRHSEDVQGEKPAVEQNNMQNLKLDAASLMKKIEILETSKRKLLGEDLGSCSLEELQQIEKQLERSISTIRARKMEVFREQIERLKGNVKVLATENAMLWEKCGDLEMQQTSGGEDLSIEGSEKSDVETELFIGLPECRTKRPLQN

SEQ ID NO: 3808 - protein, 578 aa, Gaeumannomyces graminis var. graminis
MVAHHSFTLLSLAALALGSPLGELQQRAEPRIQQRATCAGNTATTRSQWCDFDIKSDYYTGQHPNTGVTREFWLELTDSVKLAPDGVPRYVQAFNGTVPGPTLVMDWGDDVVIHVTNKLTQSINGTSVHWHGLHQKDTVLSDGVVSVTQCPSVPGTTQTYKFKATNYGSSWYHSHFALQAWQGVFGGIIINGPASANYDEDVGMVVLSDWGHKTPDELWHQAESQGPPTLENALINGMNVYGAEGNQTGKRWETSFEAGKSYRFRIVNTAIDTHFKFGIDNHTLTVIALDFIPVEPYETTMVNIGMGQRVDVIVKADQAAVASDFWLRAIPQSACGTIEMAKNTRAIVHYGNSQGVPSTTGHTYVDACEDEPLEKLKPIIRIDAEQSTYEQLKIATAGVNGNGVFRWYLNSTTMELDWSNPTVSQLASNATVAFSNSNAVMELPEADKWAYVIIQTDFGVAHPIHLHGHDYSVLAQGSGAYQPGVTKLITTNPMRRDTAILPAAGHLVLAFKTDNPGAWLMHCHIGWHTAQGFAMQFVERRSEMFSKNIINNNDIEGLCEPWRTHVGKHNIKLEDSGI

SEQ ID NO: 3809 - protein, 89 aa, Avena fatua
EMAGNIAPEEALHIGDTMRKDYVPARSIGMHALLLDRFKTADAESWKQSGAPVLPDLEAAQAWLTKNLEEEPEEEPLAAAVLRRMSQKL

SEQ ID NO: 3810 - protein, 806 aa, Arabidopsis thaliana
MANAERMITRVHSQRERLNETLVSERNEVLALLSRVEAKGKGILQQNQIIAEFEALPEQTRKKLEGGPFFDLLKSTQEAIVLPPWVALAVRPRPGVWEYLRVNLHALVVEELQPAEFLHFKEELVDGVKNGNFTLELDFEPFNASIPRPTLHKYIGNGVDFLNRHLSAKLFHDKESLLPLLKFLRLHSHQGKNLMLSEKIQNLNTLQHTLRKAEEYLAELKSETLYEEFEAKFEEIGLERGWGDNAERVLDMIRLLLDLLEAPDPCTLETFLGRVPMVFNVVILSPHGYFAQDNVLGYPDTGGQVVYILDQVRALEIEMLQRIKQQGLNIKPRILILTRLLPDAVGTTCGERLERVYDSEYCDILRVPFRTEKGIVRKWISRFEVWPYLETYTEDAAVELSKELNGKPDLIIGNYSDGNLVASLLAHKLGVTQCTIAHALEKTKYPDSDIYWKKLDDKYHFSCQFTADIFAMNHTDFIITSTFQEIAGSKETVGQYESHTAFTLPGLYRVVHGIDVFDPKFNIVSPGADMSIYFPYTEEKRRLTKFHSEIEELLYSDVENKEHLCVLKDKKKPILFTMARLDRVKNLSGLVEWYGKNTRLRELANLVVVGGDRRKESKDNEEKAEMKKMYDLIEEYKLNGQFRWISSQMDRVRNGELYRYICDTKGAFVQPALYEAFGLTVVEAMTCGLPTFATCKGGPAEIIVHGKSGFHIDPYHGDQAADTLADFFTKCKEDPSHWDEISKGGLQRIEEKYTWQIYSQRLLTLTGVYGFWKHVSNLDRLEARRYLEMFYALKYRPLAVPLAQDD

SEQ ID NO: 3811 - protein, 160 aa, Brassica napus
  misc_feature (89)..(89): Xaa can be any naturally occurring amino acid
  unsure (1)..(160): unsure at all Xaa locations
MSLGCDLSVLEELTSNAKQIQDDVLTKILKANGNTEYLSRFLKGSPEKELFKKNVPVSYEDVKPYIDRVAPNGEPSDILSGKPITAFFXSTGTSSGVKKIFPANDNFEDILLGLALSSLIMSKHVDGYKQGKVMIFKFIQPISTTPCGLPLAPSITIIMK

SEQ ID NO: 3812 - protein, 245 aa, Houttuynia cordata
MGRGRVQMKRIENKINRQVTFSKRRMGLLKKAHEISVLCDADVALIVFSTKGKLYEYATDSSMTKILERYERYSFAEREFALADNESEGAWSLEFGKLKARVEALQKTHRHYLGEDLDSLKVKELQHLEQQLDSALKHVRLRKNQVIQETISELQKKEKALQEQNNMLEKKVQEKQKAKAQQTRWENQSQNQNSAPFLFSLPLPNLNMGTYHQENGTEIREQEAARPLAHSNSQMPAWMLRHASE

SEQ ID NO: 3813 - protein, 469 aa, Nicotiana tabacum
MVFYRGVSLLSKLRSRAVQQTNLSNSVRWLQVQTSSGLDLRSELQELIPEQQDRLKKLKSEHGKVQLGNITVDMVLGGMRGMTGLLWETSLLDPDEGIRFRGLSIYECQKVLPAAKPGGEPLPEGLLWLLLTGKVPSKEQVDSLSQELRSRATVPDHVYKTIDALPVTAHPMTQFATGVMALQVQSEFQKAYEKGIHKSKLWEPTYEDSMSLIAQVPLVAAYVYRRMYKNGNTIPKDDSLDYGANFAHMLGFSSSDMHELMKLYVTIHSDHEGGNVSAHTGHLVASALSDPYLSFAAALNGLAGPLHGLANQEVLLWIKSVVEECGENISKEQLKDYAWKTLKSGKVVPGFGHGVLRKTDPRYTCQREFALKHLPEDPLFQLVAKLYEVFLQFLQNLAKLNPWPNVDAHSGVLLNYYGLTEARYYTVLFGVSRALGICSQLIWDRALGLPLERPKSVTMEWLENHCKKA

SEQ ID NO: 3814 - protein, 130 aa, Methanothermobacter thermautotrophicus str. Delta H
MAEKEKWGIANIYSSFNNTIITITDITGAETITQWSGGKVVRADRQESSPFAAMEAATRAADDAKEKGIVGLHIKVRAPGGNGPRTPGPGAQAAIRALARAGMRIGKIEDVTPIPHDGTGRPGGKRGRRV

SEQ ID NO: 3815 - protein, 279 aa, Bacillus cereus ATCC 10987
MKNLQSTTTLHNGVEMPWFGLGVFKVEDGPELVEAVKSAIKAGYRSIDTAAIYGNEKAVGEGIRAGIKEAGISREDLFITSKVWNSDQGYETTLAAYEESLKKLELDYLDLYLVHWPVEGKYKDTWRALETLYKEERVRAIGVSNFQIHHLQDVMKDAEIKPMINQVEYHPRLTQKELQAFCKEQGIQMEAWSPLMQGQLLDNETLQAIAEKHGKTTAQVILRWDLQNGVITIPKSTKEYRIIANADVFNFELTKEDMEKIDALNQNHRVGPDPDNFDF

SEQ ID NO: 3816 - protein, 478 aa, Magnetospirillum magnetotacticum MS-1
MIRGTVTPRRVLLVALFLSSPTAIMLVVLAGAGRLDIWPAIGTWVMVTSLLLPLVRSHLGELSGLANWVRTLAHGGDIATAPGKDGMALAEIAAAVAALRRLWQHRSAELAETARWNASLLENLPDPLLLLDSGRRVVRANRAATRLFGRDPAGSDLAAVLRDPTVTEAVQAVVSGAAPFRECEFTQAIPVERFFAARIERLDGQPAFEAAIALLTLHELTAIRRMERMRADFVANASHELRTPLAALSGFIETLQGPARDDEEAREKFLGIMAEQSGRMSRLVADLLSLSRIELDEHSQPGETVDLARLATSAAEALRPLASPRGMELVVEIADGLPPVTGQSDQLAQLLQNLMENAVKYGNDGSAVEVSVALADSAPSGAGTALRAGPVVRLAVKDHGEGIPAEHIPRLTERFYRVDTARSRKMGGTGLGLAIVKHIVNRHRGLLTIDSRMGEGSTFTVWLPAAPVRDRPAATSAP

SEQ ID NO: 3817 - protein, 116 aa, Avena fatua
SQVYQKYKDQGLEILAFPCNQFGGQEPGTNEEIVEFACTRFKAEYPIFDKVDVNGKEVSPLYKFLKSSKGGLFGDSIKWNFSKFLVDKEGRVVDRYAPTTSPLSIEKDIKKLLGTS

SEQ ID NO: 3818 - protein, 428 aa, Treponema pallidum
MVEVYARLRAAVARLAVCSAAEKDGALRAVRDALHAQREDILRANAQDLARAREAGLAAPLVARLALSEHLLEDMLRSLTVLSLQRDPIGEIIEGYTLANGLEIRKVRVPLGVVAVIYESRPNVTVDAFALAYKSGNAVLLRAGSAASYSNAALLRAIHVGLKKAHGVVDAVAVPPVLEEKYGDVDHILRARGFIDAVFPRGGAALIRRVVEGAHVPVIETGCGVCHLYVDESANIDVALQIAENAKLQKPAACNSVETLLVHRAVARPFLHRVQEIFATCEETTRKPGGVDFFCDAESFSLLTERGARKNVFHAQAETWDREYLDYQVSVRVVPNLEEALRHIARHSTKHSEVIVTRDRARARRFHQEVDAACVYVNASSRFTDGGQFGMGAEIGVSTQKLHARGPMGLCALTTSKYLIDGEGQVRP

SEQ ID NO: 3819 - protein, 243 aa, Houttuynia cordata
MGRGRVELKRIENKINRQVTFAKRRNGLMKKAFELSVLCDAEVALIVFSSRGKLYEFCSSSGMMKTIERYQKCNYGAPEATVSTKEIQSSYQEYMKLKARVESLQRSQRNLLGEDLGPLTGKELEQLERQLDMSLKQIRSTRTQCMLDQLSDLQRREQMLSEANKALRRRLLQLDDGSQTNPHHSWDPNAHGVGYSRHPGQPQGEVIFDPLDCEPTLHIGYQPDQITIAAPGPNGNYMQGWLP

SEQ ID NO: 3820 - protein, 198 aa, Methanothermobacter thermautotrophicus str. Delta H
MSELLIPLDKYLAAGLHIGTQQKTADMEKYIYRVRSDGLYVLDIRKTNDRVIAASKFLSKYEPDDILAVSTRQYGQEPVRKFGEVTGARTIPGRFIPGTLTNPNYAKFIEPEVLVATDPRSDSQAIIEAKQIGIPVVALCDTENLLGNVDIAIPVNNKGRKAIALVYWLLARQFLREKGILKEDEDLDIPPTEFELKI

SEQ ID NO: 3821 - protein, 308 aa, Lactobacillus johnsonii NCC 533
MNKVTIVGSINVDNIMHIKKLPQPGETIAMSEFSKAAGGKGANQAVASSRAKNETIFVGRVGDDDNGRFMLEQFKENGINVDHVAVTPNQQTGQAYILLQETGQNSIIIQHGANFDVTAEDVRNAKSQIEDSDFVIAQFETPIEATIEAFKIAREAGKITILNPAPARTDIPEELLELTDLITPNETEAESITGIKVDSEESMKKSSEIFHQMGIKGVIITIGERGSYVSYEDIEEIVPAFKVKAVDTTAAGDTFLGALSSELKPDLSNLRDGVIYASKSSSFTVQKLGAFPSIPTREVVEEALKEKN

SEQ ID NO: 3822 - protein, 304 aa, Glycine max
MASSNLFFDDIRSKVDVDPPQNEESTDVGELLNDPAQTALKPNGTVSSSVRELLECPVCLNAMYPPIHQCSNGHTICSGCKPRVHNRCPTCRHELGNIRCLALEKVAASLELPCKYQGFGCIGIYPYYSKLKHESQCAHRPYNCPYAGSECSIMGDIPYLVAHLKDDHKVDMHNGSTFNHRYVKSNPQEVENATWMLTVFSCFGQYFCLHFEAFQLGMAPVYIAFLRFMGDDDEAKNYSYSLEVGGNGRKMIWQGVPRSIRDSHRKVRDSFDGLIIQRNMALFFSGGDRKELKLRVTGRIWKEQ

SEQ ID NO: 3823 - protein, 339 aa, Mesorhizobium sp. BNC1
MRVYYDRDADLNLIKSKKVAIIGYGSQGRAHALNLKDSGAKDLAVALRPGSASAKKAEADGLKVMSVAEAAGWADLMMMATPDELQAGIYNNEIAPNIRDGAAIAFAHGLNVHFGLIEPKKTVDVLMIAPKGPGHTVRSEYQRGGGVPCLVAVHHDASGNALDLALSYACGVGGGRSGIIETTFREECETDLFGEQVVLCGGLVELIRAGFETLVEAGYAPEMAYFECLHEVKLIVDLIYEGGIANMNYSISNTAEWGEYVSGPRIITPETKAEMKRVLKDIQTGKFTAEWMQEWHSGAARFKATRRLNDSHQIEEVGEKLRAMMPWISKNKLVDKAKN

SEQ ID NO: 3824 - protein, 509 aa, Burkholderia sp. 383
MTKRRTHARAGKRAQHAPDTGRRGFIRYSAAFLGLPLLGSLAACGGGGSDGASGAASTSPGTTPGTKPSTRPVTYRLPAEDAPHASTYMAFASGADGIWLPVTPQSTDAGIDRVRADLMDVAKAIGATEPVDMLVLPADLDAARALLATASVANPDLHARYAARAAGAGGINLVPLADGFNDFWVRDTGCLFVRDTTNDNALNAVGFNFNGWGNANTDGAGMSPGATVPPEVAAASNRSKAGKFFQPFGRDNTVAGWMAQRKGASLIRSTLTLEGGAIEFDGDATAILTESSVLHVNRNPQLFDIPNGVIANATLLPTAKDTVLAELQRTLGVRKIIWLPGTATYPRSSGVGGAGGAATPAGETDITNGHVDFYARFLAPGVVACCYDASNSTGERALTDANRQRLAGETDANGRPLQIVELVPPVNFGTSAGTSLNDRQMTNFAAGYINFYACNGAIVMPKFNDAAADAAAIAAIRPYAGNRAIVQVDILGIASGGGGIHCSTREVPA

SEQ ID NO: 3825 - protein, 142 aa, Synechococcus sp. PCC 7002
  misc_feature (54)..(54): Xaa can be any naturally occurring amino acid
  unsure (1)..(142): unsure at all Xaa locations
IDILLGYCQHGIRFIRLDAVGFLWKKLQTACIHLRETHLVIQLIREILAVTYPXTVVITETNVPNRENLSYFGKGNEAHMIYNFSLPPLLLNALIRGEARHLKTWMKSMPPAQDGCAYFNFTASHDGIGLRPAEGSARRQRI

SEQ ID NO: 3826 - protein, 1660 aa, Geobacillus kaustophilus HTA426
MAKQRRRERGMIKRARRMLSLVLASVLLLALTPFQAVAAANEAGSSSALGNGAHRWTAESTASQPRTITLVGTLQDELGHTAEWDPGALATRMHDEGNGLYTFTGTLPAGTYEYKIAVNGSWDENYGAGGRNGDNLVLKLDRQTEVTFYYHDRTHAIADSTWYTAIAKEKQPRLVGTVLPAIGYEGENDGWTPGTSTALLTDDDFDSVYTFTAQVPKGSYEYKIVLGNNWNESYPQENARLTVLETTTITFFFNAKTKEVYTDYNPNGSDGVVQKDRLKHNTWDTLYRQPFGAVKAGTKVTLRLAAKKGDLTKADVYVKNATTGTAKVYTMEKVSVLGDDEYWEVAFTPSTPGVYGYKFIAQDAGTKVEYGEDTQEGQWGKAVDSRAELFQLTVYDPDYRTPDWMKEAVVYQIFPDRFFNGNPSNDNSKQQARGAQPIEHRDWSDLPDNPRLKGTSGYDGDGEWSNDFFGGDVAGIEQKLDYLQSLGVNTIYLNPIANAPSNHKYDASNYKELDPMFGSPEEFQSFVQELAKRGMHLILDGVFNHVSDDSIYFDRYHRYPTVGAYEYWEAVYDLMNEKGLSEEEARKQAEEKFKQQEQTFSPYGFHLWFNIENEKVDGRYKYQSWWGYDSLPEFKSVTGEKVPNPSELNNDALANYIFRESDSVAKSWIARGASGWRLDVANEVDPAFWREFRQELLQGSYDRGPTLKEGEQPLILGEIWDDASKYFLGDQYDSVMNYRFRGAVLDFLRNGNAEEADQRLTAIREDYPSEAFYALMNLIGSHDTARAVFLLGNGTDSFERAEFDPNYNEELGKKRLKLAAILQMGYPGAPTIYYGDEAGVSGSKDPDNRRTYPWGKEDQNLLAHYRKVGQIRQHHQTLLAHGDIKTLYAQGDVYVFARQYGRDVAIIAVNRGNEDRTVALDVASWLPNGTVLTDELHDGGKATVADGTLTVTIPALDGRMMFGTVTAEMPAAVRNLQASAVVGGVTLTWEGQASKYRVYQSTIQGAGYTLAAETNGTSVTIDSLANGTAYYFAVTAVDENGNESPKVETNRVVPHYPLTSDNVQFVTTLSDATLDLSQPQPIDVKVNIDGVTSKGAADGLQAVLQVKGPHDEAWKEYRAVYQGQDGDANVFRAAFTPLVAGTYTYRYALTTNLGEDWVYTEAKQVTFAADSSDQKAPAEAIALTPPPVESGQVHLSWQFVGKNDADAYLLVIERNGTVIHMTTSISTSFVDYGVENGTEYAYVVKLYDRAGNVTASNTVKVKPDIVMVKVIFKVKAPDYTPLDARITIPNSLNGWNTGAWEMSRNGAVTPDWQFTTEVQEGETITYKYVKGGSWDQEGLADHTPADVGDDDVSYYGYGSIGTDLKVTVHNEGNNTMVVEDRILRWIDMPVVIEEVKKQGSQVTIKGNAIKNGVLTINGERVPIDDRMSFSYTFAPASHQKEVSIHIEPSAESKTAIFNNDGGAIAKNTKDYVLNLETKQLREGKLTTPPSNGDSPGSETPSHDGGATPGNGTSPGSGGPSDGASPGGSVPPGGTAPPGNEAPPSRPPQKPSPSKPKEKPRKPTTPPGQVKKVYWDGVELKKGQIGRLTVQKPINLWKRTKDGRLVFVRILQPGEVYRVYGYDARFGGQYAVGGGYYVTDIDTHIRYETPSKEKLKLVNGE

SEQ ID NO: 3827 - protein, 438 aa, Cryptococcus neoformans var. neoformans JEC21
MSSTSPTASFRPNQRSSQSYHPQISTSTASSTASQAFSDRAPVSIARRPSRATHPPMAPPRPLTHDEALEALRAFLKERSSYDVFPVSFRLIVLDTQLKVKKALDVMLLYGVVSAPLWNTSSAQFAGMFTVQDVIHLIQYYYHTSSWEGATADVEQFRLQSIRDIEKVLHVPPPPLLYVHPLRPLYDACRYLIRTHARRLPLIDKDPQTNGEVVISVLTQYRVLKFIAMNCRDITQYLTASVQELGIGTYVSPNPDPSNTNKFWPIAAATMKTTVFDVVHMFSEQGISAVPIVDDQGKVLNLYETVDVITLVRNGAYTSLDLTIAQALKQRAVDFAGVVTCSPKDSLSAIFSLIKIRRVHRLVVVAGQDDEQPGRLVGVISLSDIMRALIGNDIPLGGAGVGAMGVDRALREEGEEGVFARSEGSKSAGTSTEGQSTE

SEQ ID NO: 3828 - protein, 268 aa, Oryza sativa
MRKRERENPCEICGHYHNSEEGERCGVCGHRSGPMAGEPPATLDPAFPTEVLKDFLFLGSYNNASRSEVLKTLSITHILNTVPDCQNLYRNSFTYHCIQDERSLDFDGANRFLEQCERETSRVLVHCMSGKNRSAAIVIGYLMKSRGWRLSQSYQWVKDRRPQVQLTDASQNQLVEYEQKLFGPNVGAPAQSSVPTESFRPLGFGFPKPAGDIQAPVFNQQPVPSIFERVNPSNIPSNFTFGAMEANTPMDDNGAPAPTSGDNPMDSS

SEQ ID NO: 3829 - protein, 470 aa, Bacillus cereus ATCC 10987
MVVGDFPIELDTVVVGAGPGGYVAAIRAAQLGQKVAIIEKANLGGVCLNVGCIPSKALINAGHRYENAMHSDDMGITAENVKVDFTKVQEWKNGVVKKLTGGVEGLLKGNKVEIIRGEAYFVDANTLRVMTEDAAQTYTFKNAVLATGSTPIEIPGFKYSKRVINSTGALSLPEIPKKLVVIGGGYIGMELGTAYANFGTEVTVVEAGDEILAGFEKAMSSVVKRALQKKGNVTIHTKAMAKGVEETETGVKVSFEVKGEIQTVEADYVLVTVGRRPNTQEIGLEQVGVKMTDRGIIEIDEQCRTNVPNIYAIGDIVPGPPLAHKASYEGKVAVEAISGHASAIDYIGIPAVCFTDPELASVGYTKKQAEEAGMTVTVSKFPFAANGRALSLNSTDGFLQLVTRKEDGLLVGAQVAGAGASDIISEIGLAIEAGMTAEDIAQTIHAHPTLGEITMEAAEVALGMPIHIVK

SEQ ID NO: 3830 - protein, 125 aa, Oryza sativa (japonica cultivar-group)
MRQAKTLKICANHLVASTTKMQEHAGSDKSCVWHAADFADGELKEEMFAIRFGSVENCKKFKDLVEEISESLAKTEGKETEEDSSAAGLLEKLSVTEKKSEEVATKEESTEAVKETDTKSAATSE

SEQ ID NO: 3831 - protein, 587 aa, Bacillus sp.
MSTALTQTSTNSQQSPIRRAWWKEAVVYQIYPRSFMDSNGDGIGDLRGILSKLDYLKLLGVDVLWLNPIYDSPNDDMGYDIRDYYKIMEEFGTMEDFEELLREVHARGMKLVMDLVANHTSDEHPWFIESRSSRDNPYRDWYIWRDPKDGREPNNWLSYFSGSAWEYDERTGQYYLHLFSRRQPDLNWENPKVREAIFEMMRFWLDKGIDGFRMDVINAIAKAEGLPDAPARPGERYAWGGQYFLNQPKVHEYLREMYDKVLSHYDIMTVGETGGVTTKDALLFAGEDRRELNMVFQFEHMDIDATDGDKWRPRPWRLTELKTIMTRWQNDLYGKAWNSLYWTNHDQPRAVSRFGNDGPYRVESAKMLATVLHMMQGTPYIYQGEEIGMTNCPFDSIDEYRDVEIHNLWRHRVMEGGQDPAEVLRVIQLKGRDNARTPMQWDDSPNAGFTTGTPWIKVNPNYREINVKQALADPNSIFHYYRRLIQLRKQHPIVVYGKYDLILPDHEEIWAYTRTLGDERWLIVANFFGGTPEFELPPEVRCEGAELVIANYPVDDSEAGGPAAAGAPHRFRLRPYECRVYRLLGWH

SEQ ID NO: 3832 - protein, 325 aa, Zea mays
MASNGDKGLIVSFGEMLIDFVPTESGVSLAEAPGFLKAPSGAPANVAIAVSRLGGRSAFVGKLGDDEFGHMLAGILRKNGVDDQGINFDTGARTALAFVTLRADGDREFMFYRNPSADMLLRPDELNLDLIRSAKVFHYGSISLIVEPCRSAHLKAMEVAKEAGALLSYDPNLREPLWPSKEEAKTQIMSIWDKAEIIKVSDVELEFLTGSNKIDDETALTLWHPNLKLLLVTLGEKGCRYYTKTFKGAVDPFHVNAVDTTGAGDSFIGALLNQIVDDRSVLEDEERLRKVLRFANACGAITTTKKGAIPALPSDAEVRSFLEKK

SEQ ID NO: 3833 - protein, 825 aa, Triticum monococcum
MAFSPRSPWSRSKKPDIYSTVVVHDDEDNARGGGAARAEDDDDDDPSALPPLLQRLPKDFGGASFDDDDDPYSSDLDDASLSATVVIKRGAPASTSSSSRSPFLDLRRSSPRAAEADPFSTFVVHGTARSGGASSPRESVSGTFIRHSGGPPSPRESVSGTFIRHTRGSSSPHESFSGTFIHHTSSASSPRDSASGAGAGFGSSFITPSSGQAEEDRQPSLLMQQQQSRRKASMSSLPDSVTREDPSTKYELLHELGKGSYGAVYKARDLRTQELVAVKIISLTEGEEGYEDIRGEIEMLQQCSHPNVVRYFGSYQGEEYLWIVMEYCGGGSVADLIGITEEPLDEPQIAYICRETLKGLAYLHTIFKVHRDIKGGNILLTEQGEVKLGDFGVAAQLTRTMSKRNTFIGTPHWMAPEVIQESRYDGKVDVWALGVSAIEMAEGMPPRSTVHPMRVIFMISSEPAPMLEDKEKWSLLFHDFIAKCLTKDARLRPPAIEMLKHKFIEKCNTGASKMLAKIKEAKIIRETAVQNQLPDSDDAMDATVRINEDYGETVPTNSQSTHETKNDGSGGDFGTMIVHPEDGDEAAESSIFPRAEFIPGLGSINSFTHDPKRAELISKFWAESTAESDASKERDLYGLPDIQEPKTMPRSTGTVKHHKGVEGTVLRHDITASPGVASTMNKLSSSPSRKAFSVQDKLWSIYAAGNTVPIPFLKAIDISPLALVSDSVAGNGPAGSSTTDALEAVRELFSGDGQAKKGRKGQNEAPLPPGVHDRLTTSPTLMNLAQALAYHKTCYEDMPLQDSQATEEQQTIQNLCDTLRTILRL

SEQ ID NO: 3834 - protein, 191 aa, Triticum aestivum
  misc_feature (37)..(37): Xaa can be any naturally occurring amino acid
  misc_feature (55)..(55): Xaa can be any naturally occurring amino acid
  misc_feature (185)..(185): Xaa can be any naturally occurring amino acid
  unsure (1)..(191): unsure at all Xaa locations
MLARSPALPFPFPTATEASASPAFFQPCHLLGFPNCXFSNKKHGTRLTVQPNIQXGKAQHASRIHTRWRALSSDPAQAAAVVDAGDSKTWEECKQILTSLNFSTEDAEKMLKKAFGWLHSPYWTDERKKEVPSAEVVNGVLDYVRGLGLSDDDLYKLLKKFPEVLGCDLESEVKLNVGKLDSDWXINGQTL

SEQ ID NO: 3835 - protein, 391 aa, Rubrobacter xylanophilus DSM 9941
MKGAAHARSEREPGVEVSGGAAFAPGLEGVVATRTRLSMVDGAAGRLVIAGFPVEELAGRASFEETLYLLWNGVLPDAGRLEGLRGDLAARRALPEAAGEVLEAAVAGGAAPIDALRMAAGTLAPSGNDRDDALTSVAAFPTIVAACWRLSQGREPVEPDPGLSHAANYLYMLSGEVPGEERVRALETYLNTVSDHGMNASTFAARVISSTGSDLISAVVGAIGALKGPLHGGAPGPALDVVFEIGEPGRAEGVLRERLDRGERLMGFGHRVYKVRDPRADVLAGAAERLYASDADEELYRLALEVERTALRLLEEYKPGRNLDTNVEFYTALLLHGLGLPTGLFTPTFAVGRVAGWTAHCLEQRETGRLIRPQSEYVGPEARKWVPLEER

SEQ ID NO: 3836 - protein, 246 aa, Houttuynia cordata
MGRGRVELKRIENKINRQVTFAKRRNGLLKKAYELSVLCDAEVTLIIFSNSGKLYEFCSSSSMMKTLERYQKCSYSMPEATGPSRETEKSYQEYLKLKGKVEHLQRIQRNLLGEDLGPLSSKELEQLENQLEQSLRQIRSTKTQSLLDQLSDLRRKEQQLLESKKILNKKLAEHGPENPLQLSWQSCGQSNPYSSQPAHSEAFFQPLDCNPTLQIGYPSVGQEQIMAAPATAAPQNANGFIPGWLV

SEQ ID NO: 3837 - protein, 477 aa, Arabidopsis thaliana
  misc_feature (187)..(187): Xaa can be any naturally occurring amino acid
  misc_feature (319)..(319): Xaa can be any naturally occurring amino acid
  misc_feature (418)..(418): Xaa can be any naturally occurring amino acid
  unsure (1)..(477): unsure at all Xaa locations
MQIFVKTLTGKTITLEVESSDTIDNVKAKIQDKEGIPPDQQRLIFAGKQLEDGRTLADYNIQKESTLHLVLRLRGGMQIFVKTLTGKTITLEVESSDTIDNVKAKIQDKEGIPPDQQRLIFAGKQLEDGRTLADYNIQKESTLHLVLRLRGGMQIFVKTLTGKTITFGGWRVLDTIDNVKAKIQDKXEGIPPDQQRLIFAGKQLEDGRTLADYNIQKESTLHLVLRLRGGMQIFVKTLTGKTITLEVESSDTIDNVKAKIQDKEGIPPDQQRLIFAGKQLEDGRTLADYNIQKESTLHLVLRLRGGMQIFVKTLTGKTXITLEVESSDTIDNVKAKIQDKEGIPPDQQRLIFAGKQLEDGRTLADYNIQKESTLHLVLRLRGGMQIFVKTLTGKTITLEVESSDTIDNVKAKIQDKEXVSLRTSSVSSSLESSLRMDVHWPTTTSRRSLPFTWSSVFVEVSKSRLCYALRSSMSRFC

SEQ ID NO: 3838 - protein, 547 aa, Ralstonia metallidurans CH34
MAAKDVVFGDAARAKMVEGVNILANAVKVTLGPKGRNVVLERSFGGPTVTKDGVSVAKEIELKDKLQNMGAQMVKEVASKTSDNAGDGTTTATVLAQSIVREGMKFVAAGMNPMDLKRGIDKAVGAAVEELKKLSKPTTTSKEIAQVGAISANSDASIGERIAEAMDKVGKEGVITVEDGKSLADELEVVEGMQFDRGYLSPYFINNPEKQVVQLDSPFVLLFDKKVSNIRDLLPVLEQVAKAGRPLLIIAEDVEGEALATLVVNNIRGILKTAAVKAPGFGDRRKAMLEDIAILTGGTVIAEEIGLTLEKATLQDLGQAKRIEIGKENTIIIDGAGDASAIEGRVKQIRAQIEEATSDYDREKLQERVAKLAGGVAVIKVGAATEVEMKEKKARVEDALHATRAAVEEGIVPGGGVALLRARAAIAGLHGENPDQNAGIKIVLRAMEEPLRQIVLNAGEEASVVVAKVIEGKGNYGYNAASGEYGDLVEMGVLDPTKVTRTALQNAASVASLMLTTDCAVAESPKEESAPAMPGGMGGMGGMEGMM

SEQ ID NO: 3839 - protein, 247 aa, Houttuynia cordata
MGRGRVELKRIENKINRQVTFSKRRNGLLKKAYELSVLCDAEVALIIFSNRGKLYEFCSSSSMMTTLERYQECSYSMPEATGPTRETEKSYQEYLKLKGKVELLQRTQRNLLGEDLGPLSSKELEQLENQLEHSLRQIRSTKTQALLDQLSDLRRKEQQMLESNKILKKKLAEHGPENLLQLAWQSCGQSNPYSRQPAHSEAFFQPLDCNPTLQIGYHPVGQEEITMAAPAIAPPQNVNGFIPGWMV

SEQ ID NO: 3840 - protein, 426 aa, Rubrobacter xylanophilus DSM 9941
MEPGDRSGGRYLTAREAAEELGVSVRTLYAYVSRGLVRSEAAGGGRRGRRYRAEDVRRLRERKEHRRDPARAAEGALDWGMPVLESGISLIADGRLYYRGRDAVALSGERSLEQVAQLIWTGSMAPGDRAAVPGLFRAAARSVAGCPRLPLGGARPVLDELGLALQAAASRDPAAYDLRPAAVVRTGARILRLLVGAATGEQDAGETAARALQRRWVPRDEGAAEILDRALVLCADHELNVSSFTARCVASAGATPYAAVVAGLAALGGVRHGGGTERVEAFLAEVEAAGDPREVVASRLRRGEAVPGFGHRLYPEGDPRAAALLAALAEGYPGSEALGLAEGAAEAAGALVGERPNVDFALAVLARVLGLPPGGALALFALGRAVGWVGHAIEQYASGAPIRPRARYVGEPPPRPESGPSPARSG

SEQ ID NO: 3841 - protein, 471 aa, Rubrobacter xylanophilus DSM 9941
MADKFDLVIIGGGNAGYIPAIRASQLGMSVALVERREGGHLGGTCLNLGCIPTKALLQTAAMLHDARNGEEFGVKVGDVRFDYRQAAKRRDQVVNQLRRGVAGLMKKNKVSVYNGTGSFIQPRRIKVELNDGGTEELEAENVLIATGSAVNTLPGLEFDGEKVISSDDVVTENDGYPESVIILGSGAVGVEFASMYNDFGTEVTIVEILDRLVPLEDPEVSAELEKQFEGRGIRCLTGTKADPGSLDKSGDGVKIKVAGEGGEETLEAEKLLVAVGRKTVTEELNLEATSVKTDDRGIIQVDEFYRTDEPGVYAAGDVIGGYWLAHAAGHEGIVAVEHMAGKDPMPLDQNLIPRVTFCRPEIASFGLSEEQAREEGYEIKVGKFPFRAIGKALIEGEPNGFLKVVADAETDLILGMHAIGPHVTELIAEGVFAKLVEGTPEEIGMAVHAHPSLAEIVGEAAMAVDGHAIHF

SEQ ID NO: 3842 - protein, 439 aa, Oryza sativa
  misc_feature (29)..(29): Xaa can be any naturally occurring amino acid
  unsure (1)..(439): unsure at all Xaa locations
MNIDMANCGDKALISEDTAHQISAGLNKXDPWYQVGFVLTTGVNSGYVLGYSGSVMVPLGWIGGTCGLILAAAISLYANALLARLHEIGGKRHIRYRDLAGHIYGRKMYSLTWALQYVNLFMINTGFIILAGQALKATYVLFRDDGVLKLTYCIALSGFVCALFAFGIPYLSALRIWLGFSTFFSLIYITIAFVLSLRDGITTPAKDYTIPGSHSARIFTTIGAVANLVFAYNTGMLPEIQATIRPPVVKNMEKALWFQFTVGSLPLYAVTFMGYWAYGSSTSSYLLNSVKGPVWVKAMANLSAFLQTVIALHIFASPMYEFLDTKYGSGHGGPFAIHNVMFRVGVRGGYLTVNTLVAAMLPFLGDFMSLTGALSTFPLTFVLANHMYLMVKRHKLSTLQISWHWLNVAGFSLLSIAAAVAALRLIMVDSRTYHLFADL

SEQ ID NO: 3843 - protein, 223 aa, Houttuynia cordata
  misc_feature (95)..(95): Xaa can be any naturally occurring amino acid
  misc_feature (212)..(212): Xaa can be any naturally occurring amino acid
  unsure (1)..(223): unsure at all Xaa locations
IQAGAKKVVISAPSKDAPMFVVGVNEKEYKPDINIVSNASCTTNCLAPLAKVLNDRFGIIEGLMTTVHSITATQKTVDGPSMKDWRGGRAASFNXIPSSTGAAKAVGKVLPQLNGKLTGMAFRVPTVDVSVVDLTVRLEKKASYEQIKAAIKEESEGKMKGILGYTEDDVVSTDFIGDKRSSIFDAKAGIALNDNFVKVVSWYDNEWGYSSXVIDLIRHIASV

SEQ ID NO: 3844 - protein, 630 aa, Glycine max
MWRCIARGLRGPASTRSTSNHSLGSQLSRFFSSGANSSYTVVDHTYDAVVVGAGGAGLRAAIGLSEHGFNTACITKLFPTRSHTVAAQGGINAALGNMTEDDWRWHMYDTVKGSDWLGDQDAIQYMCREAPKAVIELENYGLPFSRTEDGKIYQRAFGGQSLNYGKGGQAYRCACAADRTGHALLHTLYGQAMRHNTQFFVEYFALDLVMNSDGTCQGVIALNMEDGTLHRFKAASTILATGGYGRAYFSATSAHTCTGDGNAMVARAGIPLEDLEFVQFHPTGIYGAGCLITEGSRGEGGILRNSEGERFMERYAPTAKDLASRDVVSRAMTMEIREGRGVGPLKDHIYLHLNHLPPDVLKERLPGISETAAIFAGVDVTKEPIPVLPTVHYNMGGIPTNHYGEVVTIKGDNPDAVVPGLMAAGETACASVHGANRLGANSLLDIVVFGRACANRVAEIRRPGEKQKPLEKDAGQRTIAWLDKLRNSNGSLPTSQIRLNMQRVMQTNAAVFRTQETLEEGCQLIDKTWESFHDVQVKDRSLIWNSDLIETIELENLLINACITMYSAEARKESRGAHAREDFKVRDDGSWMKHTVGFWENEKVRLDYRPVHLNVLDDEVESFPPKARVY

SEQ ID NO: 3845 - protein, 141 aa, Arabidopsis thaliana
  misc_feature (61)..(61): Xaa can be any naturally occurring amino acid
  misc_feature (68)..(68): Xaa can be any naturally occurring amino acid
  misc_feature (74)..(74): Xaa can be any naturally occurring amino acid
  misc_feature (131)..(131): Xaa can be any naturally occurring amino acid
  unsure (1)..(141): unsure at all Xaa locations
EVIMKARKPALETKNITKDIHDCKRDSEALYLQLGIRGHNVEDTQIAYSLNEEQEGRRRPXDDHKSFXTLLADXHGYCGYIRMKRKKKYRVPLCARDPKFREHTRPMTEDKEPRQLMRKTASLMKLYHKMXGKLNQRCTMA

SEQ ID NO: 3846 - protein, 386 aa, Desulfitobacterium hafniense DCB-2
MKYAKWMKNVGEGFIGEMLRAAQNPAMISFAGGLPALDLFPTQDLQAAFQKVFEEQGNAALQYAQTAGYPELRSWVASQHQRSQRPARTAEVIITTGSQQGLSLLAQTFLDPGDTVFLETPTYLGAIQAFEGFRADFQMIPCDEEGILPDELEKALAFTTPKFLYLIPNYQNPSGRVMGLERRKELLKVSQKYGLLLVEDNPYGELRYEGEPIPHLAELGENVIYLGTFSKVLAPGLRIGYVLADEDIIMHLEQTKEGVDLHSNNLTQRAIYEYLQKDLLPDHILKLREVYNVRRKAMVESIQTYLGDRVEMKVPAGGLFLWAKLMGVNNSFDYVQDMIRQNVLYVPGALFYADGRVSNEMRLNYSCSTPEIIEEGMRRLARGLNQ

SEQ ID NO: 3847 - protein, 478 aa, Bacillus anthracis str. 'Ames Ancestor'
MRKKVMMSLMLMTFLSAVEGTIVSTAIPRITSDLSGVELVSWVYAIYMLATAVSTPIYGKLADLFGRKKVLLIGATIFLVGSALCGVVTSMEQLIFFRALQGIGAGAVMPITMTIIGDLYSEAKDRAKAQGWMSAVWGVSGVIGPLVGGFLVDSLSWRYIFFLNVPFGIIACLMIAIYYKESIKPAKHHIDYLGATVFSLSMIALLYALLTGSSKQNWGDVTIIGLLIFAVVSFIIFLFIEKKSPEPLIPLALFSNRTLSTINILTLIAGAMIISITMYLPIWSQGVLGKNATEAGLILMPIPVMWTFGAIFSGNLVGKLKTKQIILLGASILSVATFLLFTLSTNSPSFLIYVAVGLFGLGMGLVTPIYMVTIQAAVPAHTRGTAVGLNTFINTFSQTLGAAVFGTIFNTMIHARGIKNLDLVSGGHGGATANVVTESQSALASSVHVIYMSTFVLAVCTLIIAWLLLKPATQTSEQ

SEQ ID NO: 3848 - protein, 126 aa, Haemophilus influenzae 86-028NP
MAYSEKVIDHYENPRNVGSLDKKDSNVGTGMVGAPACGDVMQLQIKVDDNGIIEDAKFKTYGCGSAIASSSLITEWVKGKSLEEAGAIKNSQIAEELELPPVKVHCSILAEDAIKAAIADYKAKQG

SEQ ID NO: 3849 - protein, 452 aa, Clostridium perfringens str. 13
MEKQNLKNTEVNLIYGVDDDLDLPKKVLFGLQHIFAAFGGIIVVPLVIATSLGFDSKVTTALISASILGSGLATIIQAKGVGKVGARVACIMGTDFTFVSPAISVGSVLGLPGIIGATILGSLFEVILSFFIKPLMKFFPPLVTGTVVALIGLTLLPVSIDWAAGGAGSANYASLENLAVAMFVLVITLLLNNYGKGMISSASILIGIVVGYIVCIPLGLVDFTPVKEASWLSFPKILEFGVTFDAKAVMAFIPAYFVATIGTVGCLKAIGETSNIDIGDKRVAAGVLSDGVGSALGGLVGSCPNTSFSQNIGIISLTKVASRHVAVMAGILLVILGFLPKVAAIITGIPNPVLGGVGIMMFGTVAAAGIRTLSNIKLTERNLLIIAISMGLGLGVTFRPDVIHNLPEAIRMIFSSGISTGTIAALILNAVLKESPTSMEFENMYDEEKKAS

SEQ ID NO: 3850 - protein, 457 aa, Desulfotalea psychrophila LSv54
MCRYFVSFRICSRFFKVDTMSFTKKEQLKDPNYLPPLHLAIPLGIQHVLAMFISNITPAIIISLAAGFTFGSPEMVYMIQMVMTFAGIATLLQTVGLGPVGARLPIVQGTSFAFLPIMIPLVKIAGISALYGSIMLSGIFHFFLGTVIGRIRNFLPPLVTGIVVLTIGLSLIPIGIQYAAGGVPLMGTEEFGSMQHWGLSLTVLFVTLILKFFGRGMLSTASVLIGLIVGYLVAISMGMVNFSHIENAAWFAMPTPLHFGFELSLSSVFAMSLMAFVSAIETVGDVSGITQGGAGREATEKEIAGATMADGLGTTLGAFFGALPNTSFSQNVGLVSMTGVMSRHVVTIGALFLIMAGLVPKVGAVISAMPIAVLGGSVIVMFGMVISAGINMLSDVVWNKRNMLILALALSIGLGFQAVPEALQHLPGTTKILLTSGILPAALIAIILNMILPEELG

SEQ ID NO: 3851 - protein, 246 aa, Zea mays
  misc_feature (235)..(235): Xaa can be any naturally occurring amino acid
  unsure (1)..(246): unsure at all Xaa locations
MCGILAVLGCADDTQGKRVRVLELSRRLKHRGPDWSGMHQVGDCYLSHQRLAIIDPASGDQPLYNEDKSIVVTVNGEIYNHEQLRAQLSSHTFRTGSDCEVIAHLYEEHGENFIDMLDGVFSFVLLDTRDNSFIAARDAIGVTPLYIGWGIDGSVWISSEMKGLNDDCEHFEIFPPGHLYSSKQGGFKRWYNPPWFSEVIPSVPYDPLALRKAFEKAVIKRLMTDVPFGGLLSGXLDSSLGAAVTV

SEQ ID NO: 3852 - protein, 634 aa, Listeria monocytogenes str. 4b H7858
MAYMLFAKHLVFNPANPEWFNRDRFVLSAGHGSALLYSMLHLFGYDVKMEDLKQFRQLDSLTPGHPEFGWTAGVDATSGPLGQGIGMAAGMALAESHLAAEYNQPNYPIVDHYTYAICGDGDLMEGVASETASLAGHLGLGKLIVLYDSNDICLDGDLSATFSENAADRFRAYGWQVLRVEDGNNLAAIQEKIVQAKLETSKPTLIEVKTVIGYGAPTKAGSSASHGAPLGEKEANGAKEHYEWAEEPFTVPAEVRDYLRNYKARGEKLEGAWNTMLANYKKEFPELASQLDRVLAGEVAADWNANLPTFEAGTNVATRSASGKMINAIAAELPELFGGSADLGCSNKTFIDASPAYSIQDPAGKNIWFGVREFAMGAMLNGMALHSGLRVFGSTFFVFSDYVRPAMRMAALMQLPVTYVFTHDSIAVGEDGPTHEPIEQLASLRAMPGLTVIRPADAKETRAAWEIAATNTNGPIALVLSRQDLPVLENAQEEVDAGVDKGAYIVAPANSSKPDAIIIATGSEVSLAIEAKAELAKKDIDVSVVSLSSWERFEKTTDAYKESILPKEVTARFAIEAGATFGWKEFIGSEGDMLGIDHFGASAPAKDLFNAYGFTPENVADRVETVIAKAGVRV

SEQ ID NO: 3853 - protein, 199 aa, Arabidopsis thaliana
MVQTKKFRGVRQRHWGSWVAEIRHPLLKRRIWLGTFETAEEAARAYHEAAVLMSGRNAKTNFPLNNNNTGETSEGKTDISASSTMSSSTSSSSLSSILSAKLRKCCKSPSPSLTCLRLDTASSHIGVWQKRAGSKSDSSWVMTVELGPASSSQETTSKASQDAILAPTTEVEIGGSREEVLDEEEKVALQMIEELLNTN

SEQ ID NO: 3854 - protein, 330 aa, Listeria monocytogenes str. 4b H7858
MELRDVEEPQVYGDKVKIKVAFTGICGSDIHTFKGEYKNPTTPVTLGHEFSGVVVEVGPDVTSIKVGDRVTSETTFETCGECIYCKERDYNLCSNRRGIGTQANGSFAEFVLSREESCHVLDERISLEAAALTEPLACCVHSALEKTTIRPDDTVLVFGPGPIGLLLAQVVKAQGATVIMAGITKDSDRLRLAKELGMDRIVDTLKEDLAEVVLGMTDGYGAERVFDCSGAVPAVNQGLPLTKKKGDFVQVGLFAEKKNAIDEESIIQREIAYIGSRSQKPSSWILALDLLANGKINTDKMITKVYGLDDWREAFEAVMAGNEIKVLVKS

SEQ ID NO: 3855 - protein, 166 aa, Glycine max
  misc_feature (155)..(155): Xaa can be any naturally occurring amino acid
  misc_feature (161)..(161): Xaa can be any naturally occurring amino acid
  unsure (1)..(166): unsure at all Xaa locations
IPPQIPRREARRSGSPRQRRPRPQGRQSRQTRNRRRNRSPKRAEARKKLHRALEAMAEKEALDMKAALESKGEVEFQVCTLGKNVTIKKSMLTIQKEIKKEHQRVFTPSVIEPSFGIGRIIYCLFEHTFYTRPSKAGDEQLNVFRFPSLVAPIRXTVFPLXQNQKY

SEQ ID NO: 3856 - protein, 108 aa, Bacillus subtilis
MLKLHIHTIEEVISLLKPLGDRVVIELVESEEKTASGIVLPDSAKEKPQEGKIVAAGSGRVLESGERVALEVKEGDRIIFSKYAGTEVKYEGTEYLILRESDILAVIG

SEQ ID NO: 3857 - protein, 684 aa, Agrobacterium tumefaciens
MATKVKENEEAENERDGATDGPLLDLSDDAVKKMIKAAKKRGYVTMDELNSVLPSEEVTSEQIEDTMAMLSDMGINVIEDEDAEEAAPAEDDGDSDNEESEGGELAPSGGTALATAKKKEPTDRTDDPVRMYLREMGSVELLSREGQIAIAKRIEAGRETMISGLCESPLTFQALIIWRDELNEGTTLVREIIDLETTYSGPEAKAAPQFQSPEKIEADRKAAEEKEKTRRLRGPTGDEDVTDVGGDGLPPEEEEEDDDESNLSLAAMEAELRPQVMETLDTIADTYKNVRKLQDQQVEARLACTGTLSSGQERRYKELKDQLITAVKSLSLNQNRIDSLVEQLYDISKRLMQNEGRLLRLAESYGVKRDSFLEQYHGAELDPNWMKSITNLAARGWKEFAREESNTIREIRQEIQNLSTETGISIAEFRRIVSMVQKGEREARIAKKEMVEANLRLVISIAKKYTNRGLQFLDLIQEGNIGLMKAVDKFEYRRGYKFSTYATWWIRQAITRSIADQARTIRIPVHMIETINKIVRTSRQMLHEIGREPTPEELAEKLAMPLEKVRKVLKIAKEPISLETPVGDEEDSHLGDFIEDKNALLPIDAAIQGFLRETTTRVLASLTPSEERVLRMPFGIGMNTDHTLEEVGQQFSVTRERIRQIEAKALRNVKHPSRSRKLRTFLDS

SEQ ID NO: 3858 - protein, 140 aa, Glycine max
  misc_feature (125)..(125): Xaa can be any naturally occurring amino acid
  unsure (1)..(140): unsure at all Xaa locations
MADQETPVAVEAPTPVLGEPMDLMTALQLVMKKSGAHDGLVKGLREAAKAIEKHAAQLCVLAEDCDQPDYVKLVKALCSEHNVHLVTVPSAKTLGEWSGLCKIDSEGKARKVVGCSCVVVKDYGXESEGLNIVQEYVKSH

SEQ ID NO: 3859 - protein, 619 aa, Corynebacterium glutamicum ATCC 13032
MNEFDQDILQEIKTELDELILELDEVTQTHSEAIGQVSPTHYVGARNLMHYAHLRTKDLRGLQQRLSSVGATRLTTTEPAVQARLKAARNVIGAFAGEGPLYPPSDVVDAFEDADEILDEHAEILLGEPLPDTPSCIMVTLPTEAATDIELVRGFAKSGMNLARINCAHDDETVWKQMIDNVHTVAEEVGREIRVSMDLAGPKVRTGEIAPGAEVGRARVTRDETGKVLTPAKLWITAHGSEPVPAPESLPGRPALPIEVTPEWFDKLEIGSVINVPDTRGSRRAFTVTRVFDGAVLAEGPQKAYISNGTLLEHNYDRSRVYGIPAVVQRINLKVGDRLILTDEELTYDPSLGSGRTPRISCTLPQAVDAIKVGHRVLFDDGAIAAVCIDKTSTADGHNDVELEVTHARPQGVNLAAYKGINLPDSELPLPSLTEEDLQHLRFVVKYADIAAISFIRNVADVEYLLQALADIGDPVAVERLGLVLKIETIPGYEGLAQILLTGMRHENFGIMIARGDLAVELGFDRMAEVPQLIMALAEAAHVPTILATQVLENMAKNGLPSRAEITDAAMALRAECVMLNKGPHINDAIKVLTEMSRKLGASQRKSRLLLRKVKSWEE

SEQ ID NO: 3860 - protein, 316 aa, Solanum tuberosum
MASLTVPAEVPSVAEDCEQLRSAFKGWGTNEKLIISILAHRNAAQRKLIRQTYAETFGEDLLKEIGTGRNLTHDFEKLVLIWTLDPSERDAYLAKEATKRWTKSNFVLVEIACTRSPKELVLAREAYHARNKKSLEEDVAYHTTGDHRKLLVPLVSSYRYGGDEVDLRLAKAESKVLHEKISDKAYSDDEVIRILATRSKAQLNATLNHYKDEYGEDILKQLEDEDEFVALLRATIKGLVYPEHYFVEVLRDAINRRGTEEDHLSRVIATRAEVDLKTIANEYQKRDSIPLGRAIAKDTGGDYENMLVALLGQEEE

SEQ ID NO: 3861 - protein, 150 aa, Staphylococcus epidermidis
ILFGGGVCANVNLKRSAGNGADWIVIAFGWGLAVTMGVYAVGTFSGAHLNPAVTVALAMDGGFSWAQVPGYIVCQMLGGIVGGAFVWLMYLPHWKVTEDPAVKLGVFSTAPAIKNYFANFLSEIIGTMALTLGILFIGVNKIADGLNPII

SEQ ID NO: 3862 - protein, 428 aa, Oceanobacillus iheyensis HTE831
MTLNQSIDAYKEAVDLMPGGVNSPVRAFKSVGMNPIFMKEGKGSKIVDIDNNEYIDYVLSWGPLILGHSDERVVKKLQDITAKGTSFGAPTLLENDLAKLVIDRVPSIEMVRMVNSGTEATMSAIRLARGYTDRDLILKFEGSYHGHGDSLLIKAGSGVATLGLPDSPGVPENIAKNTITVPYNDTDSLKLAFENYGDRIAAIIMEPVCGNMGVVPPKDGFLQYVRHITEENGSLLIFDEVMTGFRVGYHCAQGHYDVTPDLTCLGKVIGGGLPVGAYGGKREIMEQIAPTGPIYQAGTLSGNPLAMTAGYETLSSLSEESYEDINNKVDTLVNGFRDAADKFDIPIHINRAGSMVGVFFTDEEVINFETAQTSNLDYFAQYYRSMVNEGIFLPPSQFEGLFLSTAHTDDDIEKTVKAIHKAFEQIEK

SEQ ID NO: 3863 - protein, 492 aa, Triticum aestivum; identical to SEQ ID NO: 1298

SEQ ID NO: 3864 - protein, 605 aa, Glycine max
HASVRLVPLTRNEGDFEDDAVGGINGSENKDKSPSFAKTLTQSDANNGGGFSVPRYCAETIFPRLDYSADPPVQNILAKDVHGETWKFRHIYRGTPRRHLLTTGWSSFVNHKKLVAGDSIVFLRAEKDDLRVGIRRAKRGIGIGGGPEAPAGWNSGGGIRPMPYGGFSAFLREEDSQLLRNGLSPNAKGKVRPEAVIEAATLAANMQPFEVVYYPRASAPEFCVKANLVRAALQVRWCPGMRFKMPFETEDSSRISWFMGTISSVNFADPRWPNSPWRLLQVTWDEPELLQNVKRVSPWLVEIVSNMPTIHLSHYSTQQKKPRFPQHPDFSFDGQISLPAFPSNFLGPSNPFGCLAESTPAGIQGARHANYGISLSNLHFNKLQSGLFQAGFPPLDHTASPVLRVSSNNAATMQKVGTGDNVSCLLSMSTATQPSKKVDDVKAPQLVLFGQTILTEQQISLNTSAKTDPTRNNSFDGNADKMCKFSDGFGYALHPQGSSLERLQWYKDQQKETMASLETGHCKVFMESEDIGRTMDLTMLGSYDELYRKLADMFGIEKSVVLSHMLYRDTTGAVKHIGDEAFSEFTKTARRLTILMDSNSDGRGI

SEQ ID NO: 3865 - protein, 375 aa, Lycopersicon esculentum
TRLIAKGQEPVQKNKTKPLVTKGVAARKVGVPAKAEAIKKDYVKAKAGTISGICPEEDVKTIEKIPLKERKVRKSGKTLTSILTARSKAACGLSNKPRSQIVDIDAADIDNHLAGVEYVEDIYKFYKLTEDENRPCDYMDSQPEINDRVRAILVDWLIEAHKRFELRPESLYLTVNIMDRFLSEEPVPRRELQLLCISSMLIASKYEEIWAPEVNDFLTITDNAYVRDQILLMEKVILGKLEWYLTVPTPYVFLVRYIKAAVPSDQEMENMTFFLAELGLMNYTTVISYCPSKIAASAGYAARSTLNRSPRWTDTLKHHTGYTEDQLRECAKQLVSFHFGAAENKLKAVYRKFSSPDRCAVALLPPARDVHIGSS

SEQ ID NO: 3866 - protein, 279 aa, Streptococcus pyogenes MGAS315
MVTTVKMTSGYEIPVLGFGTYQAADGEEAYQSTLAAIKADYRHIDTAAIYKNEESVGRAIKDSGVLREDLFITTKLWNDAHSYEGAKDALAASLDRLGLDYVDLYLIHWPNPKALRNTWKEANAQAWQYMEEAVEAGLIKSIGVSNFMVHHLEALQETAKITPAINQIRLAPGCYQKEVVDYCKANEILLEAWSPLGQGEIFDNETMQQLANKYDKTVAQVALAWSLAEGFIPLPKSVHDERIKENMAIFDVSLTPEDKKTIRYLSGMSAISNPDTTSF

SEQ ID NO: 3867 - protein, 328 aa, GIBBERELLA ZEAE PH-1
MDNYQRIEKVGEGLSQLITHLIHLLTQLSGTYGVVYKARDLGHSGRIVALKKIRLETEDEGVPSTAIREISVLRELNHANVVSLLNIVHADGHKLYLVMEFLDLDLKKYMDSLPVTDGGRGKPLPTGTATVIRNLGMSDKVVEKFMLDLCQGIKYCHSRRILHRDLKPQNLLIDKEGNLKLADFGLARAFGVPLRSYTHEVVTLWYRAPEVLLGGRQYSTGVDMWSVGTIFAEMCSRKPLFPGDSEIDEIFKIFRTLGTPDEDAWPGVTAYPDFKPSFPKWQRDFSTPLCPNLNEQGLELLDYLLICDPVTRISAKAALNHPYFDDIL

SEQ ID NO: 3868 - protein, 407 aa, Triticum monococcum
MAAVAMADGGGKKPYVVAVAIQAINTGTFVVSKAAFDSGMYTYIFVFYRLAAATALLVPIALINCACRRSQSTTSTPAQAMSCRLLFKLFLCAFLGSAGLTLQALTKFVKKSCQEVGGFTSLLSSSLLQGKAEHLHPQVYHASLKQTSATVASAATNSMPVVTFLLALVLRMETIKLRRRSGLGKLAGVALCLAGVLVIAFYVGPSIRPLAHHPVFAHKTQSVGNGAWIRGTFLLILSCTTWSLWITLQVPLLIEYPNKLMATAMQCLFSALQSFVVAVVVEKDFTKWKLGLDIGLLAAFLGTGALMYLQAWCAEMSGPVFVVMWSPLAFIFTIFSSSFFLGEVVHLGSILGGILLVGGLYSVLWGKSNERKNMILPVMPEKSQGQGDGDGATTQEKHGETNLTSQV

SEQ ID NO: 3869 - protein, 541 aa, Desulfitobacterium hafniense DCB-2
MASTDLSFKIAAAEEEFEQIHRLNYKTFVKEIPQHEVNSQERLVDPFHQENTYCIALHRGKLMGMLACRDKRPFSIDRKLADLDSYLPPYSSICEIRLLAVEKEVRGTRVLLGLMSLLFEHCQKKGYDLAVISGTVRQLKLYNHLGFKPFGPLVGTAAASYQPMYMTREQMSQKLIELFKAFQSKDGRRDSVNFLPGPVKLRREVQEALGRPPRSHRSEEFLAVMARIKEQLAQWLKVHYVQILLGSGTLANDVVGAYLRTALGQKKGLVLSNGEFGNRLLDQARRAGLNFEDYSIPWGKGFDYEDIEKHLSKGEGSIQWLWAVHLETSTGVLNDLPRLKALCHRQRIPLAVDCVSSIGAVPVDLSGVYLATGVSGKALCSYPGLSFVFYNQALEGGRLPRYMDLGLYQQSEGVPFTQSSNLIYALEQALHYAAERELCINQRQGEWLRAKLQELGFQVLALPEDAAPNILTLVLPREVPSLECGELLEEEGYVLSYRSAYLFQRNWVQICLMGEYEPEQIYAFPEMLAECMKKCGLRKGK

SEQ ID NO: 3870 - protein, 433 aa, Haloarcula marismortui ATCC 43049
MRDTIPVTILSGSLGAGKTTLLNHLLTEAGDRDIAVLVNDMGTVNVDAELIAEGSELDVDDGVAELSNGCICCELQDDLETAVVRLADDRDFDALVVESSGISEPAPVARLFTTESRVAALYRVDTLVTVLDTRLFLDSFAGETPERRGSGEASADGDGDDTEADGADRPLSDLMVEQVELSNLVVLNKTDLCTDEEMDEAEELVRALQPDAETIRTTFSQVDPDRLFDRALFDQTEISDLPGWKRALAESGHGHGEGSHDHGGDSHETDAHEGDTGHGHDDHHHPEEVYGVTSFTYRRRRPFHPDRLAEVLQDLPSGVVRSKGTVWLAGSERRVVIGQAGPSIRAEAQGPWIASLPEVEQDMYRSNRPELDWHDEHGDRRTELVFIGTDYDESALRTALDDALVTDEEWTESESLTGPFPAEQGEEAVIRSP

SEQ ID NO: 3871 - protein, 456 aa, Bacillus anthracis str. Sterne
MYKYLHILNDIEKMIQNGAINEGQKLPSIRSLVTQYECNKATVIRALYELEKRHIIYSVPQSGYYVVKKSGSTIENDEIIDFASSAPDPDVFPYLDFQHCINKAIDTYKNDLFVYGTPKGLPSLIPVIQKQLANYQVFTKEDNIFITSGVQQALAILTSIPFPNKNETILVEQPTYHLYIEYLEINKVPVIGIKRTSEGIDLNELERIFRTGKIKFFYTIPRYHHPLGTSYSKGEKEKVVLLAKKYNVFIVEDDYLADLETDSKADPLYSLDHDNHVIYLKSYSKIIFPGLRVGVAVIPPVISSAFHTYKKVLDIDSPMISQAALEIYIKSGMFERHKNKIKSSYNNRSKKLAEALERIHSENPLLFTYKKQNTIGIHTCLELHKTSISEMLFQRLNEMQICIDTIDKNYVRGFPKQRLLKLNVSNVKEDRIEKGIRIVMEEIKQAERLNFQFKKE

SEQ ID NO: 3872 - protein, 100 aa, Bifidobacterium longum bv. Infantis
VAFFFVSRVDSAVDKLLEANGSDEAKALEGKAAVANARLAYELFEKKFAEDPRWAALAAKGAKVQRPLWASTGTKNAAYSDCKYVDELVAKHIVNTMPEK

SEQ ID NO: 3873 - protein, 89 aa, Glycine max
  misc_feature (35)..(35): Xaa can be any naturally occurring amino acid
  unsure (1)..(89): unsure at all Xaa locations
VDAESNKELEQWNEMLKSDAIKLCQENNFNPGFFXVRLEHILERIALISDAASTEKPSAVTSSLFIGGALAARSVYTLQYLGITNILCL

SEQ ID NO: 3874 - protein, 538 aa, Geobacillus kaustophilus HTA426
MEKALTVPASTIRHRPLLITGLIIAMLFAALDGTIVGTAMPRIVGELHGLGIMTWLTTAYMLTSTTVVPIAGKLADLLGRRIVYVSGLVIFMAGSALCGMANDMTELIIYRGIQGLGGGIMMPMAMIVIGDVFTGKERAKWQGVFGGLYGLASVLGPQIGGFIVDHLNWRWVFYINLPVGILATVLIAMGLSKYKAEGPVKFDIAGMATLTAGVVSLLLGLTFGGDRYPWGSWQIVSLFAAAVVFFALFVWAEKRAEEPIIPLRLFRNRTFTLLNGIGFFMSVGMFGAIMFVPFFMQGIVGVSATQSGTIMTPMMITMIIGSVLGGRLVYRIGVKPQLIIGMAVMASAFGLLGTMDVETSKWTATMYMIILGLGTGLVMPILTLALQESFPKSELGVVTSSSQFFRSIGGTFGMTVLGAIMNHRSSALLDERLMPKLEALPAQAKGLVDRFAGMIHDDPQGLYSVLLSPEAMAKIPALLRDMFVPVLKQSLVDSLQSVFLFGLVFIAVGLLLVFGLKRITLSDRTEAMKQLKQAEEKA

SEQ ID NO: 3875 - protein, 380 aa, Actinidia deliciosa
MGLPKSFVSMSLLFFSTLLILSLAFNAKNLTQRTNDEVKAMYESWLIKYGKSYNSLGEWERRFEIFKETLRFIDEHNADTNRSYKVGLNQFADLTDEEFRSTYLGFTSGSNKTKVSNRYEPRVGQVLPSYVDWRSAGAVVDIKSQGECGGCWAFSAIATVEGINKIVTGVLISLSEQELIDCGRTQNTRGCNGGYITDGFQFIINNGGINTEENYPYTAQDGECNVELQNEKYVTIDTYENVPYNNEWALQTAVTYQPVSVALDAAGDAFKQYSSGIFTGPCGTAIDHAVTIVGYGTEGGIDYWIVKNSWDTTWGEEGYMRILRNVGGAGTCGIATMPSYPVKYNNQNYPEPYSSLINPPAFSMSKDGPVGVEDGQRYSA

SEQ ID NO: 3876 - protein, 332 aa, Bacillus thuringiensis serovar konkukian str. 97-27
MLKTTESKGNGITKEQARWMYEKMLEIRKFEDKVHELFAQGVLPGFVHLYAGEEAVAVGVCAHLTDSDSITSTHRGHGHCIAKGCDLNGMMAELFGKATGLCKGKGGSMHIADLDKGMLGANGIVGGGFPLACGSALTAKYKGTKDVSVCFFGDGANNEGTFHEGVNLAAIWKLPVIFIAENNGYGEATTFEYASSCDSIADRAKAYNIPGVQVDGKDLLAVYKAAEEAVERARNGDGPTIIECMTYRNYGHFEGEAQTYKTSEEKEEHLNEKDAIVNFRKHLIHEALLTESEIVDMEKAVDEAVQRSIEFSENSPYPGDEELLKDVYVSYK

SEQ ID NO: 3877 - protein, 331 aa, Cryptococcus neoformans var. neoformans JEC21
MEPKPLTAYQQTYHWRNKNCAPFAYDWIKQSLPGLKVDDGQQSAEISSVTSVSGDCDLGQRKGKLLTIYDLEVQASWIGKTKDGNEVKGTLKIPEVSHEAIDGVSDYVYEFSITGGSSSASEELLFYIRKSFPPLLSDKFNSFRPALLAAHGSATADAASAPDSGASTPAAYTPAPPTKGADEPINEEQKKEKKSVGATVTVEVKADLQASADDLWGLLTDENKIPMWSRSAAKLSLKAGSPYELFGGNVRGKVITADPPKKLVQTWQVKSPSWPSEHYGTMTLSLSQGSDTTAATFTLDGVPAGTQADVEKALNSFYIQGLKQMGLGTFL

SEQ ID NO: 3878 - protein, 175 aa, Triticum aestivum
  misc_feature (27)..(27): Xaa can be any naturally occurring amino acid
  unsure (1)..(175): unsure at all Xaa locations
MAPTVMASSATSVAPFQGLKSTAGLPXSRRSNGASLGSVSNGGRIRCMQVWPIEGIKKFETLSYLPPLSTEALLKQVDYLIRSKWVPCLEFSKVGFIFREHNASPGYYDGRYWTMWKLPMFGCTDATQVINEVEEVKKEYPDAYVRIIGFDNMRQVQCVSFIAFKPPGCEESGKA

SEQ ID NO: 3879 - protein, 716 aa, Triticum aestivum
MAGADPNRSFMKDVKRIIIKVGTAVITRNDGRLALGRIGALCEQVKDLNAQGYEVIMVTSGAVGVGRQRLRYRKLVNSSFADLQKPQMELDGKACAAVGQSGLMALYDMLFTQLDVSSSQLLVTDSDFDNSNFRERLRETVESLLELRVIPIFNENDAISTRKAPYEDSSGIFWDNDSLAGLLALELKADLLVLLSDVDGLYSGPPSEPSSKLIHTYIKEKHYHEITFGDKSRVGRGGMTAKVQAAVWASTGGVPVVITSGCASQSLVKVLRGEKIGTLFHKNASLWEPSKETSVREMAVAARDCSRRLQNLSSEERKKILLDVADALEANEDLIRSENEADLAAAHEAGYESALVSRLTLKPGKIASLAKSVRTLANMEDPINEILKRTEVADGLVLEKTSCPLGVLLIIFESRPDALVQIASLAIRSGNGLLLKGGKEAMRSNAILHKVITNAIPDNVGEKLIGLITTRDEIADLLKHDDVIDLVIPRGSNKLVAQIKSSTKIPVLGHADGVCHVYIDKSADMDMAKRIVMDAKIDYPAACNAMETLLVHKDLMKTPELNDILVALKTAGVNLYCGPVAHKVLGYPKADSLHLEYSSMACTVEIVDDVQSAIDHIHRYGSAHTDCVVTTDDKVAETFLRQVDSAAVLYNASTRFSDGARFGLGAEVGISTGRIHARGPVGVEGLLTTRWLLRGKGQVVNGDKDVEYTHKSLPLQ

SEQ ID NO: 3880 - protein, 291 aa, Bifidobacterium longum NCC2705
MIMTNEATTPSGQPLGISHKPSKSGAMFTKFKAENKPAFIGYLPYGFPNPDVSLDAFKTMVEHGVDAVEIGLPYSDPVMDGPVIQAAASIALNNGETIKRVFEAVETVANAGGVPLIMSYWNLVYHYGVERFARDFENAGGAGLITPDLIPDEAGEWIEASDRHGLDRIFLVSPDSSTERLETVARNARGFVYAAARMGVTGERATIDASPELLVERTRQAGAENVCVGIGVSTAEQGAKVGSYADGVIVGSALVHTLLADDNKTARDPKEGLKLLAAKSEELAEGIHNAR

SEQ ID NO: 3881 - protein, 466 aa, Bifidobacterium longum NCC2705
MAAAGTPKDDTGLERKMESRHLTMISLGGVIGTGLFVSSGYAIHQAGPLGAILAYAAGSLLVYCVMVSLGELSVAMPYAGSFHMYAKRFIGPGTAFTIAILYWLNWAVALASEFTAAGLLMQRWFPHSPSWVWSAVFIVVVFALNIMSVRLYGEAEFWFASIKVFAIIAFIVIGLLAIFGAIPIAGHDSAPLLGNFVAGGWFPSGIAPIFSTLLTVVFAFSGTEVVGVAAGETKDPSRAIPKAVHTTVLRLAIFFIGSILVMAALIPWHQAGVDTSPFVLVFQSIGMPFAGDIMNFVVLTAVLSAANSGLYVCSRMVWSLAKERLIPERFARTNFRGVPVWAVLFSMAGSLLALLSSVIAASTVYLVLVAVSGLATLVVWFSVCVCHIRFRREWARDGHSADELGYRAPGFPVLPWLAIVMCIGALVLVVLDDTQRSTLYCMIPFVACCYAAYYALERQRKRENNA

SEQ ID NO: 3882 - protein, 464 aa, Saccharomyces cerevisiae
NTKHYDYLVIGGGSGGVASARRAASYGAKTLLVEAKALGGTCVNVGCVPKKVMWYASDLATRVSHANEYGLYQNLPLDKEHLTFNWPEFKQKRDAYVHRLNGIYQKNLEKEKVDVVFGWARFNKDGNVEVQKRDNTTEVYSANHILVATGGKAIFPENIPGFELGTDSDGFFRLEEQPKKVVVVGAGYIGIELAGVFHGLGSETHLVIRGETVLRKFDECIQNTITDHYVKEGINVHKLSKIVKVEKNVETDKLKIHMNDSKSIDDVDELIWTIGRKSHLGMGSENVGIKLNSHDEIIADEYQNTNVPNIYSLGDVVGKVELTPVAIAAGRKLSNRLFGPEKFRNDKLDYENVPSVIFSHPEAGSIGISEKEAIEKYGKENIKVYNSKFTAMYYAMLSEKSPTRYKIVGAGPNEKVVGLHIVGDSSAEILQGFGVAIKMGATKADFDNCVAIHPTSAEELVTMR

SEQ ID NO: 3883 - protein, 510 aa, Listeria monocytogenes EGD-e
MEFWRRSVFYEIYMKSFQDSNGDGLGDFKGLTSRLDYLVDLGIDGIWLTPFYPSPQVDNGYDVSDYCDINPDYGDMTDFRAFMKAADARGIKVIIDLVLNHSSTEHTWFKESRSSKTNPKRDYYIWREKPNNWESFFGGSAWEKDELTGEYYYHSFAKEQADLNWANEAVRAEMEQVLAFWLNEGVAGFRLDVINNLTLVLEFPDNPVASGEMEHVYDRNQSGLEQALEDIASFCRKERDVFLVGEISSDKLPEIARYSSKKMLDVTFNFNFGSVDQLDAKSVFTTLNEMETALNEGQWPTLFFGSHDMSRFRSRLASGDIVKTQLLAFLMLTAKGVPFIYYGEEVGMPDLTFSSVKEMRDIQGTAAYYQALQTGTDEKQALEIAIEKTRDKARGPMIFPDGKPFTLGEPWIKMATLPEEEARMMWDFYQALLAFRKENDFKEMEYTFLKLDGEVLSYQRGEFIFLLHFGEEEITYPLQGNYQLVFGEAMMVENGIRMGAHTGIALRVEE

SEQ ID NO: 3884 - protein, 624 aa, Arabidopsis thaliana
  misc_feature (372)..(372): Xaa can be any naturally occurring amino acid
  unsure (1)..(624): unsure at all Xaa locations
MQDFFGSVRRSLVFRPSSDDDNQENQPPFPGVLADKITSCIRKSKIFIKPSFSPPPPANTVDMAPPISWRKGQLIGRGAFGTVYMGMNLDSGELLAVKQVLIAANFASKEKTQAHIQELEEEVKLLKNLSHPNIVRYLGTVREDDTLNILLEFVPGGSISSLLEKFGPFPESVVRTYTRQLLLGLEYLHNHAIMHRDIKGANILVDNKGCIKLADFGASKQVAELATMTGAKSMKGTPYWMAPEVILQTGHSFSADIWSVGCTVIEMVTGKAPWSQQYKEVAAIFFIGTTKSHPPIPDTLSSDAKDFLLKCLQEVPNLRPTASELLKHPFVMGKHKESASTDLGSVLNNLSTPLPLQINNTKSTPDSTCDDXDENFLTFDGEMSSTLEKDCHLKKSCDDISDMSIALKSKFDESPGNGEKESTMSMECDQPSYSEDDDELTESKIKAFLDEKAADLKKLQTPLYEEFYNSLITFSPSCMESNLSNSKREDTARGFLKLPPKSRSPSRGPLGGSPSRATDATSCSKSPGSGGSRELNINNGGDEASQDGVSARVTDWRGLVVDTKQELSQCVALSEIEKKWKEELDQELERKRQEIMRQAGLGSSPRDRGMSRQREKSRFASPGK

SEQ ID NO: 3885 - protein, 324 aa, Rubrobacter xylanophilus DSM 9941
MDIFENLSASSRVEPGELDPYSRTVQEVARKLEPAVIALGVPGGRGGGSGVILGLDEGAATAVTNSHVVQGLWQRGGTGTIAVIQSGGGTARAEVLGFDQLSDLAVIRFSPEEEPAVAELGEAGNLVVGQLVVAIGSPFGFQSTVTAGVVSALGRTLMGQDRRLVENVIQTDAAVNPGNSGGPLADADGRVVGINTAVFGGAQGLGFAIPVSSSFRRVVFSLVTEGRVRRAYLGVMVQSQPGREPSGPGGGARVESVAPNSPAERAGLRPGDVIVGFKQQPVRSTDDLLSLLDGSVIGRDVQIRVLRRGKETPLSIRPQEYPEE

SEQ ID NO: 3886 - protein, 361 aa, Arabidopsis thaliana
MDYHLRVLFSVSLIFVFVSVSVCGDEDVLIRQVVDETEPKVLSSEDHFTLFKKKFGKVYGSIEEHYYRFSVFKANLLRAMRHQKMDPSARHGVTQFSDLTRSEFRRKHLGVKGGFKLPKDANQAPILPTQNLPEEFDWRDRGAVTPVKNQGSCGSCWSFSTTGALEGAHFLATGKLVSLSEQQLVDCDHECDPEEEGSCDSGCNGRLMNSAFEYTLKTGGLMREKDYPYTGTDGGSCKLDRSKIVASVSNFSVVSINEDQIAANLIKNGPLAVAINAAYMQTYIGGVSCPYICSRRLNHGVLLVGYGSAGFSQARLKEKPYWIIKNSWGESWGENGFYKICKGRNICGVDSLVSTVAATTS

SEQ ID NO: 3887 - protein, 475 aa, Zea mays
MGRHGVDQIGAVAAFVWVTLLPLLLVCVVWPGAQAGHTSEYRRQLGSAIDMPLDADVFRPPSGYNAPEQVHITQGNHDGTAMIISWVTTSEPGSSTVIYGTSEDNLNYTANGKHTQYTFYNYTSGYIHHCTIKKLEFDTKYYYAVGIGQTVRKFWFLTPPKSGPDVPYTLGLIGDLGQSFDSNVTLTHYESNAKAQGVLFVGDLSYADNYPYHDNVRWDTWARFVERSVAYQPWIWTAGNHEIDFAPELGETKPFKPFSHRYPTPYKASGSTAPYWYSIKRASAYIIVLASYSAYGKYTPQYKWLEAEFPKVNRSETPWLVVLMHAPWYNSYNYHYMEGETMRVMYEPWFVKYKVDVVFAGHVHAYERTHRISNVAYNVVNGLCTPIPDQSAPVYITIGDGGNQEGLATNMSQPQPSYSAFREASFGHAILDIKNRTHAYYTWHRNQDGSAVAADSMWFTNRYWEPTDDSADDFQ

SEQ ID NO: 3888 - protein, 283 aa, Mesorhizobium sp. BNC1
MTAVRVAALQMRSGTEPEANLSAFEALVREAAARGAKYVQSPEMTGALVRSREALMARIKPADENPLVRRAAELARELSIYVHLGSTAIPLDGGKVANRAFLFGPDGTLIATYDKIHMFDVDLDKGESWRESATYAPGARTVVAALPFARIGLAVCYDLRFPQLFRAQALAGAEVLTVPAAFTRQTGEAHWHVLTRARAIENGAWVIAAAQGGLHEDRRETFGHSLIVDPWGRIVAEANHDEPAVVLAEIDPAASAEARQKIPNLKNAREFRIEEASYREVTA

SEQ ID NO: 3889 - protein, 573 aa, Penicillium chrysogenum
MANAPHGGVLKDLLARDAPRQAELAAEAESLPAVTLTERQLCDLELIMNGGFSPLEGFMNQADYDRVCEDNRLADGNVFSMPITLDASQEVIDEKKLQAASRITLRDFRDDRNLAILTIDDIYRPDKTKEAKLVFGGDPEHPAIVYLNNTVKEFYIGGKIEAVNKLNHYDYVALRYTPAELRVHFDKLGWSRVVAFQTRNPMHRAHRELTVRAARSRQANVLIHPVVGLTKPGDIDHFTRVRAYQALLPRYPNGMAVLGLLGLAMRMGGPREAIWHAIIRKNHGATHFIVGRDHAGPGSNSKGEDFYGPYDAQHAVEKYKDELGIEVVEFQMVTYLPDTDEYRPVDQVPAGVKTLNISGTELRRRLRSGAHIPEWFSYPEVVKILRESNPPRATQGFTIFLTGYMNSGKDAIARALQVTLNQQGGRSVSLLLGDTVRHELSSELGFTREDRHTNIQRIAFVATELTRAGAAVIAAPIAPYEESRKFARDAVSQAGSFFLVHVATPLEHCEQSDKRGIYAAARRGEIKGFTGVDDPYETPEKADLVVDFSKQSVRSIVHEIILVLESQGFLERQ

SEQ ID NO: 3890 - protein, 175 aa, Triticum aestivum
  misc_feature (24)..(24): Xaa can be any naturally occurring amino acid
  unsure (1)..(175): unsure at all Xaa locations
MAPAVMASSATTVAPFQGLKSTAXGLPVGRRSSGSLSSVSNGGRIRCMQVWPIEGIKKFETLSYLPPLSTEALLKQVDYLIRSKWVPCLEFSKVGFVFREHNSSPGYYDGRYWTMWKLPMFGCTDATQVLNEVEEVKKEYPDAYVRVIGFDNLRQVQCVSFIAFRPPGCEESGKA

SEQ ID NO: 3891 - protein, 964 aa, Brassica napus
MATGSLKKMGSIDAQLRLIAPAKVSEDDKLLEYDALLLDRFSIFSRTCMAKKSREFVQECYEVAADYDGNRNTAKLEELGNMLTSLDPGDSIVVTKSFSNMLSLANLAEEVQIAYRARIKKLKKGDFADEASATTESDIEETLKRLLQLNKTPEEVFDALKNQTVDLVLTAHPTQSVRRSLLQKFGRIRDCLTQLYAKDITPDDKQELDEALQREIQAAFRTDEIRRTPPTPQDEMRAGMSYFHETIWKGVPKFLRRVDTALKNIGINERVPYNAPLIQFSSWMGGDRDGNPRVTPEVTRDVCLLARMMAANLYFSQIEDLMFEMSMWRCNEELRVRAEVQRCAKRDAKHYIEFWKQIPSNEPYRAILGDVRDKLYNTRERARQLLSSGVSDIPEDSVFASVDQFLEPLELCYRSLCDCGDRPTADGSLLDFLRQASAFGLALVKLDIRQESDRHTDVLDAITQHLGIGSYKEWSEDKRQEWLLSELSGKRPLFGHDLPKTEEIADVLDTFKVISELPHDSFGAYIISMATAPSDVLAVELLQRECGIIHPLRVVPLFEKLADLENAPASVARLFSIEWYRNRINGKQEVMIGYSDSGKDAGRLSAAWQLYKTQEELVKVAKEYGVKLTMFHGRGGTVGRGGGPTHLAILSQPPDTIHGQLRVTVQGEVIEQSFGEEHLCFRTLHGFTARTLEHGIDPPVSPKPEWRVLMDEMAVIATEEYRSVVFKEPRFVEYFRLATPELEYGRMNIGSRPSKRKPSGGIESLRAIPWIFAWTQTRFHLPVWLGFGSAFKRVIQKDAKNLNMLKEMYNQWPFFRVTIDLVEMVFAKGDPGIAALYDRLLVSEELQPFGEQLRVNYQETRRLLLQVAGHKDILEGDPYLRQRLQLRDPYITTLNVCQAYTLKQIRDPSFHVKVRPHLSKDYMESSKPAAELVKLNPKSEYAPGLEDTVILTMKGIAAGMQNTG

SEQ ID NO: 3892 - protein, 151 aa, Arabidopsis thaliana
  misc_feature (120)..(120): Xaa can be any naturally occurring amino acid
  misc_feature (130)..(130): Xaa can be any naturally occurring amino acid
  unsure (1)..(151): unsure at all Xaa locations
MANSSFKLEHPLERRQIESSRIREKYPDRIPVIVERAERSDVPNIDKKKYLVPADLTVGQFVYVVRKRIKLSAEKAIFVFVKNTLPPTAAMMSAIYDENKDEDGFLYMTYSGENTFGLVXCVPSNAFVLXVYYMLFYNTMNMQKLYVLLLM

SEQ ID NO: 3893 - protein, 2210 aa, Nostoc punctiforme PCC 73102
MNNISKKVDKDKLEQLNSSQRILLALDEAVKKLKDVERAKTEAIAIVGLSCRFPGGVTNPEEFWQLLIDGVDAITEIPSQRWHLEDYYHPNPDTPGKMYSRYGGFLQQVDQFDAQFFGISPREAIKLDPQQRLLLEVTWEALENAGIIPQEQVNGQTGVFIGITTNDYARLITPGGDLSQIDPYYLTGNPLNAVAGRLSYTLGLHGPCMAVDTACSSSLVAVHLACQSLRNQECDRALAGGVNLILSPENNIGLSKAKVLSADGRCKTFDSEADGITRGEGCGVLVLKRLSDAVADGDRILALIRGSAVNQDGASSGFTVPNRNAQENLIRQTLTRANVKPEEVDYVEAHGTGTSLGDPIEVRALAAVLGAGRTAENPLKIGAVKTNIGHLESAAGIAGMIKVILSLQHQQIPPHLHLKQLNTHINWDELPVSVTTQATPWPVGNKQRLAGVSSFGASGTNAHVILAEAPTNNSLSKPQNAKFIERPQHLLNLSAKTEKALRELVQRYINYLQSNPEKSLADICFTANTGRSHWKYRLSILADSTMSALAQLTTWALGQDLPGVVLGEAESTSKKIAFLFTGQGSQYAGMGQKLYQTQAKFRQIIDQCDQILQPYLDKPLLEVLYPQPDTNSPIDNTAYTQVALFALEYALYQLWQSWGIKPDVVMGHSVGEYVAACVAGVFSLQDGLKLIAARGQLMQALPENGAMVAVMTTAEQLQPLLAAYKEKVAIAAVNAPQSLVISGEKSAISAITSQLETAGIKTKPLQVSHAFHSPLMQPMLADFLQVASQIKFSPPQLKLISNVTGELATTEIATAEYWCRHILNPVEFAASMVTLQQQKVAICVEIGPKPILLGMGRQCNPTVEGLWLPSLRSRQDDWQVMLLSLAQLHCHGVAVDWLLFDADYSRVRLHLPTYPFQRQRFWIETVDGQRDQPALISRNGKGRKIIHPLLGQRLPLATSQSIHFESQISAASPTFLQDHCIYDATILPATAYIEMALSAGAIVFKTDRVQLEAVSIQQALVFSGDEPKTLQVVLTPENTRVYSWQVLSYLEDESNVDNWTLHASGKVGLGNAETHSAAVDLAGLLSEDSTEISVKEYYQSLHDRGFDYGEQFQAIARLWQGETQAVGSVRLPLPLTADASKYLLHPVLLDACFQILGTNFPDNGQQDVYLPVGVEQLQVYQRAGNSLWSRVEKIEFQDVKQQHLQADLSLVNDAGELVAKITGLSFRRITQKAFQRILAKVLPAPQTTDNWLYQIAWQRQNLEPASSNKQPSSWLIFADQGGLGQKLAQLLTAAGDRCIMVSAGAVYQQLQADRYQINLAHPEDFGRLIQDNPCQGIVHLWSCDATTEPQLTSCGSVLFLLQAIYNAKLPALPSLYLVTKGTQTVGGQLTPLQVQSATLWGLGRVIALEHPELHCVRLDINPDAPEDHIPSVAQELLVPSREDQIAYRQGLRYVARLVRSDVAREADVNSQAFQLQISEYGVFENLTLAAMQRRQPGPGEVEIAVRAVGLNFRDVLNALGMLREYTEQMGITDAKELPFGGECSGIVVAVGENVSHLQVGDAVIAAQTIGSFASFVIVRSEFVVRKPENLTFEEAATIPTAFLTAYYGLYQQAQLKSGERILIHAAAGGVGQAAVQLAQRVGAEVLATASPRKWEHLRATGVKQVMNSRSLEFADQIREITSGQGIDVVLNSLNGEYIPKSLEVLSDRGRFIEIGKIGIWDAEQVKDSRPDVGYIPFDLLDISLENPSLIGEMLGELMAEFQQGSLKPLPVSVFSIQDVANAFRYMAQSKHIGKVVVSIPQRQMPKETTIQADSSYLITGGLGALGLQVAQWLVEQGAQNLVLMGRRGVSPENQPAIEQLEQAGARVLVVTADVSQQEDVSQMLATLNASMPPLRGIIHAAGLLADGMLLRQTWENFELVMAPKVAGAWNLHTLTKELDLDFFVCFSSVSALLGSPGQGNYAAANAFMDALAHHRQALGLPGSSINWGPWADAGMAAALSSREQARWAAQGVQPIPLEPGLQILAKVVQQNLAQVGVLPVDWSKFTAQFPSDVELPFLAEFTNAISKVTPQVAELRQQLEAAAPKQRPILLMNYVRSQIAKVLNLTSTEEIDPKEGFLQLGMDSLMAVELRNRLQSSLGCSVPASLIFDYPTVDALVSYLIQELWTDRPPEPSTENSPPPAQGIAESELEELSDSEAEALLLSKLDNLKY

SEQ ID NO: 3894 - protein, 100 aa, Bifidobacterium longum
VAFFFVSRVDSAVDKLLEANGSDEAKALEGKAAVANARLAYELFEKKFAEDPRWADLAAKGAKVQRPLWASTGTKNAAYSDCKYVDELVAKHIVNTMPEK

SEQ ID NO: 3895 - protein, 167 aa, Zea mays
  misc_feature (69)..(69): Xaa can be any naturally occurring amino acid
  unsure (1)..(167): unsure at all Xaa locations
MAGSTRAAHKAFLLCNYTLLGAASACIFLTLSLRLAPSACGLLLVFLHALTAVFAAAGCSAPSTTAAPXAGRAHAAHTAGAVLTAIFQGAAALLAFTRTADFLAELRSYVREEDGEVILKLIGGLGTAIFVLEWAALALAFALRLDDDGNEEIDGEHCKSWASAYHV

SEQ ID NO: 3896 - protein, 100 aa, Bifidobacterium breve
VAFFFVSRVDTAVDKLLEANGSDEAKALEGKAAVANARLAYELFEKKFAEDPRWADLAAKGAKVQRPLWASTGTKNAAYSDCKYVDELVAKHIVNTMPEK

SEQ ID NO: 3897 - protein, 302 aa, Zea mays
MMATTAYIDDSCSEVIDPPKTEVLDVAELPGDHTQNPPKPNVVVSSSVRELLECPVCLSAMYPPIHQCSNGHTLCSGCKPRVHNRCPTCRHELGNIRCLALEKVAASLELPCKYQCFGCPGIYPYYSKLKHESQCQYRPYSCPYAGSECTVAGDIPYLVNHLKDDHKVDMHNGCTFNHRYVKPNPHEVENATWMLTVFSCFGQYFCLHFEAFQLGMSPVYIAFLRFMGDDAEAKNYSYSLEVGGTGRKMVWQGVPRSIRDSHRKVRDSYDGLIIQRNMALFFSGGDRKELKLRVTGRIWKEQ

SEQ ID NO: 3898 - protein, 554 aa, Clostridium perfringens str. 13
MNKKWWKELIAYQIYPKSFMDSNGDGIGDIQGIISKLDYLKDLGIDLIWLCPMYKSPNHDNGYDISDYKDILDEFGTMDDFNELLNEVHNRGMKLIIDLVINHTSHEHPWFIESRSSRDNPKRDWYIWREGKGDEEPNNWESIFKGSAWEFCENSEEYYLHLFAKEQPDLNWENKEVRNELYKMINWWLDKGIDGFRVDAISHIKKEEGLKDMDNPEGLKYVSSFEKHMNVEGINSHLKELKEETFSKYNIVTVGEANGVSANEADHWVAEDEGTFNMIFQFEHLNLWNYEEGQGFDVKAYKDVLTNWQNSLEGKGWNALFIENHDIPRVVSTWGNDKEYLTECAKAFGAIYFLQKGTPFIYQGQELGMTNVKYHSISEYNDVKTINTYNERIESGVSEEIALKEAWVTSRDNSRTPMQWNSSENAGFTCGKPWIGVNENYKTINVEVEERDENSVLNFYKKLIKLKKSNEALIYGVYDLILEEDENIFAYTRTLNNEKFLIMANLTGENAKYMYEKEKLNSKDLILNNYEVCEHKNLTEFTLKPYECRVYKLS

SEQ ID NO: 3899 - protein, 358 aa, Arabidopsis thaliana
MSAFVSKYEDELIKTAKYIATPGRGILAADESTETIGKRFAGINVENTESNRQAYRELLFTSPGSYPCLSGVILFEETLYQKTSDGKPFVDLLMENGVIPGIKVDKGLVDLAGTNGETTTQGLDSLGARCQQYYEAGGRFAKWRAFFKIGATEPSVLSIQEDARVLARYAIICQENGLVPIVEPEVLTGGSHDIKKCAAVTETVLAAVFKALNYHHVLLEGTLLKPNMVTPGSDSPKVAPELIAEYTVTALRRTVPPAIPGIVFLSGIQREEQATLNLNAMNKLDVLKPWTLTFSFGGALQQSAIKAWAGKPENVAKAQAKFLTRCKANKDATLGKYTGWASGDSAAFENLVVIGYRY

SEQ ID NO: 3900 - protein, 355 aa, Zea mays
MVMQRFSWPYGGRSASLCGSFTGWREYPMGLVGAEFQVVFDLPPGVYQLAVLDTQLPVKQAFKIMHDEGLALVPLWDDHQGTITGMLTALDFVLMLRKLQRNIRVTGNEELEMHPISAWKEAKLQFYGGPDGAAMQRRPLIHVKDSDSLADVALTIIRNEISSVPIFKCMPDSSGVPFLNLATLQGILKFLCSKLQEQAGGCSLLHNQLLSIPIGTWSPHTGRSSSRHLRTLLLSSPLNTCLDFLLEDRVSSIPIVDDKGALHDVYSLSDIMALAKNDVYARIELEQVTVQNALDVQYQVHGRRQCYTCLQTNTLLEVLEGLSIPGVRRLVVIEQSTRFVEGIISLRDIFTFLLG

SEQ ID NO: 3901 - protein, 384 aa, Arabidopsis thaliana
MEGVSATMHKLRPYLLMIFLQFGAAGTYIVIMATLNQGQNRYVVIVYRNLVAALVLAHFALIFERKVRPKMTLSVLWKIMALGFLEPVLDQGFGYLGMNMTSATYTSAIMNILPSVTFIIAWILRMEKVNIAEVRSKAKIIGTLVGLGGALVMTLYKGPLIPLPWSNPNMDQQNGHTNNSQDHNNWVVGTLLILLGCVAWSGFYVLQSITIKTYPADLSLSALICLAGAVQSFAVALVVERHPSGWAVGWDARLFAPLYTGIVSSGITYYVQGMVMKTRGPVFVTAFNPLCMILVALIASFILHEQIHFGCVIGGAVIAAGLYMVVWGKGKDYEVSGLDILEKNSLQELPITTKSEDDNKLVSSISDNSNVTIPGGAHSNTSGI

SEQ ID NO: 3902 - protein, 232 aa, Triticum aestivum
  misc_feature (178)..(178): Xaa can be any naturally occurring amino acid
  misc_feature (209)..(209): Xaa can be any naturally occurring amino acid
  unsure (1)..(232): unsure at all Xaa locations
MEDERSTQSYQGGEAAEQVEVTDRGLLGNLLGKKKAEEDKEKQEELVTGMEKVSVEEPEVKKEEHEDGEKKETLFSKLHRSSSSSSSSSDEEEEEVIDDNGEVIKRKKKKGLKEKLKEKLPGHKDTEGEHVTGLPAPAAPASVQTHHDTDVVVEKIDGDVKTEAAPAVPEEKKKGLLXEKSRRTCPGGQKKPEDPASGGPSETLAPTPXAPPGPSPPKEGEPLLKEKGLLGK

SEQ ID NO: 3903 - protein, 581 aa, Rubrobacter xylanophilus DSM 9941
MNATHPGWLEGDPWERQGAEGTRRLLERAVAASSGGIVITDPNLPDNPIIYVNPAFERITGYSRREVVGRNCRFLQREDRGQAELEVLRQAMAERRDCRVVLRNYRRDGRMFWNELYVSPVYDEDGRLVNFIGVQNDITERKRMEEERNLLLAREQLARAEAVKAQRRLSFLAGADALLLSTVDYPGRLRQTARIAVPELADWCVVDVLNEDGSVRQIAAAHAEPSREELLEELGRIRERHGRPPGLVARVLKEGRPVLVERVGEGALEENALGPDHLEVLRRLEVRSLIVVPLLARGRTIGAMSLVSSREDRSYGEEELSLARSLAYRCALAVDNARLYHERGRIASILQQSLLPRLPEPEGLDVGVEYLPVGRENEAGGDFYDLIETGRGWLAVIGDVRGKGAAAAAITALARYTIRAVAMREGSPSRVLSDLNEAMLRQLEGHRFCTVACAGLSRNGAGLELSVARAGHPAPLLLRRDGRVETLEVPGRALGVFADPRLAERPAHLEPGDAAVFYTDGVTEVRSPGGSLFGEERLRRLLGSCAGLGAGRIAARVREEALKHGGGGLRDDLAVLVVRAA

SEQ ID NO: 3904 - protein, 362 aa, Saccharum officinarum
MGSTAEDVAAVADEEACMYAMQLASASILPMTLKNALELGLLEVLQAEAPAGKALAPEEVVARLPVAPTNPDAADMVDRMLRLLASYDVVKCQMEDKDGKYERRYSAAPVGKWLTPNEDGVSMAALTLMNQDKVLMESWYYLKDAVLDGGIPFNKAYGMTAFEYHGTDPRFNRVFNEGMKNHSVIITKKLLEFYTGFEGVSTLVDVGGGIGATLHAITSHHPQIKGINFDLPHVISEAPPFPGVQHVGGDMFKSVPAGDAILMKWILHDWSDAHCATLLKNCYDALPENGKVIIVECVLPVNTEAVPKAQGVFHVDMIMLAHNPGGRERYEREFHDLAKGAGFSGFKATYIYANAWAIEFIK

SEQ ID NO: 3905 - protein, 287 aa, Oryza sativa
MGRSPCCEKAHTNKGAWTKEEDQRLVAYIRAHGEGCWRSLPKAAGLLRCGKSCRLRWMNYLRPDLKRGNFTDDDDELIIKLHALLGNKWSLIAGQLPGRTDNEIKNYWNTHIKRKLLSRGIDPQTHRPVSAGSSAAAASGLTTTASTAAFPSLAPAPPPQQHRLHNPVHAAAPSNASFARSAASPPSEDGHSSSGGSSDAPRCPDLNLDLDLDLSMSLPSSPPKTPAAASSTTASRHHHHQQQKTICLCYHLGVRNGDVCSCKAAAPSPAGPRAFRFLRPLEEGQYI

SEQ ID NO: 3906 - protein, 336 aa, Schizosaccharomyces pombe
GSFSDLGIFRFIMLILQIFLPGIVCIYLCEIIEKGHGLGSGPVLLLGSHILGNIMWDVLSLHRYPVNESGDSQYQGALVGFAFNLFSFKNKFSSLRSILFRSEGLSFVQFLVCIAVFATFMYTLNIRIDVPIRSSRVRGVRQNFPLKLLYTSVIPLIYFYSILSHLLVFAYALYSLCPNSLITRLLVQYSPIDTFAEHKLQLVGGLVYFLYPPLGLSEALLHPVHTVIYTITLICITIYFSLLWMNATAGGPRDVLLFFKENQLVIAGYREATMLKELEKIIPIAAKLSAFFVSILSVIAGIFASTFGVGVLIASALVYASFEMIVGANTSLGNGN

SEQ ID NO: 3907 - protein, 374 aa, Bradyrhizobium sp. BTAi1
MSRWSFAARLLAVAATALLLMMAWQTFPLIQAEILGLRAKPREITARGDLAADEKSTIALFESRSGSVVFITTVQQSVNAWTGDAQQERSGTGSGFVWDDLGHVVTNYHVIEGATEALVSLTDGRSFRAALVGANPENDLAVLLIGVGTDRPKPLPIGTSADLKVGQKVFAIGNPFGLSSTLTTGIVSALNRNLQVTQERTLNGLIQTDAAINPGNSGGPLLDSAGRLIGVNTAIYSPSGASAGIGFAVPVDKVNRIVPRLIASGRYVSPSLGIRTDPKANEALSARLNMSGVFVLDVEPDSAAEKAGLIPARLTRDGGFALGDVLLAIDGQVVDSPDDMTRALETKTPGDRVVLRVRRAGKTIEVRVTLDVAR

SEQ ID NO: 3908 - protein, 442 aa, Nostoc punctiforme PCC 73102
MSNLQKVIVFGASGFLGEHIIKSLISENWDVYAAVRTKPESSTDGFNQTQVTYYEGDLEDQKYIQDAIAGMDAIIFSAGCTWKSDLEISEYYRRNVQITKNFFTALGDRPNVRIVYTSSMSVIAGSKSDYIFFEDSDRSQVSQNQLSPYDLAKIECEQIALDYAQRGNNLVILNPGNMLGPGVFNHSKITTSILVLWFCQKQFPFYINGGHSYCDVRDVAKAHVAALTRGRSGERYIVAGDNLDMASISSLLVKMTGFKMPQQLPASGVYLLSLLLESLSLLSFRLFKNPYHPDFVKSFALHYYANSQKAIKELAYNITPIETTLIDTIKYFGKRELLSEDLNFFALMTHSNIQSLIYLRQLASQHTFSQFLLSKISQIYGICQSNLSLNNVLDNLVNHSKFNIKTGKFQPDKTKCQEDLKSINQLFEYLYFASNDFLSEVI

SEQ ID NO: 3909 - protein, 202 aa, Streptococcus mutans
DPVADGPVIELAGQRSLVKGTSLASIIARLQEKKTQVPLVIMTYFNPVFQYGVETFVADLQNTSVKGLIIPDLPHEQESFIKPYLENLDLALVPLVSLTTGLERQKELIEDAQGFVYAVAINGVTGKTGNYRDDLDKHLKHLTEIAQIPVLTGFGVSTLADIKRFNQVSDGVIVGSKIVKGLHEGMQEEIKDFIYAGSHYQK

SEQ ID NO: 3910 - protein, 100 aa, Bifidobacterium bifidum
VAFFFVSRVDTAVDKLLEANGSDEAKALEGKAAVANARLAYELFEKKFAADPRWADLAAKGTKVQRPLWASTGTKNAAYSDCKYVDELVAKHIVNTMPEK

SEQ ID NO: 3911 - protein, 544 aa, Vibrio vulnificus YJ016
MENKWWHDAVVYQIYPRSFCDSNNDGIGDLNGIISKLDYLKTLGVNVLWLSPVYKSPMDDNGYDISDYQDIAAEFGTMADMQNLLDQAKARDIRIVMDLVVNHTSDEHPWFVEARKSKDNPYRDYYIWRDAKPDGSVPDDQGSIFGGSAWQWDEATQQYYFHLFSKRQPDLNWENPKVQQEVHKMMNWWIDQGIGGFRLDVIDLIGKEIDKGITGNGPRLHPLLQEMNRATFGDKDLLTVGETWGATPEIAKLYSDPERHELSMVFQFEHITLTWQHGDKWNPIPLDLKQFKHVLTKWQTELSNQGWNSLFWNNHDLPRVVSKYGDDQRYRVESAKMLATALHFLKGTPYVYQGEEIGMTNVAFESLEQYKDIETLNFYKVKTESGVSHQHMMDAIHENSRDNARTPMQWSASQNGGFSQAKPWIEVNPNYPEINVEQALADSDSIFYHYQKLIELRKQHPAIVYGDFTPLFAEHDSVFAYVRSHQDEQLLVINNFSDQDVSLALPDNLQNKEVNCLIYNYDSLDMLGVTLSLKPYQCYAFKLR

SEQ ID NO: 3912 - protein, 397 aa, Chromobacterium violaceum ATCC 12472
MFQHVDAYAGDPILSLVEAFGKDPREQKVNLSIGLYYDEAGRIPRLKAVEQAEALLASQPQPPCTYLPMDGMPAYRSAIQTLLFGAEHPAVKDGRIATLQTLGGSGALKVGADFLKRYFPASGVWVSDPTWDNHVAIFEGAGLAVERYPYFDPATRGVDFPAMLAKLQTLPAKSIVLLHPCCHNPTGADLTDAQWDQVVEVAKARQLIPFLDIAYQGFGAGLEEDAYAIRAMADAGIAFLVSNSFSKIFSLYGERCGGLSVVCETAAEAALVSGQLKATVRRNYSSPPTHGARVIATVLNDPELKALWVSEVNEMRERIQAMRGVLVQVLKEALPERDFGYLVNQRGMFSYTGFSQAQVDKLREQFAVYLVGSGRMCVAGLNAANAPYVAQAFAQVQ

SEQ ID NO: 3913 - protein, 359 aa, Geobacillus kaustophilus HTA426
MFDPDKLPVEIVRILDENGNGDEEKLAAFSDEWLLRAYREMRRARVIDERLLRMQRQGRIGTYAPFSGQEAAQIGSALALHKDDWIFPSYREVAVCLMHGMPLEQFFHYVQGRLSGKRMPEGVNIFPTQIIIAAQTLHAVGCAWASKLKGEPHVSVAYFGDGATSEGDFHEAMNFAAVYNVPVIFFCQNNQYAISVPYRKQTASRTIAQKALAYGMKGVLVDGNDVLAVYETMKQAVEAARRGEGPMLIEALTYRLGPHTTADDPTKYRRPEEVETWRAKDPLRRLRLLLERRGLWTEAQEDALVAQVNDEVTAAYEAAIASKSGSIVDAFDCVYSEAPKLLAEQKDEVMRRKQRSGVR

SEQ ID NO: 3914 - protein, 300 aa, Mesorhizobium sp. BNC1
MKILITGGGGFIGAWIARKLLEAGHEIRVFDLVDERRIMRLIAGGAIADAMDWRVGDIADTAAVEQAATGCDGIVHLAGLLTPACRANPLKGVSVNLVGTLNVFLAARRLGIARVIYMSSAGVFGPDGSGEPRPVTHYGSFKLACENSAAAFWNDDGLASVGFRPFVVYGPGREGGLSAGPTLACRAAAKGEAYTIPFTGSFDMIHVEDVAAAFVIALSLPPAGARVFNLPGAVTSSDEVVAAILRSVSDARIDASGDPMPIACPAPDGLAQAALPGWKPRDLDSGIADTIAFYRQHAQT

SEQ ID NO: 3915 - protein, 153 aa, Zea mays
MCLQSRRKTREPKEENVTLGPTVREGEYVFGVAHIFASFNDTFIHITDLSGRETLVRITGGMKVKADRDESSPYAAMLAAQDVAQRCKELGITALHIKLRATGGNKTKTPGPGAQSALRALARSGMKIGRIEDVTPVPTDSTRRKGGRRGRRL

SEQ ID NO: 3916 - protein, 410 aa, Arabidopsis thaliana
MGNCGTRDEAAVFTPQAQAQQLQKKHSRSVSDLSDPSTPRFRDDSRTPISYAQVIPFTLFELETITKSFRPDYILGEGGFGTVYKGYIDDNLRVGLKSLPVAVKVLNKEGLQGHREWLTEVNFLGQLRHPNLVKLIGYCCEDDHRLLVYEFMLRGSLENHLFRKTTAPLSWSRRMMIALGAAKGLAFLHNAERPVIYRDFKTSNILLDSDYTAKLSDFGLAKAGPQGDETHVSTRVMGTYGYAAPEYVMTGHLTARSDVYSFGVVLLEMLTGRKSVDKTRPSKEQNLVDWARPKLNDKRKLLQIIDPRLENQYSVRAAQKACSLAYYCLSQNPKARPLMSDVVETLEPLQCTGDALIPCATTTAGAAFAMGGVPDYRMHRRFAKNVGPGAICRSPNPNYSPGGPAACRVR

SEQ ID NO: 3917 - protein, 442 aa, Haloarcula marismortui ATCC 43049
MSYTALQVDPNVLAEGVNLLWVLTVSFLIFFMHAGFAMLEAGQVRSKNVANQLTKNLLTWSVGVVVFFLIGSGISSLVGTGSFAPAFGAEAANDYVGWLFGAVFAMTAATIVSGAVAGRAKLRAYITYTFLLAAVIYPVVTGLTWAGAHISLGGVVFKDFAGGMIVHGMGGIAGLTAAYVLGPRMGRYNEDGSANVIPGHSMTFAVLGTLILAFGWYGFNVGTAASVFVVEDGALALGAFATVGRVAMTTTVAMAMGAIGAALVAWLKTGKVDTLYVANGLLAGLVGITAIPDTTTWWGALIVGLLAGGQLPIVFSFMENRMKIDDVCAVFPVHGSAGVLGTIMYPLVATSGTVGSIGSALAVQVVGVAVIAGWTIVTTGLIWYGLKAAGQARVTPEHEQEGLDVSEHGVETYPEFGGGEGVVADGGKVNTNVRTDGGSKDD

SEQ ID NO: 3918 - protein, 324 aa, Arabidopsis thaliana
HPPPPYMWNPQHMMSPYGAPYAAVYPHGGGVYAHPGIPMGSLPQGQKDPPLTTPGTLLSIDTPTKSTGNTDNGLMKKLKEFDGLAMSLGNGNPENGADEHKRSRNSSETDGSTDGSDGNTTGADEPKLKRSREGTPTKDGKQLVQASSFHSVSPSSGDTGVKLIQGSGAILSPGVSANSNPFMSQSLAMVPPETWLQNERELKRERRKQSNRESARRSRLRKQAETEELARKVEALTAENMALRSELNQLNEKSDKLRGANATLLDKLKCSEPEKRVPANMLSRVKNSGAGDKNKNQGDNDSNSTSKLHQLLDTKPRAKAVAAG

SEQ ID NO: 3919 - protein, 358 aa, Arabidopsis thaliana
MSAFTSKFADELIANAAYIGTPGKGILAADESTGTIGKRLASINVENVETNRRNLRELLFTAPGALPCLSGVILFEETLYQKSSDGKLFVDILKEGGVLPGIKVDKGTVELAGTDGETTTQGLDGLGDRCKKYYEAGARFAKWRAVLKIGENEPSEHSIHENAYGLARYAVICQENGLVPIVEPEILVDGSHDIQKCAAVTERVLAACYKALSDHHVLLEGTLLKPNMVTPGSDSPKVSPEVIAEHTVRALQRTVPAAVPAIVFLSGGQSEEEATRNLNAMNQLKTKKPWSLSFSFGRALQQSTLKTWAGKEENVKAAQEALYVRCKANSEATLGTYKGDAKLGDGAAESLHVKDYKY

SEQ ID NO: 3920 - protein, 378 aa, Vibrio fischeri ES114
MKSRLKITTVALLFASFFAVITSFFSTAEDMTQPMKGDNEVATLAGGCFWCTESDLEKLDGVVDVVSGYSGGTLENPTYKQVSSGKSGHIEVIQVTFDPKVVSYEQILDHLFRHIDPTDNKGSFVDRGPQYRPAIFYHNEDQKLIAQNFMKDIDAAGIFPKPLATELIEYKTFWPAEAYHQDYYKRNPIRYKYYRHGSGRDKYLDSVFGEDREENPKTLRQYITEYEMAVNVKPYSKPSESQIKKSLTELQYYVTQEEGTERPFDNAYWDNKAEGIYVDIVSGEPLFSSTDKYKSGTGWPSFTKPINKAYIVEEDDFQLFTKRTEIRSKFADSHLGHVFNDGPKPTGLRYCMNSAAMRFVAKADLEKEGYGEYLYLFN

SEQ ID NO: 3921 - protein, 347 aa, Moorella thermoacetica ATCC 39073
MKSINVNTVLAVMLSGLLIMAGGFGLARIYDNMHNQVVAEASKLGPIEENHSESAKSQDLKSIIAENQKLVVCLEVELDYGKVQGSGFLYNRQGDVITNAHVVGDARTCRVKLSDGTVYQGTVIGRGEQIDVALVRVPELAGKEPMKIARDRMAEVGDEVIALGSPLGLQNTATTGIISGVNRDLDIGDYHYKGLYQISAPISHGSSGGPLLDRHTGEVLGVNSAGAEGENIGFSIPITQVLPLVENWSKNPSTAPVQPTTGTVGKISEKELATAASYLVEDFYTCVNNGDYVGAYALLGSDWQAKQPYEKFRAGYLNTLSVSDAFLKPGRHSATPQLLDWNASVAP

SEQ ID NO: 3922 - protein, 632 aa, Pseudomonas syringae pv. tomato str. DC3000
MSHQSDLISEDILAYLGQHERKEMLRFLTCGNVDDGKSTLIGRLLHDSKMIYEDHLEAITRDSKKSGTTGDDVDLALLVDGLQAEREQGITIDVAYRYFSTAKRKFIIADTPGHEQYTRNMATGASTCDLAIILVDARYGVQTQTRRHSYIASLLGIKHIVVAINKMDLNGFDERVFESIKADYLKFAEGIAFKPTTMAFVPMSALKGDNVVNKSERSPWYAGQSLMEILETVEIASDRNYTDLRFPVQYVNRPNLNFRGFAGTLASGIVHKGDEIVVLPSGKSSRVKSIVTFEGELEQAGPGQAVTLTMEDEIDISRGDLLVHADNVPQVSDAFDAMLVWMAEEPMLPGKKYDIKRATSYVPGSIASITHRVDVNTLEEGPASSLQLNEIGRVKVSLDAPIALDGYSSNRTTGAFIVIDRLTNGTVAAGMIIAKPVSGGGSHHHGELAHVSTEERAQRFGQQPATVLFSGLSGAGKSTLAYAVERKLFDMGRAVYVLDGQNLRHDLNKGLPQDRAGRTENWSRAAHVARQFNEAGLLTLAAFVAPDAEGRERAKALIGKERLVTVYVQASPAVCRERDPQGLYAADGDNIPGESFPYDVPLNADLVIDTQTLSVEESVKQVLDLLRGRGAI

SEQ ID NO: 3923 - protein, 558 aa, Bacillus cereus ATCC 14579
MKKQYTVSTYLLDRLHELGIEHIFGVPGDYNLAFLDDVVAHENLKWIGNCNELNAAYAADGYARIKGIAALITTFGVGELSAINGIAGSYAENVPVIKITGTPPTKVMENGAIVHHTLGDGKFDHFSNMYREITVAQTNVTPEHAAEEIDRVLRACWNEKRPVHINLPIDVYNKPINKPTEPIINKPILSNKEALNKMLLHAISKINSAKKPVILADFEVDRFHAKENLHQFVEKTGFPIATLSMGKGIFPEKHPQFIGIYTGDVSSPYLRKRIDESDCIISIGVKLTDTITGGFTQGFTKEQVIEIHPYTVKIIDKKYGPVVMQDVLQHLSDSIEHRNKDTLDVKPFILESSPFTEEFIPKAQMVTQKRFWQQMYHFLQENDVLIVEQGTPFFGSSAIPLPNNTAYVGQPLWGSIGYTLPALLGTQLANLSRRNILIIGDGSFQVTAQELSTILRQNLKPIIFLINNNGYTVERAIHGQNQLYNDIQMWDYNKLSMVFGAEEKSLTFKVENEAELAAVLTNITFNKNQLIFIEVIMSQSDQPELLAKLGKRSGQQNS

SEQ ID NO: 3924 - protein, 372 aa, Saccharum officinarum
MTVVDAVSTDAAGAPAAAAAPVQQPGNGQTVCVTGAAGYIASWLVKLLLEKGYTVKGTVRNPDDPKNAHLKALDGAAERLILCKADLLDYDAICRAVQGCHGVFHTASPVTDDPEQMVEPAVRGTEYVINAAAEAGTVRRVVFTSSIGAVTMDPSRGPDVVVDESCWSDLEFCKKTRNWYCYGKAVAEQAAWDAARQRGVDLVVVNPVLVVGPLLQPTVNASIAHVVKYLDGSARTFANAVQAYVDVRDVADAHLRVFESPRASGRYLCAERVLHREDVVRILAKLFPEYPVPTRCSDEVNPRKQPYKFSNQKLRDLGLEFRPVSQSLYDTVKNLQEKGHLPVLGEQTTEADDKEAAPAAAELQQGGIAIRA

SEQ ID NO: 3925 - protein, 245 aa, Bacillus cereus ATCC 14579
MIKLVLIRHGQSLWNLENRFTGWTDVDLSENGLSEAREAGAILKKNGYTFDVAYTSVLKRAIRTLWIVLHEMDLTWVPIHKSWKLNERHYGALQGLNKDETAQKYGEEQVHIWRRSVDVRPPALTEDDPRYEATDPRYKTLKKGEFPLTECLEDTEKRVLAYWHSEIAPTLKSGNKVIISSHGNTIRSLVKYLDNLSSDGVVSLNIPTSIPLVYELDENLRPIRHYYLSMDGEVPEGEIPKHISF

SEQ ID NO: 3926 - protein, 524 aa, Bifidobacterium longum NCC2705
MSQPDTDTAAQSPSSQQEPQIQTDGRRSHSEQMNQPAQTSQSESSHDGKDEHALHTNLKRGMESRHLQMISLGGVIGTGLFLSSGYTIQQAGPIGTILAYSIGALIVYLVMLTLGELSVAMPVTGSFHVYAEKFIGPGTGFVIAIQYWLTWTVALGSEFTAAGLLMQRWFPDSPTWVWSAACIILIFTLNALSVRLFAEAEFWFASIKVFAICAFIVIGLLAIFGVIPIAGYQHAPMFGNLVKDGIFPNGFMPVFATILTVNFAFSGTELIGVTAGETRDPETTVPKAIHTTLWRLVLFFIGSITVMCALIPWRQAGVGESPFVLVFNSIGIPYAGDIMNFVVLTAVLSASNSGLYASTRMVWSMGNEGMIPRWFAKTNRRGVPMLALCAAMAGGLLALLSSVIAASTVYLVLVALSGLSAVVVWIAIAYCQIVFRRRWLESGHSTSELKYRTPGYPYVSWAAFILCTASFVLVIFDVEQRFALVAELVFIVACYGAYFLQQWVRKRKKATEADDLDTLWVARD

SEQ ID NO: 3927 - protein, 454 aa, Desulfotalea psychrophila LSv54
MKMDLAGPMVLIVDDDQVHRYMLSSMLEEWGYLSAQADDGETAVAAVKKRKYDAVLMDVRMARMDGYRAFSIIHGLEPALPVIIMTAYSSVDQAVAAIKEGAHDYLTKPLDFDRLHIALRRAFDRGQVSHSREKQGEGGQKSGLKTDIIASSESMAELLEMVSYVAPTEATVLIQGESGTGKELVAETLHFNSLRASGPFIRVNCAALAENLLESELFGHERGAFTGADRRREGRFVQADGGTLFLDEIGETSQAMQVKLLRVLQEQEFQRVGGEETLQVDVRIIAATNRNLEEEVAAGRFREDLYYRLNVVMLAVPPLRDRLGDVPLLARYFAEKFAGKNGRTLNAITPLCLEVLQVYRWPGNVRELENAIERGIIMMRGDQLTEQTLPLSLQKQKEQTQHARMRGRSLFEAEKILIEQTMQETEGNKSEASRRLGITRKTLQNKLNKYLASQ

SEQ ID NO: 3928 - protein, 445 aa, Desulfotalea psychrophila LSv54
MPLRKKQWGEDMRTDIVHIGAGELTYEIRNIVEVGQRLQRLGVEVNWENIGDPIAKGEEVPSWMKALVAEAVQDDASYGYSPTKGVLATRRFIAAETNKKGAVQISAEDIIFFNGLGDAISKIFGFLKRTARVLVPTPSYTTHSSAEAAHSGDKPLTYKLDPHNDWYPDIADIERRVKYNPMVAGILIINPDNPTGAVYPVEILRAIVDIARRYDLFLICDEVYQNIIYNGKKTASLAEVIGEVPGFAMRGASKEMPWPGARCGWIEVYNADRDPMFQRYIDSIFNAKMLEVCSTTLPQIVYPRVVTHAEYPGYLQSRIARYQRFSKIAYDCLKDIEGILVNQANGAFYMSVCFEDGVLNSGQSLAIARDEVRTMVEDLVFSADTALDKRFVYYLLGATGVCVVPLTSFASDINGFRVTLLERDEAEFIRIFTVIAAAIRTYLKS

SEQ ID NO: 3929 - protein, 515 aa, Pimpinella brachycarpa
MTSSLGDLLAQPNNDDFGSNWGFENQKTKSFANPSQPFSPPPVSPSSYFSFLDSPIQINNYNIVSSSGNGTMNAQSFNEENQNFSDFSFPTQSRPASSTSSSSFVPANTNSVEESLKRKQGGWNFEEAAKNNEFQRFSPEMTMNQANMLSPEMTMNQANMQSNAAVLQSNSINYAQSSQSSQTNRDQSKLDDGYNWRKYGQKQVKGSENPRSYYKCTYLNCPTKKKVETTFDGHITEIVYKGNHNHPKPQSTKRSSSQSYQNSIPTMPETSLLENGHLEPVTTPENSSLSFGEDDLFEQGSMNKQGDDDENEPDAKRWKGEYENNETMSSLGSRTVREPRIVVQTTSDIDILDDGYRWRKYGQKVVKGNPNPRSYYKCTQVGCPVRKHVERASHDLRAVITTYEGKHNHDVPAPRGSGSYAVNRPSDNTATTSAPTAIRPTTNYLNPLQNTRAQPANGQAPFTLEMLQRPRSYEFSGFGNSTNTYTINQNQQASGQFSTAKDEPDVDSFFDSFLA

SEQ ID NO: 3930 - protein, 427 aa, Gluconobacter oxydans 621H
MVTSCCSGSMSEAGHILDGLAEHARRASRSLARANAGTRNHALSEAAKALRVRSDEIVAANQKDLAALSEDRNAAFRDRLTLTPERVEAMARGLEDVAGLPDPVGRVLAEWDRPNGLHFRRVATPLGVIGMIYESRPNVGADAAALCIKSGNAVILRGGGESLHSARAIQAAMEDGLRAAGLDEACVQILPSADRALVGAMLQASGKIDLIIPRGGKSLVERVQREARVPVLAHADGLNHTYIHASADPAMARKILLDAKMRRTGICGATETLLIDAAIAPALLPLLVEDLAAKGCTFRADDRARAIVPTLAAASADDFDTEWLDAVLSVAVVDGVEDALDHIARHGSSHTEAIIAEDPEAAAEFLNGTDSAVVMWNASTQFCDGGEFGFGAEIGIATGRMHARGPVGLEQLTCYRYEVIGTGQVRG

SEQ ID NO: 3931 - protein, 167 aa, Arabidopsis thaliana
  misc_feature (18)..(18): Xaa can be any naturally occurring amino acid
  unsure (1)..(167): unsure at all Xaa locations
PSPGQSKPQGGEVVSVGXGKTIGKNKIDIPVPTGAQIIFSKYAGTEVEFNDVKPFILKENDIVGLFETKGLKDFQPLNGRVFIKGAEAEEKTTGGLLLTQTTKKKPFIGPVITVGPGSLNEEGKISPFPVSTGSPGLFSKYAGNGFKGKNGFNFLALKASNVKGKPF

SEQ ID NO: 3932 - protein, 72 aa, Trametes versicolor
MSEHTYKFNVKMTCTGCSGAIDRVLKKTDGVAEYDISLEKQEVLVKGTIPYDDLHAKIAKTGKQILSGETVV

SEQ ID NO: 3933 - protein, 452 aa, Nitrosomonas europaea ATCC 19718
MNSFWLSLAPVLWLTIIAIPVGILFNAAIVFGLYSIILLGIVIYHIHTLYCLEQWLHHSDLSYATVPDRSGLWGVVFARLARFVRRHDKERLGLNTSLERLQRATSALPEGIVILGDKDQIEWCNSAAERHLGLNLEMDAGQHITRMVRQVRFVAYLDMGDFSKPFLLNQSRLRDVLLSIQIVPYGDREKLLISQDVTRFEKIEIMRRDFVANVSHELRTPLTVIGGFLETLLEENKISGEMEKNALRLMSDQAIRMRRLVEDLLTLSRLENAGNNLTEEQVDVVKLLQGLYQEAQSLSAGRHVISLNLASHAMLLGSEDELRSAFENLISNAVRYTPESGIISLNWVVENGKGLFYVQDSGIGIEPNHIPRLTERFYRVDRSRSRETGGTGLGLAIVKHVLNRHQASMEITSQPGAGSIFRIWFPSNRVLPAETAPVISSSPEHTKQNSAA

SEQ ID NO: 3934 - protein, 481 aa, Bradyrhizobium sp. BTAi1
MSFSPIVVWFRESLRLSDHPALHAAATSGAPVICCYVYDTESAALRPLGGASRWWLAQSLRALQDELDALGVKLVIRRGPSAKAISELAREASTSAVYWNDVAQTGPRAVAAEVEAALDAIGVKSRVFADDLLIDPAELRGKDGRGPRVFTPFWKRVLALGDPPKPLPVPVRLSSPSGVASLTVDKLALEPTSPDWAGGLRTTWRAGERAAQARLAKFLETTVRGYAADRDRPDIEATSRLSPHLRFGEISPRQIWHAARFAAEQQPAFARGIDKFLSELGWREFSRHLLFNNPDLATRNLQPSFDAFPWSQDAAALRAWQRGQTGYPIVDAGMRELWHTGSMHNRVRMVAASLLVKHLLIDWRLGEQWFWDTLVDADPGSNPASWQWVAGSGADAAPYFRVFNPVLQGEKFDSSGTYVRRWVPELARLPAALIHQPWAAKPLELAEAGVVLGRSYPAPVVDHRHGRERALAAYASLRTSD

SEQ ID NO: 3935 - protein, 100 aa, Bifidobacterium pseudocatenulatum
VAFFFVSRVDTAVDNKLEEIGSDEAKALEGKAAIANARLAYELFENKFANDPRWAALEAKGAKKQRPLWASTGTKNPAYSDCVYVDELVAPLIVNTMPEK

SEQ ID NO: 3936 - protein, 373 aa, Nitrosomonas europaea ATCC 19718
MTQSILQSARRIVVKVGSSLVTNEGHGLDRCALGGWAGQISRLRQMGKEVVLVSSGAVAEGMQRLGWKMRPAALYELQAAAAVGQMGLAQAYADCFSEYELQTAQILLTHDDLSSRKRYLNARSTILTLLNLGIIPVINENDTVVSDEIRFGDNDNLAALVANLIEAEVLVILTDQEGLFTGDPRKNTDARLIPEVSVSDPDIEVMAGGAGSSIGRGGMQSKVMAARRAARSGAHTVIASGRAKDVLVRLAGGEAIGTILLADMPVKVARKLWLADHLQVRGSVVLDDGASRALLSGGKSLLPIGVVEIKGEFERGEAISCLDASGREIARGLINYDARESRKIMRRPTSQIEAVLGYVDEYELIHRDNLVIL

SEQ ID NO: 3937 - protein, 538 aa, Streptococcus suis 89/1591
MSEIQKTDWWKKSVIYQIYPRSFQDSNGDGIGDIRGIISRLDYLHELGIDAIWLSPVYQSPMDDNGYDISDYQGIAPEFGTMEDMEELIAEGHKRNIKIIMDLVLNHTSDEHFWFQEALKGPDNPYYDYYVWADEPNELRSTFSGSAWEYVPHLNKYYLHQFSVKQPDLNWKNPALKQEIWDMINFWIEKGVGGFRLDVIDLIGKEPEKLITADGPTLHPLIQELNEKTFGAYDLVTVGETWSANPENAQLYSHPDRKEFSMIFQFEHVGLDQQEGKEKWDLAPLDPARLHKVLSKWQTELVGKGWNSLFWNNHDLPRAISRFGDDRPAFRELSGKMLAIYLHFMSGTPYIYQGEEIGMINTPITDISQADDIETRRMYAERIENGFTKEELITSINAKGRDNARRPMQWTAEEGAGFSTGQAWLALGDTVKDINVEKALADKQSLFYTYQKLIALRKEYPCMSEGKYEVMETGNDLVMAYRKYDEQDDFIILVNFTSEEQAYEFSLEDYSVFMHNYDNKVIFDKSVLRPYEAIVFKK

SEQ ID NO: 3938 - protein, 609 aa, Pichia pastoris
ETHTWNFTTGFVNANPDGVYERDDVIGLNGQWPLPVLEADKGDRIELYLTNGFEDYNTSLHFHGLFQNGTNSMDGPELITQCPIPPGETMLYNFTVDQVGAYWYHSHTAGQYGDGMRAAFIVHDGSDDDDFPYEYDEEFTFTISEWYHESSVDLIPNFMSRFNPTGAEPIPQNFLFNDTRNFTWNVEPSKTYKVNLINVGGFVSQYLWMEDHTFKVVQVDGVYTQPNETDMIYITVAQRYTVLIETKDDTSRNYALMQRVDDTMLDVIPKDLELNGTNYIVYNESAGLPEEYKVESLDIFLDDFWLEPLEAQEAYPDPDYQIVVDVAMDNLDDGVNYAFFNNLTYVAPKVPVLGTVFSAGEDAINPLVYGSNTNSFVLEKDEVIEIVLNNLDTGKHPFHLHGHVFQTVVRGPDYGEESTPVPYNASEAHDIPENPMRRDTVYVNPQSYFVIRFKADNPGVWFFHCHIEWHLDQGLALVLIEDPLSIQSQQNLDDNWKRMCEVNNMPYVGNAAANTENFLDLTDENVQVKNLPAGFTARGIVALVFSCIAGILGCVAIGLYGLAATDDNPVKLSQDLGIDEEFIQDETSSQLSHNGSKDTTEKTATELLN

SEQ ID NO: 3939 - protein, 482 aa, Vibrio fischeri ES114
MSKKLTTAAGCPVAHNQNVQTAGKRGPQLLQDVWFLEKLAHFDREVIPERRMHAKGSGAYGTFTVTHDITKYTKAKLFSEIGKQTELFARFTTVAGERGAADAERDIRGFALKFYTEEGNWDLVGNNTPVFFLRDPLKFPDLNHAVKRDPRTNMRSAKNNWDFWTSLPEALHQVTIVMSDRGIPATYRHMHGFGSHTFSFINSDNERFWVKFHFKSQQGIKNLSDAEAAQVIGQDRESHQRDLLESIDNQDFPKWTLKVQIMPEADAATVPYNPFDLTKVWPHKDYPLIEVGEFELNRNPQNFFAEVEQSAFNPANVVPGISFSPDKMLQGRLFAYGDAQRYRLGVNHQHIPVNAPRCPVHSYHRDGAMRVDGNFGSTLGYEPNNEGQWAEQPDFAEPALNLDGAAAHWDHREDEDYFSQPGDLFRLMTAEQQAILFDNTARNLNGVPKEIQLRHLRHCYKADPAYGEGIGKLLDIDVSEFN

SEQ ID NO: 3940 - protein, 603 aa, Oryza sativa (japonica cultivar-group)
MDLGGGVGVVMAAVDGGGGGELGGGGLLGSRLMKHGRGNAGDQEHEWRPPAKQARGGDASSAAAAVAAAAAVSEAVKVAAPFLLGASCSPGHGGEQMLSFSSSASSCSSGGGGAAVAAAAAAGGAMPLYYGTPASCSGLSSVSLSSSMQGAMARVRGPFTPSQWIELEHQALIYKYLAANSPVPHSLLIPIRRSLTSPYSPAYFGSSTLGWGSFQLGYSGSADPEPGRCRRTDGKKWRCSRDAVADQKYCERHMNRGRHRSRKHVEGQPGHAAKAMPAAVAAAAASATQPSAPAAHSGGAVAGLAINHQHQQMKNYAANTANPCSLQYSRDLANKHNESEQVQDSDSLSMLTSISTRNTGSLFPFSKQHNPFEVSNSRPDFGLVSPDSLMSSPHSSLENVNLLTSQSLNEQQSSVSLQHFVDWPRTPAQGALAWPDAEDMQAQRSQLSISAPMASSDLSSASTSPIHEKLMLSPLKLSREYSPIGLGFAANRDEVNQGEANWMPMFRDSLMGGPLGEVLTKNNNMEARNCLSESLNLLNDGWDSSSGFDSSPVGVLQKTTFGSVSSSTGSSPRLENHSVYDGNSNLRDDLGSVVVNHPSIRLV

SEQ ID NO: 3941 - protein, 482 aa, Streptococcus suis 89/1591
MKIKNQAMLITYSDSLGKNLKDLKKVLEGPLKDVVGGIHILPFFPSSGDRGFAPMDYTKVDPAFGDWSDIEALSKDYYLMFDFMINHISAKSPYFLDFLEKKDESDYADLFIRYKNFWPNGEPTQEDVDLIYKRKPRAPYRIATFADGSEEKVWCTFDEQQIDLDVTTETTRRFIQENLEQLAEHGASIIRLDAFAYANKKLGTNCFFVEPDIWEMLHFPRQLLAPKDVEILPEIHEHYTIQQKIAEQDYYVYDFALPMLVLHALYSGHVNRLVHWMEICPRKQFTTLDTHDGIGVVDVKDLLTDEETEETREALYAQGANVKKIYSTEAYNNLDIYQINCTYYSALGNNDQAYLLARVLQCFAPGIPQIYYVGLLAGENDIELLESSKEGRNINRHYYDLEEIEQEVQRPVVQSLFKLLKFRNTSPAFDGEFSVKMLDETSMEIFWNNQDAGVSARLTANLKEKSFEIVEIEEGKITTIEL

SEQ ID NO: 3942 - protein, 100 aa, Bifidobacterium angulatum
VAFFFVSRVDTAVDKLLEANGSDEAKALEGKAAVANARLAYELFENKFANDPRWAELEAKGAKKQRPLWASTGTKNAAYSDCKYVDELVAPFVVNTMPEK

SEQ ID NO: 3943 - protein, 445 aa, Haloarcula marismortui ATCC 43049
MNHEQSRALYDRALSVLSGGVNSSVRATRPYPFFVEKGDGGHVIDADGNRYIDFVMGYGPLLLGHSLPEQVQSAIQQHAAEGPMYGAPTEVEVELAEFVTRHVPSVEMLRFVNSGTEATVSAVRLARGYTGRDKIVVMQSGYHGAQESTLVEGEGDHTAPSSPGIPESFAEHTLTVPFNDEEAAHEVFEEHGDDIAAVLTEPILGNYGIVHPVEGYHDTLRQLCDDHGSLLIFDEVITGFRVGGLQCAQGAFDIDPDITTFGKIVGGGFPVGAIGGKSEIIEQFTPAGDVFQSGTFSGHPVTMAAGLETLRYAAEHDVYGHVNDLGERLRAGLQDILEDQAPEYTVVGRDSMFKVIFTRDGPDSLEGQCEAGCQQQESCPRFEYCPKTGHDVTQAETERWERLFWPAMKDQGVFLTANQFESQFICDAHTGEDIENALEAYKEAI

SEQ ID NO: 3944 - protein, 386 aa, Pseudomonas syringae pv. tomato str. DC3000
MFKALRFFGWPLLAGVLIALLIIQRYPQWVGLPSMDVNLQQAPQTTNVMQGPSSYADAVIAAAPAVVNLYTTKMVNKGTNPLFEDPQFRRFFGDNTPKQKRMESSLGSGVMMSPEGYILTNNHVTTGADQIVVALKDGRETIARVIGNDPETDLAVLKIDLKNLPAITIARSDGIRIGDVALAIGNPFGVGQTVTMGIISATGRNQLGLNTYEDFIQTDAAINPGNSGGALVDAAGNLIGINTAIFSKSGGSQGIGFAIPTKLAMDVMKSIIEHGQVIRGWLGIEVQPLTPELAESFGLKDRPGIVVAGIFRDGPAQKAGLRLGDVILAINGEPAGDGRRSMNQVARTKPKDKIAIDVMRNGKEMRLSAEVGLRPPPAPTPAAAPE

SEQ ID NO: 3945 - protein, 330 aa, Lactobacillus johnsonii NCC 533
MKVLVIGGAGYIGSHAVRKLIEEGNDVVVLDSLYTGHRKAVDKRAKFYQGDIEDTNLVSKILRDENIDAVMHFAAYSLVPESVKKPLKYYDNNVSGMISLLQAMDDAKVKYLVFSSSAATYGIPKTLPITEDTPLDPINPYGETKMMMEKIMHWADKADGIKSIALRYFNVAGASSDGSIGEDHGPETHLIPNILKSAISGDGNFTIFGDDYDTKDGTNVRDYVQVEDLIDAHILALKHVMETNKSDVFNLGTAQGYSNLEILEAAKKVTSIDIPYTIGPRRGGDPDSLVADSSKARKVLGWKPKHENVDDVIATAWNWHKSHPKGYEDK

SEQ ID NO: 3946 - protein, 247 aa, Oryza sativa (japonica cultivar-group)
MGRGKIEIKRIENTTNRQVTFCKRRNGLLKKAYELSVLCDAEVALIVFSSRGRLYEYANNSVKSTVERYKKANSDTSNSGTVAEVNAQHYQQESSKLRQQISSLQNANSRTIVGDSINTMSLRDLKQVENRLEKGIAKIRARKNELLYAEVEYMQKREVELQNDNMYLRSKVVENERGQQPLNMMGAASTSEYDHMVNNPYDSRNFLQVNIMQQPQHYAHQLQPTTLQLGSRPSISFGVDTVRTHVR

SEQ ID NO: 3947 - protein, 150 aa, Pseudomonas syringae pv. tomato str. DC3000
MQSNTPQPNPAPFLKAGETVVLFDGVCKLCNGWAKFIIRHDRRQRIRLATVQSPEGQALLEWAGLPLDRFDTMAAVTGDRLYVRSEAFFVALSDFPAPWRWLRVLRFFPAVIRDWLYDRIALNRYRLFGRYDSCLLPTPDHERRFLKASP

SEQ ID NO: 3948 - protein, 174 aa, Triticum aestivum
LSRTSLYKKAGWYRSGIPGISSTHASAHVMIGVLAILFVWSKAMTFIKKSPPDIPVVEIPEDLAVNVSRALRSDVNRSLHLLREIAMGHDLKKFLGVIAGLWVLSEVGSCCDFLTLIYIAVLMIHTVPILYDKYQDKVDHFAGKAHTEACKHYEVLDQKVLSKIPRGPAKTKKT

SEQ ID NO: 3949 - protein, 100 aa, Bifidobacterium animalis subsp. lactis
VAFFFVSRVDTAVDKKLEEIGSLEAKGLEGKAAVANARLAYELFEKKFAEDPRWAALEAKGAKKQRPLWASTGTKNAAYSDVKYVDELVAKDVVNTMPEK

SEQ ID NO: 3950 - protein, 477 aa, Pseudomonas fluorescens
SQKFDVVVIGAGPGGYVAAIRAAQLGLKTACIEKYIGKEGKVALGGTCLNVGCIPSKALLDSSYKYHEAKEAFKVHGIEAKGVTIDVPAMVARKANIVKNLTGGIATLFKANGVTSFEGHGKLLANKQVEVTGLDGKTQVLEAENVIIASGSRPVEIPPAPLSDDIIVDSTGALEFQAVPKKLGVIGAGVIGLELGSVWARLGAEVTVLEALDKFLPAADEQIAKEALKVLTKQGLNIRLGARVTASEVKKKQVTVTFTDANGEQKETFDKLIVAVGRRPVTTDLLAADSGVTLDERGFIYVDDHCKTSVPGVFAIGDVVRGAMLAHKASEEGVMVAERIAGHKAQMNYDLIPSVIYTHPEIAWVGKTEQTLKAEGVEVNVGTFPFAASGRAMAANDTTGLVKVIADAKTDRVLGVHVIGPSAAELVQQGAIGMEFGTSAEDLGMMVFSHPTLSEALHEAALAVNGHAIHIANRKKR

SEQ ID NO: 3951 - protein, 332 aa, Zea mays
MATSVSVPAGTSVSAAAVAALVPPLTGRRSPPASRVPQICRRRIRSKPRIFSSSPSFPIVPAAAMATGGAAPTASDAGSKKKLLIFDSEEDLAVSLAKYTAELSEKFAAERGAFTAVLSGGSLIEALRKLTEPPYLDSVDWSKWHVFWVDERVVPKDHVDSNYKLAYDGFLSKVPIPPGQVYAINDALSAEGAADDYEACLKQLVKNGVISMSAATGFPRFDLQLLGMGPDGHIASLFPGHPLVNEKERWVTYIKDSPKPPPERITFTFPVINSSAYVAMVVTGAGKAAAVQKALSDKQTSSDLLPVEMAVLQDGEFTWFTDKAAVSLLQNK

SEQ ID NO: 3952 - protein, 451 aa, Solanum tuberosum
MREILHIQGGQCGNQIGSKFWEVICDEHGVDPTGRYKGTAAESDLQLERINVYFNEASVDLFVPRAVLMDLEPGTMDSIRSGPYGQIFRPDNFVFGQSGAGNNWAKGHYTEGAELIDAVLDVVRKEAENCDCLQGFQVCHSLGGGTGSGMGTLLISKVREEYPDRMMLTFSVFPSPKVSDTVVEPYNATLSVHQLVENADECMVLDNEALYDICFRTLKLTTPSFGDLNHLISATMSGVTCCLRFPGQLNSDLRKLAVNLIPFPRLHFFMVGFAPLTSRGSQQYISLTVPELTQQMWDAKNMMCAADPRHGRYLTASAMFRGKMSTKEVDEQMINVQNKNSSYFVEWIPNNVKSSVCDIPPTGLKMASTFVGNSTSIQEMFRRVSEQFTAMFRRKAFLHWYTGEGMDEMEFTEAESNMNDLVAEYQQYQDATADDEEEYDDEAADDHQYES

SEQ ID NO: 3953 - protein, 216 aa, Glycine max
MSKLQSDALREAISGIMTDSKEKNRKFVETIELQIGLKNYDPQKDKRFSGSVKLPHIPRPKMKICMLGDAQHVEEAEKIGLDYMDVEALKKLNKNKKLVKKLAKKYHAFLASEAVIKQIPRLLGPGLNKAGKFPTLVTHQESLESKVNETKAMVKFQLKKVLCMGVAVGNVSMEEKQIFQNVQLSVNFLVSLLKKNWQNVRCLYLKSTMGKSYRVF

SEQ ID NO: 3954 - protein, 274 aa, Rhizobium etli
MTDCLLKCLLRHPKMRRWSMDLNQRVCIVTGGGSGIGRATAELFAKNGAYVVVADVNEDAAVRVANEIGSKAFGVRVDVSSAKDAESMVEKTTAKWGRVDVLVNNAGFGTTGNVVTIPEETWDRIMSVNVKGIFLCSKYVIPVMRRNGGGSIINTTSYTATSAIADRTAYVASKGAISSLTRAMAMDHAKEGIRVNAVAPGTIDSPYFTKIFAEAKDPAKLRSDFNARAVMDRMGTAEEIAEAMLFLASDRSRFATGSILTVDGGSSIGNHLVK

SEQ ID NO: 3955 - protein, 471 aa, Methanopyrus kandleri AV19
MEYGCLIGGEWLEGDREIVVENPYDGSEVGRVLAPEVDVEALLKDAREGQRRWRERPTYEVREALAEAAHLLKKHEDELAELIALEGGKPIRDARYEVYRTREVLRLSAAEAERLYGETLPGDAQRGRTAELILTVREPVGVVLSITPYNFPLLLPTHKLGPALAARCSVVHKPATVTPLSSLRLAEILLDAGVEPLALQVVVGPGAELGEELARADFDALSFTGSRSVGEHLREISPIPRITLELGGNDPVIVDETADVEAAAEAAVRGACYHAGQVCIAVERAIVVEDVYEEFLEAAVEVAESLKVGDPLDEDTDVGPLIDDGAVEKVRRHVEDAVERGAEILTGGEPEGRLFPPTVLADVPEDALVAREETFGPVLPVIRAKDFEEAIRIANSTDYGLHAAVFTERLDRAVKATRKLEAGGVIVNESTIYRADYMPFGGVKASGVGREGVPQAVREFTEEKTVVIGRR

SEQ ID NO: 3956 - protein, 430 aa, Ralstonia metallidurans CH34
MSRNQQLFDRAQQTIPGGVNSPVRAFRSVGGTPRFITRAEGAYMWDADGQRYIDYIGSWGPMIVGHAHPDVVRAVQETATQSFSFGAPTEAEIDMAEEICKLVPSIEQVRLVSSGTEATMSALRLARGFTGRDLIIKFEGCYHGHADSLLVKAGSGLLTFADTTQNAPSSAGVPADVTRHTMVLEYNNVTQLEEAFARHKGEIAAVIVEPVAGNMNLVRASEAFLTAMRNLCSEHGSVLIFDEVMTGFRVALGGAQAHYGIKPDMTCLGKVIGGGMPAAAFGGRRDIMAKLAPLGGVYQAGTLSGNPLAVAAGLTTLRLIQAPGFYDRLATQTRKLADGLTKAAREAGVPFCADAIGGMFGIYFTNEVPGSFAEVTKADVGRFNRFFHAMLAEGVYLAPSAFEAGFVSAKHDDAIIEATVAAAAKAFKAG

SEQ ID NO: 3957 - protein, 167 aa, Ralstonia metallidurans CH34
MRVTQTEIDSKSVDGVRIGADAGADEASAVSGRGVSGKILVIDDSSTIRRTAEIFLTNAGYQVMLAEDGFEALAKVGDLRPDVIFCDILMPRLDGYQTCSLIKKSPRFHAIPVIMLSSRDGVFDRSRGKLVGAHNHLAKPFSREALLQAVQSCLTGCVADEGAAVAA

SEQ ID NO: 3958 - protein, 440 aa, Pyrococcus furiosus DSM 3638
MTQEYCRFCGVYNLPACKVICVSVTLKGNFTFPVKSYHIELHRNPNISDQVIYPSVVQMFNPLEEAMKIKDEIISWRRDFHMYPELGYEEERTSRIVEEHLKEWGYKIKRVGTGIIADIGSGEKTVALRADMDALPIQEENEVPYKSRVPGKMHACGHDAHTAMLLGAAKIIAEHEEELNNRVRLIFQPAEEGGNGALKMIEGGALEDVDAIFGLHVWAELESGIIGLRKGPFLAGVGKFNVKIIGKGGHGAAPQYAIDPVPAVAEAILALQRIVAREIDPLESAVVTVGKVQGGTAFNVIPESVEFEGTFRFFTEELGGFIRKRISEIVSEVAKAHRCRAEVKTEILGPPTINDDRMVEFVREVAQGLGLKVGEVKKTLGGEDFAFYLQRVPGAFIALGIRNEKKGIIYPHHNPRFDVDEDILPLGTALEVALAFNFRG

SEQ ID NO: 3959 - protein, 413 aa, Wolbachia pipientis
MDKKALLELSNGSKIDLPVLSGTVGPDVLNIKDLYKKTGLFTYDPGFVSTASCSSTITFIDGDEGVLKYRGHNIADLAENNNFTAVIYLLLYGKLPSSEQHKKFLLKIQESSKVSEQVTNVIKAFPKTAHPMSILVACFANLSASYHEMHGKNVNGEDLDFGISAIAKVPAIVAMIYRHINNQEFINANNKLSYSENFLNMIFGSAVNNTLFVKALDKIFTLHADHEQNASTAAVRLVGSAGSNLFASLSAGVATLWGPAHGGANEAVINMLKEIEQSGDVDRFIEKAKDDKDPFKLMGFGHRVYKNYDPRALILKDACHEILSKLEQNNELLEIAKKLEEIALKDEYFITRKLYPNVDFYSGIIMNAIGIPSSMFTPIFALARTTGWVAQWYEMINDKETKICRPRQLYLGK

SEQ ID NO: 3960 - protein, 338 aa, Psychrobacter arcticus 273-4
MNVYYDKDCDLSIVQGKKVAIIGYGSQGHAHALNLQDSNVDVTVGLRADSGSWKKAENAGLKVAEVEEAVKAADIIMILTPDEFQKELYNDVIEPNIKQGATLAFAHGFAIHYNQVIPRSDLDVIMVAPKAPGHTVRSEFAKGGGIPDLIAIYQDASGQAKQLALSYAAGVGGGRSGIIETTFKDETETDLFGEQAVLCGGAVELVKMGFETLTEAGYAPEMAYFECLHELKLIVDLMYEGGIADMNYSISNNAEYGEYVTGPEVINEQSREAMRNALKRIQSGEYAKMFISEGATNYPSMTARRRNNAEHQIEITGAKLRGMMPWIGGNKIIDKDKN

SEQ ID NO: 3961 - protein, 543 aa, GIBBERELLA ZEAE PH-1
MSEPLQSQSQPQSPSHQQDGHNEKDAVGSRLEPVETGASYVPPHMTTLQRRLVVLSLCLTLFLCALDTTILATALPTIGNELQTSAREYAWIGSSYTLSTTAVTPVWAKISDIVGRKPSMMSATGLFMAGSLICALANSSGMLIGGRVVQGLGGGGCMVLITILIGDLFPLKDRAKYYGITGLVFGIAGAIGPVLGGVFSQAVTWRWCFYINLPFEGVALVALFFLLKVNIEKEPLIDGIRSLDWVGFAFIIGGTICFLYGLEAGSGGLAPWNSAFVICLIVFGVVILALFMVWEAKVAKNPIIPIRIFQSTTNMASFAVANLHSFIFISYDYFLPLYFQVILGFSPIISGLTLFPLILPMSISTGLGGIFVRKTGNYKIVILIGASLMAIGTGLFISLGQRKEWVKLVIFQIIAGLGCGVLFQNPMIALQTHVRQRDMAAAMSAYTFLRGLSVSISIVVGTVLIQRTVRGGNLTHVSNDAEQGETDKQGYISGLRVMWAFYTALCGLMVVSAVFILPKPVKKEASSETGTETQQSDKTDAIA

SEQ ID NO: 3962 - protein, 546 aa, Mycobacterium tuberculosis CDC1551
MDQHQRPDPMGPGSPRASARRPEPDPMGEPWWSRAVFYQVYPRSFADSNGDGVGDLDGLASRLDHLQQLGVDAIWINPVTVSPMADHGYDVADPRDIDPLFGGMPAFERLVAAAHRQGIKVTTDVVPNHTSSAHPWFQAALADLPGSPARDRYFFRDGRGPDGSLPPNNWESVFGGPAWTRVREPDGNPGQWYLHLFDTEQPDLNWDNPEILDDFEKTLRFWLDRGVDGFRIDVAHGMAKPPGLPDSPDLGIEVLHHRDDDPRFNHPNVHAIHRDIRTVIDEYPGAVTVGEVWVHDNARWAEYLRPDELHLGFNFRLARTEFDAAEIRDAVANSLAAAALQNATPTWTLANHDVGREVSRYGGGEIGLRRAKAMAVVMLALPGVVFLYNGQELGLPDVDLPDEVLQDPTWERSGRTERGRDGCRVPIPWSGNIPPFGFSTCPDTWLPMPPEWAALTAEKQRADAGSTLSFFRLALRLRRERNEFDGDVDWLAAPDDALIFRRHGGGLVCALNAAERPLALPAGEPILASAPLTDATLPPNAAAWLV

SEQ ID NO: 3963 - protein, 326 aa, Triticum aestivum
  misc_feature (93)..(93): Xaa can be any naturally occurring amino acid
  misc_feature (103)..(103): Xaa can be any naturally occurring amino acid
  unsure (1)..(326): unsure at all Xaa locations
MARSALDEVTDTGAFDRTPSTFRSFVFRDASARFPAVAGRYHLYVSYACPWASRCLAYLKLKGLDHAISFSSVKPIFERTRESDDHLGWVFPXATADEVPGAXPDPFNGAKSVRDLYEIASTNYTGKPTVPVLWDKQLRTVVNNESSEIIRMLNAEFNDIAENPGLDLNPEHLQVSIDEVNGLVYDRINNGVYKCGFAKKQGAYDKAVTTLYEALDKCEEILGKQRYMCGNQLTEADVRLFVTLIRFDEVYAVHFKCNKKLLREYPNLFNYTKDMYQIPGISSTVNMEHIRKHYYGSHPSINPYGIIPQGPNVDYNAPHDRERLFL

SEQ ID NO: 3964 - protein, 234 aa, Bradyrhizobium japonicum USDA 110
MRRPALLSLLAATTALTLAFAVPSRAAEDAVVIPAPTMDAAPASGIQTAVIAGGCFWGVQGVFQHTAGVVNAVSGYAGGTKATADYQTVSSGRTGHAESVEIKYDPKKISYGKILQIYFSVAHDPTQLNRQGPDTGTQYRSAIFTTSEEQKKVAEAYIAQLNGAKVFSKPIVTKVGALEAFYPAEAYHQDYLTLHPNQPYIAYNDLPKVENLKKLFADNYIEKPTLVNASKATN

SEQ ID NO: 3965 - protein, 113 aa, Arabidopsis thaliana
  misc_feature (47)..(47): Xaa can be any naturally occurring amino acid
  unsure (1)..(113): unsure at all Xaa locations
KKLAIFTALAFSQKLSGLSPETVFQPLLKDNLVANGIVLSFVTHFFXEYLVYNSLDDLNSILMSVKMEDNLTDFLPPVPRSADSFAEHFTISGLTDLVDVHLNTMFSVKLMEI

SEQ ID NO: 3966 - protein, 139 aa, Bradyrhizobium japonicum USDA 110
MPDAKTKTTDDKVIKSEEQWRRELSPIQYAVLREKATERPFSGEYEHDHRAGTYVCAGCGNVLFESDAKFDSGCGWPSFTQPAVESHVDEERDVSHGMIRTEVLCAKCSGHLGHVFPDGPGPTGLRYCINSAALKLEPK

SEQ ID NO: 3967 - protein, 234 aa, Brassica napus
  misc_feature (171)..(171): Xaa can be any naturally occurring amino acid
  misc_feature (218)..(218): Xaa can be any naturally occurring amino acid
  misc_feature (224)..(224): Xaa can be any naturally occurring amino acid
  misc_feature (229)..(229): Xaa can be any naturally occurring amino acid
  unsure (1)..(234): unsure at all Xaa locations
VDPRVRAPYGDHWRNLRRICALEILSSNRLTNFLHIRKDEIRIMLMRLSRDTTHSDGGSRFTHVELEPLFSDLTFNNIVRMVTGKRYYGDDVYNKEEAELFKKLVYDIAVYSGANHTADYLPVLKLFGNKFEEEVKALGKSMDEILQRLLDECRRDKDGNTMVTHLLSLQXQEPEYYSDVTIKGLMMAMMLAGTETSAITLEWAMTNLLRPLDVLKRXRSEIDXKIGEXRLIDE

SEQ ID NO: 3968 - protein, 416 aa, Salmonella enterica subsp. enterica serovar Paratyphi A str.
MLEQMGIAAKAASYKLALLSSGEKNRVLEKIADELEAQMESILSANVQDVEQARANGLSEAMLDRLALTPARLKAIADDVRQVCNLADPVGQVIDGGLLDSGLRLERRRVPLGVVGVIYEARPNVTVDVASLCLKTGNAVILRGGKETHRTNAATVRVIQKALKACGLPEAAVQAIDNPDRSLVNEMLRMDKYIDMLIPRGGAGLHKLCREQSTIPVITGGIGVCHIFVDSSADIAPALKIIVNAKTQRPSTCNTVETLLVHQDIAERFLPVLSKQMAESGVTLHGDETVMQVLHGPAKLVPLKPEELDNEFLSLDLNVVVVENMDGAIGHIREHGTQHSDAILTCDMHNAARFVNEVDSAAVYVNASTRFTDGGQFGLGAEVAVSTQKLHARGPMGLEALTTYKWIGFGDGTIRA

SEQ ID NO: 3969 - protein, 924 aa, Oryza sativa
MARNAADKGTSIDAQLRILAPKKLSEDDKLVEYDALLLDRFLDILQDLHGEDIRETVQECYELAAEYESKIAYRRRIKLKKGDFADENSATTESNFEETLKRLVGELKKSPHEVFDALKNQTIDLVLTAHPTQSVRRSLLQKHGRIRSCLTKLYAKDITPDEKQELDEALKREIQAAFRTDEIRRAPPTPQDEMRAGMSYFHETIWKGVPKFLRRVDTALKNIGINERVPYNAPLIQFSSWMGGDRDGNPRVTPEVTRDVCLLARMMAANLYYAQIEDLMFELSMWRCSDELRVKADQLHRCAKKNTTKHYIEFWKQVPPSEPYRVILSNVRDKLYNTRERARHLLASGFSEIPDEATFTDVEQFLEPLELCYRSLCACGDNSIADGSLLDFLRQVSTFGLSLVRLDIRQESDRHTDVMDAITQYLGIGSYREWSEEKRQEWLLSELNGKRPLFGPDLPQTDEIADALDTFHVIAELPYDSFGAYVISMATAPSDVLAVELLQRECHVKKPLRVVPLFEKLADLEAAPAALARLFSVDWYRNRIDGKQEVMIGYSDSGKDAGRFSAAWELYKAQEELIKVAKQFGVKLTMFHGRGGTVGRGGGPTHLAILSQPPDTIHGSLRVTVQGEVIEQSFGEEHLCFRTLQRFTSATLEHGMHPPISPKPEWRALMDEMAAVATKEYRSIVFQEARFVEYFRLATPELEYGRMNIGSRPSKRKPSGGIESLRAIPWIFAWTQTRFHLPVWLGFGAAFKHVLQKDIRNLQILQEMYNEWPFFRVTIDLVEMVFAKGDPGIAALYDKLLVSEDLWPFGARLRANYEETKQLLLQVAGHKDLLEGDPYLRQRLRIRDSYITALNVCQACTLKRIRDPGFHVSPRAHLSKDIMDSGKPAAELVKLNTTSEYGPGLEDTLILTMKGIAAGMQNTG

SEQ ID NO: 3970 - protein, 367 aa, Salmonella enterica subsp. enterica serovar Paratyphi A str.
MSDSQTLVVKLGTSVLTGGSRRLNRAHIVELVRQCAQLHAAGHRIVIVTSGAIAAGREHLGYPELPATIASKQLLAAVGQSRLIQLWEQLFSIYGIHIGQMLLTRADMEDRERFLNARDTLRALLDNHIVPVINENDAVATAEIKVGDNDNLSALAAILAGADKLLLLTDQQGLFTADPRSNPQAELIKDVYGVDDALRSVAGDSVSGLGTGGMSTKLQAADVACRAGIDTIIASGSKPGVIGDVMEGISVGTRFHAQASPLENRKRWIFGAPPAGEITVDEGATAAMLERGSSLLPKGIKSVTGNFSRGEVIRICNLQGRDIAHGVSRYNSDALRRIAGHHSQQIDAILGYEYGPVAVHRDDMITR

SEQ ID NO: 3971 - protein, 476 aa, Glycine max
MGGGFRVLHLVRPFLSFLPEVQTADRKVPFREKVIYTVISLFIFLVCSQLPLYGIHSTTGADPFYWMRVILASNRGTVMELGITPIVTSGLVMQLLAGSKIIEVDNNVREDRALLNGAQKLLGILIAVGEAVAYVLSGMYGSVGQLGVGNAILIILQLCFAGIIVICLDELLQKGYGLGSGISLFIATNICENIIWKAFSPTTINSGRGAEFEGAVIALFHLLITRTDKVRALREAFYRQNLPNVTNLLATVLIFLIVIYFQGFRVVLPVRSKNARGQQGSYPIKLFYTSNMPIILQSALVSNLYFISQLLHRKYSGNFFVDLLGKWKESEYGGGQSVPVGGIAYYITAPSSLADMAANPFHALFYLVFMLSACALFSKTWIEVSGSSARDVAKQLKEQQMVMPGHRESNLQKELNRYIPTAAAFGGICIGALTVLADFMGAIGSGTGILLAVTIIYQYFETFEKERASELGFFGF

SEQ ID NO: 3972 - protein, 304 aa, Debaryomyces hansenii CBS767
MSNSVLRSPLTHSLNIALIQLKAGADKAANLSKVTKFIDSAVKTSNVGKLHLVVLPECFNSPYAVDQFRNYAELIPSGETTNLLSSLAKKHGIFIVGGSIPELDQENDKIFNTSLTFSPEGKIIAKHRKVHLFDIDIPGGITFKELVTLSAGDKATVFKLGEFGNVGLGICYDIRFPELAMIASRNPYNSFAMFYPGAFNTTTGPLHWHLLAKARAVDNEMFTILCSPARDVGGGGYQAYGHSLVVDPYGAIIAEAGEEEEILFATLDKELLPKAREGIPVHYQRKFDVYDDFVGNGGVKVSDL

SEQ ID NO: 3973 - protein, 473 aa, Debaryomyces hansenii CBS767
MGTASIKSGTINLLNTIVGAGILAMPFGLKSNGLLFGCLLIVWSSLTSSFGLYLQNKVAKYTQQQEAVSYFSLAQLTYPQLSIIFDSAIAIKCFGVGVSYLVVIGDLMPKIMESLHVSPDSVLMARNLWISVFMVCIVIPFSYLKKLDSLKYTSIVALFSVVYLICLVISHFVARDIPVESIQVDWVGPVSVKSTLASFPIFVFAYTCHQNMFAIINELKPNEKQGSQTRQSNVIIRNAISTACISYLIVGVSGYLTFGNSVGGNIISMYPKDSILSLIGRLCIVIMVSLSYPLQCHPCRGSINHVIFFIKNGFKAHLKAKRSANAPEYTSLASDAESQTDSQLETLADETFISTTPVEGAQDSDGHYPIVVKLSTKMFYIITTAILVLSYLVAITVTSLEHVLAFVGSTGSTSISFILPGLFGYLLIKPINGATELDRVERICKFGGLALAIWGVTVMIVCLSATIFLGATE

SEQ ID NO: 3974 - protein, 462 aa, Oryza sativa
NGASTPAKLLQRVVNSLAIEMFAGLASDGGSKVRMLLTCVDALPDGSSHDMTRSEEGISYAIDLGGTSFRVLKVELGAGSTIINRKVEHQPIPENLTKGTSDDLFNFIASALKNFIEREGGEVEGRALGFTFSFPVRQTSISSGTLIRWTKEFSIEEAVGKDVAQCLNEALARNGLNMKVNVLVNNTVGTLALGHYYDDDTVAAVIIGAGTNACYIERNDAIIKSLGRVTNSERTVVNVEWGSFRPPQIELTPYDICFNNETWNYYDQGFEKMISGVYLGEIARLVFQKMAEESDIFGTAVDGLSTPFVLSTPNLAAIREDDSPDLREVGKILEEHLKLPDVPLKTRKLVARVSDIITRRAARLAAAAIVAILQKIGCDGTLCGSTQVRTMRGVRRRTVVAIEGGLFEGYSVFREYLNEALVEILGEEIAATVSLRVMEEGSGTGAALLAAAYSSARQKNSE

SEQ ID NO: 3975 - protein, 208 aa, Desulfitobacterium hafniense DCB-2
MNVLLFGGFLGAGKTSLILSAAKFLVENNLTAQATNPAKPSLIIIENEVGETGIDDKILKANGLMVRELFSGCICCTLTSELTVTLNELYETYDPQWVIVEATGMTYPHRIAETIHTYGKGVENLKIMIVADAERWEELMEIVPGLVEGQIAKADLIFLNKIDCMHHEALAEIEKSLHHLNPAAQIHCVSAFRGINPEIWREAVWRNE

SEQ ID NO: 3976 - protein, 402 aa, Geobacillus kaustophilus HTA426
MNQHSRAMSVRYRRSASAVCFRQEFFIVIQPLYVHPELSFQEEKTAQFVYETLQSFGHLELSRPTKTSVMARLIGQQPGRVVAIRADMDALPIQEENTFEFASKNPGVMHACGHDGHTAMLLGTAKIFSQLRDDIRGEIRFLFQHAEELFPGGAEEMVQAGVMDGVDVVIGTHLWSPLERGKIGIVYGPMMAAPDRFFIRIIGKGGHGAMPHQTIDAIAIGAQVVTNLQHIVSRYVDPLEPLVLSVTQFVAGTAHNVLPGEVEIQGTVRTFDETLRRTVPQWMERIVKGITEAHGASYEFQFDYGYRPVINYDEVTHVIEETARELLGEEAVARLKPNMGGEDFSAFLQKAPGSFFYVGARNEEKGIVYPHHHPRFTIDEDALEIGVQMFVAATLKLLAGAE

SEQ ID NO: 3977 - protein, 309 aa, Bacillus cereus ATCC 10987
LFFVYNIEMLYMNRGRDVMSKFTVASNGSLETTLRGVEVLSTPLLNKGVAFTQEEREELGLKGLLPPAVLTLEEQARRAYEQFCSQPDDLLKNVYLTALHDRNEVLFYRILTDHLREMLPIVYTPTVGVAIQRYSHEYRKPRGVYLSINDPSGIEEAFANIGATAENIDLVVVTDGEGILGIGDWGVGGINIAIGKLAVYTAAVGIDPSRVLPVILDVGTNREELLNNPFYIGNRHPRITGEAYDEFIDTFVRAVNKQFPKALLHWEDFSSRNARKILDKYRHDICTFNDDIQGTGAVSLAAVLSAVKA

SEQ ID NO: 3978 - protein, 129 aa, Triticum aestivum
MKTRSQTTPKPLNTVRLPPVESPRTRSRPKPKPETRKKGTLGDLRRPKKPPTAFFYFMEDFRKTFQEENPSVKAMQDVGKACGEKWNKMAFEEKVKYYDLATERRAEFEKAMAQYNKKKINGELSEESE

SEQ ID NO: 3979 - protein, 172 aa, Brassica napus
MASSSPTQRTHVPIPPEPGGGGRSLTQDANEPPVPIHIVTEPLQLPADFLNPSPEKKLVIGFDCEGVDLCRHGKLCIMQIAFPNAIYLVDVIQGGEVLMKACKPALESAYITKVIHDCKRDSEALYFQFGIRLHNVVDTQIAFSLIEEQEGRRRPLDDYISFVSLPPVPPHC

SEQ ID NO: 3980 - protein, 358 aa, Solanum tuberosum
  misc_feature (277)..(277): Xaa can be any naturally occurring amino acid
  unsure (1)..(358): unsure at all Xaa locations
MSCYKGKYADELIKNAAYIATPGKGILAADESTGTIGKRLSSINVENVESNRRALRELLFCAPGALQYLSGIILFEETLYQKTAAGKPFVDVMKEGGVLPGIKVDKGTVELPGTNGETTTQGLDGLAERCQKYYAAGARFAKWRAVLKIGANEPSQLAINDNANGLARYAIICQQNGLVPIVEPEILVDGSHDIKKCADVTERVLAACYKALNDHHVLLEGTLLKPNMVTPGSDAPKVAPEVIAEYTVRALQRTMPAAVPAVVFLSGGQSEEEATRXLNAMNKLQTKKPWTLSFSFGRALQQSTLKAWSGKEENIGKAQAALLTRCKANSEATLGKYAGSSNLGDGASESLHVKDYKY

SEQ ID NO: 3981 - protein, 400 aa, Solanum tuberosum
MNKRSFKYAWVLDKLKAERERGITFDIALWKFETTKYYCTVIDAPGHRDFIKNMITGTSQADCAVLIIDSTTGGFEAGISKDGQTREHALLAFTLGVKQMICCCNKMDATTPKYSKARYDEIVKEVSSYLKKVGYNPDKIPFVPISGFEGDNMIERSTNLDWYKGPTLLDALDQINEPKRPTDKPLRLPLQDVYKIGGIGTVPVGRVETGVIKPGMVVTFGPTGLTTEVKSVEMHHEALLEALPGDNVGFNVKNVAVKDLKRGFVASNSKDDPAKGAASFTAQVIIMNHPGQIGNGYAPVLDCHTSHIAVKFAEILTKIDRRSGKELEKEPKFLKNGDAGMVKMIPTKPMVVETFAEYPPLGRFAVRDMRQTVAVGVVKNVDKKDPTGAKVTKAAQKKGK

SEQ ID NO: 3982 - protein, 457 aa, Escherichia coli
MQKYISEARLLLALAIPVILAQIAQTAMGFVSTVMAGGYSATDMAAVAIGTSIWLPAILFGHGLLLALTPVIAQLNGSGRRERIAHQVRQGFWLAGFVSVLIMLVLWNAGYIIRSMENIDPALADKAVGYLRALLWGAPGYLFFQVARNQCEGLAKTKPGMVMGFIGLLVNIPVNYIFIYGHFGMPELGGVGCGVATAAVYWVMFLAMVSYIKRARSMRDIRNEKGTAKPDPAVMKRLIQLGLPIALALFFEVTLFAVVALLVSPLGIVDVAGHQIALNFSSLMFVLPMSLAAAVTIRVGYRLGQGSTLDAQTAARTGLMVGVCMATLTAIFTVSLREQIALLYNDNPEVVTLAAHLMLLAAVYQISDSIQVIGSGILRGYKDTRSIFYITFTAYWVLGLPSGYILALTDLVVEPMGPAGFWIGFIIGLTSAAIMMMLRMRFLQRLPSAIILQRASR

SEQ ID NO: 3983 - protein, 767 aa, Bifidobacterium longum NCC2705
MSTLTSVSGFPRIGQNRELKKIIEGYWKGANDLAAVKATAAELRAKHWKLQQAAGIDLIPSNDFSYYDQMLDTAILLNVIPQRYARLSFDNQEDTLFAMARGYQGDKGDVTALPMKKWFTTNYHYLVPEVESAAEIKLNSTKPFDEFNEAKALGIDTKPVFIGPYTFLKLARTPEATELELDKGLVNAVAAVYVEVLAKFNELGAAWVQLDEPYLVLDKEPGDVELFKTLYTKILSAKGNVKVLLNTYFGHIADVYETVNLLGFDGIGLDLNEGREENLEAVAKYGVASNTTIFAGVINGRNIWRNNYATSLGLVDALKQVTANVAVSTASSLLHVPFSTEGETGIPAEDLKHFAFAVQKLDELKEVAALADATEDEKKASAALAANQALFDGTRVAADPAVAERIGKLSDADYVRQPAREERQALQREALGLPLLPTTTIGSFPQTKEIRAERAKLRKGEVTKEAYDEFIKAQIDAVIKKQEEIGLDVLVHGEFERNDMVEYFGQNLNGFLFTKNAWVQSYGTRCVKPPIVWGDVSRANPITVEWSAYAQSKTDHVMKGMLTGPVTILNWSWPREDITHEEQTKQLALAIRDEVLDLEAAGIKVIQIDEAALREKLPLRKSDWHVKYLDWAVPAFRLVHSAVKPTTQIHTHMCYSEFNDIIRDIDAMDADVISFEASRGDLVVLDAIHDAHFETEAGPGVYDIHSPRIPSEKEIEDRIYEILDKMDVKKVWINPDCGLKTRGNAETWPSLENLVAAAKAVRAKLDK

SEQ ID NO: 3984 - protein, 657 aa, Caulobacter crescentus CB15
MFCRATLLSDGSEALGTFRHTLAKSEVLGAMSENRNHNVSSHAPLQARIAGVALATTVLALVAACLCFMLQQWSVARQEARANHEVLVQMAAAGAAAPLADHNMVGVYRALEAVAKAPGVAGVRIIDAKGRAVAQLGEANPSNADTLQRPIKLSSQTVGTLVLVAKRPGLAQTLARDLALTGALFFGAAGMAILLANSLARRLAQPMERLSEAMHETAVGGRFKALEETADDDVFRSLIASFNHLVARLECNDQDLRGAMAELVKARDDANAANVLKSHFLANMSHEIRTPLNGVLAMADVMAMDQLSDIQRERLAVIRESGAVLLGVLNDVLDLSKIEAGRLEIQDRPFDIAQLAQSIRETFVPQARAKGLAFEVGVAPEAQGLWRGDADRLRQILGNLISNALKFTLDGAVAVRFASAEDGSGLRIDVADTGIGISPEILPRLFDKFVQADSTTTRRFGGSGLGLAICRELAAMMNGSIKVQSREGRGSTFTVLVGLPREETLTDVHYIDDGDPIMAPPAAEPPRLRVLAADDNPTNQKVVAAVLAPLNADVTLVDDGAACVEAWKTGDFDVVLMDIHMPVMDGLEAARSIRATEQAEMRRRTPIIAVTANALTHQIEEYLSVGMDGHVAKPIEVSKLYDAIEAAMAGTRLSRAA

SEQ ID NO: 3985 - protein, 261 aa, Zea mays
  misc_feature (8)..(8): Xaa can be any naturally occurring amino acid
  misc_feature (12)..(12): Xaa can be any naturally occurring amino acid
  misc_feature (78)..(78): Xaa can be any naturally occurring amino acid
  misc_feature (84)..(84): Xaa can be any naturally occurring amino acid
  misc_feature (106)..(106): Xaa can be any naturally occurring amino acid
  misc_feature (113)..(113): Xaa can be any naturally occurring amino acid
  misc_feature (158)..(158): Xaa can be any naturally occurring amino acid
  misc_feature (232)..(232): Xaa can be any naturally occurring amino acid
  misc_feature (256)..(256): Xaa can be any naturally occurring amino acid
  unsure (1)..(261): unsure at all Xaa locations
SRPVSDTXAALXAKGKTAFIPYITAGDPDLATTAEALRLLDGCGADVIELGVPCSDPYIDGPIIQASVARALASGTTXDAVLEXLREVTPELSCPVVLLSYYKPIXSRSLAEXKEAGVHGLIVPDLPYVAAHSLWSEAKNNNLELVLLTTPAIPEDRXKEITKASEGFVYLVSVNGVTGPRANVNPRVESLIQEVKKVTNKPVAVGFGISKPEHVKQIAQWGADGVIIGSAXVRQLGEAASPKQGLRRLEEYARGXKNALP

SEQ ID NO: 3986 - protein, 151 aa, Triticum aestivum
MGALDHLSDSCSMTETKEALKLRKKRPLHTVNIKVKMDCEGCDRRVNNAVESIRGVTSVAVNPKMSKMTVTGHVKPRKVLYRVKSTGKAGDMWPYVPYTLATYPYVGGAYDKKAPGGFDRRAPEDMADPAAPDIHYMNMFNDEDVNACTVM

SEQ ID NO: 3987 - protein, 318 aa, Medicago sativa
MATENKILILGPTGAIGRHIVWASIKAGNPTYALVRKTPGNVNKPKLITAANPETKEELIDNYQSLGVILLEGDINDHETLVKAIKQVDIVICAAGRLLIEDQVKIIKAIKEAGNVKKFFPSEFGLDVDRHEAVEPVRQVFEEKASIRRVIEAEGVPYTYLCCHAFTGYFLRNLAQLDTTDPPRDKVVILGDGNVKGAYVTEADVGTFTIRAANDPNTLNKAVHIRLPENYLTQNEVIALWEKKIGKTLEKTYVSEEQVLKDIQESSFPHNYLLALYHSQQIKGDAVYEIDPAKDIEASEAYPDVTYTTADEYLNQFV

SEQ ID NO: 3988 - protein, 355 aa, Kluyveromyces lactis NRRL Y-1140
MANTESDITRVLGGIYVGGIQPIANHVPLKVNYQITHILSVIKFEIIPEYLVRKSYTLKNIPIDDNLSTDVLQYFNETNRYIDSCLFPDEIELDRVKVDFKKKPQKGAIYIHCQAGVSRSVTFAVAYLMYRYGFNLKTALHAVKRKRSVAEPNENFMEQLKLYEAMGSNIVDVENKDYKQWKLQNSIKTDPLGANIMAQNEMYKSEEVEAEKVAKLSKEEVEDVSAIRCKKCRFRLAFSTSFIKHDPPSKESMEGHFIRRAAGSRRIIDIQQSQDRCSHYFVEPLEWMKKELQKQELEGKFFCPNCDSKIGGYNWKGSRCSCGKWMIPAIHIQTAKVEQIALTRKDLPNLVSFEE

SEQ ID NO: 3989 - protein, 449 aa, Listeria monocytogenes EGD-e
MEKHYDYIAIGGGSGGIASINRAAMHGAKCALIEPKFLGGTCVNVGCVPKKVMWYGAQIKEAMDLYADAYGYQVDASFNFQKLVENREAYIERIRGSYKNGLDNNNVDWIKGYAEFVDEKTLRVNGELVTADHILIATGGEPALPSIPGAEFGITSDGFFALKELPKKVAVVGAGYIAVELAGVLQQLGSETHLFVRKHAPLRNFDPLLTDTLTEIIEQSDMTLHKHAIPQKVEKNPDGSLTLSLEDGRTETVDTLIWAIGRKPVIKGLQIEKSGVELLESGHIAVDKFQNTNVAGIYAVGDVTGHYELTPVAIAAGRRLSERLFNNKKDAHLNYENIPTVVFSHPAIGTVGLTEPEAIEKYGKENIKVYTSSFTSMYTAITDHREPCRMKLICEGKTERVIGLHGIGYGVDEMIQGFAVAINMGATKADFDNTVAIHPTGSEEFVTMK

SEQ ID NO: 3990 - protein, 330 aa, Oryza sativa (japonica cultivar-group)
MAQLPPKIPTMATAWPEFGGGHHHHAAHGHHHQRSPSMGAFLAAPLPPFPLPPPAPANGGAQQQQQQQQHQPSWVDEFLDFSATKRGAHRRSVSDSVAFLDPVSDDNAGVGAHDFDRLDDDQLMSMFSDDLQPPPPQQQPAAPAASASSPSDHNSMNDEKQDKGETDEAQSECDGATPGQPASPATVDPKRVKRILANRQSAQRSRVRKLQYISELERSVTSLQTEVSALSPRVAFLDHQRSLLTLGNSHLKQRIAALAQDKIFKDGGTEEGDREAAANLPPAKPQERGIPTGGRGPGPRPRQCRPDRQRGGRRGRAMPALVIGRDPDAL

SEQ ID NO: 3991 - protein, 412 aa, Thiomicrospira crunogena XCL-2
MKMRRVVMTGVGCVTPLGNTVEETWSGLLKGQSGIDFLTTFDTENFAVKFGGEIKGFDITEYIMAKEAKKMDPFIHYGLAAGTQALKDSGLEVTDDNACRIGVSIGSGIGGIGSIEKQHGIMDKSGPRRVSPFFVPSSIINMVSGNLSIMHGLKGPNMAIGTACATGTHSIGDAYRMIQFGDADVMIAGGAEHATTQLGVAGFAAAKALSTRNDDPKAASRPWDQGRDGFVLSDGAGAVVLEEYEHAKARGAEIYCEIVGFGMSGDAYHMTKPADGGEGGARCVTNALNNAGITPDQVDYINAHGTSTPAGDVCEASAIKSVFGEHAHRLAVSSTKSMTGHALGAAGAMEAVFTALAIKEQVLPPTINLETPAEGCDLDFVPGEARQAKVTYAVSNSLGFGGTNASLVFGKV

SEQ ID NO: 3992 - protein, 308 aa, Zea mays
PTRPVNWLERFPQYKHRDFYITGESYAGHYVPQLSQLVYRNNKGIEKPILNFKGFMVGNAVIDDYHDFIGTFEYLWTHGLISDETYGKLRLACQFDVSEHASKECNKVFDIAEAEEGNIDAYSIYTPTCKKTSLHKRRLIRGRTPWLPRGYDPCTEKYSTKYYNLPEVQRALHANVTGIPYPWVTCSDPVYDFWKDSPRSMLPIYRELIAAGIRIWVFSGDADSVVPLTATRYSIDALFLPTITNWYPWYDDEEVGGWCQVYEGLTLVTVRGAGHEVPLHRPRQGLKLFEHFLRGEPMPRPVDSVQSF

SEQ ID NO: 3993 - protein, 433 aa, Oryza sativa
  misc_feature (34)..(34): Xaa can be any naturally occurring amino acid
  unsure (1)..(433): unsure at all Xaa locations
MDIWRHIHSLLSLQDAARAACVSRAFLCLWRVEXARDYNKKVDRILKKHSGTGMKKFEIEFYGPSNANTYYHLNNWLEIAITSGIEELTLRLTPDVTKYNFPCSLLSDGRGDLIQSLHLSHCSFRPTVEVVSLRSLTSLDLCLVRITDRELGILLSNSLVLEKLGIKYCDKINCLKIPCVLERLSSLEVFECYSLQMVESKAPNLCSFCFGGEQVQFSIGEPLQMKNLQVIFPNSISFGRAELPFSMPNLETLNISSRCEMSHTPTAPGKFLHLRYLSITFAGWRFSRAYDYFSLVSFLDASPLLETFILCILQKGKHDLTLRDPIYPRQMSERQHDSLKNVKINGFSSTKSLVELTCHILQNTTSLECLTLDTTRIEFRCSDSSVDVCLPSDRDAIKGAHKALLAIRTYIEGIVPATVKFSVLEPCRRCYAW

SEQ ID NO: 3994 - protein, 601 aa, Yersinia pestis KIM
MIHKLHQYHLVRRLRQQVSDRSELVAFREWSPEGEKQLNWQQIDEHVTRISTALLSLGAAIQERIGIFANNSMAWSLVDLAILQLRGVSVPLYATNTAAQAAYIVNDADVRILFVGEQSQFDIAITLQPLCPQLAHIIVLDPAVDLRGCEYAQHLADFEQQQQPDTVQQHLLTTRIEGCDLDDLFTLIYTSGTTGEPKGVMLDYRNMAAQLYLHDQRLTLTPQDVSLSFLPLSHVFERAWSFYVMHTGAQNVYIRNTDWVRSAMQAVKPTVMCAVPRFYEKVFSAINDKVALAKWHQRVLFHWAVGCGERKFKRLQQGRPLPWLSEQMYTLADRLVLRKLRGVLGGRVRFLPAAGARLDDNIILFFQAIGVNIKYGYGMTETCATVSCWEEQNFRFGSIGKPLPGIDVRLGAENEIQVRGPIVMRGYFKKPQETLEAFTEDGWLKTGDAGALDAQGHLFITERLKDLMKTSGGKYIAPQMIEGTLGQDRFIEQVAIIADTRKFVSALIVPSFESLEEYARSINLKYHDRLELLRHSHIVNMFEQRLKEIQKELALFEQVKKFTLLPQAFTMETGELTPTMKLRRKIILQRYQNEIDLMYSD

SEQ ID NO: 3995 - protein, 394 aa, Geobacillus kaustophilus HTA426
MTKEEIKRLVDEVKTDVIAWRRHLHAHPELSFQEEKTAQFVFETLQSFGHLELSRPTKTSVMARLIGQQPGRVVAIRADMDALPIQEENTFEFASKNPGVMHACGHDGHTAMLLGAAKIFAQLRDQIHGEIRFLFQHAEELFPGGAEEMVQAGVMDGVDVVIGTHLWSPLERGKIGIVYGPMMAAPDRFFIRIIGKGGHGAMPHQTIDAIAIGAQVVTNLQHIVSRYVDPLEPLVLSVTQFVAGTAHNVLPGEVEIQGTVRTFDAELRQTVPQWMERIVKGITEAHGASYEFQFDYGYRPVINYDEVTRVIEETARELLGEEAVARLKPNMGGEDFSAFLQKAPGSFFYVGARNEEKGIVYPHHHPRFTIDEDALEIGVQMFVAATLKLLAGAE

SEQ ID NO: 3996 - protein, 542 aa, Oryza sativa (japonica cultivar-group)
MGARASRHRQSPDQSQSQSPSPHHKHHHHHQTTRAPKPKPKPQPPPPQQPRSQPPPPPRHQPQQAPQQAAAEDGVGRVLGRPMEDVRATYTFGRELGRGQFGVTYLATHKPTGRRYACKSIAARKLARPDDLDDVRREVHIMHHLTGHRNIVELRGAYEDRHSVNLVMELCEGGELFDRIIARGHYSERAAAALCREIVSVVHSCHSMGVMHRDLKPENFLFLNKREDSPLKATDFGLSVFFKPGEQFRDLVGSAYYVAPEVLKRLYGAEADIWSAGVILYILLSGVPPFWAENEDGIFDAVLQGHIDFSSEPWPSISSGAKDLVKRMLRQDPKERLTAAEILNHPWIREDGEAPDKPLDITVISRMKQFRAMNKLKKVALKVVAENLSEEEIVGLKEMFKSLDTDNSGTITLEELRAGLPKLGTKISESELRQLMEAADVDGNGSIDYVEFISATMHMNRLEKEDHIYKAFEYFDKDHSGFITVDELEEALTKYDMGDEATIKEIIAEVDTDHDGRINYQEFVAMMKNNSPEIVPNRRRMF

SEQ ID NO: 3997 - protein, 262 aa, Brassica napus
  misc_feature (106)..(106): Xaa can be any naturally occurring amino acid
  unsure (1)..(262): unsure at all Xaa locations
RPTRPELTRTIVGVVEACHSLGVMHRDLKPENFLFVSKHEDSLLKTIDFGLSMFFKPDDVFTDVVGSPYYVAPEVLRKQHGPEADVWSAGVIVYILLSGVPPFWAXVLHGDLDFSSDPWPSISESAKDLVRKMLVRDPKKRLTAHQVLCHPWVQVDGVAPDKPLDSAVLSRMKQFSAMNKFKKMALRVIAESLSEEEIAGLKEMFNMIDADQSGQITFEELKAGLKRVGANLKESEILDLMQAADVDNSGTIDYQEFIARTL

SEQ ID NO: 3998 - protein, 495 aa, Rhizobium etli
MAISSTLLGRLKDQTLVREQMLVGGKWSSEGVNGTRINVLNPSTMDVLASLPSAGLAEVRASIDAAKAAQKKWAKVSAKERSLIMRKFYEEVVANAEDLAVILTSEMGKPLAEARGEIAYGASYIEWFGEEAKRVYGDTIPGHQADKRLLVIKQPVGVVAAIAPWNFPSAMVCRKIAPALASGCAIVFKPAAETPLSALALAILAERAGIPDGLFSVLPTDNARMFGEEVCSNPVVKKLTFTGSTEVGRILMAQGAQKIMKLSLELGGNAPFIVFDDADLDQAVEGAMLSKFRNAGQTCVCANRIYVQSGIHDRFVEKLAMRVSALQVLDGFESGATIGPLINDEAVAKLYGHIDDAVTKGATVVVGGDRDARGGTFVQPTLLSGATKDMKVAREETFAPLAPVFKFDTVEEVIELANDTEFGLAAYFFANDLRNVWKVTEALEYGMVGVNTGLISTELAPFGGVKQSGFGREGSKYGMDDFLSMKYVCMGGIGA

SEQ ID NO: 3999 - protein, 286 aa, Oryza sativa (japonica cultivar-group)
MAGGEHGVNGQHEETRAMEEGSRDHQARCENSEQDGGSKSSSNNHPMFSVQFAQKVIAEILGTFFLIFAGCAAVAVNKRTGGTVTFPGICITWGLAVMVMVYSVGHISGAHLNPAVTLAFATCGRFPWRRVPAYAAAQVAGSAAASAALRALFGGAPEHFFGTAPAGSDVQSLAMEFIITFYLMFVVSGVATDNRAIGELAGLAVGATVLVNVLFAGPISGASMNPARTIGPAIILGRYTGIWVYIAGPVFGAVAGAWAYNLIRFTDKPLREITMTASFIRSTRRN

SEQ ID NO: 4000 - protein, 583 aa, GIBBERELLA ZEAE PH-1
MSLPNPVDPGAKVLHRVLEAQHDAPYRDSEASSSDSAVDTDVQHGIQEIEAVTLSWSKTSLLVAFVLIWLVYFVQGLVGGISGALLPYVTSDFAMHSLTATTSVMSFVIGGVTNLSIAKTLDVFGRPQGFMFCAITATIGLIMSAACNNVEAYAASQVFYTVGINGVGYSLSVFIADTTSLRNRGLIQSICASPNIITAWIGGPIATAFLKGAGWRWAFGMESILVPFVTIPLFSLFMVHYQRAKSQGLMPNRESKGSFLDATRYYIREFDLVGLLSLSTGVALFLLPFNLYTMQAKGFGSPMIICFFVFGILLLIFFGIWERFFAKVSFIPWRFLLDRTVTGACLLSFSMFFSSGCWSLYFTSILQVVNNLSVTNASYIVSAYTVGGFLFAILIGWILSYTGNFKATTLYVALPFATLGTGLMIFFRQPDQSIGYIVMSQLILAVGSGSIMITAEIAILAAVSEQQYFAVAIALVSMCSSIGQAVGLTVSSAIWQDVIPRKLAEYLPAEDLPNLPIIAADIVTQLSFPVGSPTRLAIQHAYGDAHKLLFIAGTAAWVLGFVGTLMWKNINIKNIKQTKGRVA

SEQ ID NO: 4001 - protein, 392 aa, Moorella thermoacetica ATCC 39073
MAAVAPRGNKGVAFLKRFFPGGLRRYRILLLVSLVFLSSILGAGAALYFAPRLMFRPLPPASPPQGLINQPVGLPAQYTADSPVVTIARQVGPSVVGVQAMTGTNYTGDGVVKQGSGVIFDTTNGYIVTNNHVIAGAGRITVSLDREQTYPATLVGADERSDLAVLKVQGPNLPQARLGDSSTLQVGETVVAIGNPLGREFARSVTVGVISALNREVTVPGSRGVEITLRVLQTDAPINPGNSGGALVNLRGEIIGINSVKIAASGVEGMGFAIPINDVRPIIDQIITRGYVTHPFLGVYNLQEITPEMAQWYNIPVGVYVGGVFKDGPAAKAGLQVGDVITAVENQKVATYDDIQRLINKKSPGDQVTVTIRRLKSPNPVNYTITLGELPK

SEQ ID NO: 4002 - protein, 545 aa, Moorella thermoacetica ATCC 39073
MTRHYRYLQRYTEVATVLLRHGWQAYCETRPRRAPARRPLVTGREPGDPVYRHLRLAFEELGPVFIKLGQLLSTRPDLIPTEMAAEFSYLQDRVRPLAPDVIRQQVFRELGTAPEKAFSYFDYQPLAAASIAQVHKARLPGGQEVAVKVQRPQLDGVVVTDLAVLENLGRRFKGTVVGRICALEEILATFRRQIERELDFTVEALAMENFRRLYREFPQIVVPRVYWDYTTRGLLTMDYLAGKRLSDWYGKGTDCQRAALLIKALLAPFFQEGIFHGDPHPGNILFLPGGRLGLIDFGIVGRLDEDYRYQAARLILGLQERDLQAVMEVTLKLGKPMAAVDYQALYEDTAELVDRVTGMGKGDVNLAGLLLGMVELARRHSIRMPGTFFVLGRTIMEGESLARRLDPSLDLVQVSGPLAASYLRSRLRPNPTPGRTYHRAASTLQDLLELPRDISRSLDKLARGQLTTIFVHRGLETLYHRLDMVSARLSAALIVAALIGAGALILHAGAGPKTGGLSLLGLGVLGGALILGCLWALLLKVGQKE

SEQ ID NO: 4003 - protein, 340 aa, Moorella thermoacetica ATCC 39073
MLMVLRFLVGLGLGAEVPVAFTLASEFSPVQYRGRMAVLLESFWAFSWIAAALIGYLAVPHWGWRLAFFIGALPALYAAVLRRALPESPRYLEKIGKESEARAIVESIERSCGVDPGKVATSPAAATAETSVKATFADLWSSRYARRTLCLWILWFGINFSYYGIVTWLPSLMVGKGFAIIKSFEYVLIMTLGQVPGYFSAAYLVEKIGRKATLVSYLILSGVAAYMFSLSTTTSQIIWWGLAVYFFNLGAWGVLYAYTPEMYPTAIRATGSGWASFCGRIGAILAPVIVGQMIVVMGQAKAYPLIFVLFTAVFVITALGMLALGIETKGKTLEELAGIR

SEQ ID NO: 4004 - protein, 428 aa, Yersinia pseudotuberculosis IP 32953
MVRFESTDSLMLARQLPNKTVALILAGGRGSRLKDLTATRAKPAVHFGGKFRIIDFALSNCLNSGVRRIGVITQYQSHTLVQHIQRGWSFLNEEMNEFVDLLPAQQRLSTEQWYKGTADAVCQNLDIIRRYDAEYIVILAGDHIYKMDYSRMLLDHVEKGAECTVACIPVPISEGSEFGIMEVTADYQITAFYEKPANPPPIPGDPSNALASMGIYIFNADYLFKLLEEDNNTPGSSHDFGKDIIPQLTARKVVWAHPFDLSCVTSNAELPPYWRDVGTLDAYWRANLDLASVTPELDMYDRAWPIRTHMEPLPPAKFVQDRSGSHGMTMNSLVSGGCIVSGSVVVHSVLFPRVRVNSFCTIDSSLLLPDVHVGRSCRLRRCIIDRACHIPEGMVIGENANEDSARFYRSEGGVVLVTRDMLAKLEAK

SEQ ID NO: 4005 - protein, 595 aa, GIBBERELLA ZEAE PH-1
MGVLDKVQLTLGRKGKEGTAAEQPVTVTTSINEKDQEAGVFPDDGSNSDAVTENAQHGVQAVEATTLAWSKKALAGVFVFMWLIYLTNGFQGQINNTLLPYASSEWESHSLMPIIGVVANCMTAAVYIPLSKILDLWGRAEGFLLMVLFATIGMIMMAASQNLPTYCAAYVFWQVGWSGLTYSIDVITADSTQLKNRGLAYAFTSSPYMITAFAGPKSAEAFLLNGDQWRWGFGTFSIVLPVVAAPLYALLRYNLQKAKKQGLLVQESSGRSVMESIKWGLIEFDAAGAFLFAAGLVIFLLPFSIASMAPQGWQTPYIIAMIILGIVLLAIFGLYERFVAPKPFLRFDILVSRTVIGVCLLDFIYMIAYYCWNSYFTSFLQVVNNLRPSEAGYVSNTFEIVSGILLFIVGYAMHKTGRFKWILCVGIPLYIFAQGLMIHFRQPGQSIGYLIMCEVFISIAGATFILCMQVGILAAVEHQYVATALATLSVTGNIGAAVGGTISAAIWTNTFEEKLFEYLPASAQENAALITGDLDSQLAYEMGSPERLAIQKAYGYGQARMLGAGTGIMAIALISLFLIKNYDLRKIKQTKGTVF

SEQ ID NO: 4006 - protein, 140 aa, Leifsonia xyli subsp. xyli str. CTCB07
MSNSFDVLSQLDRFASSVFDTARSPRVMPVDLFREGDQYVLSADLPGIDPDSVDLDVDGQLLTIRAERLAPSSENVKWLVHERPYGSYMRQFTLGDGVDVEKITANYEHGVLSVIVPMAERAKPRKIQIGSARGRKEVGA

SEQ ID NO: 4007 - protein, 488 aa, Listeria monocytogenes EGD-e
MSIKETALPKVQTKLFINGKWTDGDNKETKDIVNPANGDVIAKIAQAGPSETKKAIKAAKDAFPDWAKMELADRVKLLHKIADLMEEKADTLAKIMTLEQGKPLKESKGEVLTGVENFRFAAEEARRLYGETIPAPNNHAFIVKKQPIGVVAAITPWNFPGGMVTRKLAPALATGNTIVLKPSGDTPLSALAIFEIFEEAGLPKGVANIVMGSSKEIGETLTDSDDVRKLTFTGSTKVGQTLFKQSADTLKKISLELGGHAPFIVFDDANLDAAVNDLVAAKFRNNGQVCVSPNRIFVAKEIKEKFTKALVAKVEQLKVGNGLDDVNVGPLIREDAIDKIDKQLKNATEKGAKVLTGGGRLTGSDYDKGNFYKPTVLDNVTRKMDIFYEETFGPVIPLITFETEDEAIEMANDSEFGLASYFYTKDLARVEKVGAALEYGMVGANEIAISNPETPFGGVKHSGFGRENGHYGMEEYIQVKFINLKYRD

SEQ ID NO: 4008 - protein, 457 aa, Escherichia coli O157:H7 EDL933
MMEGQQHGEQLKRGLKNRHIQLIALGGAIGTGLFLGSASVIQSAGPGIILGYAIAGFIAFLIMRQLGEMVVEEPVAGSFSHFAYKYWGSFAGFASGWNYWVLYVLVAMAELTAVGKYIQFWYPEIPTWVSAAVFFVVINAINLTNVTVFGEMEFWFAIIKVIAVVAMIIFGGWLLFSGNGGPQASVSNLWDQGGFLPHGFTGLVMMMAIIMFSFGGLELVGITAAEADNPEQSIPKATNQVIYRILIFYIGSLAVLLSLMPWTRVTADTSPFVLIFHELGDTFVANALNIVVLTAALSVYNSCVYCNSRMLFGLAQQGNAPKALASVDKRGVPVNTILVSALVTALCVLINYLAPESAFGLLMALVVSALVINWAMISLAHMKFRRAKQEQGVVTRFPALLYPLGNWICLLFMAVVLVIMLMTPGMAISVYLIPVWLVVLGIGYLFKEKTAKAVKAH

SEQ ID NO: 4009 - protein, 331 aa, Streptomyces hygroscopicus
MRSAGPSAPSNGSTPRPGSTGRSGSRRRCDRTGRPPRRTGSAPIRPLPSLAIPFVVFPFSGPRSFRPRSFGPHSSDRVLRTAPETRTGGPPYRPAPRECSMNTHPISHGGPLSGAGVAPITSVVFDLDGVLVNSFAVMREAFTLAYAEVVGDGEPPFEEYNRHLGRYFPDIMRIMGLPLEMEGPFVRESYRLAHLVEMFDGVPELLSELRHRGLRLAVATGKSGPRARSLLDTLGIRGQFHVVLGSDEVARPKPAPDIVLKAMDMMDADPDRTVMVGDAVTDLASARGAGITAVAAMWGETDEKTLLAAEPDVILHKPAELLSLCPEVTVP

SEQ ID NO: 4010 - protein, 646 aa, Oryza sativa
MYSSGMRQFGAASRLARQLQVRNFSRTAPAKKIITPNGPLRAKEASPLLNNKYPIIDHEYDALVVGAGGAGLRAAFGLAEAGFNTACISKLFPTRSHTVAAQGGINAALGNMHKDDWRWHMYDTVKGSDWLGDQDAIHYRTREAPASVIELENYGCPFSRTDEGKIYQRAFGGQSQDYGKGGQAYRCCAAADRTGHALLHTLYGQSLRHNTNYFIEFFAIDLIMEDGECKGVIAYNQEDGTLHRFRSHHTVLATGGYGRAYFSCTSAHTCTGDGMAMVARAGLPNQDMEFVQFHPTGIYGAGCLITEGSRGEGGYLLNSEGERFMERYAPTAKDLASRDVVSRSMTMEIREGRGVGPDKDHIYLQLSHLPAEVLHERLPGISETASIFAGVDVTKQPIPVLPTVHYNMGGIPTKYTGEVLTVDEAGKDKVVPGLFACGEAACVSVHGANRLGANSLLDLIVFGRAVSHTIRDNFSPGKPHKELDAGAGAEAIQTVDQIRTADGPKSTNEVRSAMQKVMQTDVSVFRTEESLQEGVKKINEVDQMFSQVGTKDRSMIWNSDLVETLELRNLLTCAVQTAESAANRKESRGAHAREDYPDRDDENWMKHTLSWQKKPHGKTELGYRAVTGTTLDEAECKAVPPFARKY

SEQ ID NO: 4011 - protein, 619 aa, Arabidopsis thaliana
MEISVASVTVSVAVVVVSWWVWRTLQWVWFKPKMLESYLRRQGLAGTPYTPLVGDLKKNFSMRAEARSKPINLTDDITPRIVPYPLQMLKTHGRTFFTWFGAIPTITIMDPEQITEVLNKVYDFQKAHTFPLGRLIATGVLSYDGDKWAKHRRIINPAFHLEKIKNMVPAFHQSCSEIVCKWDKLVSDKESSCEVDVWPGLVSMTADVISRTAFGSSCVEGQRIFELQAELAQLIIQTVRKAFIPGYSYLPTKGNRRMKAKAREIQVILRGIVNKRLRAREAGEAPNDDLLGILLESNLGQTKGNGMSTEDLMEECKLFYFVGQETTSVLLVWTMVLLSQHQDWQARAREEVKQVFGDKEPDAEGLNQLKVMTMILYEVLRLYPPIPQLSRAIHKEMELGDLTLPGGVLINLPILLVQRDTELWGNDAGEFKPDRFKDGLSKATKNQASFFPFAWGSRICIGQNFALLEAKMAMALILQRFSFELSPSYVHAPYTMKQFHISLPIMLVQRDTMMWEFKPERFKDGLSKATKSHVSFFPFAWGPKICIGQNFAMLEAKMAMALILQRFSFELSPSYVHAPQIGRHHSPTVRCTSYPAQAVILESHVLLSDKQRKINQIIV

SEQ ID NO: 4012 - protein, 331 aa, Thermococcus kodakarensis KOD1
MKAVIMAGGYATRLWPITKDVPKALLPVGDRTILDHILEKVAETGLETYISTNRFFESRFRPFAEKWGVKLIVEDTLHEEEKLGTIGALKKIIEEIGLDDYLIIAGDNLFSFSLQDFLKRYDEKPLIAVYDVGNPELAKRYGVVLLEGDRVVDFEEKPAVPKSTLISTGVYALPRDVMALIDEYLANGHRDAPGYFLSWLLKKGIEIRAYRFSEFWYDIGSADSYLEALKTLLKESHIEEIQISPYSKIIPPVVIKRGTKILGRSIIGPYAYIGEDCVIENSDVSDSIVFRGTILKNATIWRSIIDEKCEIRNLELKKSLVGGHAKIQRGD

SEQ ID NO: 4013 - protein, 582 aa, Exiguobacterium sp. 255-15
MRRTKIVCTIGPASEKRLPEMIEAGMNVARLNFSHGDYEEHGARITDIRRAAEEANKLVTILLDTKGPEIRTHTFEEGKALLVRGKQVIVVSGDANEIVGTADKFSVTYDGLYDDVEVGSMIMLDDGLIGLRVAEKLDNRELLCDIENEGIIKTKKGVNLPNVKVNLPALTDKDIADIEFGIKSDIDLIAASFVRRASDVVAIRQLLEKHNASHIKIFPKIENQEGVANIEEIIAISDGLMVARGDLGIEIPTEEVTPTQKDLIKICNDYGKPVITATQMLDSMQRFPRPTRAEASDVANAILDGTDAIMLSGETAAGDYPIESVQMMHTIAKRTEKMLDYKMLLKDRQTRSEHTVTDAIAQAVTHTAINLDAKAILTPTQSGYTAARISKYRPEPNIVAVTPSARVARQLNIVWGVYPIVVDHLSDNTDDMLTLAADTAKEAGFVTDGDLVVISAGIPALTAGTTNMLKIHIVGKEITNGRGIGERGVVGEVVIAHTAEEANAKAKPGMILVTNSTDRDMMPAIEMAAAMVTVDGGLTSHAGIVGPSLGKPVIVGVENAMTIFTDGQRISIDPLTGKLYNA

SEQ ID NO: 4014 - protein, 692 aa, Vibrio fischeri ES114
MKNHSEKEQFQEILLELKRSKEREAQLHKENQVILRGVSAISDAQTKEDIFNGLLNVIKEFVEFDNAIVVSSTDKDSFSVLASTNPYFDHLTWRYNDLFHRACHDETIILFQPHKTNEFLFKNTELQSLFSSVAICGLKSHSGYAVIILACSKFGAYSTLEKEKIERFMPLVERAVIDIDYKERLNAMVSLKTKELFLSKERFQDFAETVGDWFWETDPQFNFTYLSDTKINNTSIISQNLLSLISNDFINSTIIESEKRLVPFHEVEWNPDIFNNKVWLSLSGKPFFDEFGTFVGYRGTAKDISARKKRIRDIQTAKTEAEKANKAKSQFLAMMSHEIRTPLNSILGLVDVFHSSLLSEEQLDWLNQMESSSQLLLTIISDVLDISRIEAGTFVLNEQPIDLLRSLNTSINFLDTRAKDKGITLTVTASQNVPKYVFADATRLSQVIFNLVGNAIKFTNHGHVAVKIEKLPNNSISISVSDTGIGIASTTLEQLFKPFVQADSSITRKYGGTGLGLAIIKRLVELMQGTITVESRLNIGSTFKITLPLKEISDLPKQLNNEAKELVNQRSLNILLAEDNKANQAVLQILLEKQGHHVSIVSNGEEAISIFKHQTNGCFFDVVLMDVSMPVKDGISATTELRKLGIELPIIAITAHAMETEKEMCLEAGMNDFISKPIRAKDLSDILIKYSC

SEQ ID NO: 4015 - protein, 140 aa, Glycine max
  misc_feature (22)..(22): Xaa can be any naturally occurring amino acid
  misc_feature (43)..(43): Xaa can be any naturally occurring amino acid
  misc_feature (56)..(56): Xaa can be any naturally occurring amino acid
  misc_feature (61)..(61): Xaa can be any naturally occurring amino acid
  misc_feature (97)..(97): Xaa can be any naturally occurring amino acid
  unsure (1)..(140): unsure at all Xaa locations
QQRDVAHTVGPAHHECICTVSXGIGAIEHVLYHSVTYEVTTIXASSPRFLMSRKTXSLGVXWVIFAEGLDQIFGGYMYLYEAPHKALFHQMTIGMVXALAKHDCLRDNRSTSAWGLEARVPMLVKQCVRVAMIFGPEYNM

SEQ ID NO: 4016 - protein, 485 aa, Porphyromonas gulae
MEKNKLTTAAGAPVADNQNVATAGKRGPMLLQDVWFLEKLAHFDREVIPERRMHAKGSGAFGTFTVTHDITKYTKAAIFSEIGKQTELFVRFSTVAGERGAADAERDIRGFAIKFYTEEGNWDLVGNNTPVFFLRDPLKFPDLNHVVKRDPRTNMRSPQNNWDFWTLLPEALHQVTITMSDRGIPASYRHMHGYGSHAFSFINAEGVRHWVKFHLHTQQGIKNLTDAEAEALIGKDRESHQRDLFESIERGDYPRWTLKVQIMTEEEAKALPYNPFDLTKVWSQKDFPLIEVGVMELNRNPENYFADVEQSAFNPANVVPGISFSPDRMLQGRLFSYGDTQRYRLGVNHHQIPVNRSRCPFLNMYHRDGAMRVDGNFGSRLGYEPNSYGHWQDQNEYKEPPLELDGAAYQWDFREDDSDYYSQPRKLFHIMSPDQQQVLFDNTARAMGDIPKEIKLRHIANCYKADPDYGKGVAKALGLDVNEAL

SEQ ID NO: 4017 - protein, 498 aa, Glycine max
MATRVIPPRILKKLRYNTTTKPLNAAHPSISPVIAPPSLFERSPSPVADAVSTTSTTMETANLNLDDAERLFASVSTEKLLRSSAVLHATAVGPMVDLGMWLMKSPVFQTGLPKDLIMAATKETFFSHFCAGEDAAAAGRSISALKEAGLRGMLVYGVEDAHENDGCDRNLKGFLHTVDVSKSLPPSSVSFVIVKITAICPMTLLERMSDLLRWQQKDPSFVLPWKQDSLPIFAESSPLYHTQKRPEPLTPEEESDLQLANQRLLELCQRCEEANMPLLVDAEHTTVQPAIDYFTYSSSIRHNKDDNPIVFGTIQTYLKDAKERLLLTTKAAEKMGVPLGFKLVRGAYMSTESKLAESFGYASPIHNTIQETHNCFNGCSSFLLEKIANGPGSISVVLATHNIESGKLAAAKAYELGVGKVNHKLEFAQLYGMSEALSFGLSNAGFQVSKYMPFGPVDMVMPYLLRRAEENRGLLAASGFDRQLMRKELGRRLKAAMF

SEQ ID NO: 4018 - protein, 388 aa, Avena sativa
MASATLLKSSFLPKKSEWGVTRQAAAPKPMTVSMVVRASAYADELVKTAKTVASPGRGILAMDESNATCGKRLASIGLENTEANRQAYRTLLVTPPGLGNYISGAILFEETSTSRLLMGRRLLTSLSSRVIVPGIKVDKGLVPLVGSNDESWCQGLDGLASREAAYYQQGARFAKWRTVVSIPNGPSELAVKEAAWGLARYAAISQDNGLVPIVEPESHVDGEHGIERTFEVAQKVWAETFFYMAQNNVMFEGILLKPSMVTPGAECKDRATPEEVASYTLKLLHRRIPPSVPGIMFLSGGQSVVEATLNLNAMNQAPNPWHVSFSYARALQNTCFKTWGGRPENVAAAQEALLLRAKANSLAQLGKYTSDGEAAAAKEGMFVKNYSY

SEQ ID NO: 4019 - protein, 77 aa, Arabidopsis thaliana
MKLSMRLISAVLLLFMIFVATGMGPVTVEARTCESKSHRFKGPCVSTHNCANVCHNEGFGGGKCRGFRRRCYCTRHC

SEQ ID NO: 4020 - protein, 292 aa, Arabidopsis thaliana
MEESINQNHEAMEALISNLFGNISSLKSAYIELQSAHTPYDPEKIQAADKVVNSELKNLSEMKHSYRENNPKPVCVSPQDSRLAAEIQEQQSLLKTYYEVMVKKFQSEIQNKDSEITQMLQKIEEANKKRLKLEKNLKLRGMSTNEGSGGDGNLQFPDLTTELFVSTYEVAAKAVHDFSKPLINMMKAAGWDLDSAANSIEPDVVYAKRPHKKYAFESYICQRMFSGFQQKNFSVNSESATVMADDDTDTFFRQFLALKDMDPLDALGTNPDSNVRLYACQKVFVIVGLTVI

SEQ ID NO: 4021 - protein, 458 aa, Pseudomonas putida
QQTIQTTLLIIGGGPGGYVAAIRAGQLGIPTVLVEGQALGGTCLNIGCIPSKALIHVAEQFHQASRFTEPSPLGISVASPRLDIGQSVAWKDGIVDRLTTGVAALLKKHGVKVVHGWAKVLDGKQVEVDGQRIQCEHLLLATGSSSVELPMLPLGGPVISSTEALAPKALPQHLVVVGGGYIGLELGIAYRKLGAQVSVVEARERILPTYDSELTAPVAESLKKLGIALHLGHSVEGYENGCLLANDGKGGQLRLEADRVLVAVGRRPRTKGFNLECLDLKMNGAAIAIDERCQTSMHNVWAIGDVAGEPMLAHRAMAQGEMVAEIIAGKARRFEPAAIAAVCFTDPEVVVVGKTPEQASQQGLDCIVAQFPFAANGRAMSLESKSGFVRVVARRDNHLILGWQAVGVAVSELSTAFAQSLEMGACLEDVAGTIHAHPTLGEAVQEAALRALGHALHI

SEQ ID NO: 4022 - protein, 581 aa, Oryza sativa (japonica cultivar-group); identical to SEQ ID NO: 1095

SEQ ID NO: 4023 - protein, 621 aa, Burkholderia cepacia
MKLRALIKLGKERGFLTYAEINDHLPDNFTETEALEGIIGTFNDMGVAVYEQAPDAETLLLNDNAPAASSDDEVEEEAEVALSTVDSEFGRTTDPVRMYMREMGTVELLTREGEIEIAKRIEDGLRHMVMAISACPTTIADILAMAERVANEEIRVDELVDGLLDPNAADAADTDGFSAKEAEAIENEDEEAEEEEEEEEEEDDDGAAQATANAAQLEALKRASLEKFSQISEWFDKMRRAFEKEGYKSKSYLKAQETIQTELMTIRFTARTVERLCDTLRAQVDEVRQVERQILHIVVDKCGMPRSEFIARFPGSETDLDWAEKIAAEGHSYSAVLSRNIPAIREQQQRLLDLQARVVLPLKDLKETNRQMAAGELKARQAKREMTEANLRLVISIAKKYTNRGLQFLDLIQEGNIGLMKAVDKFEYRRGYKFSTYATWWIRQAITRSIADQARTIRIPVHMIETINKMNRISRQILQETGLEPDPATLAEKMEMPEDKIRKIMKIAKEPISMETPIGDDDDSHLGDFIEDNNTVAPADAALHASMRDVVKDVLDSLTPREAKVLRMRFGIEMSTDHTLEEVGKQFDVTRERIRQIEAKALRKLRHPSRSDKLKSFLEGN

SEQ ID NO: 4024 - protein, 547 aa, Moorella thermoacetica ATCC 39073
MPVKVTRRITMPAKFIFVTGGVTSSLGKGITAASLGRLLKSRGLKVAIQKFDPYINIDPGTMSPYQHGEVFVTDDGAETDLDLGHYERFIDISLTKASNVTAGKVYWSVITKERRGDFLGGTVQVIPHITNEIKARLLRVAEESDPDVVITEIGGTVGDIESLPFLEAIRQMKSDIGRDRVLYIHVTLVPYLRAAGEAKTKPTQHSVKELRSIGIQPDIIVCRTERPFSREMEEKIALFCDIDPDAVIQAWDADSIYEVPLMMQEEGLDSIVVERLKLNCGPAQMDDWRAMVAKLKNITRHLEIALVGKYVTLPDAYLSVVESLRHAGMYHNVQVDIRWIYSADLERGGLEQLQDVAGILVPGGFGDRGVEGKIIAARYAREHGIPFLGICLGMQLAVVEFARHVCGLEAANSSEFNPETPHPVIDLLPEQKEIEDKGGTMRLGLYPCRLQPGTRAHQAYGEEIIYERHRHRYEFNNNYRAELTARGMVISGTSPDDRLVEIIELADHPWFVACQFHPEFKSRPNRPHPLFRDFIGAACRRAGGGAG

SEQ ID NO: 4025 - protein, 416 aa, Arabidopsis thaliana
MGWVPLQPLPESLQLHLLELYPVLESIQKFLWPRLCKLDQRTLYELHYQLITFGKVFCTKSRPNCNACPMRGECRHFASAYASARLALPAPEERSLTSATIPVPPESYPPVAIPMIELPLPLEKSLASGAPSNRENCEPIIEEPASPGQECTEITESDIEDAYYNEDPDEIPTIKLNIEQFGMTLREHMERNMELQEGDMSKALVALHPTTTSIPTPKLKNISRLRTEHQVYELPDSHRLLDGMDKREPDDPSPYLLAIWTPGETANSAQPPEQKCGGKASGKMCFDETCSECNSLREANSQTVRGTLLIPCRTAMRGSFPLNGTYFQVNELFADHESSLKPIDVPRDWIWDLPRRTVYFGTSVTSIFRGLSTEQIQFCFWKGFVCVRGFEQKTRAPRPLMARLHFPASKLKNNKT

SEQ ID NO: 4026 - protein, 215 aa, Moorella thermoacetica ATCC 39073
MRIFIDTANVEEIKAANDLGIIAGVTTNPSLIAREGRNFREIVEEIAAIVDGPISAEVVSTTAPEMVAEGVELAAIHPNIVIKIPMIAEGLKAVKELSARGIKTNVTLVFSANQALLAALAGATYVSPFVGRLDDISHDGLQVIADIVPIFAQYGFKTQIIAASIRHPLHVLEAARLGADIATVPFKVLMQMLKHPLTDTGLARFLADWEKVKNK

SEQ ID NO: 4027 - protein, 420 aa, Schizosaccharomyces pombe
MDLEHKRISRSTLPDYADPDYFEARGERNPVKPQSSNVVPGTSHIGSIKSPADYVFGDIIGDGSFSKVRRATDKKSWKEYAIKVLDKKYIVKENKVKYVNIERDSMMRLNGFPGISRLFHTFQDDLKLYYVLELAPNGELLQYIKKYRFLDENCVRFYAAEILSSIEYMHSCGIIHRDLKPENILFDGNMHVKITDFGTAKILPPKYVNSPDYTTFPSSFVGTAEYVAPELLSRQVVSKSSDLWAFACVVYQMIVGSPPFHGSNPNNIFKKIMSLEYELPKLLPPDIVPLFSHLFRIQPSDRSTTQQIKQFPFFATITWDNLWTQDPPPMQSFRPNYNIAIPNAPAYYRSNVTAAAAANAAAAFASASIVKHQETARRQELPTVNRFTAPTAHYGYASLRSHQMPVDRLYYKLVPSSESI

SEQ ID NO: 4028 - protein, 767 aa, Ralstonia metallidurans CH34
MTQSSPSVPPSPGLQGPWSAEIGATLQPGENVLAGLTLDLDARLHFTQGWLVVTDRRLIARAPGEKTLQDWEITAGQTLAHGDHAGVGTLELSDGQRRLASWRYTLGYNPDALRLADQFDTRRDALATGRAPEPADTEICPTCKAPLPPGEEQCPQCSRELETPPSTWALLRLWRFARPYRWELLGGFVLLLLGTAATLVPPYLTMPLMDKVLIPYQNGVPIDIGLVKLYLAGLLGAALVAWVLGWARTYLLARVSERISADLRTTTYEHLLKLSLEYFGGKRTGDLMARIGSESDRISVFLSLHLLDFATDVLMIAMTSIILVSINPWLALVTLVPLPFIAWMIHLVRDRLRHGFEKIDRIWSEITNVLADTIPGIRVVKAFAQEKREVTRFREANKHNLAINDRVNAVWSLFTPTVTFLTEVGLLVVWIFGIWQVSHDAITVGVLVAFLTYISRFYTRLDSMSRIVSVTQKAAAGAKRIFDILDHVSSVPEPQKPVHIDNVQGAIELRDLGFRYGNRAVIRGLNLSIQPGEMIGLVGHSGSGKSTLVNLICRFYDVSEGAIRVDGVDIRSLPVSEFRRHIGLVLQEPFLFFGTIADNIAYGKPDATREEIIAAARAAHAHEFILRLPHGYDSLVGERGQALSGGERQRISIARALLINPRILILDEATSSVDTTTEKEIQKALDNLVQGRTTIAIAHRLSTLRKADRLVVMDRGQIVEVGNHDELMAREGAYYKLYQAQARNVDTDADTISDGEVAEAKEAVGAQ

SEQ ID NO: 4029 - protein, 467 aa, Thiomicrospira crunogena XCL-2
MKIQLKSLYGAWMALMLALSFSSVQASGPTVTLPDFSQLASENSPVVVNISTLKKIERPDHPQLRGMPDEMLRYFFGIPEGQDPRGERQEQVSSLGSGFIISSDGYIITNHHVVADADDIVVKLSNRQELKAKVIGSDERSDIAVIKVDAKNLPVAKIGTSKNLKVGQWVMAIGEPFGLDYTVTHGIISALGRSLPDDTYVPFIQTDVAINPGNSGGPLLNTNGEVIGVNAQIYSNSGGSMGLSFSIPIDIAMDVAQQLKTKGRVERGYLGVGVQEVSGDLAKSFDMKRPMGALVTSTEKDSAASEAGIQPGDIIIEFAGRTIQKSSDLPPIVGNSAVGESIKVKILRNGDYKTLTVRLKSLDDMKLAAAGAEAENTTLGVMMKEVSPKVLDKLNLPFGIGVSKVKRGSAADRAGIIPGDILVTINFKPIKSIKALNEIVAAAPKGRSLPVRVVRGKRSVFLPLVLN

SEQ ID NO: 4030 - protein, 477 aa, Listeria monocytogenes
MAKEYDVVILGGGTGGYVAAIQAAKNGQKVAVVEKGKVGGTCLHRGCIPTKALLRSAEVLQTVKKASEFGISVEGTAGINFLQAQERKQAIVDQLEKGIHQLFKQGKIDLFVGTGTILGPSIFSPTAGTISVEFEDGSENEMLIPKNLIIATGSKPRTLSGLTIDEEHVLSSDGALNLETLPKSIIIVGGGVIGMEWASMMHDFGVEVTVLEYADRILPTEDKEVAKELARLYKKKKLNMHTSAEVQAASYKKTDTGVEIKAIIKGEEQTFTADKILVSVGRSANTENIGLQNTDIATENGFIQVNDFYQTKESHIYAIGDCIPTIQLAHVAMEEGTIAANHIAGKAAEKLDYDLVPPLYLYFTSTEIASVGITEEQAKERGHEVKKGKFFFRGIGKALVYGESDGFIKIIADKKTDDILGVSMIGPHVTDMISEAALAQVLNATPWEVGNTIHPHPTLSESFREAALAVDGNAIHG

SEQ ID NO: 4031 - protein, 332 aa, Listeria monocytogenes
MTLKEAGLTEDKLIKMYETMLMARRLDERMWLLNRSGKIPFTISGQGQETAQIGAAFAFDLDKDYALPYYRDLAVVLAFGMTAKDIMLSAFAKAEDPNSGGRQMPAHFGQKSNRIVTQSSPVTTQFPHAAGIGLAAKMAGDEIAIYASTGEGSSNQGDFHEGINFASVHKLPVVFVIHNNQYAISVPASKQYAAEKLSDRAIGYGIPRERVDGTNMGEVYAAFKRAADRARNGEGPTLIETVSYRFTPHSSDDDDSSYRSREEVNEAKGKDPLTIFQTELLEERLLKTEEKIAEIEKNIAKEVNEATDYAESAAYAEPESSLLYVYDEEANS

SEQ ID NO: 4032 - protein, 206 aa, Zea mays
TEYGRMNFGSRPAKRRPGGGITTLRAIPWIFSWTQTRFHLPVWLGVGAAFKFAIDKDVRNFQVLKEMYNEWPFFRVTLDLLEMVFAKGDPGIAGLYDELLVAEELKPFGKQLRDKYVETQQLLLQIAGHKDILEGDPFLKQGLVLRNPYITTLNVFQAYTLSKEFADENKPAGLVKLNPASEYPPGLEDTLILTMKGIAAGMQNTG

SEQ ID NO: 4033 - protein, 640 aa, Mesorhizobium sp. BNC1
MLSSNAAAAVADAETETADIRAYLSSQERKTLLRFLTCGSVDDGKSTLIGRLLYDTKLIFEDQLAALEQDSKKHGTNGGEIDFALLVDGLEAERQQGITIDVAYRFFATPKRKFIVADTPGHEQYTRNMATGASTADLAVVLVDARQGVLQQTRRHSIIASLLGIRYIVVAVNKIDLVDFDEQVFAKITADYDAFAKDLGFSSIVAIPMSARHGDNVTRISERTPWYAGPSLIEHLETVDVAGESVAQPFRFPVQYVNRPNLDFRGFAGTIASGSVAVGDEVVVAKSGRRTRVKRIVTYDGDLPSAFEGQAITVVLEDEVEVSRGEILVAPEARPDVADQFTANIVWFDEHPLLPGRMYILRTETDEVSATVSQLKHRVNINNFAHEAAKCLELNAVGVCNLSLQSPIAFDPFGKNRSTGSFILIDRVTNATVGAGMILHPLRRAANIHWQALDVTKESRATLKHQKPAVLWFTGLSGSGKSTVANLLEKKLHAAGRHTYILDGDNVRHGLNRDLGFTEEDRVENIRRVAEVARLMADAGLIVLVSFISPFRAERRMARDLMGEGEFIEVFVDTPFEECAKRDPKGLYARALKGELKNFTGIDSPYEAPENPDLHLHTVGRAPEDMADELETWLRERGYC

SEQ ID NO: 4034 - protein, 138 aa, Brassica napus
  misc_feature (23)..(23): Xaa can be any naturally occurring amino acid
  unsure (1)..(138): unsure at all Xaa locations
HPSGSGRDPLSVNIPNLGLMSTXFQEGATLIFNGTTVGQAKKLGNLRLAQICGPLVANKKRLETASTKIVEKLFEMDPDGPVMALANLMRKKISMPANLLSDGRVESLFNNFFFVAQRFGVYTAKNFAAIFEFLVGGG

SEQ ID NO: 4035 - protein, 1231 aa, Agrobacterium tumefaciens str. C58
MDCRGVEYRLTEGCGLLEKACRAVAALELPACIKDGELRYVVVNEAYGRVMGRAPSAFEGQTSLSLSGDIRDAEREDRERRSLVFATDEAIACHAALSAQSHMLRCERFIGDDGSLFLFEVFEEMPSAVSRKSAAVGGASDILFSSGVMDFIDAGIVVYDRDNQLVYCNARFAEFYSDLDIELKPGIRLEALMKTLYSSSVYRCAKNDGPSFEDWMQKQLHDFSLPYLERVEQFADGRWVRMVNKRLENGMLVGLRVDVTEFKAHETLLSTQIRETWLLRAALEQLPVGVFLRDQDRRLTYANAAYNTFLGGNLADHIGKTETEMFPQNGPRFRQENERILQTGEAIERTGNMPWRDGGAVPVITRLGRVATPDDEYYLVGSVTDVSLLQDREKALIAAQAEAEALHRQLQAVLRALPVGVLLLNADLVIEYVNPFFYQVWGEIGGEKSLVGKSYREFMEMNFDSGLYDYGDRPFDDVYEERVQRLLKADAFAPREVRSKSGKVTVISKTRLEGGKILSTYADVTDVRMRDAEISKARAELERVGEYMQGATRAMAQGLVLVEQGTIIMSNEAMARMFDVPPHLLEKGRNWAGFFAHCAGRGDFGTAAEAGETLRIWRENIAANRPFSWLVHVAGKSWLNLEATNSSGNYWLIIVTDVTEMKVREEELQRLLSRAEAADRAKSEFLANMSHEIRTPMNGVLGMAELLAKSKLDTRQKTFTDIIVKSGNALLTIINDILDFSKIEAGQMKLRSVPFDPAEAVEDVVSLLSSAALEKDIELIVRIDASVSGKVIGDAGRFRQIVTNIVGNAVKFTETGHVLVELSAQSAEASESIFSLRVEDSGIGIPVDKLETIFDKFSQVDGSATRRHEGTGLGLAITVGLVGLFDGKINVVSEVGRGSAFEVDIPFQVMERRRDVPLLSVAIDDIRVLVIDDNDVNRRILTEQLRSWGIDGHAVENGPSGIAVLQEAASLGFAIDAIILDYHMPVMNGLDVVERIRADKRFDDIAIVFLTSMDVVGDETLFTDLSVQAHLMKPARARLLRSTLFDVVRDVRLKRIRQHPLAQGTGGEKARPESRPAEKKQRAEAPATVPERSRPCLLDVLVAEDNDVNQIVFSQILQQAGLRFLIVGNGKRAVQAWEEYNPALILMDVSMPVMNGHQATQAIRAAEQAAGDSRHVPVIGVTAHTQEADRERCLEAGMDDYLSKPISPESLEDKIAQWLGENVLRRDAPGV

SEQ ID NO: 4036 - protein, 311 aa, Burkholderia vietnamiensis G4
MDNTHTSCLVVGAAGNLGHRIIDALLRTRPAGEIRAGVRGGSAGKHGNRARQWLANGVTVVNTDLDDPLSLEQACAGVDTVISAVQGGPDIIVDGQARLLEAALAAGVRRLVPSDFSENLFSIPEGINPYLDMRRTFDRKVAPSGIGHTHILNGGFMEAVFSNPGLIDAKAGTIAYWGDDEVPLDFTSMNDVAAWTVAAVEDPAAANRIVSVAGDCRTIAQIAADYAAATGKELHRVRRGSIADGYAELRRMAKAGAHPMAMLPLQYLLPMMSGEGTLRDIANGQYPTVRPTSLLDFMTRHYEGARTKFDS

SEQ ID NO: 4037 - protein, 306 aa, Mesorhizobium sp. BNC1
MILCCGEALIDMLPRETADGEAAFVPHVGGSVFNTAIALGRLEVPVSFFSGLSEDLFGVRLQDTLRASGVDLSHAIISTRPTTLAFVSLNEGQASYHFYDENTAGRMLFEADLPDLDESVEAMLFGGISLAPEPCGGTFEALMTRESPTRVTMLDPNIRQAFIRDPLAHKARMRRMMAIADIIKISEEDLAWFGGPASAGEAAQVLLAAGTRLVVVTSGGKGASAYWRGGSFVISAVNVKVADTVGAGDSFNAGILAALRKAGYLKKSRLASLTTEVVRDALSFATRVAAVTVSRAGANPPWADEV

SEQ ID NO: 4038 - protein, 286 aa, Zea mays
MHIREEEATPSTVTGIMSTLTSAGQQKLKEPISPGGGSASVAGSAAERNNGGRGKGKTEIKRIENTTNRQVTFCKRRNGLLKKAYELSVLCDAEVALIVFSSRGRLYEYANNSVKGTIERYKKATSDNSSAAGTIAEVTIQHYKQESARLRQQIVNLQNSNRALIGDSITTMSHKELKHLETRLDKALGKIRAKKNDVLCSEVEYMQRREMELQNDNLYLRSRVDENERAQQTANMMGAPSTSEYQQHGFTPYDPIRSFLQSNIVQQPQFYSQQEDRKDFNDQGGR

SEQ ID NO: 4039 - protein, 278 aa, Streptomyces nogalater
MTNSGTRPQEVADFYDGSSRLIAELNGGSLHFGCWDSLPADAGMDRASQRLTEMMTERIEVGPGQRVLDIGCGTGAPAVQLARATGAEVVGITISPEQVRLATAHAEREGVAERVTFRCADASAELPFPADSFDAVWFFESIFHLPDRLTALRRAAEVLRPGGRLALTDVLHNDETSPAAQESLDEHAYTPLVGEPMRLSDYPPLLRQARLVPVECRDISELTVGRTLECMHRTLDENRERFVERYGSELVDQFSTAVPLLDAVEFGYGIVTAARPDH

SEQ ID NO: 4040 - protein, 65 aa, Jatropha curcas
AIPWIFAWTQTRFHLPVWLGFGAAFKHIIEKDRKNLQMLQEMYNQWPFFRVTIDLVEMVFAKGDP

SEQ ID NO: 4041 - protein, 566 aa, Ustilago maydis 521
MGAWTNFVDGFKPEVTDESASDSVPAYAEKDSKDFETNAVAGFKDPKDETGLKRRLTGRHVQFIALGGSIGTGLFIGSGGALATGGPGFLMIDFILIGIMLLMVVMALGELGAIFPVAGSFAAYSTRFIDPAVGFAMAYNYWLQWLIVLPLELVAASIVIVFWDPNETVPKGVWIAVFLIIITIINLFGVRGYGEFEFFGSLVKVLAVIGFIIAGVVINVGGGPDGKYYGTETWRNPGAFNNGFKGFSSVFVTAAFAFAGTELIGLAAAETANARKEIPKAAKQIFMRVTIFYVVSLLVVSFLVPYTNPALLGGSYDARASPFVIAVANARISVLPSILNAVILISVLSVGNSAVYAASRTLQAMSTIGQAPRYFSYIDRQGRPLPAVILSLIFGLLGFLIYAGDDARGLVFSWLLAISGLSTIISWLCICISHARFRQAWTRAGHTLEELPWKSPFGIWGSLYGAFFNVLVIIVTFYVSAFPIGEGEMSATERANAFFQSFLSVPVVVFVFYLPYKFFMRSKYVDIDDIDISTGRRDPVPVEVLRREREEAAALPMYKKVWHFLF

SEQ ID NO: 4042 - protein, 162 aa, Brassica napus
LLGLDSKLEKSLLIPFREIKVECTIPKDDGTLASFVGFRVQHDNARGPMKGGIRYHPEVEPDEVNALAQLMTWKTAVANIPYGGAKGGIGCDPSKLSISELERLTRVFTQKIHDLIGIHTDVPAPDMGTGPQTMAWILDEYSKFHGYSPAVVTGKPIDLGGS

SEQ ID NO: 4043 - protein, 487 aa, Oryza sativa (japonica cultivar-group)
MASSTGGLDHGFTFTPPPFITSFTELLSGGGGDLLGAGGEERSPRGFSRGGARVGGGVPKFKSAQPPSLPLSPPPVSPSSYFAIPPGLSPTELLDSPVLLSSSHILASPTTGAIPAQRYDWKASADLIASQQDDSRGDFSFHTNSDAMAAQPASFPSFKEQEQQVVESSKNGAAAASSNKSGGGGNNKLEDGYNWRKYGQKQVKGSENPRSYYKCTYNGCSMKKKVERSLADGRITQIVYKGAHNHPKPLSTRRNASSCATAAACADDLAAPGAGADQYSAATPENSSVTFGDDEADNASHRSEGDEPEAKRWKEDADNEGSSGGMGGGAGGKPVREPRLVVQTLSDIDILDDGFRWRKYGQKVVKGNPNPRSYYKCTTVGCPVRKHVERASHDTRAVITTYEGKHNHDVPVGRGGGGGRAPAPAPPTSGAIRPSAVAAAQQGPYTLEMLPNPAGLYGGYGAGAGGAAFPRTKDERRDDLFVESLLC

SEQ ID NO: 4044 - protein, 242 aa, Anabaena variabilis ATCC 29413
MSLKAILFDFNGVIINDERIHLQLIDEILIQENLQPQKVQERQASLGRSDRACFQELLANRGRVVSDDSLTQLLNSKAQAYVLEVEKLEKLPIYPGLEDLIYQARSRNLHLGIVSGAVRQEIELVLNRAKLAEYFTVIVAGDDITTSKPKPDGYLLAVERLNQEYPELNLLPQECLAIEDTPAGIAAAKRAQMQVVGVANTYPFHMLQRCCNWTVDYLSDLELERVQKIFSGGEFQAIVSEC

SEQ ID NO: 4045 - protein, 389 aa, Anabaena variabilis ATCC 29413
MKAMILAAGKGTRVRPITYTIPKPMIPILQKPVMEFLLELLRQHGFDQIMVNVSHLAEEIENYFRDGQRFGVQIAYSFEGKIDDEGKLVGEAIGSAGGMRRIQDFSPFFDDTFVVLCGDALIDLDLTAAVKWHKSKGSIATIITKTVPEEEVSSYGVVVTDENSRVKAFQEKPSIEEALSTNINTGIYIFEPEVFNYIPSGVEYDIGGQLFPKLVEIGAPFYAIAMDFEWVDIGKVPDYWRAIRGVLQGEIKNVQIPGHEVAPGIYTGLNVAVNWDKVDITGPVYIGGMTRIEDGAKIVGPAMIGPNCWICGEATVDNSVIFEWSRLGHGARLVDKLVFGRYCVDKTGAAIDVQAAALDWLITDARQTPPEHTPVERQAIAELLGTNAI

SEQ ID NO: 4046 - protein, 671 aa, Anabaena variabilis ATCC 29413
MGVESTATSDEVVKVPANGNKLEGKNHKQKKLLPTNAPGDVSRAWKIEDSEALYRIEGWGQPYFSINAAGHVTVSPKGDRGGSLDLFELVNALKQRSLGLPLLIRFSDILEDRIERLNACFAKAIARYNYPGVYRGVFPVKCNQQRHLIEDLVRFGKPHQFGLEAGSKPELMIALALLDTPGSLLVCNGYKDREYVETAMLSQRLGQTPIIVLEQVEEVDLVIAASHQLGIKPILGVRAKLSTQGMGRWGTSTGDRAKFGLTIPEIIQAVDKLRDADLLDSLQLMHFHIGSQISAINVIKDAIQEASRIYVELASLGANMKYLDVGGGLGVDYDGSQTNFYASKNYNMQNYANDIVAELKDTCAEKQIPVPTLISESGRAIASHQSVLIFDVLSTSDVPRDNPEPPKEGESPVINYLWETYQSINKENYQEFYHDATQFKEEAISRFNLGILRLRERAKAERLYWACCQKILDIIRQHDYVPDELEDLEKIMASIYYINLSVFQSAPDCWAIDQLFPIMPIHRLDEEPTQRGILADLTCDSDGKIDRFIDLRDVKSVLELHPFQPGEPYYMGMFLNGAYQEIMGNLHNLFGDTNAVHIQLTPKGYQIEHVVKGDTMSEVVSYVQYDSEDMVENIRQRCERALEEKRITLAESQRLLQTYEQSLRRYTYLNS

SEQ ID NO: 4047 - protein, 270 aa, Gluconobacter oxydans 621H
MSRIQTRFAALKKEGRGALIPYLQACDPDYDTSLELLRAMPAAGADLIEIGVPFSDPSADGPTIQAAALRGLKAGATLGRVLEMVRAFRETDNETPIVLMGYLNPIDSYGPAEFCFDAAQAGVDGIIVVDMPTEEADLLDAHAREADLDIISLVAPTTSNSRLFHVLREASGFVYYVSITGITGTNSASAADLEKALPRIREATSLPVAIGFGISTPEQARTASRIGDAAVVASALIKTMASTLENGQATERTVPAVLKQLEGLAAAVRA

SEQ ID NO: 4048 - protein, 503 aa, Oryza sativa
MEGAGSDGNPLGGYRIGKTLGIGSFGKVKIAEHILTGHKVAIKILNRRKSMEMEEKVKREIKILRLFMHPHIIRLYEVIDTPADIYVVMEYVKSGELFDYDVEKGRLQEEEARRFFQQIISGVEYCHRNMVVRRDLKPENLLLDSKCNVKIADFGLSNVMRDGHFLKTSCGSPNYAAPEVISGKLYAGPEVDVWSCGVILYALLCGTLPFDDENIPNLFKNIKGGIYTLPSHLSPLGRDLIPRMLVVDPMKRITIREIREHQWFTVGLPRYLAVPPPDTAQQVKKLDDETQNDVINMGFDKNQLIESLHKRLQNEATVAYYLLLDNRLRTTSGYLGAEFHESMVSSLAQVTPAETPNSATDHRQHGHMESPGFGLRHHFAADRKWALGLQSRAHPREIITEVLKALQELNVCWKKIGHHNMKCRWSPSFPSHESMMHNNHGFGAASAMIETDDSEKSTHTVKFEIQLYKTRDEKYFLDLQRLSGPQLLFLDLCSAFLTQLRVL

SEQ ID NO: 4049 - protein, 129 aa, Zea mays
  misc_feature (14)..(14): Xaa can be any naturally occurring amino acid
  unsure (1)..(129): unsure at all Xaa locations
PPKAWKFCDPMPYXFKALRKAGVKTAVVSNFDTRLRPLLQALKCDHWFDAVAVSAEVAAEKPNPIIFLKACELLGVKPEEAVHVGDDRRNDIWGARDAGCDAWLWGSDVRSFKEVFLYFFLTPRFRGLS

SEQ ID NO: 4050 - protein, 257 aa, Glycine max
  misc_feature (144)..(144): Xaa can be any naturally occurring amino acid
  unsure (1)..(257): unsure at all Xaa locations
MAEARHRKWHVFQTKDELSVAMAKYTAHLSAKFCKEKGLFTVVLSGGGLIDWLCKLLEPPYKDSIEWSKWHVFWVDERVCAYEDPDSNYKLAMDGFLSKVGIPNKNIYAIDKHYAADGNAEHCAALYEECLRKLVSKHTPLCPXGKYPQFDLQLLGMGPDGHMASLFPGHPQINVKDKWVTHITDSPKLPPRRITFTLPVINSASYNLMAVCDDHTEQCPRSIADIFKHNNLALPASHLTAHVETMWYLDKAAASLL

SEQ ID NO: 4051 - protein, 507 aa, Saccharomyces cerevisiae
MTMTHQQDLKGVFTAKDLDFKPAGKITKKDLNTGVTKAEYAVRGAIPTRADELKEELKKNPEVLPFDDIINANIGNPQQLDQKPLTFTRQVLAILEYPEILRVGHNELASLNLFSRDALERAERLLNDIGGSIGAYSHSQGVPGIRQTVADFITRRDGGEPATPEDIYLTTGASSAATSLLSLLCKDSQTGLLIPIPQYPLYTASASLFNAQVLPYYLDEESNWSTNSDEIEKVVQDALKKQIRPSVLIVINPGNPTGAVLSEETIARICLIAAKYGITIISDEVYQENIFNDVKFHSMKKVLRKLQHLYPGKFDNVQLASLHSISKGFMDECGQRGGYMEIIGFSQEIRDALFKLMSISICSVVTGQAVVDLMVKPPQPGDESYEQDHDERLKIFHEMRTRANLLYETFKELEGIECQEPQGAMYLFPRLVLPKKALCESERLGIEPDEFYCTSLLESTGICTVPGSGFGQRPGTYHVRTTFLAPGTKWIQDWKEFHQDFFSKYRN

SEQ ID NO: 4052 - protein, 640 aa, Oryza sativa; identical to SEQ ID NO: 1372

SEQ ID NO: 4053 - protein, 292 aa, Zea mays
MGKDDVVQSGAGGGEFAAKDYTDPPPAPLVDAAELGSWSLYRAVIAEFIATLLFLYVTVATVIGYKHQTDASASGAGADAACGGVGVLGIAWAFGGMIFVLVYCTAGISGGHINPAVTFGLFLARKVSLVRALLYMVAQCLGAVCGVGLVKAFQSAYFDRYGGGANSLASGYSRGAGLGAEIVGTFVLVYTVFSATDPKRNARDSHVPVLAPLPIGFAVFMVHLATIPVTGTGINPARSLGAAVVYNKDKPWDDHWIFWVGPLLGAAIAAFYHQYILRAGAIKALGSFRSNA

SEQ ID NO: 4054 - protein, 353 aa, Fagus sylvatica
MEKYELVKDIGSGNFGVARLMRNKESKELVAMKYIERGRKIDENVAREIINHRSLRHPNIIRFKEVVLTPTHLAIVMEYAAGGELFERICAAGRFSEDEARYFFQQLISGVPYCHSMQICHRDLKLENTLLDGSPAPRLKICDFGYSKSSLLHSRPKSTVGTPAYIAPEVLSRREYDGKLADVWSCGVTLYVMLVGAYPFEDPEDPKNFRKPINRIMAVQYKIPDYVHISQECKHLLSRIFAANPSKRITIKEIKNHPWFLKNLPRELTEAAQIMYYKKENPSFSLQSDREITKIVEDAKIPPPTSRSIGGFGWGGEEDGDGKEEEVNAEDEEEDEYEKKVKEAQESGDVQVS

SEQ ID NO: 4055 - protein, 548 aa, Saccharomyces cerevisiae
MQRSIFARFGNSSAAVSTLNRLSTTAAPHAKNGYATATGAGAAAATATASSTHAAAAAAAAANHSTQESGFDYEGLIDSELQKKRLDKSYRYFNNINRLAKEFPLAHRQREADKVTVWCSNDYLALSKHPEVLDAMHKTIDKYGCGAGGTRNIAGHNIPTLNLEAELATLHKKEGALVFSPCYVANDAVLSLLGQKMKDLVIFSDELNHASMIVGIKHANVKKHIFKHNDLNELEQLLQSYPKSVPKLIAFESVYSMAGSVADIEKICDLADKYGALTFLDEVHAVGLYGPHGAGVAEHCDFESHRASGIATPKTNDKGGAKTVMDRVDMITGTLGKSFGSVGGYVAASRKLIDWFRSFAPGFIFTTTLPPSVMAGATAAIRYQRCHIDLRTSQQKHTMYVKKAFHELGIPVIPNPSHIVPVLIGNADLAKQASDILINKHQIYVQAINFPTVARGTERLRITPTPGHTNDLSDILINAVDDVFNELQLPRVRDWESQGGLLGVGESGFVEESNLWTSSQLSLTNDDLNPNVRDPIVKQLEVSSGIKQ

SEQ ID NO: 4056 - protein, 245 aa, Fagus sylvatica
AGVSYCHSMQICHRDLKLENTLLDGSPAPRLKICDFGYSKSSLLHSRPKSTVGTPAYIAPEVLSRREYDGKLADVWSCGVTLYVMLVGAYPFEDPEDPKNFRKTINRIMAVQYKIPDYVHISQECKHLLSRIFVANPSKRITIKEIKNHPWFLKNLPRELTEAAQIMYYKKENPSFSLQSDREITKIVEDAKIPPTTSRSIGGLAWGGEEDGDGKEEEVNAEEEEEDEYEKKVKEAQESGDVQVS

SEQ ID NO: 4057 - protein, 344 aa, Bacillus anthracis str. Sterne
MQSIMKKVSEELDYFGYEEQKGFYPLREAISKYVKSFGIHASPSSILIVSGALQALQLISIGLLHRESTILLEQPSYLYSLHVFQSANINLSGISMDPHGILPNELLKRIKYSQKKNILYSIPCFQNPTGILMSKERRKEILKICEKEQLPIIEDDIYRELWIDAPPPAPLKSRDKHGHVLYIGSLSKTLTPGLRIGWVIGPEPVIDRLSDIKMQTDYGSSSLSQRVAAEWINKGFYEEHLANVRIKLKERRQIMIRALHKYCADIATWDIPSGGFFIWLKVIPSIPMKKLFSEALSKGVLLNPGRIYEEESDRYIRLSYGYASSEQMTNGIKLLSELIRKLTA

SEQ ID NO: 4058 - protein, 378 aa, Fagus sylvatica
MCGGAIISDFIAPTGSRRLTADYLWGDRKKPISGKRFSKPVVDLDDEFELDFQGFKDEEESDIDEEEVLVQDVKPFTFSAPPSSGSKPVKSVEFNGQAEKSAKRKRKNQYRGIRQRPWGKWAAEIRDPRKGVRVWLGTFNTAEKAARAYDAEARRIRGKKAKVNFPDETPRASPKRSVKANLQKPLAKANLNSVQPNLNQNFNFMNNSDQDYTMGLMEEKPFTNQYGYMDSIPANADVGLKPFASNNTTPYFNSDQGSNSFDCSDYGWGEQGSKTPEISSVLSATLEGDESQFVEDAMPTKKLKSDSGNAVFIENNTAKTLSEELSAFESQMNFQMPFLEGSWESNMEALFSGDTTQDGNSMDLWSFDDLPVMAGGVL

SEQ ID NO: 4059 - protein, 632 aa, Pseudomonas syringae pv. phaseolicola 1448A
MSHQSDLISEDILAYLGQHERKEMLRFLTCGNVDDGKSTLIGRLLHDSKMIYEDHLEAITRDSKKSGTTGDDVDLALLVDGLQAEREQGITIDVAYRYFSTAKRKFIIADTPGHEQYTRNMATGASTCDLAIILVDARYGVQTQTRRHSYIASLLGIKHIVVAINKMDLNGFDEGVFESIKADYLKFAEGIAFKPTTMAFVPMSALKGDNVVNKSERSPWYTGQSLMEILETVEIASDRNYADLRFPVQYVNRPNLNFRGFAGTLASGIVHKGDEIVVLPSGKSSRVKSIVTFEGELEQAGPGQAVTLTMEDEIDISRGDLLVHADNVPQVSDAFDAMLVWMAEEPMLPGKKYDIKRATSYVPGSIASITHRVDVNTLQEGPASSLQLNEIGRVKVSLDAPIALDGYDRNPTTGSFIVIDRLTNGTVAAGMIIARPVSGGGSQHHGELAHVSTEERAQRFGQQPATVLLSGLSGAGKSTLAYAVERKLFDMGRAVYVLDGQNLRHDLNKGLPQDRAGRTENWSRAAHVARQFNEAGLLTLAAFVAPDAEGRERAKALIGKDRLLTVYVQASPAVCRERDPQGLYAADGDNIPGESFPYDVPLNADLVIDTQTLNLEESVKQVLDLLRSRSVI

SEQ ID NO: 4060 - protein, 514 aa, Lycopersicon esculentum
MASAMTCSAAELFPHLGSSANATAAAEFICSRFSAVSEYLTNTTYAVDTTYLLFSAYLVFAMQLGFAMLCAGSVRAKNTMNIMLTNVLDAAAGGFSYYLFGFAFAFGAPSNGFIGKHFFGLKEFPSQAFDYSYFLYQWAFAIAAAGITSGSIAERTQFVAYLIYSSFLTGFVYPIVSHWFWSGDGWASASKTDGNLLLRFGVIDFAGSGVVHMVGGIAGLWGAFIEGPRIGRFDRSGRSVALRGHSASLVVLGTFLLWFGWYGFNPGSFLTILKSYDHTIRGTYYGQWSAIGRTAVTTTLAGCTAALTTLFCKRLLVAHWNVVDVCNGLLGGFAAITSGCAVVEPWAAIVCGFIAAWVLIGFNALAAKLKYDDPLEAAQLHGGCGSWGIIFTGLFAKKEYVNEVYPGFPNRPYGLFMGGGGKLLGAQVIQVVVIIGWVSVTMGPLFYLLHKFKLLRISRDDETAGMDLTRHGGFAYIYHDEDEGSSMPGFKMTRVEPTNTSTPDHQNRSVNVVV

SEQ ID NO: 4061 - protein, 149 aa, Anabaena variabilis ATCC 29413
MERTFLAIKPDGVQRGLVGEIIRRFETKGFTLVGLKFLQVSKELAEQHYGVHRERPFFPSLVEFITSGPVVAMVWEGDGVIASARKIIGATNPLTAEPGTIRGDFGINIGRNLIHGSDAPETAQKEVSLWFTDAELVNWQPHLTPWLHE

SEQ ID NO: 4062 - protein, 150 aa, Brassica napus
MGGSISVPEKSIHEFTVKDSSGKEVDLSVYQGKVLLIVNVASKCGFTQTNYTQLTELYRKYKDQGLVILAFPCNQFLNQEPGTSQDAHEFACTRFKAEYPVFQKVRVNGQNAAPVYKFLKSKKPSFLGSRIKWNFTKFLVGKDGQVIDRY

SEQ ID NO: 4063 - protein, 235 aa, Oryza sativa (japonica cultivar-group)
MASKEPSGDHDHEMNGTSAGGGEPKDGAVVTGRNRRPRGRPPGSKNKPKPPIFVTRDSPNALRSHVMEVAGGADVAESIAHFARRRQRGVCVLSGAGTVTDVALRQPAAPSAVVALRGRFEILSLTGTFLPGPAPPGSTGLTVYLAGGQGQVVGGSVVGTLTAAGPVMVIASTFANATYERLPLDQEEEEAAAGGMMAPPPLMAGAADPLLFGGGMHDAGLAAWHHARPPPPPPY

SEQ ID NO: 4064 - protein, 467 aa, Solanum tuberosum
MRSIDQHHHHQKKNNFFEMREIISVHIGQAGIQVGNSCWELYCLEHGIQPDGMMPSDTSPGAAHDAFNTFFSETGAGKRVPRAIFVDLEPTVIDEVRTGTYRQLFHPEQLISGKEDAANNFARGHYTVGKEIVDLCLDPVRKLAINCTGLQGFLVFNAVGGGTGSGLGSLLLERLSVDYGKKSKLGFTIYPSPQVSTAVVEPYNSVLSTHSLLEHTDVVVMLDNEAIYDICRRSLDIERPTYTNLNRLISQIISSLTTSLRFDGAINVDITEFQTNLVPYPRIHFMLSSYAPVISAEKAYHEQLSVPEITNAVFEPSSMMAKCDPRHGKYMACCLMYRGDVVPKDVNAAVATIKTKRTVQFVDWCPTGFKCGINYQPPTVVPGGDLAKVQRAVCMISNNTAVAEVFSRIDHKFDLMYAKRAFVHWYVGEGMEEGEFSEAREDLAALEKDYEEVGAEGVDDEEDGDEY

SEQ ID NO: 4065 - protein, 220 aa, Richadella dulcifica
MKELTMLSLSFFFVSGLLAAAANPRLSAADSAPNPVLDIDGEKLRTGTNYYIVPVLRDHGGGLTVSATTPNGTFVCPPRVVQTRKEVDHDRPLAFFPENPKEDVVRVSTDLNINFSAFMPCRWTSSTVWRLDKYDESTGQYFVTIGGVKGNPGPETISSWFKIEEFCGSGFYKLVFCPTVCGSCKVKCGDVGIYIDQKGRRRLALSDKPFAFEFNKTVYF

SEQ ID NO: 4066 - protein, 302 aa, Burkholderia mallei ATCC 23344
MSAGFPQFVSAGDILTDMVRTGGAHWTSRPGGAGWNVARAVARLGAPSACAGAVGRDCFSDELWRESEAAGLDLRFLQRVERAPLLAIVHETQPPAYFFIGENSADLAFDPQRLPDGWREHVKWAHFGCISLVREPLASTLVALAAELREAGVKISFDPNYRNLMTDSYRPTLARMAELADLIKVSDEDLRHLFAGDDEASAIARLRALNPRAALLVTRGPDTATLYAGGETIDARPPRIEVADTVGAGDATIGGLLFSLMTVPARGWRAHLSFALAAGAAACRHTGAHAPTLDEVVALVAA

SEQ ID NO: 4067 - protein, 401 aa, Bordetella bronchiseptica RB50
MRRAAIVSPLRTPVGAFGGALKAVPVEELGAAVARAIVQRTGLDPARIDDVVFAQSYASGETPCTGRWVALQAGFPIEVAGMQLDRRCGGGVQAVATAAMMVQTGAADVVMAGGVESMSNVEHYTTDMRWGKRAGSVTLHDRLDRGRERSQPESRFGRISGMIETAETLAREYGISREQADLFAARSHKRAAAAQAAGHFDAEIVPISVAQRKGEPLLVGQDEGVRGETSAESLGRLRTIMKEGVVTAGNACQQNDAAAACLIVAEDRLEELGLEPMGWLVGWAAAGCDPARMGIGPVPAVSKVLARTGLGFDQMDLIELNEAFACQALACVKGWGSSMDALEDRLNVNGSGISLGHPVGATGVRIMTTLLHEMQRRKARYGLETMCIGGGQGIAMIVERA

SEQ ID NO: 4068 - protein, 219 aa, Lactococcus lactis
GGLYAPFVEPELEWDFRLKNVISINTSGHKYGLVYPGVGWVLWRDKKYLPEELIFKVSYLGGELPTMAINFSHSASQLIGQYYNFVRYGFDGYKAIHERTHKVAMFLAKEIEKTGMFEIMNDGSQLPIVCYKLKEDSNRGWNLYDLADRLLMKGWQVPAYPLPKNLENEIIQRLVIRADFGMNMAFNYVQDMQEAIEALNKAHILYHEEPENKTYGFTH

SEQ ID NO: 4069 - protein, 448 aa, Solanum tuberosum
MGKEKIHISIVVIGHVDSGKSTTTGHLIYKLGGIDKRVIERFEKEAAEMNKRSFKYAWVLDKLKAERERGITIDGAVWKVETTKYYCTVIDAPRGRDFIKNMITGTSQAGCAVLIIDSTTGGFEAGISQDGQTRERALLAFTLGVKHMICCCNKMDATTPKYSKARYDEIVKEVSSYLKKVGYNPDKIPFVPISGFEGDNMIERSTNLDWYKGPTLLDALDQINEPKRPTDKPLRLPLQDVYKIGGIGTVPVGRVETGVIKPGMVVTFGPTGLTTEVKSVEMHHEALLEALPGDNVGFNVKNVAVKDLKRGFVASNSKDDPAKGAASFTAQVIIMNHPGQIGNGYAPVLDCHTSHIAVKFAEILTKIDRRSGKELEKEPKFLKNGDAGMVKMIPTKPMVVETFAEYPPLGRFAVRDMRQTVAVGVVKNVDKKDPTGAKVTKAAQKKGK

SEQ ID NO: 4070 - protein, 565 aa, Arabidopsis thaliana
MTTVHTFSILLFFCSLFSASLIIAKVQHHDFVIQETPVKRLCKTRNAITVNGMFPGPTLEVNNGDTLEVKVHNRARYNITIHWHGVRQIRTGWADGPEFVTQCPIRPGKSYTYRFTIQGQEGTLWWHAHSSWLRATVYGALIIHPTPGSSFPFPKPDRQTALMLGEWWNANPVDVINQATRTGAAPNISDAYTINGQPGDLYNCSTKETVVVPINSGETSLLRVINAALNQPLFFTVANHKLTVVGADASYLKPFTTKVLMLGPGQTTDVLLTADQPPKRYYIAARAYQSAQNAPFDNTTTTAILQYKKTTTTSKPIMPVLPAFNDTNTVTSFSRKFKSLRNVVVPKTIDDNLFFTIGLGLDNCPKKFPKSRCQGLNGTRFTASMNNVSFVLPSNFSLLQAHSNGIPGVFTTDFPSKPPVKFDYTGNNISRALFQPVKGTKLYKLKYGSRVQVVLQDTNIVTSENHPIHLHGYDFYIVGEGFGNFNPKKDTSKFNLVDPPLRNTVAVPVNGWAVIRFVADNPGVWLMHCHLDVHIKWGLAMAFLVDNGVGELETLEAPPHDLPIC

SEQ ID NO: 4071 - protein, 163 aa, Lactococcus lactis
GGLYAPFVEPELEWDFRLKNVISINTSGHKYGLVYPGVGWVLWRDKKYLPEELIFKVSYLGGELPTMAINFSHSASQLIGQYYNFVRYGFDGYKAIHERTHKVAMYLAEEIEKTGMFEIMNDGSQLPIVCYKLKENSNLGWNLYDLADRLFNEGMASACLSTS

SEQ ID NO: 4072 - protein, 358 aa, Campylobacter jejuni RM1221
MQYKILENNRIASKGYAMLSKDAKFTPFEFSRHAIGDNDILIKILYAGICHSDIHTARSEWGEATYPCVPGHEIAGEVIAVGKNVSKFKVGDYAGVGCMVNSCGECDACKRSQEQFCENGKTIFTYNSCDVFHGNENTYGGYSNNIVVSEKFAVCVPKDAPMEKVAPLLCAGITTYSPLKFSNIKEGSSVAVAGFGGLGMMAVKYAVKMGAKVSVFARNENKKADALAMGVSSFYTSTDKNAVKERFDLIISTIPTPYDPSTYMDLLKFGGEMAIVGLPPHEVAPSISVITFVHKAGKKVYGSLIGGIAETQEMLDFSLKHEIYPETELITPQEIDKAYENLTSGKAKFRYVIDMTKE

SEQ ID NO: 4073 - protein, 337 aa, Zea mays
MGKDDVVQSGAGGGEFAAKDYTDPPPAPLVDAAELGSWSLYRAVIAEFIATLLFLYVTVATVIGYKHQTDASASGATADAACGGVGVLGIAWAFGGMIFVLVYCTAGISGGHINPAVTFGLFLARKVSLVRALLYMVAQCLGAVCGVGLVKAFQSAYFDRYGGGANSLASGYSRGAGLGAEIVGTFVLVYTVFSATDPKRNARDSHVPVLAPLPIGFAVFMVHLATIPVTGTGINPARSLGAAVVYNKDKPWDDHWIFWVGPLLGAAIAAFYHQYILRAGAIKALGSFRSNASVAFVPACVMSRAKERPSLDCVLEQRRSIDLAWGEADRRAREGGE

SEQ ID NO: 4074 - protein, 669 aa, Ustilago maydis 521
MPKTASVEIDTPANKGETKIRRSYRAPDRMLERPADGINTMADVFIKAKERFPNKPIMGWRDVVRMHDEQKEITKTVDGKEVKETKTWQYYELSDYKYITYNEFEERIQYASSGLVNLGLSKQTRFNIYAATAINWQNMAHACFRQSIPFCTAYETLGEEGLQHSLNEPEVVGVFTNAELLPTLANVIDKTETVKYVIYDGKPDDKHLTKVLDVVSARQGKLLTIEELWQQGKASPADSHLPTRDDVACIMYTSGSTGAPKGVILTHGNLVASIAAVEVHIGDLLKPDDTFLAYLPLAHILEFIVECAFIHVGVTMGYGKVKTLTQQSVRNCDGDIKAFRPSIMIGVPAVWELIRKGILSKVNAGGSVKKSVFNGAMTIKKNKLPLLSSVVDSAVFKQVREQTGGRLRIALSGGAALSKETQEFLNNALVTLLQGYGLTESCGMTAILHPDFYSYGPSGGIVPAIEAKLRDVPDAGYFSTNNPPQGEVLIRGPSITNGYFKREDVNKESFEDGWFLTGDVGQWNADGTLSIIDRKKNLVKLSGGEYIAIERLESTYKSSNLVSNICVHANSDAKQPMGIIFPREDNLMAAVQKAGIKGDDLEQLCKNREVAKIVKDDVNAAGKKVGFKNLEMLQTVLLVHEELAMTAAQKLSRKDIIKKYEADIKKVYM

SEQ ID NO: 4075 - protein, 397 aa, Exiguobacterium sp. 255-15
MKEFAYLYSPEEAAYRFSDSHPFNPIRLELTLSLLEATGALETVDCIVPRRATDEELSLIHDADYIQAVKLAGHGELSPMKAQMYGLGTEDTPLFDQMHESAALLVGGTIEACELVLSGQYRRTFHIGGGLHHGFRGRASGFCIYNDTAVAMAAMIQKYDCRILYVDTDAHHGDGVQWAFYNRADVMTLSLHETGRYLFPGTGMVTERGAEEGYGWSWNVPFDAFTEDASFLQAYRTVLFEACELFKPDLIITQNGADAHALDPLTHLSLTMESYEQIPQIAVEAADRYTDGRIVALGGGGYDWYRVVPRAWSQVFAALTNQSPFHGNLPEEWIQRWQKESPTVPVTWADPVPLYPMIPRRPEIEEKNWETVKRLLWPFIDDSKKEHLSFSSPYSND

SEQ ID NO: 4076 - protein, 610 aa, Zea mays
  misc_feature (146)..(146): Xaa can be any naturally occurring amino acid
  unsure (1)..(610): unsure at all Xaa locations
LDTSGIVWSVGGHRPAGSGAVACPASGVSGFITSTGGGGEPPPRDATLGRHLARRLVQVGVSDVFAVPGDFNLTLLDHLIAEPGLRVVGCCNELNAGYAADGYARARGVSACVVTFTVGGLSVLNAIAGAYSENLPVLCVVGGPNXSNDYGTNRVLHHTIGLPDFSQELRCFQPVTCHQAVVNNLEDAHEQIDGAISTALRESKPVYMSVSCNLPGLPHPTFATDPVPYLLAPRPSNLTGLAAAVEATVSFLDKAVKPVVVAGPKIRVAKAAAAFVELAEASGYAVAAMPSAKGLVPETLPRFLGTYWGAVSTAFCAEIVESADAYLLAGPIFNDYSSVGYSILLRKDKAVVVQPDRVTVGNGPTFGCVMMRDFLSALAKRVRPNTTAYDNYRRIFVPGGQPPECEAGEPLRVNVLFKHIQRMLSGGSAVIAETGDSWFNCQKLRLPDGCGYEFQMQYGSIGWSVGALLGYAQGAPDKRVIACIGDGSFQVTAQDVSTMLRCEQRSIIFLINNGGYTIEVEIHDGPYNVIKNWDYTGLVDAIHNGQGRCWTARVATEEELTAAIATATGDDRKDCLCFIEVVVHKDDTSKELLEWGSRVSAANSRPPNPQ

SEQ ID NO: 4077 - protein, 515 aa, Neurospora crassa
MPNLRTRNPRSLANENDENSTATTTRMTRAKAATLHVDELSMPAKTMQTKKTTISTTTAATAARTVGKRNALGDVSNVTKVEVAGTKKAIAKPGLVSKAAQPSGIQKKTTTATSRTATTARRALSNKEPNKTVGPSAGAGTIPAKRKPPPSTSKLAPIKESAPVENEPARKKIHVEEPEKKKVSRTEAKENDAPSKAVKPMAEPPAPVVRDVVPVQSVYPPGVKDLDTEDLEDPLMVAEYATEIFEYLRDLECKSVPNPQYMSHQDDLEWKTRGILIDWLIEVHTRFHLLPETLFLAVNIIDRFLSEKVVQLDRLQLVGITAMFVASKYEEVLSPHIANFRHVADDGFTEAEILSAERFILSTLNYDLSYPNPMNFLRRISKADNYDIQSRTLGKYLMEISLLDHRFMPYRPSHVAAAAMYLARLILGRGEWDKTIAYYAGYTEEEIEPVFHLMVDYLARPVIHEAFFKKYGSKKFLKASILTRQWAKKNAVLYGVVDAEIPLDKLKDRPVDQLP

SEQ ID NO: 4078 - protein, 597 aa, Oryza sativa (japonica cultivar-group)
MHPAGAVVAPAAGAPARAAPRVEKATSHLLMGPDWAVNLEICDIINADVWQTKDVVKAVKKRLQNKDPKVQFYALTLLETMMKNCGEYVQLEVAEQHVLQEMVKIIQKKNDMLVRDKILLLLDSWQEAFGGPGSKYPQYHFAYLEVKRIGAVFPRRPIDAPPIFTPPATHTSQSYGSPRYEAGSLNEIMSSDVETLSLGDLNNIRNVTELLCDMVHALNPSDHMAVKDEIITDLVSQCRSNQQKLMQFVSSTGNEQLLKQGLEINDRLQNIISKYDIMASSTHLAVEAPPADNVEAPKEDPAEKPSAPPISTLEEEEEEEDEFTRLAQRKNKSVMTSDDSLSSTGDLALVPIDMESSESSSSVASNALVPVDPALVSSSPQTKEQDMIDLLSLTLCSPTHEASTDSSTQGPNGPQQPAVTDGQHNPSGVPQYPSNHQSHPINQEYIRQNRNYVAPWAQSGQYYPAPPWAAPPSVNSNPFQSATYQEQPPPVGSVSSTYSAPSASYTSPSMAYVPPSASLPIWNGSTTSNGLSATQAQMNGNQQPPGSSAAASKPYYIPDNLFSDLIDLKGLSGGNKMGVPTSMGSANGGQPTIGGKK

SEQ ID NO: 4079 - protein, 447 aa, Vibrio fischeri ES114
MKKILTLAFPLIVSQLISMALVLTDVWMMSRLSVSALAGGGLGASVYFFIFIVASSTVGCVANLIAIAYGQRLARPEFGNQQIRLAIKGAVLLSVILSVILLFAFSYAPNVLRLAGQPEEMISLAMEYVDALKWAMFPSLILLVLRGLTSALGNVRSIMVMSVITVVLNVPISYVLTFQLGMGLYGLGLGTAVAALMVMLGYGLWVFKQQEYKPFAPWLNLEEYSIKLITPLLVMGLPIAVAALLEHGLIYGGTLMAGTISIASLALHQILLQCLSFTWNFNFGFSQAAAILVGRDFGANNVDGIKKTSQHSFVLVTVMSVFIAAVFIIWPESIADLFQLDNGENNMSALLTSVIWVVALCFVVDAWQLLAINLLRGMKIVSLPTVMTAIGYWVCGLPAAWYLMPIFGLSGIWAGIGIGLGVTGILLLVQLLISIARVKTHYQEIEN

SEQ ID NO: 4080 - protein, 362 aa, Oryza sativa
MSAYCGKYKDELIRNAAYIGTPGKGILAADESTGTIGKRLASIGVENVEENRRALRELLFTAPGALDCLSGVILFEETLYQSTRDGTPFVDVLAAAGVLAGIKVDKGTVELAGTDRETTTQGHDGLGERCRRYYAAGARFAKWRAVLSIGRASSRPSQLAVDANAQGLARYAIICQENGLVPIVEPEILVDGEHGIEACAEVTERVLAACYKALSDHHVLLEGTLLKPNMVTPGSDAARAPPEVVAEHTVRALLRTVPPAVPAIVFLSGGQSEEEATRNLNAMNQVASRGKKPWSLTFSFGRALQQSTLKAWAGKAENVGKAQAALLARCRANSQATLGAYAGDAAAGEGVSENLHVKDYKY

SEQ ID NO: 4081 - protein, 606 aa, Lotus corniculatus
MDVKLGSLDTTKPASNDVVSCATANHTTAIQSSIPSTAVSSCDATLGRHLARRLAQIGVTDVFSVPGDFNLTLLDHLIAEPQLNLVGCCNELNAGYAADGYARARGVGACVVTFTVGGLSVLNAIAGAYSENLPLICIVGGPNSNDYGTSRILHHTIGLPDFTQELRCFQTVTCFQAVVNNLEDAHEQIDTAISTALKESKPVYISIGCNLPGIPHPTFSRDPVPFSLSAKLSNQMGLEAAVEATAEFLNKAVKPVLVGGPKLRVAKASDAFVELADASGYALAVMPSAKGQVPEHHPHFIGTYWGAVSTAFCAEIVESADAYLFAGPIFNDYSSVGYSLLLKKEKAIIVQPDRVVIANGPAFGCVLMKDFLKALAKRLKHNNAAYENYHRIFVPEGKPLKSAPKEPLRVNVMFQHIQKMLSGETAVIAETGDSWFNCQKLKLPRGCGYEFQMQYGSIGWSVGATLGYAQAVPEKRVIACIGDGSFQVTAQDVSTMLRCGQNTIIFLINNGGYTIEVEIHDGPYNVIKNWNYTGLIEAIHNGEGKCWTSKVFCEEELVEAIATATGPKKDCLCFIEVIVHKDDTSKELLEWGSRVSAANGRPPNPQ

SEQ ID NO: 4082 - protein, 297 aa, Brassica napus
  misc_feature (249)..(249): Xaa can be any naturally occurring amino acid
  unsure (1)..(297): unsure at all Xaa locations
STTRPEDYEAMARDYYALKFLSPDVDVTPIIPALRDFFDDALNYTVSELNFKTLVDGLGAVFYQYPFDVPAYYALILRSLTVLEGLALYADPDFKVLAASYPYFAKRLLTDQNPYLRDALIELLFKDGKFRWGRLENLLQQGSKDRDFSSKDALQPVLKLLLDPNGEELRLLVIKEAVRVSEAFALGSVVDTYNSMPEFMRSLVFNGNGNGGPLTMNPTELESTLELRDQVSRIWSLLQSSESFDPAIXLQPIVQVLQQPEAKRLGGRVAGGVGQRLAARFLQQLFGATTPTPTPVP

SEQ ID NO: 4083 - protein, 515 aa, Saccharomyces cerevisiae
MSKLGQEKNEVNYSDVREDRVVTNSTGNPINEPFVTQRIGEHGPLLLQDYNLIDSLAHFNRENIPQRNPHAHGSGAFGYFEVTDDITDICGSAMFSKIGKRTKCLTRFSTVGGDKGSADTVRDPRGFATKLYTEEGNLDWVYNNTPVFFIRDPSKFPHFIHTQKRNPQTNLRDADMFWDFLTTPENQVAIHQVMILFSDRGTPANYRSMHGYSGHTYKWSNKNGDWHYVQVHIKTDQGIKNLTIEEATKIAGSNPDYCQQDLFEAIQNGNYPSWTVYIQTMTERDAKKLPFSVFDLTKVWPQGQFPLRRVGKIVLNENPLNFFAQVEQAAFAPSTTVPYQEASADPVLQARLFSYADAHRYRLGPNFHQIPVNCPYASKFFNPAIRDGPMNVNGNFGSEPTYLANDKSYTYIQQDRPIQQHQEVWNGPAIPYHWATSPGDVDFVQARNLYRVLGKQPGQQKNLAYNIGIHVEGACPQIQQRVYDMFARVDKGLSEAIKKVAEAKHASELSSNSKF

SEQ ID NO: 4084 - protein, 488 aa, Arabidopsis thaliana
MGKVLVMLTAAAAVVACSVATVMVRRRMKGRRKWRRVVGLLKDLEEACETPLGRLRQMVDAIAVEMQAGLVSEGGSKLKMLLTFVDDLPNGSETGTYYALHLGGSYFRIIKVHLGGQRSSLEVQDVERHSIPTSLMNSTSEVLFDFLASSLQRFIEKEGNDFSLSQPLKRELAFTFSFPVKQTSISSGVLIKWTKGFAISEMAGEDIAECLQGALNKRGLDIRVAALVNDTVGALSFGHFHDPDTIAAVVFGTGSNACYLERTDAIIKCQNPRTTSGSMVVNMEWGNFWSSRLPRTSYDLELDAESMNSNDMGFEKMIGGMYLGDIVRRVILRMSQESDIFGPISSILSTPFVLRTNSVSAMHEDDTSELQEVARILKDLGVSEVPMKVRKLVVKICDVVTRRAARLAAAGIAGILKKQIMRRTVVAVEGGLYLNYRMFREYMDEALRDILGEDVAQHVVVKAMEDGSSIGSALLLASSQSVQTIPSV

SEQ ID NO: 4085 - protein, 366 aa, Zea mays
FGSSNNTPVFFLRDPTKFPVFIHTQKRNPQTNLKDATMFWDYLSTHQESAHQVMHLFSDRGTPYSYRHMNGYSGHTFKWIKPDGTFNYVQIHCKTDQGNKTLTNEEAGELAKSNPDWHTQDLFQAIERGENPSWTCYVQTLSPEQAEKFRWNVFDLTKVWPQSEVPLRRFGRFTLNKNPENYFAEIEQAAFAPSHLVPGVEPSADPVLQARLFSYPDTHRHRLGVNYQQIPVNCPLHAFNPYQRDGAMAVNGNYGANPAYPSSFRAMNFEPVKASQEHEKWVGAVTSQQIPVTDEDFVQANALWRVLGRTPGQQENFVKNVSVHLCNANERVRKQTYGFFTRINAILGEKIKKATEKNVSREQARL

SEQ ID NO: 4086 - protein, 453 aa, Pelvetia fastigiata
MRECISIHIGQAGIQVGNACWELYCLEHGIQPNGQMPADNTTGGGDDAFNTFFSETGAGKHVPRAVYVDLEPTVCDEVRTGSYRQLYHPEQIISGKEDAANNYARGHYTIGKEIVDIVLDRIRKLSDNCTGLQGFLVFHATGGGTGSGLGSLLLERLSVDYGRKSKLSFAITPAPQVATAVVEPYNSVLSTHALLEHTDCTFCLDNEALYDVCRRNLDIERPTYTNLNRLVAQVISSLTASLRFDGALNVDVTEFQTNLVPYPRIHFMLTSYAPIISAEKAYHEQLSVAEITNSVFEPAGMMTKCDPRHGKYMACCLMYRGDVVPKDVNAAVATIKTKRTIQFVDWCPTGFKCGINYQPPTAVPGGDLARVQRAVCMVANTTAIAEALSRIDHKFDLMYAKRAFVHWYVGEGMEEGEFSEAREDLVALEKDYEEVGAETADGDGEEEEFGEEY

SEQ ID NO: 4087 - protein, 251 aa, Brassica oleracea var. botrytis
MPIRNIAVGRPDEATRPDALKAALAEFISTMIFVFAGSGSGMAFNKLTENGATTPAGLVAASLAHAFGLFVAVSVGANISGGHVNPAVTFGAFVGGNITLLRGILYWIAQLLGSVVACLLLKFATGGLVVPAFGLSAGVGVSNALVFEIVMTFGLVYTVYATAVDPKNGSLGTIAPIAIGFIVGANILAGGAFSGASMNPAVAFGPAVVSWSWNNHWVYWAGPLVGGGLAGLIYEVFFINTTHEQLPTADY

SEQ ID NO: 4088 - protein, 453 aa, Pelvetia fastigiata
MRECISIHIGQAGIQTGNACWELYCLEHGIQPDGQMPSDKTIGGGDDAFNTFFSETGAGKHVPRAVYVDLEPTVCDEVRTGTYRQLYHPEQIISGKEDAANNYARGHYTIGKEIVDLVLDRIRKLADNCTGLQGFLVFHATGGGTGSGLGSLLLERLSVDYGRKSKLSFAITPAPQVATAVVEPYNSVLSTHALLEHTDCTFCLDNEALYDVCRRNLDIERPTYTNLNRLVAQVISSLTASLRFDGALNVDVTEFQTNLVPYPRIHFMLTSYAPIISAEKAYHEQLSVAEITNSVFEPAGMMTNCDPRHGKYMACCLMYRGDVVPKDVNAAVATIKTKRTIQFVDWCPTGFKCGINYQPPTVVPGGDLARVQRAVCMVANTTAIAEALSRIDHKFDLMYAKRAFVHWYVGEGMEEGEFSEAREDLAALEKDYEEVGAETAEGEGEEEDFGEEY

SEQ ID NO: 4089 - protein, 175 aa, Brassica oleracea var. botrytis
ANISGGHVNPAVTFGAFVGGNITLLRGILYWIAQLLGSVVACLLLKFATGGLVVPAFGLSAGVGVSNALVFEIVMTFGLVYTVYATAVDPKNGSLGTIAPIAIGFIVGANILAGGAFSGASMNPAVAFGPAVVSWSWNNHWVYWAGPLIGGGVAGLIYEVFFINTTHEQLPTTDY

SEQ ID NO: 4090 - protein, 321 aa, Acinetobacter sp. ADP1
MKKKVVVFSQIDPRILEQLKQQYQVVVLDPKKGDINEQICQEVVDADGMIGAGRLLNENNLAPAQHLKIVSTVSVGYDNYDVQYLNQKKIWLAHTPHVLTETTADLAFTLLVSAARKVPQLDAWTKAGEWKRTVGAAQFGQDIFGKTLGIIGLGNIGAAIARRGLYGFNMNILYHNRHEKLVLAQPLNAEYCSMQDLLQRSDFIVVAVDLNTESQALIGTQEFEQMQSHAVFVNISRGSVVDESALIEALKQKQIFAAGLDVYQKEPLQASELFDLDNVVTLPHVGSATAETRLKMSQLAYKNLVDALEGKTPRYLVNPDF

SEQ ID NO: 4091 - protein, 495 aa, Zea mays
MSAGSAAAVSGTDSAPHFVLVPMMAAGHAGPMLDMARTLSGRGALVTFVTTPLNLPRLGRAPSDGALPIRFLPLRFPCAEAGLPEGCESLDALPGLGLLRNFNDACAMLRGPLVALLRDREGDAPPASCVVSDACHPWTGGVARELGVPRFSFDGFCAFSSLCMRQMNLHRIFEGVDDDDTRPVRVPAFPIHVEISRARSPGNFTGPGMKEFGEEIMSESERADGLVVNSFAEMEPMFVDAYEAAMSKKVWTIGPLFLAPTVPLAATAENANAVRCVSWLESNKLRTVVFVSFGSLVRSSLPQLVEIGHGLEATKRPFIWVVKPGNLAEFERWLSEDGFESRVGETGLVIRDWAPQKAILSHPATGAFVTHCGWNSVLECVAAGLPMVSCPHFAEQFMNEKLVVDVLRVGVPVGVKGAAQWGVEAEGVLATRQDVEGAVAAVMDCGEEGSARRARAAELGRKAREAVVHGGSSFRNVALLIQHVQQRTSTRNPWI

SEQ ID NO: 4092 - protein, 369 aa, Oryza sativa (japonica cultivar-group)
MLRYTRGPSSYAALMGDAFGRAGAALLNVFVAFNAIGTLTVYLIIIGDVMSGTTSDGKVHDGVLTEWFGQQWWTGREAVLVAAAVLLLPLVLRKRVDSLKFTSAVSILLAVVFMFISLGIAVYALFTGTAKMPRMLPDFSRLSSPFELFTAVPIVVVAFTFHFNVHPIRTELSKTSDMKAAVRISLVLCAAIYAAVGFFGFLLFGDATMADVLANFDRSSGAGVPQALNDAARLSYALHLVLVFPLLHFSLRVNVDELLFPGRRPLATDTRRFVALTAVLMAVLYALAIAIPSIWTLFEYSGSTFAVCISLIFPGAIVLRDAHGIAKTKDKALAATMIALAVITSSIAIASNVMSSISGKVEGGHAAGR

SEQ ID NO: 4093 - protein, 537 aa, Oryza sativa
MATGVSVENINPKVILGPSSIAECIVIRGEVAIHAQVSWFSPSMFWKSISIYSFSANARREINRYLTFFFQHLQQQLQTQPGSLPFDEIVYCNIGNPQSLGQKPITFFREVLALCNHPNLLEREEIKSLFSTDAIARAKKILSMIPGRATGAYSHSQGIKGLRDEIAAGIASRDGFPANADDIFLTNGASPGVHMMMQLLIRNNRDGIMCPIPQYSLYSASLALHGGALVPYYLDESSGWGLEVSKLKNQLEDARSKGITVRALVVINPGNPTGQILDEQQQYELVKFCKDEELVLLADEVYQENIYVTNKKINSFKKIARSMGYNGDDLQLVSLHSVSKGYYGECGKRGGYMEVTGFSTPVREQLYKIASVNLCSNITGQILASLIMDPPKAGDASYDLYEEEKDNILKSLSRRAKAMESAFNSIDGITCNKTEGAMYLFPRIYLPQKAIEAARAVNKAPDVFYALRLLDTTGIVVTPGSGFGQIIRCYLFTCNSEFLTTQVWSFVKGCRDMAREMHDPAAGGEDTFDDLPLQGIP

SEQ ID NO: 4094 - protein, 438 aa, Oryza sativa
MSLVRRSNVFDPFSLDLWDPFDSVFRSVVPATSDNDTAAFANARIDWKETPESHVFKADLPGVKKEEVKVEVEEGNVLVISGQRSKEKEDKNDKWHRVERSSGQFMRRFRLPENAKVDQVKAGLENGVLTVTVPKAEVKKPEVKAIEISGGENISRGKYKVNWKRVCRPKDLGGLGIMDLQRFASALRLRWLWYEWTAPEKPWESNWVRDIDILRITEADHVQQSVRLWTMIRRMNPLTEDQDSIHWDLTANGQYSAKSAYRLQFLGATRSAFNQTIWKAWAPPKCKFFSWLATQNRLWTVDRLEKRGWQNQKICPLCCIIDESAVHLLAHCRVTKRVWTEIQRWTQTNLQMIKWSDCDSVEQWWNLVVDSLNNPRIPLRTLVILVSWEIWCERNARIFRNSASPLASILAKIKEEGRAWVKAGAYKLQEFGILGDIT

SEQ ID NO: 4095 - protein, 607 aa, Astragalus membranaceus
MATVTGSYVVSRSACFNSQGRTEAKVNSPQKINLNSQAFTYVGLRSLNKLHVQTARATKTSSSSLKATNKDLVKIVCGNGMNLVFVGAEVGPWSKTGGLGDVLGGLPPALAGNGHRVMTVSPRYDQYKDAWDTGVSVEIKVGDRFETVRFFHCYKRGVDRVFVDHPLFLEKVWGKTESKLYGPKTGVDYKDNQLRFSLLCQAALEAPRVLNLNSNKHFSGPYGEDVVFVANDWHTALLPCYLKSLYKSKGIYKSAKVAFCIHNIAYQGRHAFSDLSLLNLPNEFRSSFDFIDGYDKPVKGRKINWMKAGVLESDRVFTVSPYYAKELVSGEDRGVELDNIIRSIGITGIVNGMDNREWSPQTDRYIDVHYDASTVTEAKAILKEALQAEVGLPVDRNIPVIGFIGRLEEQKGSDILVESIPKFIDQNVQIIVLGTGKKIMEKQIEQLEVTYPGKAIGVAKFNSPLAHKIIAGADFIVIPSRFEPCGLVQLHAMPYGTVPIVSSTGGLVDTVKEGYTGFHVGAFSVECEAVDPADVEKLATTVNRALKTYGTQALKEMILNCMAQDFSWKGPAKQWEQALLSLEVAGSEPGIDGEEVAPLAKENVATP

SEQ ID NO: 4096 - protein, 454 aa, Colletotrichum lagenarium
MKGEILHLHLGQAGTQLGNSAWELYLLEHGLGHDGRPDPSAKDVVDGGSYETFFTETSNGKYVPRSLFVDLDPSPIDEIRTGGYRQLFHPELLISGKEDAANNYARGHYTIGKEMVDNVIDRIRRVADNCHSLQGFLIFHSFGGGTGSGFGALLLERLSTEYGKKSKLEFAVYPAPRVSTAVVEPYNAVLSTHSTIENSDCTFLVDNEAVYDICRRNLDIPRPSYDHLNRLIAQVVSSITSSLRFDGALNVDLNEFQTNLVPYPRIHYPLISYAPVISGFKSAHESFKVQLTFQCFEPNNQMVVCDPRNGKYMAVALLYRGDAVPRDCNAAIAALKAKSSFNLVEWCPTGFKLGINYQKPMAVPAAPGDGGLAPVDRSVSMLSNTTAMPEAWSKTGITKFDLMSAKRAFVHWYVGEGMEEGEFSEAREDLAALEKDYEEVAADSYEGDEGEAEY

SEQ ID NO: 4097 - protein, 450 aa, Colletotrichum lagenarium
MREVISINVGQAGCQIANSCWELYCLEHGIQPDGYLTEERKQADPDHGFSTFFSETGQGKYVPRAIYCDLEPNVVDEVRTGPYRGLFHPEHMITGKEDASNNYARGHYTVGKELIDQVLDKVRRVADNCVGLQGFLVFHSFGGGTGSGFGALLMERLSVNYGKKNKLKFCVYPAPQTATSVVEPYNSILTTHTTLEHSDCSFMVDNEAIYDICRRNLGLERPNYENLNRLIAQVVSSITASLRFDGSLNVELTEFQTNLVPYPRIHFPLVAYAPMISAAKAAHEANSVQEMTMSCFEPNNQMVKCDPRHGKYMATCLLYRGDVVPNDAHAAVATLKTKRTIQFVDWCPTGFKLGICYQAPQMVPNGDLAKVSRAVCMLSNTTAIAEAWSALSTKFDLMYSKRAFVHWYVGEGMEEGEFSEAREDLAALERDYEEVAADSLEGEEGLEAEY

SEQ ID NO: 4098 - protein, 332 aa, Zea mays
MDMEDSGQFMQWAMATLQHDDEDLGVDHIDNNGRDEATFPSLRALREASSQAAEMIQELIGEPHAANSRCSGGDGDTTGGGTASSISGTAPRNSSSSSATIQPVGWNFGAGAAAPPGRDGVPVPAEAAATGSLLPDLAYGPPPTRKQAVLKSVGSIYAQDHIIAERKRREKINQRFIELSTVIPGLKKMDKATILLDATRYLKELQEKLKDLEQRKEAGGGSIETLVLVKKPCLHAAAARDDDGGSSLPASPPAGTPTEGKRLPEIEVQFSELEKTVAVRVHCENRKGVVVHVLAELEDLHLSNIHANVMPFTACTRIITITAKASFPCPAF

SEQ ID NO: 4099 - protein, 174 aa, Zea mays
  misc_feature (127)..(127): Xaa can be any naturally occurring amino acid
  unsure (1)..(174): unsure at all Xaa locations
MAEAPASPGGGGGSHESGSPRGGGGGGSVREQDRFLPIANISRIMKKAIPANGKIAKDAKETVQECVSEFISFITSEASDKCQREKRKTINGDDLLWAMATLGFEDYIEPLKVYLQKYREMEGDSKXTAKSSDGSIKKDALGHVGASSSAAQGGAYNQGMGYMQPQYHNGDISN

SEQ ID NO: 4100 - protein, 250 aa, Triticum aestivum
AYLGDTLRTSLYKKAGWYRSGIPGISSTHASALCDSDPFHFLAFRELLQEVGFNNGVPITEEFYSANISGWHNDALAGALFPELDHAKGMEFMDRKEALFRKLAAGELKGLAGLQELCTWIEGRNLKRAAVTNAPRANAELVLSLLGLTSFFPVLVIGSECERAKPSPDPYLKALDLIGASPDHTFIFEDSASGIRAGVAAGVAVVGLTTGNPEKVLRDAGASLLIGDFRDPKLMAMLQELDPAAADKQG

SEQ ID NO: 4101 - protein, 352 aa, ASPERGILLUS NIDULANS FGSC A4
MAVRIAACHASPIFLSASKTTSKTVSLIHAAARNKAQIIVFPETFIPAFPIWSALRPPTDNHELFQRMVAESVFADGNEIAAIRTAARETNTIVSIGISEKSRFSTATLYNSNLLIDTNGAVLNHHRKLMPTFFEKLTWAAGDGHGLRVSKTAHGNIGNLICGENTNPLARYTLMAQAEQIHISTWPAIWPTRAPTDSGGANYDNVAANRTRAAAHCFEAKCFGVLCAGFLAPDTDSAAVKMIAEGASAPQAVKHVLQNSSRGASMFLDPTGAVHPAFVFSEDGKKEKREFLQDEEGIIYADFELDRDRALSTFSRLKFMHQSQLSHAAGTVSEISKRATGMRNGTVGYIIS

SEQ ID NO: 4102 - protein, 296 aa, Glycine max
MKKRSSSSSSSSVFEANGVEEPQQPSSCAAAALDELHKEKNENGEETLVPSNPYPNLDDGFYEIETIRRKRLRKGQLQYLIKWRGWPETANTWEPLENLQSVPDLVDAFEDSLKSGKHQKRKRKHVDVLQLTLLKKRSERSTTSYSLRHFPPLTPTNANDYDPKLSELKAPTHTGVQLDNLAIHFQQPIPSRGAKRRKSASSVKRFKRDTDAAALQPISAPINMPDANTACNIVKIIKPIGYSASLSDNMHDVLVTFMAMRSDGTEVMVDNRYLKAYNPLLLINFYEMHLRYTPTP

SEQ ID NO: 4103 - protein, 213 aa, Campylobacter jejuni RM1221
MKNYYLVDEKRKTPVSTWEKISQALRRSVKLELFVGLFVMMRELLKRNNSATIKYPFEKVKLDNRYRAVHRLMRFIESENERCIGCGLCEKICISNCIRMETSLDENGRKKVGNYSINLGRCIYCGFCAEVCPELAIVHGTEYENAAEQRSYFGYKQDFLTPIDKLKNQVEFEGAGSLRKDANLWVKKTPNYYDAMLESALENQNTQEQGENK

SEQ ID NO: 4104 - protein, 620 aa, Chlorobium tepidum TLS
MSIYSILPLLNEVFSTNQTALKAEPATTTHPTLALQKTRPPQPDQRLSTTDATGKNPGDKTLKSKAIQLKTWALEKFQAMFNAPTKEETLLKICLFLISAFALKNLFIYLNKQIIFRIQTKTAKKLRDDVFSSIIEMQLDYFNKNRVGNLMNYVYNDVENVNNSISATFVNFLQNPFSIIVFLAVLLTLSWQLTLFSAVTSIFILVFVRMIGKKIRGLARRYQVNMGNMNSVLQEKFNGIKIIKSTAFEEVEFNKFKAFTKEFRTLGIRISQLKNMIGPLNETLMIAAIAMVLWFGGLQVFNGMMTANELLLFAFTLYSTMGPIKQLGDANTAIEAGLVSVERLFEVLDAEPEIVNGNRSISTFNEAIRFEDVCFKYNKEDPNAPNILDHVSFEIKKGEMVALVGQSGSGKSTAVDLLMRFYDVDSGRITIDNIDIREFDYKQLRKMIGVVSQEVILFNDTIEQNIAYGVHEEIEHDQIEKAAKLANAHQFIMEKPEQYDTMIGDRGIQLSGGQRQRIAIARAMVKNPELLIFDEATSALDNESEKVVQDAIDHAMENRTALVVAHRLSTIKNADKIIVMERGKVVEAGNHAALLEKNGVYKMLYDIQFTGQAANRQQTT

SEQ ID NO: 4105 - protein, 640 aa, Kluyveromyces lactis NRRL Y-1140
MIKLPAKLLGSRFYSSVTNQNRYSVTRHNAPKKCPESGHYNKIPIGKEAARLQSQPKVTRLSVDGPIECPLEGFQLLNSPLFNKGSAFTLEERKAFGLDGLLPPQVNTLDEQVERAYKQLCYLKTPLAKNDFMTSMRVQNKVLFFELVRRHIRQLVPIIYTPTEGDAIAAYSHRFRKPEGVFLDITEPDSIDSRLAAYGEDKDVDYVVVSDGEGILGIGDQGIGAIRIAISKLALMTLCGGVHPGRVMPVALDVGTNNKQLARDELYMGNRFSRIRGKQYDQFLDKFIKALKHRFPNAVLHFEDFGVTTARTLLERYRNELPCFNDDIQGTGAVVMASFIAALKHTNRELVDSRILVYGAGSAGLGIADQIVNHMVTHGCTPEEARAKIYLMDRKGLILDTMENDSNPAQFLYAKPSENWEGANTQSLVDVVSKVKPTCLIGCSTQAGAFNKVVVEEMYKHNPRPIIFPLSNPTRLHEAVPEDLLKWTNYDALVATGSPFPPVDGYRISENNNCFSFPGIGLGAVLSRAKVISDKMISAAVDQLADLSPLKPGDSKPGLLPPLEEINDTSARVATAVILQALEEGSARIEEENVPGTDKKVQVPRDFNKCLEWVIKQMWKPEYRPLIKVEHDPAVHTHQF

SEQ ID NO: 4106 - protein, 195 aa, Zea mays
VLAKGGSKLETTTAQLARKSSVRQQNPASFTDASFRKLPNVRKINKRIVSMSTNTKHCLTGCRQLMGQNLSGLGVKGLQNLENQLEMSICCIRTKKDQLLVDEIHELNRKGSLIQQDNMGLHRKVNLIRQENAELYKKLYEKEAEGEVNRDSTTPYNFVVAEGANVPIHLELNIPLQENGVEQPVAPKLGLQLNQ

SEQ ID NO: 4107 - protein, 961 aa, Arabidopsis thaliana
MEGDSGKLEATIDRLLNEEKQMRLAENVAGTRKAATEILQLCFDAKDWKLLNEQILNLSKKRGQLKQAVQSMVQQAMQYIDQTPDIETRIELIKTLNNVSAGKIYVEIERARLTKKLAKIKEEQGQIAEAADLMQEVAVETFGAMAKTEKIAFILEQVRLCLDRQDFVRAQILSRKINPRVFDADTKKDKKKPKEGDNMVEEAPADIPTLLELKRIYYELMIRYYSHNNEYIEICRSYKAIYDIPSVKETPEQWIPVLRKICWFLVLAPHDPMQSSLLNATLEDKNLSEIPDFKMLLKQVVTMEVIQWTSLWNKYKDEFEKEKSMIGGSLGDKAGEDLKLRIIEHNILVVSKYYARITLKRLAELLCLSMEEAEKHLSEMVVSKALIAKIDRPSGIVCFQIAKDSNEILNSWAGNLEKLLDLVEKSCHQIHKETMRGDSFASSSLIMDGADGTVRVKPGRGFETETDVAVSSPVTRQKAAAAKQFIENHYKNYLQGLHERMERRREFQRKVQEAQLPVEEQDEMMRNLARRETEYMRLQRRKIGIDDFELLTVIGKGAFGEVRLCRLRSTSEVYAMKKLKKTEMLSRGQVEHVRSERNLLAEVDSRYIVKLFYSFQDSECLYLIMEYLPGGDIMTLLMREDILSEDVARFYIAESILAIHSIHQHNYVHRDIKPDNLILDKSGHLKLSDFGLCKPLDDKYSSLLLEDDEMLSQDSENQSGKSDADKAPWQMPKEQLLQWKRNRRALAYSTVGTLDYMAPEVLLKKGYGMECDWWSLGAILYEMLVGYPPFCSDDPRITCRKIINWRVCLKFPEEPKISDEARDLICRLLCDVDSRLGTRGVEEIKSHPWFKGTPWDKLYDMEAAYRPIVDGELDTQNFEKFPEVEGSPSEAPQVGPWRKMLTSKDTNFIGFTFKKSDITRSMESSGADMKSNGSGEAPSLISLLGRINMEEGEGEAMERRW

SEQ ID NO: 4108 - protein, 534 aa, Saccharomyces cerevisiae
ETHTFNWTTGWDYRNVDGLKSRPVITCNGQFPWPDITVNKGDRVQIYLTNGMNNTNTSMHFHGLFQNGTASMDGVPFLTQCPIAPGSTMLYNFTVDYNVGTYWYHSHTDGQYEDGMKGLFIIKDDSFPYDYDEELSLSLSEWYHDLVTDLTKSFMSVYNPTGAEPIPQNLIVNNTMNLTWEVQPDTTYLLRIVNVGGFVSQYFWIEDHEMTVVEIDGITTEKNVTDMLYITVAQRYTVLVHTKNDTDKNFAIMQKFDDTMLDVIPSDLQLNATSYMVYNKTAALPTQNYVDSIDNFLDDFYLQPYEKEAIYGEPDHVITVDVVMDNLKNGVNYAFFNNITYTAPKVPTLMTVLSSGDQANNSEIYGSNTHTFILEKDEIVEIVLNNQDTGTHPFHLHGHAFQTIQRDRTYDDALGEVPHSFDPDNHPAFPEYPMRRDTLYVRPQSNFVIRFKADNPGVWFFHCHIEWHLLQGLGLVLVEDPFGIQDAHSQQLSENHLEVCQSCSVATEGNAAANTLDLTDLTGENVQHAFIPTG

SEQ ID NO: 4109 - protein, 257 aa, Zea mays
MAKLVNKLVDSFDHDEAPAPDVGCVRAVLAELVLTFLFVFTGVSASMAAGAGGKPGEAMPMATLAAVAIAHALAAGVLVTAGFHVSGGHLNPAVTVGILVRGHITKLRALLYVAAQLLASSLACILLRYLSGGMVTPVHALGAGIRPMQGLVMEVILTFSLLFVTYAMILDPRSQVRTIGPLLTGLIVGANSLAGGNFTGASMNPARSFGPAMATGVWTNHWVYWIGPLLGGSLAGFVYESLFMVNKTHEPLLNGDI

SEQ ID NO: 4110 - protein, 391 aa, Kineococcus radiotolerans SRS30216
MVPAHRTHRGLEAHRPAGGHHRARRRGRAVSAGFLLAPLLLAGCTGQDPQDTAAPGIVGGAAATASASASASASSSGAAGSAQSLQDAYQQVITGVLPSVVEIRTGSGLGSGVVLDEEGNIVTNAHVVGTATEFQVQFANSATSYPATLVGTYPTNDLAVIHVEGAPELHPATFGDSSAVEVGTIVLAMGNPLGLSSSVSNGIVSAVGRTVSEPAGESSPGATLPGTIQTSAAINPGNSGGALVDLDGEVIGIPTLAALSPSQGGAAPGIGFAIPSNTAKDIAGQLIANDGRVVDSNRAALEVSVTTLADASGQPAGVGVVAVDPGGAAAAAGVREGDVIVSVAGQDVTSTGQLSTVLAERSVGDVVDVVVVRDGRRETLQVTLGELASTS

SEQ ID NO: 4111 - protein, 358 aa, Arabidopsis thaliana
MSAFVGKYADELIKTAKYIATPGKGILAADESTGTIGKRFASINVENIESNRQALRELLFTSPGTFPCLSGVILFEETLYQKTTDGKPFVELLMENGVIPGIKVDKGVVDLAGTNGETTTQGLDSLGARCQEYYKAGARFAKWRAVLKIGATEPSELSIQENAKGLARYAIICQENGLVPIVEPEVLTDGSHDIKKCAAVTETVLAAVYKALNDHHVLLEGTLLKPNMVTPGSDSPKVAPEVIAEYTVTALRRTVPPAVPGIVFLSGGQSEEEATLNLNAMNKLDVLKPWTLTFSFGRALQQSTLKAWAGKTENVAKAQATFLTRCKGNSDATLGKYTGGASGDSAASESLYEEGYKY

SEQ ID NO: 4112 - protein, 257 aa, Solibacter usitatus Ellin6076
MRGFGEIAERLRRSTVQVRLNKHGGGSGIVWKPDGLILTNAHVARGSQAEIELWDGRRFPAKLVSKDARRDLATFRIAAANLEAAVVGDSAALRPGELVIAVGNPLGFAGALSTGIVHSNSDRWIHADVQLAPGNSGGPLANSLGQVIGVNTAIVNGLGAAVPSKAALEFVQHGARPTLGVTMRPVHLGLQLLEVEPGGAAANASLRAGDILLTRFDALNEALDSGRPTLRLHFLRDDPKRVREAVVLLAARVEAAA

SEQ ID NO: 4113 - protein, 665 aa, Listeria innocua Clip11262
MSRIDEQMVNSIRVLSMDMIEKANSGHPGLPMGAAPMAFSLWKNHLKFNPEHPTWFNRDRFVLSAGHGSAMLYSLLHLFGYDLPMSELKNFRQTGSKTPGHPEFGHTVGVDATTGPLGQGFAMGVGMAMAEAHLGAKFNQPEFPVVDHNTYVLCGDGCLMEGISYEAASLAGHLKLGKLVVLYDSNDISLDGDLNESFSEDIELRFRAAGWQTLRVDDGNDLDALDAAIHLAKTEKSRPTLIEVKTVIGYGSPGKAGKSAAHGSPLGEKELKLAKEAYDWQMPPFELPKTVENQKEFYHSKGRASESSWLRTFNAYKQKYPALAESLQQLMDDNLNPDWDAELPVFDENADKPVATREVSGIVLQELEKKLPNLFGGAADLASSNKTNLKASERFAPGNYAAKNISFGVREFAMGAAVNGMTLHGGVQAFGATFFVFSDYLRSAIRSAALMGIPSTFIMTHDSIAVGEDGPTHEPIEHLASFRAMPGLHVIRPADGNETVEAYRYAFTQKEQPTMLVLSRQNLPILPNSAAKAKTGLAKGAYILADSPLDKLDIILLASGSEVHLMTAVRDNLAKKGFGARVVSMPSFDLFDKQSPEYKESILPKAVKKRFAAEMGASYGWHKYLGDAGEILAIDSFGMSGPGDELAERFGFTVENLTELALKQL

SEQ ID NO: 4114 - protein, 161 aa, Glycine max
MRDGMNYRILLDSAKSCILASSVPRRQQFLIRCVGGSIDHRHRDMQALRSLEVDSQTVIRAITPALDPTRHKGQAGNIAVIGGCREYTGAPYFAAISALKIGADLSHVFGTKDAAPVIKSYSPELIEHPVLEESYNVGEGHKSSIASKGLAEVDKWLERFD

SEQ ID NO: 4115 - protein, 218 aa, Listeria innocua Clip11262
MKFFLDTASVSEIKRISELGLVDGVTTNPTIIAKEGRPFEEVIKEICSIVDGPVSAEVIGLEADKMVEEARILAKWAPNVVVKIPMTEEGLKAVHTLTAEGIKTNVTLIFTVSQGLMAAKAGATYISPFLGRLDDIGTDGMILIKNLKKVLDNYGLKAEIISASIRHIGHLEEAAEAGAHIATIPGSLFPKLWSHPLTDKGIEGFLKDWEAFSQKEGN

SEQ ID NO: 4116 - protein, 431 aa, Debaryomyces hansenii CBS767
MLSRVQLKRIPNCRQFSVMNRACKWNDIPLAPPDKILGISEAFVKDSNTKKINLGVGAYRNNSGKPIVFESVKNAEAKLLETETEKEYTGIIGNKNFQKVVRNFIFNNSGKDANGARLIDENRIVTSQTISGTGSLRVIADFLHRFNTAKKIYVPKPTWANHIAVFTDAGMSTEYYDYYNKEINNLDYDKLKQSLSNAEEGSVVLLHACCHNPTGMDLSSEQWDEVLAIVQQKQLFPLVDMAYQGFASGNPYKDIGLIRRLNELVVNGDISTYALCQSFAKNMGLYGERTGSISIVTESAEHSTAIESQLKKLIRPIYSSPPIHGSKIVETIFADESLYNSWLSDLDQVVSRLNTVRTKLYEKLDKSNYNWDHLLKQRGMFVYTGLSAEQVIELREKYSVYATEDGRFSISGINDNNVDYLADAMNQVVNK

SEQ ID NO: 4117 - protein, 494 aa, Mannheimia succiniciproducens MBEL55E
MTKDLNVFDKHYGLLINGEWTDGSEGKTLTAHNPANGAELATFIDATDADVDAAVTAAQEAFKTWKHTTAAERAAILNKIADVIDENTELFALQETLDNGKPIRETRAADIPLAADHFRYFAAVIRSEEGSANQLDDEDLSLILREPIGVVGQIIPWNFPFLMAAWKIAPALAAGCTVVIHPSSSTSLSLLSLAQKINHLLPKGVFNVITGKGSKSGEYMLHHTGFNKLAFTGSTEIGRKIGVAAAEMLIPSTLELGGKSANIFFDDMPFDKALEGAQKGILFNQGQVCCAGSRIFVQENIYDKFIAALKEEFKKVKVGLPWEDDTQMGAQVNSNQIKVISKYVDIAREEGCEIIIGGEKATDPALAKGEFFQPTLILAPDNTKRVAQEEIFGPVAVVIKFKEEADVIHMANDSEYGLGGAVWTHNINRALRVARALETGRVWVNCYNRLPAGAPFGGYKTSGIGRETHKMMLDAYTQVKNIFISTREEREGMY

SEQ ID NO: 4118 - protein, 422 aa, Mannheimia succiniciproducens MBEL55E
MELTQQQLVQWRREFHRFPETGWAEFWTTSRIADYLEQMGFEILLGNQIINRDFVRGRQQAVVEKGLANAVAYGAKQKWLEKMDGYTGCVAVLDSGKPGKTLALRFDIDCVNVMETKAPEHIPNKEDFASLNDGFMHACGHDGHITIGLGTALWLSQNKDKLSGKVKIVFQPAEEGVRGAAAIAASGVIDDADYFSASHIGFCADSGTVISNPKNFLSTTKIDIRYQGKPAHAGAAPHLGRNALLAAAHAVTQLHGISRHGEGMTRINVGVLKAGEGRNVIPSKAEIQLEVRGENKAVNQYMVDQVMRIANGIAVSFDVEYETEIMGEAVDMINDTELVGLVEEIVLAHPKVHSANANYAFNASEDATVLGRRVQEQGGKAIYFVLGADRTAGHHEAEFDFDEDQLMNGVNIYTALVQRLLG

SEQ ID NO: 4119 - protein, 231 aa, Triticum aestivum
  misc_feature (177)..(177): Xaa can be any naturally occurring amino acid
  unsure (1)..(231): unsure at all Xaa locations
MASLSVPPVLTPPRDDAVALHKAFKGFGCDSTTVTNILAHRDSAQRALILHEYKAIYHQDLYHRLATELSGNHKNAMLLWVLDPVGRDATILNQALNSDITDLRAATEVICSRTPSQLQIMKQTYRARFGCYLEHDITERTYGDHQKLLLAYLGVRRNEGPEVDPSAGTDHARELYXQAGEKRVGTPLTGLHPGFFNETHLGPTWWSRGPNPLPTTLVTPRGLLGKKGPLR

SEQ ID NO: 4120 - protein, 181 aa, Lycopersicon esculentum
MASSIVSSAAAATRSNVAQASMVAPFTGLKSAASFPVTKKNNNVDITSLASNGGRVRCMQVWPPINMKKYETLSYLPDFSDEQLLSEIEYLLKNGWVPCLEFETERGFVYRENNSSPGYYDGRYWTMWKLPMFGCTDATQVLAEVQEAKKAYPQAWVRIIGFDNVRQVQCISFIAYKPEGF

SEQ ID NO: 4121 - protein, 655 aa, Debaryomyces hansenii CBS767
MSYSDTSSFRDTAAATGSEDFDKSSKVREHDGSEDIPQGYNEQSIPMVVKSTSKSYGIRRSEILVEQFTHPAFSILFLFCVFICAYAYSLDGTVRFTYQGYATNSYDQHSLLAAINVIRSVIAAASQPTYARLSDIFGRLELLIFSIILYAMGTVIESQAYDIYRFAGGSVLYQAGYSGVMLILQVILADFSNLNWRLLCSLIPATPFIINTWVSGNVTESALATYSWNFCIGMWAFIFPLACIPILGCLIAMQVKARKTPEWRQIRAEEKESNRWRSWKDNVIVDLFFKIDVIGILFIICILGFILVPMTIAGGKTDDGAVREAWKEAKIIVPLVIGFVLIFPFILWEYKFSKYPVVPFQLMKDRGVWSALFIAIMINFVWYLPNDFMYPVLLVAMRASIKAGTRITSLYSFVSTITGVLFGLLIVPWARRLKPFIIFGGLCWIASMAILYSYRGANDGIESEKYLNGVIGGLCFMGFGAGLFTYPTQVSIQTCTNHEHMAIVISLYLAFYNIGSAFGSCVSGAVWTNTLYKYLLDKFTEAGLDTSAAELAYGKPYDFIAIYTWGTPERVAVVLAYAQTQRLLCIIGLCLSVILFIATFLLRDHKLESVQSLELAHEEGIKAEDGEVVVNDYDNDLVFSKIKSLFKRKEKNDAI

SEQ ID NO: 4122 - protein, 180 aa, Lycopersicon esculentum
MASSVISSAAVATRSNVTQASMVAPFTGLKSSATFPVTKKQNLDITSIASNGGRVSCMQVWPPINMKKYETLSYLPDLSDEQLLSEVEYLLKNGWVPCLEFETEHGFVYRENNKSPGYYDGRYWTMWKLPMFGCTDATQVLAEVQEAKKAYPQAWVRIIGFDNVRQVQCISFIAYKPEGY

SEQ ID NO: 4123 - protein, 337 aa, Arabidopsis thaliana
THASAHASGTICFLIRVLRFLGNRIASTDISPMSSLTVRRVSREDIQLVQNLIERCLQLYMNQKEVVDTLLEQAKIEPGFTELVWQKLEEENREFFKAYYLRLMVKHQIMEYNELLEQQINHMRQMHPTAGASVRNRNGSHVPPMNQQQLLYERKEPDQSSPNLSSPYLNGGSAINTNIPSYVDFSSHSRRVDPSPNSLSLQATNMPLMQGMIKSETAYQNCAPYMYGGEAQSTVGDVTIASFSNDSSNQSLNDPLVDPDAPTFGSLGQIPQNFSLSDLTADFSQSSDILESYEGSPFLLADAENFLDSSERVEHQGDHERLRTISSGFSYENFRSN

SEQ ID NO: 4124 - protein, 241 aa, Asparagus officinalis
MGRGRVELKRIENKINRQVTFSKRRNGLLKKAYELSVLCDAEVALIIFSSRGKLYEFGSAGTSKTLERYQRCCYTSQDAAIASHETQSWYQEVSKLKAKFESLQRSQRHLLGEDLGPLSVKELQQLERQLESALSQARQRKTQIMLDQMEELRKKERHLGEINKQLKAKLEAEGASFRAIQGSWESEAGVGGNAFSMHPSQSSAMDCEPTLQIGYHHLVQPEAALPRSSGGENNFMLGWVL

SEQ ID NO: 4125 - protein, 581 aa, Canavalia lineata
MASTNALSSASILRSPNHQSLSRRANQNGRVNYRQPNHRFAVKASAKEIAFDQSSRAAIQAGIDKLADAVGLTLGPRGRNVVLDEFGSPKVVNDGVTIARAIELPDAMENAGAALIREVASKTNDSAGDGTTTASVLAREIIKLGLLSVTSGANPVSLKRGIDKTVQGLVEELEKRARPVKGGDDIKAVASISAGNDELIGKMIAEAIDKVGPDGVLSIESSSSFETTVEVEEGIEIDRGYISSFVTNLEKSIVEFENARVLVTDQKISAIKDIIPLLEKTTQLRAPLIIIAEDVTGEALATLVVNKLRGILNVAAIKAPSFGERRKAVLQDIAILTGAEFQASDLGLLVENTSIEQLGLARKVTISKDSTTIIADAASKDELQARVAQLKKELAETDAVYDSVKLAERITKLSGGVAVIKVGAATETELEDRKLRIEDAKNATFAIEVGIVLVDTALLHLSTHVPAIKDKLEDADERLGADIVQKALIAPASLIAQNAGIEGEVVVEKVKNGEWEVGYNAMTDRYENLVEAGVIDPAKVTRCALQNAASVAGMVLTTQAIVVEKPKPKAPTAAAPQGLTI

SEQ ID NO: 4126 - protein, 458 aa, Acinetobacter sp. ADP1
MTDQHAHELKKGLSNRHVQLIALGGAIGTGLFLGISHTIQLAGPAVLLGYAIAGMIAFLIMRQLGEMVVEEPVSGSFSYFAHKYWSSMAGFMSGWNYWVLYVLVSMAELSAIGIFVQFWWPQIPTWLTALVFFVLINAINLINVRFFGELEFWFSCIKIIAIISMIGFGAYLLLSGTAGAHAGIANLWQHGGFMPNGWTGLIIAMAFIMFAFGGLELVGIAAAETKNPTQTIPKATNQIVYRILIFYIGAIAILLSLYPWNQVAQGGSPFVMIFQSLNNTGVAHVLNMVVLIAAISVYNSCVYSNSRMLLGLAEQGNAPKLLKRVNARGIPVYAVYASVMVTALCVLLNYVMPEKAFNLLMMLVVAALVINWLMISITHLKFRQYMLEAGRKPIFRSLGAPFTNYITIAFVFFILLIMSYTSEMRIAVFLVPVWLGILYIFYRFKAPASKMTESVLDQ

SEQ ID NO: 4127 - protein, 540 aa, Bacillus clausii KSM-K16
MDESKKAPSFGTNVTGQGDALDQRKAANEKDDTLTTRQGHPVKDNQNVRTVGNRGPMTLENYDFLEKISHFDRERIPERVVHARGAGAHGYFQSYGKVGEEPISKYTRAKVFTNTEVKTPVFVRFSSVIHGIHSPETLRDPRGFAVKFYTEDGNWDLVGNNLKIFFIRDPLKFPDMVHAFKPDPVTNRQSMERFFDFVSQSPESTHMITFVFSPWGIPANYRNMQGSGVHAYKWVNEEGKAMLVKYHWEPVQGIKNLTQKEAEQIQGKNFNHATQDLYEAIEKGDYPEWELYVQLMEDGEHPELDFDPLDPTKLWYKDQFPWHKVGKMVLNKNPENYFAEVEQAAFGTGVLVDGLDFSDDKLLQGRTFSYSDTQRYRVGPNYLQLPINAPKKRVATNQRDGQMTYHVDSPPGINPHVNYEPSVLNGLKEAEKVNPDHTPHVSGEVKYEAISRPNNFGQAGETYRRFSDWERDELIANLADALADVDKRIQKQMIENVTEADRDYGKRLEEAIKRVQESVDDKEGHAVKEAEQEGMPSDPY

SEQ ID NO: 4128 - protein, 392 aa, Acinetobacter sp. ADP1
MRRTFIWLPWVLLIIVILSFIAWQKSQQPKPTIAADGVKMPAEKVESLVDTSRSGGVVSYSAAVKVAAPAVVNIFTTQKVKKLDHPLLNDPTFREFFGNQVPNQLDQKNENSLGSGVIVRADGYILTNNHVIAQADQIVVALYDGRRAEAKVIGTDPDTDLAVIKIDLDKLPVLPFKLSGNEVGDVVLAIGNPFGVGQTVTQGIISATGRSDLGINTYEDFIQTDAAINPGNSGGALIDVAGNLVGINTAIFSQSGGSLGIGFAIPARVCQQVLNSILKDGRVIRGWLGISLVAPTQDDVLAPKQAGVVVADVLQNGPAAQGGVKIGDKILKVNDEQITSVSHLINYVALQQPASMITLEVERNSKRENLRVKVGERKTQNQDSQYIPLPKR

SEQ ID NO: 4129 - protein, 572 aa, Bacillus clausii KSM-K16
MIKRFFSYYVPHKKLFFIDFFSAIVVAVLDLFFPIVVQWFINTLLPQQEWDKVVWVSGGLLLTYLISAYLQYNVNFLGHKLGIHIETDMRQDLFESIQRQSFRYFDNTKTGHIISRITNDLFDIGELAHHGPEDLFIALMTFVGAFGIMFYVNPTLAIVALVFVPFLIALITYTNIKMNQAWSKMYAEIGDVNARVEDSVSGMRVVQSFTNEAHEVEEFRKNNRRYQKAKVGGYKVMGYTSSGIFLATRLMILSVLLVGAWLLYTNSLDVGEFVLFILYINILFKPIEKISAILELYPKGMAGFKRFTEVLDTEVDIEDKPDAKVAPVLNGDIEFHNVTFSYENNRPVLNDLNLFIPAGKTVAFVGPSGAGKTTISSLIPRFYDVDSGAITINGINICDMTKKSLRSQIGIVQQDVFLFSGTLKENIRYGKLDASDEDIYRAAKLANLDGLIESLPEGYETQIGQRGLKLSGGQKQRIAIARTFLKNPPILILDEATSALDTETEALIQESLQELAADRTTLVIAHRLATIRHADHIVVVTKDGIAEQGTYEELVAKNGVFATLNNIQLTHV

SEQ ID NO: 4130 - protein, 295 aa, Lupinus albus
MTYMFKYDSVHGHWKHDELKVKDSKTLDSVHGHWKHDELKVKDSKTLAESGAEIIVESTGVFTDKDKAAAHLKGGAKKVIISAPSKDAPMFVVGVNEHEYKPELDIISNASCTTNCLAPLAKVINDRFGIVEGLMTTVHSITATQKTVDGPSSKDWRGGRAASFNIIPSSTGAAKAVGKVLPVLNGKLTGMAFRVPTVDVSVVDLTVRLEKAATYDEIKKAIKEESEGKLKGILGYTEDDVVSTDFIGDNRSSIFDAKAGIALNEKYVKLVSWYDNEWGYSTRVVDLIAHFAKTI

SEQ ID NO: 4131 - protein, 133 aa, Brassica napus
RPRVRPRVRGSIASLNRNFRSLVKSGDIYKLRKQNGFVEHWVYFSCQLLEWVAFDPVERKWMQLPTMPSSVTFMCADKESLAVGTDLLVLGKDGFSSHVIYRYSLLTNSWSSGMEMNSPRCLFGSASLGEIAI

SEQ ID NO: 4132 - protein, 324 aa, Bradyrhizobium sp. BTAi1
MAKAVRVHKVGGPEALVYEPVDLAAPGPGEVRIRQHAIGLNFIDVYYRTGLYKAPGLPFIAGNEAAGEVIAVGPGVTHFHPGDRVAYYENLGGYATERNIAWQRLVKLPDHITYEQGAVLMLKGLTVWYLLHKTFKVEPHHRVLIHAAAGGIGLLACQWARALGAHVIGTVGSRAKADLALANGCDHVILYNEEDFVARVKQISRGELCDVVYDGVGKSTFPGSLSCLKPRGLFVSFGNASGPVPPFSIAELNSHGSLFATRPKLNDYVGKRSELLEGADTLFAAVISGKLHVPINHAYALKDAAKAHADLESRATTGASILKP

SEQ ID NO: 4133 - protein, 523 aa, Neurospora crassa
MFKPLCGLLWSLILSSLAHDNAGQAPSISTRTMKHMCPRPVSPDRPISSTSIHYHGLRMLNANTQDGVNGVTECPIPPGSRKTYTFLANQYHSHFPLQYGNGVLGPIVIKGPASADYDTDLGPLVLSDWYYGSVFEIAHRVNNPSNPFIPNFPGSPPASDNVLFNGRNINPDGSGGTYTRKTLTKGKKHLLRLINTSLQNAFTVSLVGHTFQVVATDMVPIKPVTRDHLFLGIGQRYDVIINANQPTANYWFNVTFSALPCGQSDNPYPAAIFSYSGASSASLPTQRGVAPPDSRCAAPERDYSPIVSRSADVNSFAPTTSHTLNVDLTVDNSQARVFWPVNNSPLRVNWQEPTLRYVANNTLSSVPRSRNLIQIPGSNTLTYFLLQNNSPIPHPIHLHGHDVMILGSSPPLADPLAETQIREYNPNTDKSTLRGNNPPRRDTTMLPAWGWLLVAWRTNNPGVWLFHCHVGWHVSQGLGVQVLERLDALRDGGGGSLGTVEQNCGNWAGWYPGSTWKQDDAGL

SEQ ID NO: 4134 - protein, 432 aa, Kineococcus radiotolerans SRS30216
MGLPSLTGGHVTVAGPIVPLVATPNVLAIVLAGGEGKRLMPLTADRAKPAVPFGGTYRLIDFALSNLVNAGYRKVVVLTQYKSHSLDRHISQGWRMSNLFGSYIASVPAQQRVGQRWYLGSADAIYQSLNLVSDERPDIVVVVGADHVYRMDFSQMVDAHIASGSPCSVAAIRQPISLADQFGVIQTAPGSNRIAEFLEKPKDPQGLEDSPHEVLASMGNYVFDADALVDAVTRDSENEGSKHDMGGDIVPDFVSRGQASVYDFKDNEVPGATDRDRAYWRDVGTLDSYFEAQMDLISVLPVFNLYNYEWPIITAQDYYPPAKFVHGWQGTYGHAVNSIVSQGTVVSGALVEKSVVSPNVRLDSWAHVSESVLMDGVQVGRHAVVQRAIVDKFVTVPDDARIGVDPEEDRARGFHVTDSGITVVGKGQTIPT

SEQ ID NO: 4135 - protein, 416 aa, Arabidopsis thaliana
MTEIYRTISTGRGDDVSPTKCRERRRRRIEMRRQAAVFGEPSSSRNRDRTDMEVYSSFDVPLRKQARRSEIGGLPADIGGFLAPPAASSCQKSEAPVWKGEETEDEPLYGIVSVMGRSRKMEDSVTVKPNLCKPEVNRQRPVHFFAVYDGHGGSQVSTLCSTTMHTFVKEELEQNLEEEEEGSENDVVERKWRGVMKRSFKRMDEMATSTCVCGTSVPLCNCDPREAAISGSTAVTAVLTHDHIIVANTGDSRAVLCRNGMAIPLSNDHKPDRPDERARIEAAGGRVLVVDGARVEGILATSRAIGDRYLKPMVAWEPEVTFMRRESGDECLVLASDGLWDVLSSQLACDIARFCLREETPSSLDLNRMAQEDDNDGEQNPSRSVLAATLLTRLALGRQSSDNISVVVIDLKNSSQ

SEQ ID NO: 4136 - protein, 236 aa, Arabidopsis thaliana
MINFEATELRLGLPGGNHGGEMAGKNNGKRGFSETVDLKLNLSSTAMDSVSKVDLENMKEKVVKPPAKAQVVGWPPVRSFRKNVMSGQKPTTGDATEGNDKTSGSSGATSSASACATVAYVKVSMDGAPYLRKIDLKLYKTYQDLSNALSKMFSSFTIGNYGPQGMKDFMNESKLIDLLNGSDYVPTYEDKDGDWMLVGDVPWEMFVDSCKRIRIMKGSEAIGLAPRALEKCKNRS

SEQ ID NO: 4137 - protein, 511 aa, Glycine max
MGSVDCYPSRTDDAAVVSLDSLPLGFRFRPTDEELVNYYLRQKINGNGRQVWVIREIDVCKWEPWDMPGLSVVQTKDPEWFFFCPQDRKYPNGHRLNRATNNGYWKATGKDRRIKSGKDLIGMKKTLVFYTGRAPKGNRTNWVMHEYRPTLKELDGTNPGQNPYVLCRLFKKHDESLEVSHCDEAEQTASTPVAYSTEEIQSDLAVVAGSPSQVTEDDKHQAMIPAHSEEAISNVVTPVDRRTDRYDACHAPNQIVLPTAEEFQPLNFDIYYDPRSELLDGKLFSPVLAHIQPEFHYQANIESDGRYGLQYGTNETNMSDFLNSVVNWDQVPFEDPNCQQQSYPLFNVKDNILNSDLDSELANMTCMQAGYAEGAIDGRIPLLITSEFCSTTGIPVDCVGDEQKSNVGLFQNNSQRAFTDVNMGQVYNVVDDYEQQRICSAVASGNTGIIRRHREVRNEQLSINSTQGTAQRRIRLSMATHGSNKTVKSESCAQEELYAKPVIAVVRFLFF

SEQ ID NO: 4138 - protein, 486 aa, Shewanella sp. MR-4
MYCNHLTGGLNYTSKHFLLAYSLKAVFMNHSGFQAKRLIQLALPVLIAQVTQTMMGFIDTVMAGRVSAVDMAAVAVGTSLWLPAILFVQGLLMAFTPLFAHHNGANNQKAIQPLAFQGAYLALIGGLGVMAFLASAPLVLSHMNLEPQLYNLTIGYIDGILWGAPAFVLYQVLRGCSEGISYTLPTMIIGFVGLAVNIPANYIFIYGHFGVPAMGGAGCGVATALVFWAMLIAMTIYMQFHKKFAALAPFSQFHRPDFTTMKKMTKLGMPIAMALFFEVSLFAIIALLLAPLGATVVASHQIALNFSAIVFMLPLSIGIAVSIRIGYYLGRDRADISAVVAKVGLWLALSLALSTAILTVLFRFQIAELYNGDPEVVVLAGSLMLMAALYQLSDSVQVVAAGALRGYKDTRSAFYITLFSYWGIGMTLGYTLAYTDLIVPAMGAHGFWTGLIAGLTSAALLFFIRLRYIQKHGVHLSLIEGDSVHH

SEQ ID NO: 4139 - protein, 330 aa, Yersinia pestis KIM
MPKVHAQTMRNDNMTDKLTSLRQITTVVADTGDIAAMKLYQPQDATTNPSIILNAAQIPEYRKLIDEAIAWAREQSSDHAQQIVDATDKLAVNIGLEILKLIPGRISTEVDARLSYDTVASVAKAKRLIKLYNEAGISNDRILIKLASTWQGIRAAEQLEKEGINCNLTLLFSFAQARACAEAGVFLISPFVGRILDWYKANGDQKEFAPSEDPGVVSVTEIYQYYKKHGYKTVVMGASFRNLGEIIELAGCDRLTIAPSLLKELAESEGPVERKLAYTGEIQAKPAPLTEAEFYWQHNQDPMAVDKLADGIRKFAIDQGKLEKMISDLL

SEQ ID NO: 4140 - protein, 503 aa, Bacteroides thetaiotaomicron VPI-5482
MKIFPSSSIKKLDAYTIEHEPIASIDLMERAAQALTKAITNRWNPETPVTIFAGPGNNGGDALAVARMMAEKGYKIEVYLFNTKGELSPDCQTNKELVEMMEEVTFHEISTQFVPPTLTPEHLVIDGLFGSGLNKPLSGGFAAVVKYINASPAMVVSIDIPSGLMGEENTFNVKSNIIRADVTFSLQLPKLAFLFAENTEFVGEWELLDIQLSEEGIEETETNYEMLEIEEIRSLIKPRQQFAHKGNFGHALLIAGSKGMAGASVLAARACLRSGVGLLTVHAPLCNNDILQTSAPEAMVETDVSETCFAVPTDTDDYQAVGIGPGLGRNEETEAALIEQLEHCQTPTVLDADALNILANHRHTLTHLPKGSILTPHPKELERLVGKCQDSYERLMKACELAHTAKVHIILKGAYSAIITPEGKCYFNQTGNPGMATGGSGDVLTGVILALLAQGYPAEDAAKIGTYIHGLAGDIAQKKQGMIGLIASDIVTCLPTAWRLVSE

SEQ ID NO: 4141 - protein, 540 aa, Burkholderia vietnamiensis G4
MTAKDVKFRDGARSQIVKGVNVLADAVKVTLGPKGRNVVIERSFGAPVITKDGVSVAKEIELKDRFENMGAQIVKQVASKTADVAGDGTTTATVLAQAIVQEGMKHVAAGMNPMDLKRGIDKAVGVVLEELRTLSRPISTHKEIAQVGAISANADDAIGKIIADAMEKVGKEGVITVEDGKSLDNELDVVEGMQFDRGYISPYFINDPEKQAAYLDDALILLHDKKISNIRDLLPILEAASKAGKPLLIVAEDVEAEALATLVVNAMRGILKVAAVKAPGFGDRRKAMLEDIAILTGATVISEETGKQLDKATLDDLGSAKRVEVRKDDTIIIDGAGDAARIDARVKSIRVQIDEATSDYDREKLQERVAKLAGGVAVIKVGAVTEVEMKEKKDRVDDALHATRAAVEEGIVPGGGVALLRARAALTDLKGANGDQDAGIRIVLRALEAPLRVIASNAGDEPSVVIAKVLEGSGNFGYNAATGEYGDLVEAGVVDPTKVTRTALQNAASIAGLVLTTDATVADAPKDERAEAAPSPELGY

SEQ ID NO: 4142 - protein, 105 aa, Burkholderia vietnamiensis G4
MQIRPLYDRVIVKRIEQQRTTASGIVIPDSAAEKPEQGEVIAVGSGRLLQDGSQQPLQLKVGDRVLFGKYAGQTVKVDGEELLVMREEDVMGVLEAASPAARKAA

SEQ ID NO: 4143 - protein, 325 aa, Pseudomonas fluorescens Pf-5
MISKCEKTVAIVQMPAALLDRAESMRLAAEHIKSAALKEAQLVVFPETWLSCYPAWIFGMAGWDDAQAKFWYAKLLADSPVIGQPDDMDDDLAVLREAARVNSVTVVMGMNERSRRHGGSLYNSLVTIGPEGTILNVHRKLTPTHTERTVWANGDAAGLRVVDTAVGRVGGLVCWEHWHPLARQALHAQDEQIHVAAWPDMTEMHHVAARSYAFEGRCFVLCAGQYLNVADVPAELLTAYRLGVGGNGLEERLLFNGGSGVVAPDGSWVTAPLFGEPGIVLATIDLAQIDAQHHDLDVAGHYLRPDVFELSIDRRVRTGLTLRDD

SEQ ID NO: 4144 - protein, 472 aa, Pseudomonas fluorescens Pf-5
MAIQPDAFFQQFDDSKLVAADKAHYMHGFHMFDEHREQGSLNIAAGDGAYIYDTAGTRYLDAVGGMWCTNIGLGREEMAEAIADQVRQLAYSNPFCDMANVSAIELCQKLASLAPGDLNHVFLTTGGSTAVDTAYRLVQFYQNSRGKHEKKHVISRHNAYHGSTFLTMSIGNKAADRAPEFDFMSDLFHHISCPNYYRAPAGMSEADFLEFLVAEFEDKILTLGPDKVAAFFAEPIMGSGGVIIPPEGYHRRMWEICQRYDLLYVADEVVTSFGRLGAFFASEEVFGMQPDIITTAKGLTSGYLPLGACIFSERIWQVIGEPGKGRCFTHGFTYSGHPVSCVAALKNIEIIERENLLAHVEEVGVYMEQRLQTLAELPLVGSVRCKRLMACVEFVADKRTKALLPDGLNIAERIHLRAQAKGLLVRPIGHLNVMSPPLIITRQQIDEIVATLRDCILEAAAELRQNGQYLGQ

SEQ ID NO: 4145 - protein, 540 aa, Mycobacterium bovis AF2122/97
MAKTIAYDEEARRGLERGLNALADAVKVTLGPKGRNVVLEKKWGAPTITNDGVSIAKEIELEDPYEKIGAELVKEVAKKTDDVAGDGTTTATVLAQALVREGLRNVAAGANPLGLKRGIEKAVEKVTETLLKGAKEVETKEQIAATAAISAGDQSIGDLIAEAMDKVGNEGVITVEESNTFGLQLELTEGMRFDKGYISGYFVTDPERQEAVLEDPYILLVSSKVSTVKDLLPLLEKVIGAGKPLLIIAEDVEGEALSTLVVNKIRGTFKSVAVKAPGFGDRRKAMLQDMAILTGGQVISEEVGLTLENADLSLLGKARKVVVTKDETTIVEGAGDTDAIAGRVAQIRQEIENSDSDYDREKLQERLAKLAGGVAVIKAGAATEVELKERKHRIEDAVRNAKAAVEEGIVAGGGVTLLQAAPTLDELKLEGDEATGANIVKVALEAPLKQIAFNSGLEPGVVAEKVRNLPAGHGLNAQTGVYEDLLAAGVADPVKVTRSALQNAASIAGLFLTTEAVVADKPEKEKASVPGGGDMGGMDF

SEQ ID NO: 4146 - protein, 438 aa, Oryza sativa
FVSAVPENSSTGYLLIGTSGGLNQQRIGITDAVVVARILNATLVVPELDHHSFWKDDSDFSDIFDVDWFISYLSKDVTIVKRIPYEVMMSMDKLPWTMRAPRKSMPDFYIDEVLPILMRRRALQLTKFDYRLTNELDEELQKLRCRVNFHALRFTNSIQTLGEKLVRKLRSMSSRYVAVHLRFEPDMLAFSGCYYGGGDKERRELGEIRKRWDTLPELSAEDERSRGKCPLTPQEIGLMLRALGFSNDTYLYVASGEIYGGEETLQPLRDLFPNYYTKEMLAGNDLKPFLPFSSRLAAIDFIVCDGSDVFVTNNNGNMAKVLAGRRRYMGHKRTIRPNAKKLNLLFKRRKQMGWDIFSQKVKKVQRGLMGEPDDIRPGRDDFNEFPSSCICQRPVSPRPSTDDDGDVDALERLSLVTRRHHSYTWSQVILTIINFTKL

SEQ ID NO: 4147 - protein, 865 aa, Anabaena variabilis ATCC 29413
MSNVDQVNYELADEVTALRQRIAELEQLEKQYQYKQVELERRIEDLQAKLRTPNIANVDIERHPEPVTLQRLQQEISQRQQVDAALTESEERWRLALDAANLGFWDWNVLTEKVVWSENHELLFGLVPGSFDGAYETFLCCVHPEDRESVMQVISACLNNKTDYYDEFRIVWPEKSIHWIAAKGRFFYNEQGQPVRMIGVCMDITESKRSEENTRQLATQVQEQANILNAILATSVDHIYILNRTGHYQYVSYGGAAVLGLHPQQMIGKTVQEIDLPQELIDKMNGQFLTVMKVGEPIKDECEYVAEDGKHYYEYILTPLRNVNHSIEGVITVSRDMTEHKRAEQSIRNSEARFRRLFESNLIGVAFWNVDGFITDANDAYLQIVGYTREEFDTLGKINWRELTPPDCEHLDTRAIAEVKANGISRIYEKQYIQRNGRRVSIVLGIALLDDSDEQGVAFVLDISERKLAEQQRDRLLCAERIARKDAEIANRIKDEFLAVLSHELRTPLNPILGWSKLLRSRQFDAATTDRALETIERNATLQTQLIEDLLDVSRILQGKLSLNVCPVSLPIVIGAAIDTVRLAAEAKEIKIQNVFDPELGQVMGDANRLQQVVWNLLSNAVKFTSPGGTVEIHLKAVNDQAQIQVIDTGKGITPEFLPYVFDYFRQADGTTTRKFGGLGLGLAIVRQVVELHGGTVQATSPGEGLGATFTVNLPLSPKHEAMNHEDKNPVSANFQPATLSGVRVLIVDDEPDIRDLVTFILEDYDVEVIAVSSAQEALEALSQSLPDIIVSDIGMPDVDGYMLMRQLRQRSPQEGGNLPAIALTAYAGEMNQQQALAAGFQLHISKPVDPDALIEAIGNLVNNQ

SEQ ID NO: 4148 - protein, 261 aa, Persea americana
QVHPNSYALVVSTENMTLNWYSGNNRAMLVTNCLFRMGGAAILLSNRWSDRRRSKYQLVHTVRTHIGADDRAFNCVSQEEDEAGKVGVSLSKDLMVIAGEALKSNITTLGPMVLPMSEQLLFFATLAARKVFKMKIKPYIPDFKLAFEHFCIHAGGRAVLDELQKNLELSDWQMEPSRMTLYRFGNTSSSSLWYELGYSEAKGRVMKGDRMWQIAFGSGFKCNSAVWRALRSVNPAKEKSPWMDDIDSFPVHVPKVTTIQS

SEQ ID NO: 4149 - protein, 156 aa, Corynebacterium diphtheriae NCTC 13129
MSILDTEVTLINGEKASMDQWAGHCLLIVNTASECGYTPQLETLEELYEDYAMRGFFVIGVPCNQFGEEEPGKDAQVARRYEEKFGVRFPLLAKSDVNGPNTIELYKKLKGDGPDIEWNFEKFIVAPSGEVVGRFAPSLDPDDMKIINVLEEYLPI

SEQ ID NO: 4150 - protein, 318 aa, Anabaena variabilis ATCC 29413
MNQSSQNRPLRPKPLQSSFQWLYAFWKFSRPHTIIGTSLSVLGLYLISIAVSSTGFALTQINSVLGAWLACVCGNVYIVGLNQLEDIEIDKVNKPHLPLASGEFSRKQGQIIVILTGILALALAWLNGPYLFGMVAVSLAIGTAYSLPPIRLKQFPFWAALCIFSVRGTIVNLGLYLHFSWLLQNKQSIPLPVWILTVFILIFTFAIAIFKDIPDMEGDRLYNITTLTIQLGPQAVFNLAMWVLTVCYLGMVIVGVLRLGTINSVFLVITHLIILCWMWMQSLAVDIHDKTAIAQFYQFIWKLFFLEYLMFPIACLLA

SEQ ID NO: 4151 - protein, 746 aa, Rubrivivax gelatinosus PM1
MTAKKSAPAPASKPSKTAAPAPAAKAAAKSAGKAEIDPKKAKAAAAPAKAAGKTAKVAVPEAPKGKPGRKPAAKQALPVLDEDLGDIEADLEGEASAEDTGGDKPKAKPLRMKVSRAKERALMREFGLDETALTEDEVAKRRQELKTLIKMGKTRGFLTHQEINDHLPEKLIEAEILEAIVSMLNDMGIAVYEQAPDAATLLIAGGSTATSTDEEAEEEAEAALSTVDSEFGRTTDPVRMYMREMGTVELLTREGEIEIAKRIEGGLQAMMLAISESPTTIAEILVLADKIRVGEMQISEAVDGFVSNEEADDYVAEEDFDEFDEEDDDDGNGGSKALTKKLEELKTQALVRFDELRTHFDRMRKAYEKEGYKSPAYNRAQMGVSSEIMSLRFTVKTIERLCQILRSQVDDIRRYERELRKIVVDKCGMPQDHFIKTFPPNSLNLKWAEKEIAANKSYSAVMARNLPPIQDLQQKLIDLQSRAVVPIDDLKLINKKMNQGEKASRDAKKEMIEANLRLVISIAKKYTNRGLQFLDLIQEGNIGLMKAVDKFEYRRGYKFSTYATWWIRQAITRSIADQARTIRIPVHMIETINKMNRLSRQHLQEFGFEPDAPTLAEKMEMPEDKIRKIMKIAKEPISMETPIGDDDDSHLGDFIEDTNNTAPIEAAMQAGLRDVVKDILDSLTPREAKVLRMRFGIEMSTDHTLEEVGKQFDVTRERIRQIEAKAIRKLKHPSRSDKLRTYLDNL

SEQ ID NO: 4152 - protein, 796 aa, Triticum aestivum
MPPAAMAPPQAPSAGDPLYDELWHACAGPLVTVPRVGDLVFYFPQGHIEQVEASMNQVAGNQMRLYDLPSKLLCRVINVELKAEADTDEVYAQVMLMPEPEQNEMAVDKSTSTTGATPPRPAVRSFCKTLTASDTSTHGGFSVLRRHADECLPPLDMTQSPPTQELVAKDLHGMDWRFRHIFRGQPRRHLLQSGWSVFVSSKRLVAGDAFIFLRGESGELRVGVRRAMRQLSNVPSSVISSHSMHLGVLATAWHAINTKSMFTVYYKPRTSPSEFIIPYDQYMESVKNNYSIGMRFRMRFEGEEAPEQRFTGTIVGSENLDQLWPESNWRSLKVRWDEPSTIPRPDRVSPWKIEPASSPPVNPLPLSRVKRPRPNVPPVSPESSVLTKEVAAKIDMDSAQAQQRNQNSMVLQGQEHMTLRTNNLTGSNESDATVQKPMMWSPSPNIGKNHASAFQQRPSMDNWMQLGRCDASSGAQSFGDSQGFFMQTFDEAPNRHGSFKNQFQDHSSARHFSDPYTKMQTEANEFHFWNSQSTVYGNPRDQSQGFRFEEHPSNWLRQQQFSPVEQPRVIRPHASIAPVDLEKAREGSGFKIFGFKVDTTSTPSNHLSSSMAAIHEPVLQIQASASLTQLQHTHADCIPELSVSTAGTTENEKSIQQAPHSSKDVQSKSHGASTRSCTKVHKQGVALGRSVDLSKFGDYDELTAELDRMFEFDGELMSSNKDWQIVYTDPEGDMMLVGDDPWEEFCNIVRKIFIYTKEEVQKMNSKSSAPRKEEGSGDADGANEKAHLATSSHLDN

SEQ ID NO: 4153 - protein, 675 aa, Ustilago maydis 521
MSQNIASRRIPLRTRSTASASGAQAKENAGVTSVSSRGARYRHDGAAADAGPSKPASTATAATKASVASAASGVLGTRKRAALGDLTNANRTRSAMAGNDDKGKAALKDAIKPRATTSASTSSRSAVGTAASATTTGTGAARRVVRTRPTTASSTTASTTVTDAASDRPFRASRRVAGTTASTASGIPSATSRPTSTTTATSAVTAARKASMVRASSAGSQTDVRRDVSNTSAVTTNTTAPITAASRSSKVQLNEVHDTDDKMEAPQAKRLKTEQTNKPAKDEGWEDLDAEDADDPLMVAEYVNDIFEYMKELEIINMPNGDYMANQKEINWDVRAILIDWLVDVHAKFRLLPETLYLAVNIIDRFLSRRTISLSKLQLVGVTAMCIASKYEEVMCPSIQNFCHLADGGYTDVEILRAERYMLKVLDFSMSYANPMNFLRRISKADNYDIQTRTVAKYFMEISLLDYRLMEHPPSLIAAASVWLAREVLERGEWTPTLVHYSTYSEQELLGTAEIMLDYCLRPIAHQFFHKKYAHKKFMRASTYVIEWAHKAFPEGVVGVDEQQDLNVLRIDLYERNEIERPEMSPVSSSRATSPVSMHGQAHFEVEPSQNVDGDDTVSYAHDDDHEEEDDLVDDAQEIEGDVQLLDDVKAAAQRQDTRQVLRDVTNAYEATETF

SEQ ID NO: 4154 - protein, 1317 aa, Rubrivivax gelatinosus PM1
MKSAPAPADDAERLRVLHELRLLDTEVDPAFAAIARLAQQHSGWSVGAISLVAADRQWFPASVGLEVRETPRKLAFCAHTILGNDAMEIVDAQRDERFADNPLVVGAPRLRAYAAVPVQVDGQRIGTVCAIDARPGRLPPDALATLRDLATLTSALLQARLQEQRSRLQESRVRAASRAGSDWLWETDEHGTISWVSDSVEAHTGHPPSHEVGQFGQGMHRARDDEHRASWEALVAARAQQRPFRNAVADRDAAHGTITISTSGDPVFDATGQFKGYRGAARNITEELNRRTQEQRTQALLQAAIEGVAAGVMVSDPRGRIVLSNTAWRTGMQRFLPEWPSHWPDLVHALLRAGAYPDATGREAEFAAWRLGLTTAEGRQHELRFGQQHVLVTDQLLADGSVIHLSIDITRRRRTELELAEQQARLGAVLRSLPDLWFVIDAEGRHVECSDERHPSLFRPFEELRGKHFAEAVPEPLASLAMRSIAEALRSGEVQRIEYELPTLDGRVRNFEARISPMGGDRVLYLTRDLTELRHLERNVQLMQRALEAEAALPMVVADATQPDLPLIYANTAFERLSGLPLDQVIGRNCRFLQAGDRDQPGLTRLREALAAERACSVTLRNQRADGTSFINELHVAPVRDTLGRVTHYVGVQHDVTERSRAERQLALSETLYRSVAASITDGLLVIGPDRRIVTANPSACTLLGARATTLTGQRLGRLGYKLLEEDGRPVEHDRHPVREVLLSGRSALDRVHRLRRPDGSERLLRLNVQPLRAHPDDSRLSCVVTFRDITAQRGAEAELAQAEARWKFALEGAGDGIWDYDEDTQLVFYSPRWKAMLGYRDDEIGTSTREWSRRIHPDDRPGVIDAIRRYRAGEITEYRTEHRLRHKDGHWIWVYERGKIVERRADGSPRRIVGTHTDVTRQKMAEQAMRDKAAAELASQAKSAFLSRMSHEMRTPLNAVIGFAQLLRKDDAPGGARVAQFGDHILQAGEHLLALVNDVLDLQQVEEGRLSIRLESLPLRAAVDAALELIRPQAAQRRVTVCNLIEPDLSVQADPQRLRQVLLNLLSNGVKYNREGGELHCSAVLDGTTPCCTLLIEDQGFGLEADDLARLFQPFERLGRETSAIEGTGLGLVISRRLAEEMNGRLSLSSRPGHGTLARLELPLQAPVEPAGDAAAAALAPPLAAPPSAALPLRMLYVEDNRINAILFEEAIKLRGGIDLRIAEDGPEALTMADEWQPDVLVLDAHLPSTTGYDVLAELRRRPDFERTPAFMCSADTMPQDLQRATDAGFAGYWTKPIDIDRVMNDLDALRIAARS

SEQ ID NO: 4155 - protein, 511 aa, Glycine max
MEAPSLTKPNDPTKPSNTSSTLSLEGGPGEASPLRKMFAVASIAAGIQFGWALQLSLLTPYVQLLGVPHAAASFIWLCGPISGLVVQPIVGYYSDHCTSRFGRRRPFILGGALAVAIAVFLIGYAADIGHSAGDDITKKTRPRAVGVFVIGFWILDVANNMLQGPCRAFLADLAAGDQQKTRIANGFFSFFMAVGNVLGYAAGSYSGLHKIFPFTETKACDVFCANLKSCFFFSILLLLFLATVALLYVKDKQVEAIPLDDATQPSCFFQLFGALKELKRPMWMLMLVTAVNWVGWFPYFLFDTDWMGREVYGGTAGEDAYAKGVRVGSLGLMVNAVVLGFMSLAVEPLGKMVGGVKRLWAIVNFILAIGFGMTVVITKVAEHQRRMNPAAVGHPSEGVVVGSMVFFGVLGVPLAITFSVPFALASIYCSASGAGQGLSLGVLNLAIVVPQMVVSALSGPWDSLFGGGNLPAFMVGAAAAALSAIMAIVLLPTPKPADEAKASSMMAGGFH

SEQ ID NO: 4156 - protein, 118 aa, Triticum aestivum
TRRVATAMAAALLVIMLVAAAADIAAAQQTGQGPSYFNPQNFNPSMAVIIVVLVTAFFFLGFFSIYIRRCAGGPLGGPGEDLGVPGARPGGLTFLTAARSRRMRGLDPAALEALPTMA

SEQ ID NO: 4157 - protein, 2152 aa, Saccharopolyspora spinosa
MTVTTSYEEVVEALRASLKENERLRRGRDRFSAEKDDPIAIVAMSCRYPGQVSSPEDLWQLAAGGVDAISEVPGDRGWDLDGVFVPDSDRPGTSYACAGGFLQGVSEFDAGFFGISPREALAMDPQQRLLLEVAWEVFERAGLEQRSTRGSRVGVFVGTNGQDYASWLRTPPPAVAGHVLTGGAAAVLSGRVAYSFGFEGPAVTVDTACSSSLVALHLAGQALRAGECDLALAGGVTVMSTPKVFLEFSRQRGLAPDGRCKSFAAGADGTGWGEGAGLLLLERLSDARRNGHEVLAVVRGSAVNQDGASNGLTAPNGSSQQRVITQALASAGLSVSDVDAVEAHGTGTRLGDPIEAQALIATYGRDRDPGRPLWLGSVKSNIGHTQAAAGVAGVIKMVMAMRHGQLPRTLHVESPSPEVDWSAGTVQLLTENTPWPRSGRVRRVGVSSFGISGTNAHVILEQPPGVPSQSAGPGSGSVVDVPVVPWMVSGKTPEALSAQATALMTYLDERPDVSSLDVGYSLALTRSALDERAVVLGSDRETLLCGVKALSAGHEASGLVTGSVGAGGRIGFVFSGQGGQWLGMGRGLYRAFPVFAAAFDEACAELDAHLGQEIGVREVVSGSDAQLLDRTLWAQSGLFALQVGLLKLLDSWGVRPSVVLGHSVGELAAAFAAGVVSLSGAARLVAGRARLMQALPSGGGMLAVPAGEELLWSLLADQGDRVGIAAVNAAGSVVLSGDRDVLDDLAGRLDGQGIRSRWLRVSHAFHSYRMDPMLAEFAELARTVDYRRCEVPIVSTLTGDLDDAGRMSGPDYWVRQVREPVRFADGVQALVEHDVATVVELGPDGALSALIQECVAASDHAGRLSAVPAMRRNQDEAQKVMTALAHVHVRGGAVDWRSFFAGTGAKQIELPTYAFQRQRYWLVPSDSGDVTGAGLAGAEHPLLGAVVPVAGGDEVLLTGRISVRTHPWLAEHRVLGEVIVAGTALLEIALHAGERLGCERVEELTLEAPLVLPERGAIQVQLRVGAPENSGRRPMALYSRPEGAAEHDWTRHATGRLAPGRGEAAGDLADWPAPGALPVDLDEFYRDLAELGLEYGPIFQGLKAAWRQGDEVYAEAALPGTEDSGFGVHPALLDAALHATAVRDMDDARLPFQWEGVSLHAKAAPALRVRVVPAGDDAKSLLVCDGTGRPVISVDRLVLRSAAARRTGARRQAHQARLYRLSWPTVQLPTSAQPPSCVLLGTSEVSADIQVYPDLRSLTAALDAGAEPPGVVIAPTPPGGGRTADVRETTRHALDLVQGWLSDQRLNESRLLLVTQGAVAVEPGEPVTDLAQAALWGLLRSTQTEHPDRFVLVDVPEPAQLLPALPGVLACGEPQLALRRGGAHAPRLAGLGSDDVLPVPDGTGWRLEATRPGSLDGLALVDEPTATAPLGDGEVRIAMRAAGVNFRDALIALGMYPGVASLGSEGAGVVVETGPGVTGLAPGDRVMGMIPKAFGPLAVADHRMVTRIPAGWSFARAASVPIVFLTAYYALVDLAGLRPGESLLVHSAAGGVGMAAIQLARHLGAEVYATASEDKWQAVELSREHLASSRTCDFEQQFLGATGGRGVDVVLNSLAGEFADASLRMLPRGGRFLELGKTDVRDPVEVADAHPGVSYQAFDTVEAGPQRIGEMLHELVELFEGRVLEPLPVTAWDVRQAPEALRHLSQARHVGKLVLTMPPVWDAAGTVLVTGGTGALGAEVARHLVIERGVRNLVLVSRRGPAASGAAELVAQLTAYGAEVSLQACDVADRETLAKVLASIPDEHPLTAVVHAAGVLDDGVSESLTVERLDQVLRPKVDGARNLLELIDPDVALVLFSSVSGVLGSGGQGNYAAANSFLDALAQQRQSRGLPTRSLAWGPWAEHGMASTLREAEQDRLARSGLLPISTEEGLSQFDAACGGAHTVVAPVRFSRLSDGNAIKFSVLQGLVGPHRVNKAATADDAESLRKRLGRLPDAEQHRILLDLVRMHVAAVLGFAGSQEITADGTFKVLGFDSLTVVELRNRINGATGLRLPATLVFNYPTPDALAAHLVTALSADRLAGTFEELDRWAANLPTLARDEATRAQITTRLQAILQSLADVSGGTGGGSVPDRLRSATDDELFQLLDNDLELP

SEQ ID NO: 4158 - protein, 241 aa, Nicotiana sylvestris
MGRGRVELKRIENKINRQVTFAKRRNGLLKKAYELSVLCDAEVALIIFSNRGKLYEFCSSSSMLKTLERYQKCNYGAPETNISTREALEISSQQEYLKLKARYEALQRSQRNLLGEDLGPLNSKELESLERQLDMSLKQIRSTRTQLMLDQLTDLQRKEHALNEANRTLKQRLMEGSQLNLQWQQNAQDMGYGRQTTQTQGDGFFHPLECEPTLQIGYQNDPITVGGAGPSVNNYMAGWLP

SEQ ID NO: 4159 - protein, 275 aa, Saccharopolyspora spinosa
MLPGGAPTSQQVGQMYDLVTPLLNSVAGGPCAIHHGYWENDGRASWQQAADRLTDLVAERTVLDGGVRLLDVGCGTGQPALRVARDNAIQITGITVSQVQVAIAADCARERGLSHRVDFSCVDAMSLPYPDNAFDAAWAMQSLLEMSEPDRAIREILRVLKPGGILGVTEVVKREAGGGMPVSGDRWPTGLRICLAEQLLESLRAAGFEILDWEDVSSRTRYFMPQFAEELAAHQHGIADRYGPAVAGWAAAVCDYEKYAHDMGYAILTARKPVG

SEQ ID NO: 4160 - protein, 332 aa, Burkholderia vietnamiensis G4
MTRTETAIRIGIDRYGDAGALRRVDAPVAPPGPGEVRIRQTAVGVNFVDIYFRTGAHPLPALPAALGVEAVGVVDAVGPGVDAVVAGQRVAYAGLPTGSYASLRTLPAERVVPVPDGVSDETVAGGLLKGITVYMLLHRVRQVAAGDSVLVHAAAGGVGLLATQWAHALGARVIGTVGSAAKAALVRAHGAQAVVDYRDEDFVAAARAFGGGAGVDYAIDGIGGDVLTRTLGAIRPFGMVASIGQVAAIGARQTIDLDELGPARSIALARPSVLGFIARDVAGYRDAAHATLERFARGMHVEVGARLPLEQAADAHRLLESRQTTGGVVLLP

SEQ ID NO: 4161 - protein, 352 aa, Pseudomonas fluorescens Pf-5
MYPKNAWYVACTPDELQGKPLGRQICGEHMVFYRAHEGRVTAVEDFCPHRGAPLSLGYVENGNLVCGYHGLVMGCDGKTVEMPGQRVRGFPCNKTFAAVERYGFIWVWPGDQALADPALIHHLEWADNDQWAYGGGLFHIQCDYRLMIDNLMDLTHETYVHASSIGQKEIDEAPPQTTVDGDQVVTARHMHNVMPPPFWRMALRGNQLADDVPVDRWQICRFSPPSHVLIEVGVAHAGHGGYDAPAQYKASSIVVDFITPESDTSIWYFWGMARNFNPQDPALTESIREGQGKIFSEDLEMLERQQQNLLAQPQRNLLKLNIDAGGVQSRRVLERLIAQEREPREPLIATSR

SEQ ID NO: 4162 - protein, 341 aa, Geobacillus stearothermophilus
MAKFYYNGDANEQYLQGKTVAIIGYGSQGHAHAQNLRDSGVRVIVGLRKGKSWEQAEQDGFEVYSVREAAKQADIVMVLLPDEKQPAVYKEEIEPGLEPGNALVFAHGFNIHFSQIVPPEHVDVFLVAPKGPGHLVRRTYAEGAGVPALIAVYQDVTGHAKETALAYAKAIGAARAGVLETTFKEETETDLFGEQAVLCGGLTALIKAGFETLVEAGYQPEVAYFECLHEMKLIVDLLYEGGLSWMRYSISDTAQWGDFITGPRIINDAVKAEMKKVLDDIQTGKFAKSWILENQANRPEFNAINRRENEHLIEVVGRELRSMMPFVKAKQKKAVVPGAKH

SEQ ID NO: 4163 - protein, 275 aa, Solanum tuberosum
MADTSLPIQRLLGKVALVTGGATGIGESIVRLFHKHGAKVCIADIRDEVGQHVCETLGNDQNVCFIHCDVTVEADVSNAVDFTVQKFGTLDIMVNNAGLSGPPIRDIRDYELSVFENVLDVNLKGAFLGMKHAARIMIPLKKGAIVSLCSVASAIGGIGPHGYAASKYAVLGLTQNVAAEMGKHGVRVNCVSPYAVATGLALAHLPEDEKTDDAMEGFRDFVARNANLQGVELMANDVANAVLFLASDESRYISGHNLMVDGGFSCVNHSLRVFR

SEQ ID NO: 4164 - protein, 254 aa, Triticum aestivum
  misc_feature (172)..(172): Xaa can be any naturally occurring amino acid
  unsure (1)..(254): unsure at all Xaa locations
NKFVQKSLPVPVRNSRDIVDPRVRLIFSKGSSQVIAQYYQLIRLGCEGYRNIMDNCQENAMVLKEGLERTGRFNIVSKDQGVPLVAFSLKDSSRYYEFEISEFLRRFGWIVPAYTMPPDAQHVTVLRVVIREDFSRTFAERLVIDIEKALHELDALPSCSSGPAPAAPPTGXPVSKKDLPRQRELVSVWKEGRPPPGRKTQGVLLDGGALHLLTWLAGDLMNPITCLLNTFWGGISLILKLAYYLPLWAMKDFF

SEQ ID NO: 4165 - protein, 460 aa, Bacteroides thetaiotaomicron VPI-5482
MKSYNKKFVYSICLVSAMGGLLFGYDWVVIGGAKPFYELYFGIADSPTMQGLAMSVALLGCLIGAMVAGMMADRYGRKPLLLISAFIFLSSAYATGAFSVFSWFLAARFLGGIGIGIASGLSPMYIAEVAPTSIRGKLVSLNQLTIVLGILGAQIANWLIAEPIPADFTPADICASWNGQMGWRWMFWGAAFPAAVFLLLACFIPESPRWLAMKGKREKAWSVLSRIGGNRYAEQELQMVEQTSASKSEGGLKLLFSRPFRKVLVLGVIVAVFQQWCGTNVIFNYAQEIFQSAGYSLGDVLFNIVVTGVANVIFTFVAIYTVERLGRRALMLLGAGGLAGIYLVLGTCYFFQVSGFFMVVLVVLAIACYAMSLGPITWVLLAEIFPNRVRGVAMATCTFALWVGSFTLTYTFPLLNTALGSYGTFWIYSAICVFGFLFFLRALPETKGKSLETLEKDLIK

SEQ ID NO: 4166 - protein, 236 aa, Zea mays
MGQGQGSKYAGIIVTATCTSVASVLWLWHQSNRQEATSTTAIRSPYSDPHEVKNLYEERKEPGREELEEMASAEGERWVGLATDFSQGSREALQWAATNLLRAGDHLLLLHVIKEPDYEQSEAILWESTGSPLIPLSEFSDPIIAKKYGAKPDMETLDLLNTTATQKEIMVVVKVLWGDPREKLCQVIHDTPLSCLVIGSRGLGKLKRVLLGSVSDYVVNNATCPVTVVKSSSTEG

SEQ ID NO: 4167 - protein, 463 aa, Pseudomonas fluorescens Pf-5
MNTTSVTAVIDDAPQPARSGSTHADIGTLLDHGPFTGMQKLVVLLAALSIVMDGFDGQLIGFAIPLMIKEWGITREAFAPAVAAGLIGMGIGSACAGLFADRFGRRMAIIASVFVFGAATCAIGLAPNALAVAALRFIAGLGIGGALPSATTVTAEFTPARRRTLAVTATIVCVPLGGMLAGLFASHVLQLYGWRTLFFIGGSLPIVLGFALLATLPESPRFLARRPQRWNELGTLLGRMGRPMAAGVVYTDALEQKSEKQGGFRALFALGYGRDTLALWVAFFMCLTAVYSAFSWLPTMLLSEGLELSVAGSGLTAYNLGGVIGALVCAVAITRWGSFWPLLICCAGGAASAFLLQVVDIHQDTGLLIFGFGVHGLFVNAVQSTMFALCAFIYPTSVRATGTASALAFGRLGAILSAFAGALVITQGGANGYLTLLGSVMVMALLALLIVGRHIPRRLPGQS

SEQ ID NO: 4168 - protein, 1976 aa, Shewanella sp. MR-7
MHVHPTQQNSTAVPNDQRQNSKAMPKIAIVGLAVQYPDADTPEQFWQNLLDKKDSRSQIDAVKLNANPADYQGVQGQADRFYCDKGGYIRNFRFDPQGYQLPPTAFDGLDESFLWALDCSKKALLDAGVDLTAPLLERTGIVMGTLSFPTASSNELFLPIYHQAVEKALKTKLNLPEFILAPFANGSIAGSQQAANGAIAHTASKLLSDALGLGGAQLSLDAACASSVYALKLACDYLTTGKADMMLAGAVSGADPFFINMGFSIFHAYPDHGISAPFDSNSKGLFAGEGAGVLVLKRLEDAERDGDNIYAVVSGIGLSNDGKGQFVLSPNSKGQVQAFERAYAAANTHPSNIEVIECHATGTPLGDKVELTSMERFFEDKLGGTKAPLIGSAKSNLGHLLTAAGMPGIMKMIFAMRSGQLPASINLKAPISSPKGLFSGNNIPTQLQAWPDKTGNDRRHAGVSVFGFGGCNAHLLLESYQPTAHSAEKQANKPVYQQQALTVIGMASHFGPLASINALDKALIAQTDAFIPLPPNRWKGLDKHPDILNQFGLNRAPKGAYIEQFDFDFLRFKVPPNEDDRLISQQLLLIKVADEAIRDAKLTAGSKVAVLVAMETELELHQFRGRVNLHTQLAESLKQQGVHLSNDEYLALEAIAMDSVLDAAKLNQYTSFIGNIMASRIASLWDFNGPAFTISAAEQSVARCIDVAQNLLSQEALDGVVIAAVDLSGSVEQVILKNAQIAVDLDANSANPQWKVGEGAGAIVLTNQQASNSQQASNSSQKGYGQIRAQAFGTHHQLPKLLDSLITETAIANPSVPAAIHMVEQCIAPEEQLPAERLLTQLNLMGTPCNRVANTLGHNFAAAGMASLLSALLSLKNGSEGSDKNADKQALVFTQSQGVSSLLLLSQTVTQAEQLELRLEQDLTLSEQKHLIKPVTLGGRDIYQHIVDTPLPALAAIQGKMRQLQPVAPQATQTVPRVQAALDTTAENATPFATPIAVESGMSSNAPHQYSAAPLAQDRASQDSAALLQNQQLLQNQQLAREAHLAFLQSREQGLKLADALLKAQLSQTTQMGSVAPHVTTSANVAPAAAQQAVPVPELKPDHANVAPYTPPIPAAKPCIWNYQDLVEYAEGDIAKVFGADYAIIDSYARRVRLPTSDYLLVSRVTKLNAQMNRYQPSTMTTEYDIPVDAPFLVDGQIPWAVAVESGQCDLMLISYLGIDFENKGERVYRLLDCTLTFLGDLPRGGDTLRYDISINHFARNGDTLLFFFSYECFVGDKLILKMDGGCAGFFTDKELADGKGVIRTEAEIKAREQAQIALANEYARNGKKPRFTPLLNCAQTAFSYGQIHRLLSADIGGCFGGEHAAHQAKFGLQPSLCFASEKFLMIEQVSKLEVHGGAWGLGLIEGHKQLAPDHWYFPCHFKGDQVMAGSLMAEGCGQLLQFFMLHIGMHLGVTNGRFQPLENASQKVRCRGQVLPQSGTLTYRMEVTEIGMSPRPYAKANIDILLNGKVVVDFQNLGVMIKEEADCTRYSQSSFSQSHSSQGNDSQAANIYNQAEQAPLMAQIPDVSAPVNKGVVPLKHVSAPIAPAGSKYANRVPDTLPFTPYHLFEFATGDIENCFGPDFSIYRGLIPPRTPCGDLQLTTRVVAIEGKRGELKKPSSCIAEYEVPSNAWYYAKNNHPSVMPYSVLMEISLQPNGFISGYMGTTLGFPGQELFFRNLDGSGKLLREVDLRGKTIVNDSRLLSTVIAGSNIIQNFSFELSCDGEPFYRGNAVFGYFKADALKNQLGIDNGKITQAWHIERGIKADSQINLLDKNGRSFVAPQGKPHYRLAGGQLNFIDKAEIVKTGGKKGLGYLYAERTIDPSDWFFQFHFHQDPVMPGSLGVEAIIELLQTYAIDQDLGASFNNPKFGQIRSEIKWKYRGQINPLNKQMSLDVHITSIEDKDGKRIIKGDANLSKDGLRIYEVTDIAICIEEA

SEQ ID NO: 4169 - protein, 394 aa, Bordetella bronchiseptica RB50
MREAVIVSTARTPIGKAYRGAFNQTHGAELGGHSLRHAIARSKVDPAEIEDVIIGCGMPQGATGYNIGRQIAICGGLPIETGGTTVNRLCASGLQAIAIAAQRIMVDRVPVMAAGGLECISIVQDEHHNGVKKSPWIEAHKPHTYDAMLRTAEVVAQRYGVSRDAQDDYAFQSQMRTAAAQRDGRFDDEIVPMTTVKLSKNKETGATYEEEVTLLRDEGNRPDTTREGLATLQPVMEPDTSITAGNASQLSDGSSACILMEAKEAERRNLEPLGAFRGFVATGCEPDEMGIGPILAVRTLFQRFGLRMEDIDLWELNEAFASQTVYCRDQLGIPNELLNVNGGAISVGHPYGMSGARMVGHALIEGRRRGARLVVVSMCVGGGMGAAGLFEVYR

SEQ ID NO: 4170 - protein, 565 aa, Shewanella sp. MR-7
MLSRIHIKYFYLFGALLFGYFAVTGHSPILTFIWAWSSLSLALVGSAYWFNLASIFRKRQDGSIPWYIRWGFIPFLLGCRLYNLWARHRDSVPSMQAIDKYLYLGSRLSAADLPKLNRYGITAILDVTAEFDGLDVSLYEDHIDYLNIPILDHSVPTSAQLNQAINWLHRQVRAQKRVLIHCALGRGRSVMVLAAYLVCRHPELSFAEVLQQIKSIRKTAGLNRWQLKALEQMYTQGEIKLHKRAWIIANPVSGAGKWQSHGEQICTELKRYFEVQLALTTPEISAQTQAKKARLQGADIIIACGGDGTVTEVAAEIIDTDITLGIIPLGTTNALSHALFGLSSKLYAVSQALDNIIQGQTQTIDTARCNERLVLLLVGIGFEQQMIESASRERKNALGQLAYLDGLWRAVNTDTNLELQLTLDDQTPMTVQTHSLVVANAAPFTSLLAQGKGEPNMTDGLLDITWLDSNNEPNEQLISLVELAFTGWIKEAANSDSAATGNTGKVKHAHAKKVKISSQPQCKYVIDGEICEPEELNIDILPASLKVFVPYQAQNAEPQSESKIS

SEQ ID NO: 4171 - protein, 829 aa, Arabidopsis thaliana
MNTKRAYKLRILFSLISSFREFVAHSAAVNCLKIGRKSSRVLVTGGEDHKVNLWAIGKPNAILSLYGHSSGIDSVTFDASEGLVAAGAASGTIKLWDLEEAKVVRTLTGHRSNCVSVNFHPFGEFFASGSLDTNLKIWDIRKKGCIHTYKGHTRGVNVLRFTPDGRWIVSGGEDNVVKVWDLTAGKLLHEFKSHEGKIQSLDFHPHEFLLATGSADKTVKFWDLETFELIGSGGTETTGVRCLTFNPDGKSVLCGLQESLKIFSWEPIRCHDGVDVGWSNLSDMNVHEGKLLGCSYNQNCVGVWVVDLSRTEPMSGGATQSNSHPEKTSGSGRDQAGLNDNSSKVILGKLPGSQKVDPLLKETKSLGKLSVSQNSDPLPKDTKSTGRSSVSQSSDPLVKEPKPLGRFSATHSSDTVKESRTLSSTGSVSDSPHRVTLTSAPKSASGISTVVPNAAASKRNFGKANPKANPPVVNKEDYFPVIVPRTEPIIEQASESRAELDIIGRTMPYSLQSKAADSRRLSSSRNEPDLPTSSLLERSQSQPIEPITLQDGNTYPSDEGGSWDTAERTNKESKCRVFGRFNSRSLVRSPPRNHDENSDLISYNANRDSSPTESRKGGRLHSLVLNRERRGRFSNFEGPVSSSSGGNMTAPNSRPSNMLKQRGNHVPVDQGITSASEEDIVADIMGQHDQFVSSMHSRLAKLQVVRRYWERNDIKNSISSIEKMADNAVIADVLLIVNERPEILTLDTCTSLLPLLTALLGSNMDSHLSVCLDLLLKLVRMYGSQIYSSLSAPSSVGVDIEAEQRLVRASISPFIVVFDCNLLSLASQI

SEQ ID NO: 4172 - protein, 242 aa, Zea mays
  misc_feature (45)..(45): Xaa can be any naturally occurring amino acid
  unsure (1)..(242): unsure at all Xaa locations
LLFQLFVSPCICVSLPARLKGSTLVTNGVITAGSDEWAIYGGTGXFAMARGVIRRRYLADRAGGNTDELNMDVFCRPWGSQSQLQDKVQGQGQGSSVTKIGLWGGPGGSAQDITAERPPQRLHSVTVRAGVAVDSIEFTYTDSAGQRRAAGRWGGLGGNVRTIDLGNAEDVREVSGTYGAFEGATTLTSLRLVTSSRTWGPWGVENGTRFSVTAPIGSSIVGFYARAGTRLVDAIGVYLRQI

SEQ ID NO: 4173 - protein, 245 aa, Frankia sp. EAN1pec
MPTLVLLRHGESTWNRENLFTGWVDVDLSEKGLKEATRGGELLQEAGVLPDVVHTSLLTRAIRTAWLALDAAGRTWVPVRRSWRLNERHYGGLQGLNKAETLAKFGDEQFLLWRRSYDTPPPPIEPGQPSGVDERYADLAPDVIPLTECLRDVVVRMLPYWYDSIVPDLRSGATVLVTAHGNSLRALVKHLDGISDTDIANLNIPTGIPLRYELDDDLKVLDSGYLDPAAAETAAAAVAAQGKKK

SEQ ID NO: 4174 - protein, 713 aa, Bacillus sp. 17-1
MKKISKLTTALALSLSLALSLLGPAHAAPDTSVSNKQNFSTDVIYQIFTDRFSDGNPANNPTGPAFDGTCTNLRLYCGGDWQGIINKINDGYLTGMGVTAIWISQPVENIYSVINYSGVNNTAYHGYWARDFKKTNPAYGTIADFQNLIAAAHAKNIKVIIDFAPNHTSPASLDQPSFAENGKLYNNGRDEGGYTNDTHNLFHHNGGTDFSTTENGIYKNLYDLADLNHNNSTVDTYLKDAIKMWLDLGIDGIRMDAVKHMPFGWQKSFMATVNNYKPVFTFGEWFLGVNEVSAENHKFANVSGMSLLDFRFAQKVRQVFKDNTDNMYGLKSMLEGSATDYAQMEDQVTFIDNHDMERFHNNSANRRKLEQALAFTLTSRGVPAIYYGTEQYMSGGNDPDNRARIPSFSTTTTAYQVSKKLAPLRKSNPAIAYGTTQERWINNDVLIYERKFGNNVAVIAVNRNVNTSASITGLVTSLPAGSYTDVLGGLLNGNNLTVGSGGSASIFTLAAGGTAVWQYTTAVTAPTIGHVGPMMAKPGAAVTIDGRGFGATKGTVYFGTTAVTGANITAWEDTQIKVKIPAVAGGVYNIKIANSAGTSSNVHDNFEVLSGDQVSVRFVVNNATTALGQNVYLAGSVSELGNWDPAKAIGPLYNQVIYQYPTWYYDVTVPAGKTIEFKFLKKQGSTVTWEGGSNHTFTAPTSGTATINVNWQP

SEQ ID NO: 4175 - protein, 245 aa, Nicotiana sylvestris
MGRGRVQLKRIENKINRQVTFSKRASGLLKKAHEISVLCDAEVGLIVFSTKGKLFEYSTDSCMERILERYERYSYAERQLTATDDETPGSWTLEHAKLKARLEVLQRNQRHYAGEDLDSLSMKELQNLEHQLDSALKHIRSRKNQLMHESISELQKKDKALQEQNNNLSKQVKEREKELAQQTQWEQQSHDHLNSSSFVLTQPLSSLHLGEAYPTAGDNGEVEGSSRQQQQNTVMPPWMLRHLNG

SEQ ID NO: 4176 - protein, 940 aa, Streptococcus thermophilus CNRZ1066
MAFNKLESSNNQEIISEEVGILKELLDDATRGMAGEQGLTTIQHLVELYDEGDYEALTQAISEMTNDDMVFASRYFSLLPLLINISEDVDLAYEVNRKNNIDESYLGKLSETFDVVAESDNARDILENVNVVPVLTAHPTQVQRKTMLELTNHIHELLRKHRDVKDGLINKDKWYADLRRYVEIMMKTDIIREKKLKVKNEITNVMEYYNSSLIKAITKLSHEFKRLAVEKGIELDNPTPITMGMWIGGDRDGNPFVTAETLKLSATLQSEVILNYYIEKVDNLYRSFSLSSRLTEVSETVAEMAKLSPDTSVYRENEPYRRAFSYIQSKLIQTLLFFKAGNFSNERAAKRLSENVRLGSVSTGEVVADFVHDRLSQSLQAVSQQTTEFYETAEAFHDDLLAIKNSLLENDDSVLISGDFEELLQAVEVFGFYLATIDMRQDSSVHEACVAELLKSANIVDNYSELTEVEKVAVLLKELQEDPRTLSSTNVSKSETLEKELAIFRTARLLKDYLGEEVIKQHIISHTESVSDMFELAILLKEVGLVDTERARVQIVPLFETIEDLENSNEIMKQYLGYDIVKRWIKNSNNYQEIMLGYSDSNKDGGYLSSGWTLYKAQNELTNIGEERGIKITFFHGRGGTVGRGGGPSYDAITSQPFGTIKDRIRLTEQGEVIGNKYGNKDAAYYNLEMLVSATLDRMVTRQITDPDELVDFREIMDSIVQDSNRIYRDLVFGNEHFYDYFFEASPIKEVSSLNIGSRPAARKTITDISGLRAIPWVFSWSQNRIMLPGWYGVGSAFNHYIEAEEGNLEKLQHMFETWPFFRSLLSNVDMVLSKSDMNIAFHYAQLAESEEVRSVFNIILDEWQLTKNVILAIEKHDDFLEESPSLKASLGFRLPYFNVLNYIQIELIKRLRNNNLTDDEISLIHITINGIATGLRNSG

SEQ ID NO: 4177 - protein, 242 aa, Nicotiana sylvestris
MGRGKVQLRRIENKINRQVTFSKRRGGLVKKALEISVLCDAEVALIVFSHKGKIFEYSSDSCMEQILERYERYSYTERRLLASNSESSVQENWSLEYAKLKAKIDLQQRNHKHYMGEDLDSLSLKDLQNLEQQLDTSLKLIRSRKNQLMHESISMLQKKEKAIQEENNMLSKKIKEKDNTVGQQVEWHQQNQVPTSASFLLQPHPCLNIGGNYQEEREERRRNELDLNLDSLYPCHMGCFAT

SEQ ID NO: 4178 - protein, 697 aa, Kineococcus radiotolerans SRS30216
MSQPSLEWSDLDQRTVDTARVLAMDAVQRAGNGHPGTAMSLAPVATLLFQKVLRHDPADPDWVGRDRFVLSCGHSSLTLYNQLYLSGYGLELDDLKALRKWGSKTPGHPEHGHTAGVEMTTGPLGQGLSSAVGMAMAARRERGLFDPEAAPGTSPFDHHVYVLCSDGDIEEGVTSEASAIAGVQELGNLVVIYDQNHISIEDDTAIALGEDTGKRYESYGWHVQTIDWTNGGEGPYTEDLAGLHAAIEAAKAETGKPSIIVLRTIIAYPAPNLQNTGKSHGSALGEAEVKATKEVLGFDPEKTFEVSDEVIGFARQVRERGKTAHEAWQREFDAWREGAGERAELFDRMRTRTLPAGWEQSLPVFEPGKAMASRKASGQVLNAIASSLPELWGGSADLAESNLTSLKGEPSFLPPSRTTKTWDGNVYGRVLHFGIREHAMGSILNGIALHGGTRPYGGTFLVFSDYMRPAVRLASIMRLPVTYVWTHDSIGLGEDGPTHQPIEHLASLRAIPGFDVVRPGDANETAWAWKTILETTDRPAGLALSRQDLPTFDRSQPGWGAADGVAKGAYVLVEASTANPEVILIGTGSEVQIAVAAREKLEAEGIPTRVVSMPCREWFDAQPQSYRDTVLIPGVKARVAVEAGIAQGWHDLTGDAGRVVGIEHFGASADYQDLYREFGMTDTAVVTAAKESLAGLQ

SEQ ID NO: 4179 - protein, 373 aa, Kineococcus radiotolerans SRS30216
MSNNLETLHQHGVSVWLDDLSRELTDGGELQRLVDAGVLGVTSNPTIFATALSKGDRYTDQVKELVGKGVDTEEAVFHITTEDVRRACDVLKPVFDRTDGIDGRVSLEVDPRQARDTAATEASARRLWEAVGRENLHIKIPATVEGLPAITTALSEGISVNVTLIFSLDRYRAVMQAFLTGLEQAKQNGHDISKIHSVASFFVSRVDTEVDRRLGEIGTDEANALRSKAGLANARLAYQAYEEVFSTPRWQVLKEAGAHAQRPLWASTGVKDPNLPDTLYVTGLVAENTVNTMPGKTLDATIDHGEVTGDTIRGSYGESQSVLDDLERLGISYTEVVELLETEGLDKFEKSWTELLQTVTDELERVKTQVEAQ

SEQ ID NO: 4180 - protein, 542 aa, Sinorhizobium meliloti
MAAKEVKFTSDARDRMLRGVDIMANAVRVTLGPKGRNVVIDKSFGAPRITKDGVSVAKEIELEDKFENMGAQMLREVASRTSDIAGDGTTTATVLAQAIVREGAKAVASGMNPMDLKRGIDLAVEAIVKELRNNARKVSKNAEIAQVATISANGDAEIGRYLAEAMEKVGNEGVITVEEAKTAEIELEVVEGMEFDRGYLSPYFITNQEKMRVELEDAYILLHEKKLSNLQAMIPILESVIQSGKPLLIIAEDVEGEALATLVVNKLRGGLKIAAVKAPGFGDRRKSMLEDIAILTGGTVISEELGIKLENTTMDTLGRAKRIMVDKETTTIVDGAGSKEDIGGRVAQIKAQIEDTTSDYDREKLQERLAKLAGGVAVIRVGGSTEVEVKEKKDRVDDALHATRAAVEEGILPGGGVALLRVVSALNGLATANDDQRVGIEIVRRAIEAPVRQIAENAGAEGSIIVGKLREKQDFAFGWNAQTGEFGDLFQMGVIDPAKVVRAALQDAASIAGLLVTTEAMIAEKPKKDGQPQMPPGGGMDF

SEQ ID NO: 4181 - protein, 583 aa, Fusobacterium nucleatum subsp. nucleatum ATCC 25586
MKILKFKNKSLNIFLGYSYRYKWQMIAVIILSIIASLMSAAPAWLSKKFVDDVLIGQNKKMFMWIIGGIFAATVIKVISSYYSQIASNFVTETIKRKIKIDIFSHLEKLPISYFKKNKLGDTLSKLTNDTTSLGRIGFIVFDMFKEFLTVLVLTARMFQVDYILALVSLVLLPLVIRVVRKYTKKIRKYGRERQDTTGKVTAFTQETLSGIFVIKAFNNTDFAIDKYKDLTKEEFEQAYKTTKVKAKVSPINEVITTFMVLLVVLYGGYQILVAKRITSGDLISFVTALGLMHQPLKRLISKNNDLQDSLPSADRVVEIFDEKIETDVFGEAVEFNEKIQDIKFENVNYKYDDSNEYVLKNINLDVKAGEIVAFVGKSGSGKTTLVNLLARFFNTDDGKITVNGVNIKNIHLDTYRDKFAIVPQETFLFGGTIKENISFGKEVTEEEIISAAKMANAYNFIQEDLPNKFETEVGERGALLSGGQKQRIAIARALIKNPEIMILDEATSALDSESEKLVQEALDSLMEGRTTFVIAHRLSTIVRADKIVVMENGEIKEMGTHSELIAMNGIYKNLYDIQFNENV

SEQ ID NO: 4182 - protein, 249 aa, Kineococcus radiotolerans SRS30216
MTRSGVLVVRHTSPEVLAAATAGRLLSAVADAQAARGIAHVSLTGGTIGGKTLAAVASSPARDAVDWTRVHLWWSDERFLPAGDPERNATQAADALLDALPLDPSTVHLPPASDGADGDDLDAAAARYAAELLAFGEGAEVPAFDVLLLGMGPDGHVASLFPHHPGLARDDSSVVGVRESPKPPPLRVSFTFGAIARARQVWLVASGAEKAAAVARGVAAGDVAETPAAGVFGTERTLWLVDEAAAADL

SEQ ID NO: 4183 - protein, 441 aa, Pseudomonas fluorescens Pf-5
MNHDLKQRVDQGPMGSFQCLAIGICIVLNMIDGFDVLVMAFTAASVSAEWQLNGAQIGLLLSAGLFGMAAGSLFIAPWADRFGRRPLILFCLLLSGVGMLLSAGSQSPLQLALLRGLTGLGIGGILASSNVIAAEYSSRRWRGLAVSLQSTGYALGATLGGLLAVWLLTHWGWRSVFLFGGIVTLLVIPLVLLWLPESLDFLLARRPADALARINRLAGRLGHPQLLQMPAAAVREQGAGSGFGQLFAGPMRRTTLLIWLLFFLVMFGFYFVMSWTPKLLVAAGLSAQQGITGGVLLSVGGIFGAALVGGLSSRWPLTRVLSLFMLVTAGLLVLFVGSASSIAAALGLGLLIGLFANGCVAGLYALSPVVYDASVRATGVGWGIGIGRMGAIVSPTVAGVLLDVGWQPLHLYAVFAVVFVLAAACLLLLRPVSAQPQPALA

SEQ ID NO: 4184 - protein, 191 aa, Oryza sativa
MLGTTAAHPTSRRGGLSSPRTRHGFGCGVDNMNRLRLAIPSASKNVSRCGKLAICRAQSEDSKGGGGFLTGFLIGGAIFGTLGYVFAPQVLSNLFKKIMHSESDEHGLVKPRYGRYYDEGLEKTRQTLGDKISQLNLAIDKAASRLKRVAGNVEKEAINDESEIEISSFNDNELVAENLNEQGFVQGETAT

SEQ ID NO: 4185 - protein, 198 aa, Zea mays
MSASRFIKCVTVGDGAVGKTCLLISYTSNTFPTDYVPTVFDNFSANVIVDGNTINLGLWDTAGQEDYNRLRPLSYRGADVFLLAFSLVSKASYENVSKKWVPELRHYAPGVPIILVGTKLDLRDDKQFFVEHPGAVPISTAQGEELKKVIGAPAYIECSAKTQQNVKAVFDAAIKVVLQPPKNKKRKKRKSQKACSIL

SEQ ID NO: 4186 - protein, 163 aa, Arabidopsis thaliana
MMMLRQTSRKAYLGLQASPLGLGRRLYHENVIDHFENPRNVGSFNRNDPNVGTGLVGAPACGDLMSLQIKVDDSGQIIDTRFKTFGCGSAIASSSVASEWIKGKTLDEVMTIKNAEIAKHLRLPPVKLHCSMLAEDAIKSAVRDYKEKQAKTNAAAAEETVKA

SEQ ID NO: 4187 - protein, 600 aa, Mycobacterium leprae TN
MREFSVPTRFSVGEHDNIAAVVFEHERDDPNLVIYQRQIDGVWTDVTCAEAASQIRSAALGLIALGMQAGDRVSIFSATCFEWAILDLAILSVGAVTVPIYETSSAKQVRWILQDSDAVLVFAETDAHATMVNQLAGELPALRQVLQINSAGATALDQLAEAGASVDVAQLANRLKTLRAQDPATLIYTSGTTGRPKGCQLTHSNLLYEVRGAKECLPTLLQPGQRLLVFLPLAHVLARALTLSAFTYKMTVGFTSDIKNLLPMLAVFKPTVVVSVPRVFEKVYNTAEQNAANEGKSRIFAMAAQTAVEWSEASHRGGPGLLLRARHAVFDRLVYRKLRAALGGDCHASVSGGAPLGARLGHFYRGVGLTIHEGYGLTETSAAITLNQAGNVKVGTVGNLLPGNSMRIADDGELLVRGNVVFSGYWHNEQGTIEAFTEGWFKTGDLGAIDEDGFLTITGRKKEIIVTAGGKNVAPALLEDQLRAHPLISQALVVGDAKPFVGALITIDPEAFNGWKQRNSKAADAAIGDLTTDPDLVAEVDAAVKQANLSVSHAESIRKFRILPVDFTEQTGELTPTMKVKRNVVAQKFASDIEAIYEKD

SEQ ID NO: 4188 - protein, 281 aa, Nicotiana tabacum
MVRAPCCEKMGLKKGPWTPEEDQILVSYIQTNGHGNWRALPKLAGLLRCGKSCRLRWTNYLRPDIKRGNFTREEEDSIIQLHEMLGNRWSAIAARLPGRTDNEIKNVWHTHLKKRLKNYQPPQNSKRHSKNNLDSKAPSTSQTFNNSDNFSNIQEDINGPVTGPNSPQRSSSEMSTVTVDSTAMTTITIDDQNMFKQLDEMDSSENFIPEIDESFWTDDLSTSDNSTFGMEGTGGELQVQFPFSSVKQESMDMVGAKLEDDMDFWYNVFIKSGDLLDLPEF

SEQ ID NO: 4189 - protein, 278 aa, Brassica napus
LTTSLVISRFYVSEVIVAMEYLHMMGIVYRDLKPENVLVRSDGHIMLTDFDLSLRCDESTSTPQIVLNRNALPNGSSDQNENQTMDHRQTTSSSCMITNCIVPAVSCFHPRIRRRKKKADHRNNGPELVAEPLDVRSMSFVGTHEYLAPEIVSGEGHGSAVDWWTLGIFMFELFYGTTPFKGIDHELTLANIVARALEFPKEPTIPSAAKDLIAQLLAKDPIRRLRSSLGASAVKRHPFFQGVNWALLMCTRPPFLPPPFRKEHLSDDICPDTHVDYY

SEQ ID NO: 4190 - protein, 590 aa, Pseudomonas syringae pv. phaseolicola 1448A
MCGLAGELRFDHQPADLAAVERITHQLAPRGPDAWGFHSQGPVALGHRRLKIMDLSDGSAQPMIDSHLGLSMAFNGAIYNFPELRAELESLGYQFHSGGDTEVLLKGYHAWGADMLPKLNGMFAFAIWERDSKQLFIARDRLGVKPLYLSKTDKRLRFASSLPALLKGGDISGMLDPVALNHYLNFHAVVPAPRTLLAGVEKLPPASWMRIDASGKVEQKVWWTLPYGPHEDEKNLTLEDWRDRVLDSTREAVAIRQRAAVDVGVLLSGGVDSSMLVGLLREVGVEDLSTFSIGFQDAGGERGDEFQYSDLIAKHYGTRHHQLRIQESEIIEQLPAAFRAMSEPMVSHDCIAFYLLSREVSKHCKVVQSGQGADELFAGYHWYPQVDGASDPVAAYRDAFVDRSYAEYAETVQPKWRTANDAAGDFVRDHFAQPGASAAVDKALRLDSTVMLVDDPVKRVDNMTMAWGLEARTPFLDYRLVELSARIPGKFKLPDDGKQVLKEAARLVIPSEVIDRKKGYFPVPGLKHLQGDTLNWVRELLTDSSQDRGLFNPAMVDKLLTNPEGQLTPLRGSKLWQLAALNLWLSEQGL

SEQ ID NO: 4191 - protein, 342 aa, Bradyrhizobium japonicum USDA 110
MSIVLVTGGSGFVGIHVVLQLLAAGHTVRTTVRRPERQADVLAMLREGGAASPESLSFFTADLVRDEGWREAVAGCDYVLHVASPLSTSVPKDEDEMIIPARDGTLRVLRAAREAGVRRVVITSSLGAIGYGHKPREKPFDETDWTNLGGADVQAYIKSKTLAERAAWDFVAREGGGLELSVVNPAGIFGPVLGPDFSGSIEIVKSLLDGAMPAVPRVYFGVVDVRDVADLHLRAMTAPEAKGERFIAVSGEAMSILDIARVLRRELGPRARRVPRLQAPDWLVRLAANRIPLLRAVVPMLGRVRHSTSAKARSLLGWQPRSNDEAILATAESLIRLGLVRA

SEQ ID NO: 4192 - protein, 250 aa, Arabidopsis thaliana
MDNNNNNNNQQPPPTSVYPPGSAVTTVIPPPPSGSASIVTGGGATYHHLLQQQQQQLQMFWTYQRQEIEQVNDFKNHQLPLARIKKIMKADEDVRMISAEAPILFAKACELFILELTIRSWLHAEENKRRTLQKNDIAAAITRTDIFDFLVDIVPREEIKEEEDAASALGGGGMVAPAASGVPYYYPPMGQPAVPGGMMIGRPAMDPSGVYAQPPSQAWQSVWQNSAGGGDDVSYGSGGSSGHGNLDSQG

SEQ ID NO: 4193 - protein, 413 aa, Shewanella sp. MR-7
  misc_feature (395)..(395): Xaa can be any naturally occurring amino acid
  unsure (1)..(413): unsure at all Xaa locations
MPIENSTPFTVLLVDDDEDVLTAYRHLLQLSGYSAKGTHSPSKALALLNDNWNGVVVSDIYMPAMNGMDLLNEVKKIDPEIPVIMITGHGDIPLAVEAVKRGAFDFLEKPLDSAQFIQLLKRAQQIRQGIIEQREAISSTFKEHLFGTSEQINQIRQQLSQIARIDKDVMIEGQIGTGRHLVASVLHSLSQHKNNSLIIHDCKEYPSLTELEASIAKVQNGTLVLRSLTQLSHEHQRWLCTRLLDQERLNTKSHRTICIFDTNPDDEVKTGALLPELYYYFSQARIQLPTLAERKSDIIPLFRNFLSQSCKRFDIPIPKIDLNYIEILKRHHWPGNIRELRNLAELYAVGIIKLPGEETLKLVQAPEAPLDELVDAYEKQVIENIPPLCFCLLPXAANYLGIPRKKLYLRMKN

SEQ ID NO: 4194 - protein, 207 aa, Glycine max
MTQRFLVPLKFNCDIWFGKCVTVGDGAVGKTCLLISYTSNTFPTDYVPTVFDNFSANVVVDGSTVNLGLWDTAGQEDYNRLRPLSYRGADVFILAFSLISKASYENIAKKWIPELRHYAPGVPIILVGTKLDLREDKQFFMDHPGAVPITTAQGEELRKLIGAPAYIECSSKTQQNVKAVFDAAIKVVLQPPKLKKKRKTQKACSIL

SEQ ID NO: 4195 - protein, 387 aa, Oryza sativa (japonica cultivar-group)
MSSFAHHHHGSLVEKDGRMSALRSSLRPYEAAEEMAAAAAAGGPAAAWGAVERGAGMMGDGFSVEDLLDLEELCEVDRDGGEQGEAAAAAAAAVEKERSSDSHGSSVVSYEPMPLLPPVMDLPAHDVEELEWVSRIMDDSLAELPLPQLPAAAAALAACGKPQHRRPHEGAASALLDPMRTPTICALSTEALVPVKSRRSKRSRASVWSLSGAPLSDSTSSSSTATTSSCSSSASFSPFLQYVDFPALVASDLLDEQPRSKKSKHGKNGKQKPKKRGRKPKHQQPPHLAAAAGGGAALPATGDRRCSHCGVQKTPQWRAGPEGAKTLCNACGVRYKSGRLLPEYRPACSPTFVSSLHSNSHRKVLEMRRKKETPVIVAAAAPAVASF

SEQ ID NO: 4196 - protein, 406 aa, Mannheimia succiniciproducens MBEL55E
MKRAVITGFGVISSIGNNKEEVLASLKAGKSGIEIVPSFVEMGMRSHVAGTVKLNPAELIDRKIYRFMGDAAAYAYLSMKEAIEDAGLSEDQVSNERTGLVIGAGIGSAHYQVKAADAARGSRGVKAIGPYAVTKTMSSSVSACLATPFKIKGVNYSISSACATSAHCIGNAFELIQLGKQDIVFAGGAEELSWEGAAQFDAMGAVSTKYNETPEKASRAYDADRDGFVIAGGGAVVVVEELEHALARGAKIYAEIVGYGATSDGYDMVAPSGEGAERCMKQAMANIDTPIDYINVHGTSTPVGDVKELGAIRNVFGEAKPAISSTKSMTGHSLGAAGAHEAIYTLLMLHNDFIAPSINIETLDEQAEGLNIVTETKENAGLQTVMSNSFGFGGTNATLVFKRYAK

SEQ ID NO: 4197 - protein, 146 aa, Anaplasma marginale str. St. Maries
MMFEKTLSILKPDVVERGIIGRVLSYIEAAGLRIVAQRMCALSHEQAEAFYAVHKARPFFPSLVGFMTSGPVVVQVLVGESAVKTYRDVMGATNPSEAAPGTIRGDLAESIDANCVHGSDSLENAEWEIKFFFKEHEIMSSMPNGK

SEQ ID NO: 4198 - protein, 81 aa, Saccharum hybrid cultivar
MSCCGGNCGCGSGCKCGSGCGGCKMYPDMAEQVTTTTQTLIMGVAPSKGHAEGGFEAAAAGAENDGCKCGPNCSCNPCTCK

SEQ ID NO: 4199 - protein, 277 aa, Nicotiana tabacum
MGRAPCCEKMGLKKGPWTPEEDQILISFIQQNGHGNWRALPKQAGLLRCGKSCRLRWTNYLRPDIKRGNFTKEEEDTIIQLHEMLGNRWSAIAAKLPGRTDNEIKNVWHTHLKKKLKDYKPPQNPKRHSKNHDSKGPTTSESSNNSHLTFIYTQKHIIDSSVPAPNSPQISSSTEMSTVTLVDDHQMVIKQEEMESSEYFPEIDESFWTDKLSTDNNWSNTHDHVMVTADQELQVQLPFSSLKEENVDMLTTKMEDDMDFWYNVFIKTDDLPELPEF

SEQ ID NO: 4200 - protein, 389 aa, Aeromonas hydrophila
  misc_feature (289)..(289): Xaa can be any naturally occurring amino acid
  unsure (1)..(389): unsure at all Xaa locations
MRIWAPTPNSAELTRNLHQRGMKIILDAVVNHTSTEHPWFCPPLGAQRNPDSPWRSFYTFDNEGDYVSWKGIRSLPKLDFSSEQVQDAVYRADDAILRYWMRAPYQIDGWRFDVIHMLGERGTAEGNRGHVRAIRGAVKQENPDAYVLGEHFFEASQWLQGDQEDGAMNYYGFAHPIRAFLAGQDIAYHPIKISAEELDRWLKLARAHIPFKNQLAQFNLLDSHDTARFLHLLGEDKQRMRLAATLLLTYIGVPSIYYGDEVGLSGGNDPDCRRCFPWETTAWDHVLHXHYRRLIQIRRQRPALRRGDIQTLYAGPHSYVFARTLQSDQVVVACNRHPSEPRTISLPLWQTASPASRFTDALNGDKFEVVQGEIQLTIPANSARVLLSS

SEQ ID NO: 4201 - protein, 716 aa, Zea mays; identical to SEQ ID NO: 1015

SEQ ID NO: 4202 - protein, 464 aa, Mycobacterium bovis AF2122/97
MTHYDVVVLGAGPGGYVAAIRAAQLGLSTAIVEPKYWGGVCLNVGCIPSKALLRNAELVHIFTKDAKAFGISGEVTFDYGIAYDRSRKVAEGRVAGVHFLMKKNKITEIHGYGTFADANTLLVDLNDGGTESVTFDNAIIATGSSTRLVPGTSLSANVVTYEEQILSRELPKSIIIAGAGAIGMEFGYVLKNYGVDVTIVEFLPRALPNEDADVSKEIEKQFKKLGVTILTATKVESIADGGSQVTVTVTKDGVAQELKAEKVLQAIGFAPNVEGYGLDKAGVALTDRKAIGVDDYMRTNVGHIYAIGDVNGLLQLAHVAEAQGVVAAETIAGAETLTLGDHRMLPRATFCQPNVASFGLTEQQARNEGYDVVVAKFPFTANAKAHGVGDPSGFVKLVADAKHGELLGGHLVGHDVAELLPELTLAQRWDLTASELARNVHTHPTMSEALQECFHGLVGHMINF

SEQ ID NO: 4203 - protein, 344 aa, Agrobacterium tumefaciens str. C58
MTKFKLEYIWLDGYKPVANLRGKTQIKEFDEFPTLEQLPLWGFDGSSTQQAEGHSSDCVLKPVAIYPDPARTNGALVMCEVMMPDGVTPHASNSRATILEDEDAWFGFEQEYFFYQDGRPLGFPEQGYPAPQGPYYTGVGFKNVGSVAREIVEEHLDLCLEAGINHEGINAEVAKGQWEFQVFGKGSKRAADQIWIARYLLLRLCEQYGIDVEFHCKPLGDTDWNGSGMHCNFSTKFMREVGGKDYFEALMAAFAKNWQEHIDVYGPDNHLRLTGKHETAPWNKFSYGVADRGASIRVPHSFVNNGYRGYLEDRRPNSQGCPYQIASVVLKTIAEVPLAKSAAA

SEQ ID NO: 4204 - protein, 188 aa, Saccharum hybrid cultivar
SSVVTAAAAIQADPAEKPRAPKAQVVGWPPVRSFRKNIMSVQSDKGAGGSKDADKSSPPPAAAAAVGGAAFVKVSLDGAPYLRKVDLKMYKMYKSYQELSKALEKMFSSTIGSCGSQGMNGMNESKLVDLLNGSEYVPTYEDKEGDWMLVGDVPWEMFVESCKRLRIMKGSEAIGLAPRAMEKCKNRS

SEQ ID NO: 4205 - protein, 232 aa, Solanum tuberosum
MAVAFHNVNSESGLKKLDDYLLTRSYITGYQASKDDITVYSYLAKPPSAEYVNALRWYKHIDALLRISGVSGEGAGVIVEGSAPITEAVATPPADDSKASAAEDDDDDDDVDLFGEETEEEKKAAEERAAALKASGKKKESGKSSVLMDVKPWDDETDMKKLEEAVRSVHMEGLTFGASKLVPVGYGIKKLQIMLTIVDDLVSVDDLIENYLTVEPINEYVQSCDIVAFNKI

SEQ ID NO: 4206 - protein, 247 aa, Treponema denticola ATCC 35405
MRLVLVRHGESEWNKLNLFTGWTDVDLSEKGVEEAKEGGTYLKKEGFDFDICYTSYLKRAIHTLNYILSQMDREWLPVIKTWKLNERHYGGLQGLNKAETAEKYGEDQVKIWRRSFDIAPPVLEEGDKRCPYLQEQYRGIEKSELPLTESLKDTIARAVPFFEKTIKPQMLEGKRILITAHGNSLRALVKYFENLSDEEIISVNIPTGVPLVYEFDKNFKVLSKRYLGDQEKINAKINAVANQGKKK

SEQ ID NO: 4207 - protein, 408 aa, Yersinia pseudotuberculosis IP 32953
MILNVYVVISIFIMNAMSLLSVEVSNFTFVDLFKNDNVNIVSIHRVLLLLEELMSQLPEKMSAVVCHGPQDYRLEHVPTPVPKAKELVIKVKGCGICAGDCKCKNGAKMFWGETPWVKPPVVPGHEFYGHIVALGEGTESKYKIGERVIAEQIVPCWDCRYCNSGSYWMCETHNIYGFQKDVAEGGMAEYMRFSENAIVHKIPESLSHEDAVLIEPMACAIHTVARGDIQLDDVVVLAGAGPLGLCMVQVARLKTPKKLIVIDTIEERLALAKAFGADVVINPLKEDADKIVKSLTGGYGCDVYIEATGAPIGVTQGLQMIRKLGRFVEFSVFGQETTVDWSIIGDRKELDIRGAHLAPYSYEIATDLFERGLVTSKGIVTHSYSLDDWEKAFELADSTNSIKVILVP

SEQ ID NO: 4208 - protein, 510 aa, Zea mays
  misc_feature (469)..(470): Xaa can be any naturally occurring amino acid
  unsure (1)..(510): unsure at all Xaa locations
MMIARRLLRSNNAPAQATSLLKHVTGTASLQGNADSLLDGTVRHFGSAPSAQPEENGFKGHGMLAPFTAGWQSNDLHPLIIERSEGSYVYDINGNKYLDSLAGLWCTALGGSEPRLVKAATEQLNKLPFYHSFWNRTTKPSLDLAQEILSMFTAREMGKVFFTNSGSEANDSQVKLVWYYNNALGRPNKKKFIARSKAYHGSTLISASLTGLPALHQKFDLPAPFVLHTDCPHYWRYHLPGETEEDFATRLATNLENLILKEGPETIAAFIAEPVMGAGGVIPPPKTYFDKVQAIVKKYDILFIADEVITAFGRLGTMFGCDYYNIKPDLVSLAKALSNAYVPIGATLVSPEISDVIHSQSNKLGSFAHGFTYSGHPVACAVAIEALKLYRERDIPGHVKQIAPKFQDGIRALADSPIIGEIRGLGMIMGTEFTNNKSPTDLLPAEWGVGAIFGEECQKRGMLVRVAGXXIMMSPTLIMTPGEVDELVRIYGEALKATEERVAALQSKKN

SEQ ID NO: 4209 - protein, 405 aa, Zea mays
  misc_feature (259)..(259): Xaa can be any naturally occurring amino acid
  unsure (1)..(405): unsure at all Xaa locations
MATSGAGDHGQGQGQGHGRFASSLTARYSDWVLETLDELPGSFLLTDPALPGHPIVYASRGLAALTGYAPRDVLGRNARLFQGAATDRATVAGVREAVRAHRPHQAAILNYRRDGAPHWVLLHLAPLFHARDGTLLHFLAVQVPIAPAAVARGATCHTTGHLLAACRDEASRVAEDFPCATHAGKVFVDMDKRGLEAEEPRVASDSEKDMAISTANSIVSALNSYSKLTGLVVSRKRCDSIGIPALSSSLKLSLGLTPXLPDMPIIYASDAFTSLTGYSREEILGCNCKVLNGPGTSLEVLEEINQHICSEQACTVDLLSYRKDGSSFCDHLHVSPIRDASGKVRLHLSQVAFHIWVHLDMGAKHDFSGLTPEKWLLGAVGAVRVAVRGLSASGSLLRPPSQYQF

SEQ ID NO: 4210 - protein, 592 aa, Bacillus cereus G9241
MAETLAKRGPDDNKVWIKGNVAFGHKRLIVVDPEGGKQPMTCLKDEANYAICYNGELYNTEDIRKELLRRGYTFKGHSDTEVLLASYMEWKEECVDHLNGIYAFAVWDEQKEQVFIARDRLGVKPLFYKYDSGRLLFGSELKAILAHPDVKVEVTLEGLSEIFGLGPSRTPGHGIYAGIKELRPGHAMTFSKNGLCIWRYWNVESKKHEDSFEETVEKTRFLLQDAITRQLVSDVPLCTFLSGGVDSSAITAIAAKEYERSGKGQLHTYSIDYEDNDKYFKANAFQPNSDAPFIHLMTETFQTIHHRCVISNEQLAQYLTEAVLVRDLPGMADIDSSLLWFCREIKQDFVVGLSGECADEIFGGYPWFYREDDLQSSAFPWMRSTEAREQLLKKEWRNKLNLQQYVQRRYEESIQEVPILEGESPIEAKRRQLFYLNMVWFMTTLLDRKDRMSMGASLEVRVPFADHRLVEYAWNIPWEMKMYKNREKGLLRKALEGLLPNEILYRKKSPYPKTHNPHYTKAVTVWLQDLLTDKGSILHELFDKEQLSGLIESGGSAFQSPWFGQLMTGPQLLAHLAQIHVWFKEYGVNIKE

SEQ ID NO: 4211 - protein, 504 aa, Lycopersicon esculentum
MSSRGGGIAESPYLRNYRVGKTLGHGSFGKVKIAEHLLTGHKVAIKILNRRKMKTPDMEEKLRREIKICRLFVHPHVIRLYEVIETPTDIYVVMEYVKSGELFDYIVEKGRLQEDEARKFFQQIIAGVEYCHRNMVVHRDLKPENLLLDARRNVKIADFGLGNIMRDGHFLKTSCGSPNYAAPEVVSGKLYAGPEVDVWSCGVILYALLCGTLPFDDENIPNLFKKIKSGVYTLPSHLSPLARDLIPRMLIVDPMKRISVADIRQHQWFKIHLPRYLAVPPPDARQHLKKLDEEILQQVTRMGLDRDQLLDSLQKRIQDDATVAYYLLYDNRSMASSGYLGAEFQESVDGYSSGLFPNLDLQLSSGNGVSEESLRRPFRKEKTWLVGLQSPANPKEIMNQVLGTLLELNVRWKKIGHYNMKCLWCHDLHLHSMASNHMNDDDHFISNATAISTHLQPLPTVKFEMQLYKTEDEKYLLDLQRISGPQFLFLDFCAGFIRQLEGPQ

SEQ ID NO: 4212 - protein, 433 aa, Rhodospirillum rubrum
MTDSKQTVTLVDNRSGKSYEFPILSGSTGPDVVDIRKFYTETGMFTYDPGYTSTGSCSSAVTYIDGDAGILLHRGYAIEDLAMHCDFTEVAYLLLRGELPTAPKKTEFEKIITYHTMVHEQLHKFYDGFRRDAHPMAVMCGVVGALSAFYHDSIDITDPIQRMIAQHRLVAKMPTIAAWAYKYSQGQPFMYPRNNLTYAENFLHMMFATPCEEYKVSPVLARAMDRILILHADHEQNASTSTVRLAGSSGANPFACIAAGIASLWGPAHGGANEAVLKMLTEIGSPDRVDDFVKKAKDKNDPFRLMGFGHRVYKNYDPRAKIMAATCHEVLDELGIVDEPLLEIAMRLEKIALEDEYFIEKKLYPNVDFYSGIIFRAIGIPTSMFTCLFALARTVGWISQWKEMIEDPDQKIGRPRQLYNGATKRDFLPMDKR

SEQ ID NO: 4213 - protein, 488 aa, Bacillus cereus G9241
MNPNNRLTTNQGAPVGDNQNSRTAGRRGPVLLEDYHLVEKLAHFDRERIPERVVHARGAGAHGVFVTKNSMKQYTKAAFLQNEGTETPVFVRFSTVIHGQGSPETARDPRGFAVKFYTEEGNYDIVGNHLPVFFIRDAIKFPDMVHSLKPAPDTNIQTPDRYWDFMTLSPESTHMMTWVFSDYGTPASYREMEGFGVHSFKWINAEGKIVYIKYHWKPQQGVRNLSAKEVQEVQGKDFNHATRDLFDAIEKGNYPKWDLHVQVMQLEETDSLDFDPLDPTKVWPEDRFPLMEVGTMTLNRNPKNFFAEVEQVAFSPSATVNGIEPSEDKLLQGRLFSYPDTQRYRLGANYLQIPVNCPYAAVHNQQRDGAMQINQNPSTINYEPSRHAENPVEDPAYRDSTMKVEGYVSREKIDKPNDFKQAGERYRSFSKEEQDNLIANLTNDLKDVSERTKLLAVCNFFRADQEYGMRLAQSLNVDITQYVGNAPK

SEQ ID NO: 4214 - protein, 460 aa, Pseudomonas aeruginosa PAO1
MTAQLNPQRDTRDYQQLDAAHHIHAFLDQKALNREGPRVMVRGDGLQLWDNDGKRYLDGMSGLWCTNLGYGRQDLAAAASRQLEQLPYYNMFFHTTHPAVVELSEMLFSLLPDHYSHAIYTNSGSEANEVLIRTVRRYWQILGKPQKKIMIGRWNGYHGSTLGSTALGGMKFMHEMGGMLPDFAHIDEPYWYANGGELSPAEFGRRAALQLEEKILELGAENVAAFVAEPFQGAGGMIFPPQSYWPEIQRICRQYDVLLCADEVIGGFGRTGEWFAHEHFGFQPDTLSIAKGLTSGYIPMGGLVLGKRIAEVLVEQGGVFAHGLTYSGHPVAAAVAIANLKALRDEGVVTRVREETGPYLQRCLREVFGDHPLVGEVQGAGFVAALQFAEDKVTRKRFANENDLAWRCRTIGFEEGVIIRSTLGRMIMAPALVAGRAEIDELIDKTRIAVDRTAREIGVL

SEQ ID NO: 4215 - protein, 883 aa, Escherichia coli O157:H7 EDL933
  misc_feature (345)..(345): Xaa can be any naturally occurring amino acid
  unsure (1)..(883): unsure at all Xaa locations
MNEQYSALRSNVSMLGKVLGETIKDALGEHILERVETIRKLSKSSRAGNDANRQELLTTLQNLSNDELLPVARAFSQFLNLANTAEQYHSISPKGEAASNPEVIARTLRKLKNQPELSEDTIKKAVESLSLELVLTAHPTEITRRTLIHKMVEVNACLKQLDNKDIADYEHNQLMRRLRQLIAQSWHTDEIRKLRPSPVDEAKWGFAVVENSLWQGVPNYLRELNEQLEENLGYKLPVEFVPVRFTSWMGGDRDGNPNVTADITRHVLLLSRWKATDLFLKDIQVLVSELSMVEATPELLALVGEEGAAEPYRYLMKNLRSRLMATQAWLEARLKGEELPKPEGXLTQNEELWEPLYACYQSLQACGMGIIANGDLLDTLRRVKCFGVPLVRIDIRQESTRHTEALGELTRYLGIGDYESWSEADKQAFLIRELNSKRPLLPRNWQPSAETREVLDTCQVIAEAPQGSIAAYVISMAKTPSDVLAVHLLLKEAGIGFAMPVAPLFETLDDLNNANDVMTQLLNIDWYRGLIQGKQMVMIGYSDSAKDAGVMAASWAQYQAQDALIKTCEKAGIELTLFHGRGGSIGRGGAPAHAALLSQPPGSLKGGLRVTEQGEMIRFKYGLPEITVSSLSLYTGAILEANLLPPPEPKESWRRIMDELSVISCDLYRGYVRENKDFVPYFRSATPEQELGKLPLGSRPAKRRPTGGVESLRAIPWIFAWTQNRLMLPAWLGAGTALQKVVEDGKQSELEAMCRDWPFFSTRLGMLEMVFAKADLWLAEYYDQRLVDKTLWPLGKELRNLQEEDIKVVLAIANDSHLMADLPWIAESIQLRNIYTDPLNVLQAELLHRSRQAEKEGQEPDPRVEQALMVTIAGIAAGMRNTG

SEQ ID NO: 4216 - protein, 255 aa, Spinacia oleracea
MAATHLTSTSSLTINTLPSFEGLRSASGISKINVSVAYPSFTSRSFRGLVVRAASITTSKYTSVKPLGDRVLIKTKIVEEKTTSGIFLPTAAQKKPQSGEVVAIGSGKKVGDKKLPVAVKTGAEVVYSKYTGTEIEVDGSSHLIVKEDDIIGILETDDVKDLKPLNDRLLIKVAEVENKTSGGLLLAESSKEKPSFGTVVATGPGVLDEEGNRIPLPVCSGNTVLYSKYAGNDFKGVDGSDYMVLRVSDVMAVLS

SEQ ID NO: 4217 - protein, 208 aa, Shewanella sp. MR-7
MKLYELAPTPSARRVSIFLAEKGIDIPRVSVDIRGGENLNPEFKAKSVNGRIPLLELDDGNHICESVAICRYLEEIYPSGSSLFGNSPLERAKVEMWQRIIELQGFTAGFQAFRNLTGIYKDRENCVEAWGAESRQRVIDFLPTLDQQLAKSSYVAGDNFTIADISAYVFISFIKNLDILVDDTLPHIQAWFATVAQRPSIVSLTPKN

SEQ ID NO: 4218 - protein, 325 aa, Listeria innocua Clip11262
MNLNKHSERKFDLITVGRACIDLNAVEYNRPMEETMTFSKYVGGSPANIAIGTAKLGLKVGFIGKISDDQHGRFIEKYMRDLNINTDGMVKDTAGRKVGLAFTEIKSPEECSILMYRENVADLYLTPEEISEDYIKETRVLLVSGTALAQSPSREAVLKAVHLAQKNDVIVAFELDYRPYTWKNTEETAVYYSLVAEQADVIIGTRDEFDMMENQIGGNNEMTIDNLFKHKAEIIVIKHGVEGSFAYTKAGETFRAQAYKTKVLKTFGAGDSYASAFLYGLFSGENIETALKFGSAAASIVVSKHSSSDAMPTADEIKALIANAD

SEQ ID NO: 4219 - protein, 222 aa, Shewanella sp. MR-7
MIDLYTAATPNGFKISIALEEMGLDYRVHKLDFNTNEQKQPEFLAINPNGRIPAIIDRDNEDFVVFESGAILLYLAEKTGKFLPTDPKKRSQVIQWLMFQMSGVGPMMGQANVFYRYFPEKIPAAIERYQKEGRRLFEVMNTQLAKHQYLAGDEYTIADIATWPWVRIHEWSGINMEGLTHLQRWLDELALRPACQKGIVTPPPSALSDEERAKQIQKMVTK

SEQ ID NO: 4220 - protein, 463 aa, Photorhabdus luminescens subsp. laumondii TTO1
MDREFMADQQHSLQRGLEARHIELIALGGTIGVGLFMGSASTLKWAGPSVLLAYIIAGIFVFFIMRSMGEMLFLEPVTGSFASFGHKYLSPYWGCLTAWGYWFMWVAVGISEITAIGVYAEFWFPELPQWVSALIAVALVALANLAAVRLYGELEFWFAMIKVTTIIVMILIGLGLIFFGIGNQWQPIGLDNLTVHGGFFAGDWQGFLFALCIVVASYQGVELVGITAGEAKNPQVTLKKAINNILWRILIFYVGAIFIVVTLFPWTEVGAQGSPFVMTFTKVGITSAAAVINFVVLTAALSGCNSGMYSGGRMLYALAQNRQLPSSLTKLSKNGVPVIGIAITILCLIVGSSLNYLIPNPQAVFVYVYSASVLPGMVPWFVILMSQLRFRQYHQQALKQHSFKSILFPYVNYLTLAFLCCVLVGMAINPDTRFSLLVGGGFLLIVSLIYWLVKLFNGKKPKA

SEQ ID NO: 4221 - protein, 187 aa, Saccharum hybrid cultivar
MANLRSVLAVSLAVALFAVAPASFALDEKELHLSLYLNQTYSGNGLNQAVVVEPGLPGEFGNIAVQDWPVTNGEGSDATVVGRAQGIQFKPSQRNDQAWYTTLTIVFENTSLKGSTLQMMGYIPQDGQWSIFGGTGQLTMARGVVNHKVVRQTNGGRMYKINIHAFYTPLGASSNCGINLRRLDFDA

SEQ ID NO: 4222 - protein, 574 aa, Fusobacterium nucleatum subsp. nucleatum ATCC 25586
MLNNLKILLDKDYTPVKKATYYQLLDILFNMIIYTILFLTIYSLIEKSFTMNKVYWYSGLLLIALIFKSHFGGCGMVKMQKTGSTASKNLRIAMGDHVKKLNLGYFNSHNLGYLINILTMDITDFEQAITHNIPDLLKVLVLSVYLLLITFFINFKLAIIQIIVVLLTIPILKVGGEKLEKIGVEKKTVSAKLISTIIEYISGIEVFKSFGVIGDKFERLEKGFRDLKKYSIKLELIAVPYVLLFQVIIDLLFPILLLLAVRFFMNGELEAKMLVGFIVLSLTLTNVIRNFSVSYSITRYLFLSVAKISDTLNYPTISYKDEDFNFSSYDISFEDVDFSYTEDRKVLKDINFTAKNNEITALVGKSGSGKSTIMSLIARFWDTTKGSIKIGGKDIKEVNPDSLLKNISMVFQDVYLINDTIYENIRIGNLNASKEEIMNAAKIANCHDFISKLPKGYDTYIGEEGSTLSGGEKQRISIARALLKNSPIILLDEATASLDADSEHEIKMAINELIKDKTVIIIAHRLNTIKDANKIIVMDDGKIIESGNHEKLMNDKGTYYSMFTAMEKAKEFSI

SEQ ID NO: 4223 - protein, 358 aa, Solanum tuberosum
MSCYKGKYADELIKNAAYIATPGKGILAADESTGTIGKRLSSINVENVESNRRALRELLFCAPGALQYLSGIILFEETLYQKTAAGKPFVDVMKEGGVLPGIKVDKGTVELPGTNGETTTQGLDGLAERCQKYYEAGARFAKWRAVLKIGANEPSQLAINDNANGLARYAIICQQNGLVPIVEPEILVDGSHDIKKCADVTERVLAACYKALNDHHVLLEGTLLKPNMVTPGSDAPKVVPEVIAEYTVRALQRTMPAAVPAVVFLSGGQSEEEATRNLNAMNKLQTKKPWTLSFSFGRALQQSTLKAWSGKEENIGKAQAALLTRCKANSEATLGKYAGSSNLGDGASESLHVKDYKY

SEQ ID NO: 4224 - protein, 311 aa, Oryza sativa
  misc_feature (253)..(253): Xaa can be any naturally occurring amino acid
  unsure (1)..(311): unsure at all Xaa locations
MAKHFVLNTGAKIPSVGLGTWQSDPGVVGDAVYAAVKAGYRHIDCARMYKNENEVGIALKKLFEEGVVKREDLFITSKLWCDCHAPEDVPESLDKTLSDLQLEYLDLYLIHWPFRVKKGSGISNTEDYIPPDIPSTWGAMEKLYDSGKSRAIGVSNFSSKKLGDLLAVACVPPAVDQVECHPGWQQTKLHNFCQSTGVHLSAYSPLGSPGSTWMNSNVLKESVIISIAEKLGKTPAQVALHWNIQMGHSVLPXSVTEERIKQNIDVYDWSIPEDLLVKFSEIKQVRLLRGDVIVNPHSVYKTHEELWDGEI

SEQ ID NO: 4225 - protein, 483 aa, Pseudomonas aeruginosa UCBPP-PA14
MSVRRTKIVATLGPASNSPEVLEQLILAGIDVARLNFSHGTPDEHRARARLVRELAAKHGRFVALLGDLQGPKIRIAKFANKRIELQVGDKFRFSTSHARDAGTQEVVGIDYPDLVKDCGVGDELLLDDGRVVMVVEEVAADELRCRVLIGGPLSDHKGINRRGGGLTAPALTDKDKADIKLAADMDLDYVAVSFPRDAKDMEYARRLLTEAGGKAWLVAKIERAEAVADDDALDGLIRASDAVMVARGDLGVEIGDAELVGIQKKIILHARRNNKVVITATQMMESMIHSPMPTRAEVSDVANAVLDYTDAVMLSAESAAGEYPVEAVQAMARVCQGAEKHPTSQKSSHRLGQTFDRCDESIALASMYTANHFPGIKAIICLTESGFTPLIMSRIRSSVPIYAYSPHRETQARVAMFRGVETIPFDPAALPAEKVSQAAVDELLKRGVVTKGDWVILTKGDSYTAQGGTNTMKVLHVGDLLV

SEQ ID NO: 4226 - protein, 148 aa, Brassica napus
MVRYIEENITKMLETKIISKSEVLYAGGDDGDTSPATKVFQDFQINEEDVGRGGGGLIRSWVDSMRACSPSHLKPFNKQSSWIKEHPSALNMFEEILHESEGKQIVMFLDYDGTLSPIVDDPDRAFMSNKMRNTVRKLAMCFPTVIVS

SEQ ID NO: 4227 - protein, 623 aa, Xylella fastidiosa Temecula1
MQSVIAYLKQQEIKPLLRFITCGSVDDGKSTLIGHLLYDSQCLAEDQLADLTVDSQRYGTQGEHIDYALLLDGLAAEREQGITIDVAYRYFDTEKRKFIVADCPGHAQYTRNMATGASSADAAVVLVDARKGLLTQTRRHSYIVALLGIRHVVLAVNKMDLVGYDQQTFEAIASDYLALAAKLGINQVQCIPLSALEGDNLCKRSARMLWYVGPSLLEYLEALEPADVDLAAAMCLPVQWVNRPDSQFRGFTGTLAAGRVRSGDGVVVLPSGCVSRVVRVFNGDTEVHEAVAGQAVTLTLADEIDISRGDVIAATDDPPEVADQVTAYVLWMDDTALLPGRRYWLKLGARMVAASVSDIKHRVDVNTQEQRVAQRLQLNELGYCQLSLDAPVAFVPYARNRVLGSFILIDRQSNATVGAGTLDSGVHCASNVHWQPLDIDHVARARIKGQTPKVLWFTGLSGAGKSAIANIVDKRLHALGYHTFILDGDNVRHGLNRDLSFTVEDRVENIRRVAEVARLMVDAGLVVLVSFISPFRDERQLARERFAADEFVEVFVDVPLAVAEARDVKGLYAKARAGLITDFTGIDSPYEPPQHPELHLRADQGTPEQLASQVLSLLGVEGK

SEQ ID NO: 4228 - protein, 368 aa, Chromobacterium violaceum ATCC 12472
MSAPRLPVTVLTGFLGAGKTTLLSKLLENNKQRRLAILVNEFGEVSIDGGLLRDGENQGVEIHDLANGLVAYDDDADFLPTMLALWQRRQQIDHVLIETSGLALPSAVMAQLQSEALAPYFVLDATLAVVDTPLLLAGHFAPAGDGGKTDAVAALFDQQLGHADIVVLNKIDALSADQLLAAEEAVRKQAPSIRFIELAYEAKLDTRLTLGLHLHEASPAAHRHYGPVASMPGLAMRPLANQTLLDGHSHGGQAAHSHGLATHKHFHEQDPGWQSFMIRSKEPQCADKLAAALQAIAREEPLLRIKGFAACADSPGRLLAQGVRSRIELSRDDTLAAPRQAQLVFIGYHPSRPRVVALLRDITGAHWS

SEQ ID NO: 4229 - protein, 306 aa, Vibrio vulnificus CMCP6
MNKLVVLGSVNADHVLQVPSFPRPGETLHGRNYQVIPGGKGANQAVAAARLGADTGFIACVGDDSFGINIRENFKLDGIQIDGVKMQPNCPTGIAMIQVADSGENSICISAEANAKLTEVAIESDLPRIRDARFLLMQLETPICGIELAAREAKAAKTNVILNPAPARTLSDELLACIDVITPNETEAQVLTGIEVVDDESAQQAANVLHQKGIEIVMITLGSKGVWLSENGRGQRICGFKVDVTDTTAAGDTFNGALVTGLLEDMPLESAIKFAHAAAAISVTRFGAQTSIPTRKEVDEFLAAHS

SEQ ID NO: 4230 - protein, 421 aa, Arabidopsis thaliana
MFEGRPRDSCLVSTLFTMPSHKETKWSFLVSGKRSFLNNDESDLHFKKMYKLTTDSSEGEDNGSSSDSGTLIPGMNRDDSLSCLIRCSRADYCSIASVNRSLRSLIRSGEIYRLRRLQGTLEHWVYFSCHLNEWEAFDPRSKRWMHLPSMPQNECFRYADKESLAVGTDLLVFGWEVSSYVIYRYSLLTNSWSTAKSMNMPRCLFGSASYGEIAVLAGGCDSSGRILDTAELYNYEDQTWLVLPGMNKRRKMCSGVFMDGKFYVIGGIGVGEENEPKVLTCGEEFDLKTRKWTEIPEMSPPRSNQGNGMSAAAMAPPLVAVVNDQLYAADHAGMAVRRYDKEKRVWNKVGNLPEQAGSMNGWGLAFRACGDRIIVIGGPKAPGEGFIELNSWVPSVTTPEWHLLGKKQSVNFVYNCAVMSC

SEQ ID NO: 4231 - protein, 333 aa, Zea mays
MEKYELLKDIGSGNFGVARLMRNKDTKELVAMKYIPRGLKIDENVAREIINHRSLRHHNIIRFKEVVLTPTHLAIVMEYAAGGELFDRICSAGRFSEDEARYFFQQLICGVSYCHFMQICHRDLKLENTLLDGSPAPRLKICDFGYSKMADVWSCGVTLYVMLVGAYPFEDPDDPKNFRKTIGRIVSIQYQIPEYVHISQDCRQLLARIFVANPAKRITIREIRNHPWFLKNLPRELTEAAQAKYYKKDNSAPTFSDQTVEEIMKIVEEARTPPQSSTPVAGFGWAEEEEQEDGKRSDDDEQYGEDEDYDGEDEYDKQVKHVHASGDFQHLLK

SEQ ID NO: 4232 - protein, 544 aa, Bacillus thuringiensis serovar konkukian str. 97-27
MAKDIKFSEEARRSMLRGVDTLANAVKVTLGPKGRNVVLEKKFGSPLITNDGVTIAKEIELEDAFENMGAKLVAEVASKTNDVAGDGTTTATVLAQAMIREGLKNVTAGANPMGLRKGIEKAVVAAVEELKTISKPIEGKSSIAQVAAISAADEEVGQLIAEAMERVGNDGVITLEESKGFTTELDVVEGMQFDRGYASPYMITDSDKMEAVLDNPYILITDKKISNIQEILPVLEQVVQQGKPLLIIAEDVEGEALATLVVNKLRGTFNVVAVKAPGFGDRRKAMLEDIAILTGGEVITEELGRDLKSATVESLGRAGKVVVTKENTTVVEGVGSTEQIEARIGQIRAQLEETTSEFDREKLQERLAKLAGGVAVIKVGAATETELKERKLRIEDALNSTRAAVEEGIVAGGGTSLMNVYTKVASIVAEGDEATGINIVLRALEEPVRQIAINAGLEGSVVVERLKGEKVGVGFNAATGEWVNMLETGIVDPAKVTRSALQNAASVAAMFLTTEAVVADKPEPNAPAMPDMGGMGMGGMGGMM

SEQ ID NO: 4233 - protein, 445 aa, Triticum aestivum
  misc_feature (201)..(201): Xaa can be any naturally occurring amino acid
  unsure (1)..(445): unsure at all Xaa locations
MANRGKILMERYELGRLLGKGTFGKVHYARSLESNRSVAIKMLDKEKVLKVGLSEQIRREVTTMRLVAHKNIVQLHEVMATRNKIYFVMEYVKGGELFDKVAKSGKLTEGAAHKYFQQLISAVDYCHSQGVYHRDLKLENLLLDENENLKVSDFGLSALSESKRQDGLLHTTCGTPAYVAPEVISKTGYDGAKSDIWSCGXVILLGLGGGYLPFHGSNLMDMYRKIEQGDFRCPNWFSHKLQKLLFKILDPNPSTRASIQKIKESTWFRKGPRGTLAVKERTPSENVTTNAPPTAGVRPRKNTHEDVQPLTVTNLNAFEIISFSTGFDLSGLFIQEDCRKETRFTSDKPASAIISKLEYVAKALNLRVRKKDNGVVKMQARKEGRNGAVQLDMEIFEITPSHPLIEMKQTSGDPLEYRELLEDIRPALKDIVWAWHGDDPHQQLE

SEQ ID NO: 4234 - protein, 103 aa, Neisseria gonorrhoeae FA 1090
MKQLTLKEAQEFYAVHKDRPFYAGLVEFMTGGPVMIQVLEGENAVLKNRELMGATNPTEAAEGTIRADFATSVSINAVHGSDSVENAALEIAYFFSQTEICPR

SEQ ID NO: 4235 - protein, 450 aa, Escherichia coli CFT073
MTKHYDYIAIGGGSGGIASINRAAMYGQKCALIEAKELGGTCVNVGCVPKKVMWHAAQIREAIHMYGPDYGFDTTINKFNWETLIASRTAYIDRIHTSYENVLGKNNVDVIKGFARFVDAKTIEVNGETITADHILIATGGRPSHPDIPGVEYGIDSDGFFALPALPERVAVVGAGYIAVELAGVINGLGAKTHLFVRKHAPLRSFDPMISETLVEVMNAEGPQLHTNAIPKAVVKNADGSLTLELEDGRSETVDCLIWAIGREPANDNINLEAAGVKTNEKGYIVVDKYQNTNVEGIYAVGDNTGAVELTPVAVAAGRRLSERLFNNKPDEHLDYSNIPTVVFSHPPIGTVGLTEPQAREQYGDDQVKVYKSSFTAMYTAVTTHRQPCRMKLVCVGPEEKIVGIHGIGFGMDEMLQGFAVALKMGATKKDFDNTVAIHPTAAEEFVTMR

SEQ ID NO: 4236 - protein, 452 aa, Thermus thermophilus HB27
MEELVELRPAFQALGFGFGLQLGPHGTATTPIPRVAPFGQRKVRPWTVPGPRRLDKAMSLDLRARVRDELERLKREGLYISPKVLEAPQEPATRVEGREVVNLASNNYLGFANHPYLKEKARQYLEKWGAGSGAVRTIAGTFTYHVELEEALARFKGTESALVLQSGFTANQGVLGALLKEGDVVFSDELNHASIIDGLRLTKATRLVFRHADVAHLEELLKAHDTDGLKLIVTDGVFSMDGDIAPLDKIVPLAKKYRAVVYVDDAHGSGVLGEKGKGTVHHFGFHQDPDVIQVATLSKAWAGIGGYAAGARELKDLLINKARPFLFSTSHPPAVVGALLGALELIEKEPERVERLWENTRYFKRELARLGYDTLGSQTPITPVLFGEAPLAFEASRLLLEEGVFAVGIGFPTVPRGKARIRNIVTAAHTKEMLDKALEAYEKVGKRLSIIR

SEQ ID NO: 4237 - protein, 178 aa, Bradyrhizobium japonicum USDA 110
MDSRTENEMFDRRILLTTVAGLFGLSAFRWLRGTPAEAGEKAAETFEITKTEAEWRAQLTPQQYEILRNHGTERPGSSPLLKEHRKGVFACAGCDLPLFASDTKFESGTGWPSFYQPIEGNVGKTEDRTYGMLRTEVHCRRCGGHLGHVFDDGPKPTGLRYCIDGFGLVFHPAAASAT

SEQ ID NO: 4238 - protein, 685 aa, Magnetococcus sp. MC-1
MDRASTSTRSFRAPNRVVLSGGLTLLLSLLLTGLLAVQENGRYQNQLRVTVLEQLSQLRGLLENEINLSFHLTMGLLAYVAIEPNISQQNFQLMAREIIAQSRNIRNLGLAPDNVLSYIYPLSGNERALGLDYRKNAKQWPAVQLAISERRTVVAGPVKLVQGGEAFISRTPIYRTGMDGKKGAYWGLASTVIDKDKLFTTAGIYEVSKQIKLAIRGRDGLGAQGDLISGEGELFNERAVLQNVQLPDGRWQLAAEPLNGWDQDSPYVPVIWGAGIGGGMLAGGLVYLWLIGVARHQHILQQALQDAQAADRVKSEFYATMSHEIRTPMNVVLGMSDILLETVQEPEQRQQLARLQQAGSALLELINNILDISRIEEKRLTLHMAPMDLRSLVEDLLGFFQLPYHEKGIALVSEWEQGLATHILGDSGRLRQVLTNLLGNALKFTERGQVVVVVRRDPEDATYLRIEVRDSGIGLHADQLLHIFDKFTQAESGLTRRYGGSGLGLAICKQLVVLMGGRIWVESEDGVGSCFIFTLPYQEVTELERRQMQDEAAEWSVDVPRKVLLVEDSVDNQQLIVAYLKASPYQVSIAQNGAEGVAMAKQDAYDLILMDMQMPVLDGYAATRSIRQWERQQGREPVPIVALTAHALEGDLEKSIEAGCSLHLTKPIRKAQLLNQLRGFFKEAP

SEQ ID NO: 4239 - protein, 459 aa, Arabidopsis thaliana
MGSIVEPWAAIAENGNANVTAKGSSRELRHGRTAHNMSSSSLRKKSDLRLVQKVPCKTLKNILSNLQEVILGTKLTLLFLAIPLAILANSYNYGRPLIFGLSLIGLTPLAERVSFLTEQLAFYTGPTVGGLLNATCGNATELIIAILALANNKVAVVKYSLLGSILSNLLLVLGTSLFFGGIANIRREQRFDRKQADVNFFLLLMGLLCHLLPLLLKYAATGEVSTSMINKMSLTLSRTSSIVMLIAYIAYLIFQLWTHRQLFEAQQDDDDAYDDEVSVEETPVIGFWSGFAWLVGMTIVIALLSEYVVDTIEDASDSWGLSVSFISIILLPIVGNAAEHAGAIIFAFKNKLDISLGVALGSATQISLFVVPLSVIVAWILGIKMDLNFNILETSSLALAIIITAFTLQDGTSHYMKGLVLLLCYVIIAACFFVDQIPQPNDLDVGLQPMNNLGEVFSA

SEQ ID NO: 4240 - protein, 511 aa, Oryza sativa (japonica cultivar-group)
MAAMDLRVAAPASVAAAARCGTSLARPWPARAVGGGGGGGGRGRRLSVRTSVATTEAAAAAVGASEDAALEARDSKTVVAVILGGGAGTRLFPLTKRRAKPAVPIGGAYRLIDVPMSNCINSGINKVYILTQFNSASLNRHLSRAYNFSNGVAFGDGFVEVLAATQTPGSEGKRWFQGTADAVRQFDWLFDDAKAKDIDDVLILSGDHLYRMDYMDFVQSHRQRGADISICCLPIDDSRASDFGLMKIDDTGRVIAFSEKPKGDDLKAMQVDTTVLGLPQDEAKEKPYIASMGVYIFKKEILLNLLRWRFPTANDFGSEIIPASAKEINVKAYLFNDYWEDIGTIKSFFEANLSLAEQPPRFSFYDANKPMYTSRRNLPPSMINNSKITDSIISHGCFLDSCRIEHSVVGIRSRIGSNVHLKDTVMLGADFYETDLERGELLAEGKVPIGIGENTKIQNCIIDKNARIGKNVTISNSEGVQEADRTSEGFYIRSGITIVLKNSIIADGLVI

SEQ ID NO: 4241 - protein, 141 aa, Legionella pneumophila subsp. pneumophila str. Philadelphia 1
MAKELTLSIIKPDAVAKSVIGEIYTRFEKAGLDIVAAKMTQLSREQAESFYDIHRARPFFKDLVDFMISGPVMIQVLKGENAVAKNREIMGATNPKEAAPGTIRADFADSIDANAVHGSDSLENAAREIAFFFEQHELCNR

SEQ ID NO: 4242 - protein, 321 aa, Antirrhinum majus
MVRSPCCDKVGVKKGPWTVDEDQKLLAYIEEHGHGSWRSLPLKAGLQRCGKSCRLRWANYLRPDIKRGPFSLQEEQTIIQLHALLGNRWSAIASHLPKRTDNEIKNYWNTHLKKRLTRMGIDPVTHKPHTHNILGHGQPKDVANLNHIAQWESARLQAERRLVRESRLAQNNNKIGTIQRRLTWPLCLDNEQSNHYHSALLNSTSAVGLNQDNSFTNYSARPDNNNIYDDYEVNNIMGMIEFNNNSNYFADSLRLPGFVEGITDISSSNIVLGAGVLPSNSDNVVGYFEENWSSVLNNVASSSSMDSPDVLVNASSSYKMY

SEQ ID NO: 4243 - protein, 389 aa, Sulfolobus tokodaii str. 7
MIQKEKKLLMHVGPVNILDRVLYAGLKNNVGFTSQEFVEAFQFSLKKTRELFQADNTYQPFLIPGGGTSAMESVTSLLKEGEKVLVVTNGVFGDRWINIFRKYPVKVNVLSAEPGYYVEPETVEKEVKKDKYTLVTFTHVETSTGVRQPIKDSVKAVRDYVDLVVVDGVSSVGAEEVKAKDWRVDVYLTASQKALGVPPGLGILVLSERAMERLKDEKSIAGYYLDLRNWLPVMNSMENGKASYFSTPPVHTILMLSEALKIIIDEEGLESRIKRHEKVASAIRAGIEGMGLEIVAKKPEAYSNTVTGVVVKKVNAGNVLSEIVSEGVELAPGVHPKLQGKYFRIGHMGWVTENDAIVTIASIERVLNKLGEEIRLGEGIKATQLYLAK

SEQ ID NO: 4244 - protein, 300 aa, Solanum tuberosum
MAAITQQPRTLTTKEADIQLMLAAEVHLGTKNCDFQMERYVFKRRNDGIYIINAGKTWDKLHMAARVIVSIENPQDIIVQSARPYGQRAVLKFAQYTGAHAIAGRHTPGTFTNQLQTSYSEPRLLILTDPRTDHQPIKEAALGNIPTIAFCDTDSPMRYVDIGIPANNKGKHSIGVLFWILARMVLQMRGTISAGPKWDVMVDLFFYREPEEAKDQQEEEVPAIADYAEYGGAALGGDWTSSQIPDAQWAADGATSVPVATGGWSGEAVAEGGWDAAAAPPAPVGVPEVTPTPATAAGWE

SEQ ID NO: 4245 - protein, 311 aa, Mycobacterium bovis AF2122/97
MRRARRRAQAGLPGSCARRCGALVAGPRLARMRIALAQIRSGTDPAANLQLVGKYAGEAATAGAQLVVFPEATMCRLGVPLRQVAEPVDGPWANGVRRIATEAGITVIAGMFTPTGDGRVTNTLIAAGPGTPNQPDAHYHKIHLYDAFGFTESRTVAPGREPVVVVVDGVRVGLTVCYDIRFPALYTELARRGAQLIAVCASWGSGPGKLEQWTLLARARALDSMSYVAAAGQADPGDARTGVGASSAAPTGVGGSLVASPLGEVVVSAGTQPQLLVADIDVDNVAAARDRIAVLRNQTDFVQIDKAQSRG

SEQ ID NO: 4246 - protein, 122 aa, Citrullus lanatus var. lanatus
LSRLPGGPEVPFHPGREDKPEPPPEGRLPDATKGSDHLRDVFYTMGLSDQDIVALSGGHTLGRAHKERSGFEGPWTSNPLIFDNSYFTELLSGEKEGLLQLASDKALLSDPVFRPLVEKYAR

SEQ ID NO: 4247 - protein, 591 aa, Zea mays
MCGILAVLGVAEVSLAKRSRIIELSRRLRHRGPDWSGLHCHEDCYLAHQRLAIIDPTSGDQPLYNEDKTVVVTVNGEIYNHEELKAKLKTHEFQTGSDCEVIAHLYEEYGEEFVDMLDGMFSFVLLDTRDKSFIAARDAIGICPLYMGWGLDGSVWFSSEMKALSDDCERFITFPPGHLYSSKTGGLRRWYNPPWFSETVPSTPYNALFLREMFEKAVIKRLMTDVPFGVLLSGGLDSSLVASVASRHLNETKVDRQWGNKLHTFCIGLKGSPDLKAAREVADYLSTVHHEFHFTVQEGIDALEEVIYHIETYDVTTIRASTPMFLMSRKIKSLGVKMVISGEGSDEIFGGYLYFHKAPNKKEFHEETCRKIKALHLYDCLRANKATSAWGVEARVPFLDKSFISVAMDIDPEWKMIKRDLGRIEKWVIRNAFDDEERPYLPKHILYRQKEQFSDGVGYSWIDGLKDHASQHVSDSMMMNAGFVYPENTPTTKEGYYYRMIFEKFFPKPAARSTVPGGPSVACSTAKAVEWDASWSKNLDPSGRAALGVHDAAYEDTAGKTPASADPVSDKGLRPAIGESLGTPVASATAV

SEQ ID NO: 4248 - protein, 453 aa, Arabidopsis thaliana
MDGVSSLPNELLCHILSFLTTKEAALTSILSKRWRNLIAFVPNLYIDDTVFLHPEEGKRDRPEIIQSFMDFVDRILALQGNYPIKKCSLKCLTEVDSVRVDAWISNVLARGVTDLDLLIILDCESDDNYRLSPKCLQSSTLVSLKIDGGIDIARVDNFDILLLALPALEELALVDVIWKDEDVIVSSPSLKTLTIYDIYCFSNLSFDTPSLVYFKYYGCVPQDYPLVNMKNLFDARIIFMLQLPGAREPDDDHWFDQNVALRYSNVWKLFLGLQNVPNLYLSPDTLKVLSLYCESMPVFKNLKSLAIKSGKERGWQAIPVLLRNCPHLETLVIEGVLHNVTDKCGDACDCISREDKGRSLTSCPVKMLEIRGFRGTMKEMTMMKHFLDYFLCLKAMNIYVEENDPTELRFPEVSKCIMQMMEEYNKLSSCNVELLVTDYFYFSEKWTAKGRIL

SEQ ID NO: 4249 - protein, 341 aa, Pseudomonas fluorescens Pf-5
MLPTSTAGSLPKPSWLAQPETLWSPWKLQEEELVEGKQDALRLSLQEQQQAGIDIVSDGEQTRQHFVTTFIEHLSGVDFAKRETVRIRDRYDASVPTVVGAVSRQKPVFVEDAKFLRQQTEQPIKWALPGPMTMIDTLYDSHYKSREKLAWEFAKILNQEARELEAAGVDIIQFDEPAFNVFFDEVNDWGVATLERAIEGLKCETAVHICYGYGIKANTDWKKTLGSEWRQYEEAFPKLQKSSIDIVSLECHNSHVPMDLIELIRGKKVMVGAIDVASNTIETPEEVADTLRKALQFVDADKLYPCTNCGMAPLSRGVARGKLKALSAGAEIIRRELSNLR

SEQ ID NO: 4250 - protein, 361 aa, Mycobacterium avium subsp. paratuberculosis K-10
MSKSHHHRSVWWSWLVGVLTVVGLGLGLGSGVGLAPASAAPSGLALDRFADRPLAPIDPSAMVGQVGPQVVNIDTKFGYNNAVGAGTGIVIDPNGVVLTNNHVISGATEISAFDVGNGQTYAVDVVGYDRTQDIAVLQLRGAAGLPTATIGGEATVGEPIVALGNVGGQGGTPNAVAGKVVALNQSVSATDTLTGAQENLGGLIQADAPIKPGDSGGPMVNSAGQVIGVDTAATDSYKMSGGQGFAIPIGRAMAVANQIRSGAGSNTVHIGPTAFLGLGVTDNNGNGARVQRVVNTGPAAAAGIAPGDVITGVDTVPINGATSMTEVLVPHHPGDTIAVHFRSVDGGERTANITLAEGPPA

SEQ ID NO: 4251 - protein, 281 aa, Nicotiana tabacum
MVRAPCCEKMGLKKGPWTPEEDQVLVSYIQTNGHGNWRALPKLAGLLRCGKSCRLRWTNYLRPDIKRGNFTREEEDSIIQLHEMLGNRWSAIAARLPGRTDNEIKNVWHTHLKKRLKNYQPPQNSKKHSKNNLDSKAPSTSQTFNNSDNFSNIQEDINGPVTGPNSPQRSSSEMSTVTADSTAMTTITIDDQNMFKQLDEMNSSESFIPEIDESFWTNDLSTGDNSNFDMEGTGEELQVQFPFSSVKQESMDMVGTKLEDDMDFWYNVFIKSGDLLDLPEF

SEQ ID NO: 4252 - protein, 590 aa, Mycobacterium avium subsp. paratuberculosis K-10
MNDAREAVEHHPEEGSHVQDGVVEHPEAEDFDNAAALPTDPTWFKHAVFYEVLVRAFFDANADGAGDLRGLLAQLDYLQWLGIDCIWLPPFYDSPLRDGGYDIRDFYKVLPEFGTVEDFVALLNAAHERGIRVITDLVMNHTSESHPWFQESRHDPDGPYGDFYVWSDTSDRYADARIIFVDTEESNWTFDPVRRQFYWHRFFSHQPDLNYDNPAVQEAMIDVIRFWLGLGIDGFRLDAVPYLFEREGTNCENLPETHAFLKRVRKVVDDEFPGRVLLAEANQWPADVVEYFGDPSTGGDECHMAFHFPLMPRIFMAVRRESRFPISEILAQTPQIPEMAQWGIFLRNHDELTLEMVTDEERDYMYAEYAKDPRMKANVGIRRRLAPLLDNDRNQIELFTALLLSLPGSPVLYYGDEIGMGDVIWLGDRDGVRTPMQWTPDRNAGFSKANPGRLYLPPSQDPVYGYQAVNVEAQRDTSTSLLNFTRTMLAVRRRHEAFAIGTFEELGGSNPSVLAFVRQVSNDGDTVLCVNNLSRFPQPIELNLQHWSGCIPVELTGHVEFPRIGHLPYLLTLPGHGFYWFQLTACEEDT

SEQ ID NO: 4253 - protein, 247 aa, Solanum tuberosum
MLAVFEQSIGKPPSELSTQKKEAKTEEEIAESFKSWKPDSTFYHLSNGNFMAFSHENENPLHPRSIVVMDDIFCIFSGGLDNTFDLRKHYGLSRQATEAMIMVEAYKVLRDRAPYPPDQVIKELEGKFAFILFDSKASTLFLARDRDGSVPLHWGIATDGSLVCSDDSEFIQASCGKLYTPFPPGCIFISDTGLISFDHPMHKVKGIAREDDEGNVNAVIFQVDLYTKLHSIPRRGSAANWGWCYYG

SEQ ID NO: 4254 - protein, 128 aa, Acinetobacter sp. ADP1
MAYSEKVIDHYENPRNVGILDKNAENVGTGMVGAPACGDVMRLQIQVNNDGVIEEARFKTYGCGSAIASSSLVTEWLKGKTLDQAQAIKNIDIANELALPPVKVHCSVLAEDAIKAAIEDYRNKRSKA

SEQ ID NO: 4255 - protein, 399 aa, Pseudomonas aeruginosa UCBPP-PA14
MAWLEEVADDLRSLRQDIHAHPELGFEERRTAALVAECLRGWGYEVHEGIGRTGVVGVLRQGDGTRRLGLRADMDALPIVEATGLGYSSCHGGRMHACGHDGHTAMLLGAARYLAATRRFDGTLVLIFQPAEEGQGGAEAMLADGLLERFPCDALFGMHNMPGLEAGHLGFRAGPMMASQDLLSVTLEGVGGHGSMPHLSVDPLLAASSAVMALQSVVARNVDPQKAAVVTVGALQAGEAANVIPQRAVLRLSLRALDGQVREQVLQRVRQIIELQAASYGCQASIEHYPAYPVLVNSVEETEFARQVGVELAGAEQVDGATPKLMGSEDFAWMLQRCPGSYLFIGNGRGRPMVHNPAYDFNDDILVRGAAYWGALAETWLAAPAASGLRLTAANNGAA

SEQ ID NO: 4256 - protein, 240 aa, Triticum aestivum
VHEMMLNGVLQVHKPPINFAAYGEGILLTPANRSDACVKYSDVDENGIVHMMLCRVIMGNVEIVHPGSNQHRPSSDHFDSGVDDLKNPQHYIVWDMNMNRHIYSEFVVIVKLPSKTKDSFVSQEECQNSSDLSLVLNSSSPDCISEEMNLEAPPALGGGCAAPMLGDSMEKAPSSPWMPFSMLFAAISTKVSPENMDVIIGCYEEFKSKKISRGELVKKLRHVVGDRVLISTIMRLQDKV

SEQ ID NO: 4257 - protein, 249 aa, Mycobacterium bovis AF2122/97
MANTGSLVLLRHGESDWNALNLFTGWVDVGLTDKGQAEAVRSGELIAEHDLLPDVLYTSLLRRAITTAHLALDSADRLWIPVRRSWRLNERHYGALQGLDKAETKARYGEEQFMAWRRSYDTPPPPIERGSQFSQDADPRYADIGGGPLTECLADVVARFLPYFTDVIVGDLRVGKTVLIVAHGNSLRALVKHLDQMSDDEIVGLNIPTGIPLRYDLDSAMRPLVRGGTYLDPEAAAAGAAAVAGQGRG

SEQ ID NO: 4258 - protein, 292 aa, Helicobacter hepaticus ATCC 51449
MAKNNKTQVILNEFFTLNNGNKIPKLGLGTWRIDDNVVEAAVREAFKVGYRHIDTAQAYGNERGVGEAVRKSKIKREELFITSKIRAEYKDYKSASASIDTSLKTMKLDFIDLMLIHSPQPWNSFRKGDYFKENVEVYNALEDAQKAGKVRSIGVSNFLQKDLENILKNCKTKPAANQILCHIGNTPFTLLDYCKKQNILAEAYSPIAHGELLKDPRVIELAKKYNVSPAQICIRYTLELGLVSLPKSKTPKYIAENAQVDFTFSKADLQTLKKLTFKDYGEHSYFPVFGGK

SEQ ID NO: 4259 - protein, 1072 aa, Vibrio vulnificus CMCP6
MTESISLTLTNNESSRFLIRQRLLSILQAFGYDACRCDIHMLRLGEFVRITLADIQRFTLSFELDDDSLKVILASSELDPQTCSFPACVHTFQREKAIGVSIPSLIPLSDEILNQLTQFLAKPSRDELMSELKAKNQELAVHQAGLEKEIELRTADLKASEELSRTIIDGAPSSVAIVDESLSISLWNSTAQNVYGYSSEEATGENILTLLNMSLPDALSHVLSAPLALQNQPDVEGGFFEVETTTKEGHMVPIDLGVSIFELNGACHAALFLRDVTSRKAVEKELNDAKAKAEEAVEVKSMFLANMSHEIRTPMNAIIGMSHLALKTDLTPKQHDYVSKIHSSATLLLGIINDILDFSKIEAGKLSIETTEFYLDDVFHNVSMVTGQKAFEKGLELIFDLPRETPRCLLGDPLRLGQIIINLVNNSVKFTEKGEITVSVHHIRNVEDLVELEFRISDTGIGMTDKQMKSLFTAFTQADGSTTRKYGGTGLGLSICRRLVELMGGQIRVESEAGKGSHFIFNVLVKADPANSSAPSIVPQSLEKIRILVVDDNEHALEIMQEMLSTLPGKVALANSGQQAVDCIRKASEQREKFDLIFMDWNMPEMDGIETSRLIRESFASEYQPQIVIVTAYDKEDVLDATNDLDIAGFLSKPVGQSYLFDLLVELFGRDRNPTTQIRKKELPTHDSKNDLKGLKVLLTEDNEINQQIAVELMEGNGLLVTVANNGQEALEHLEAMEKGESHFDIVFMDLQMPVMDGYEASHRIRANSSYDTIPLIAMTAHAMVEERERCLNLGMNDHISKPIDPEILFNTIRKWCPRTLNEKDESPVDVEQSQTQQLDSSIESAATPKSTERAAAEKRTLETLESLDYKNGLLRVAGNQTLYRRLLSQLMDKEISAPERLTIALDKQDTEQAIIIAHSLKGSASNLGAIRLSDIASRLEMAIQHGKERAEIDKLNKELDGYLEHFFQDLALALGRPKPSSDKRLELKDEELMIIHTLDSLLDSLDAYAIEFLDEHYVLLNTLLKSEDFEACCRCVNDCDFESASKSLRKAVSIYPLDLGKLSGEKNGRES

SEQ ID NO: 4260 - protein, 448 aa, Pseudomonas aeruginosa PAO1
MNSPSLPAVERLDVQAFINAQPLSPYQWRIVLLCFLIVFLDGLDTAAMGFIAPALTQDWGIDRASLGPVMSAALIGMVFGALGSGPLADRYGRKLVLVAAVFLFGLFSLASAYSTNVEQLLALRFLTGLGLGAAMPNATTLLSEYTPERLKSLLVTSMFCGFNLGMACGGFVSAKLIPLFGWHSLLLLGGLLPLVLAVVLLFRLPESARYLVVRNRGSERVRQVLAPIAPAQVALARSFHVPEQQTVQARNVFAVIFSGTYSAGTLLLWLTYFMGLVIVYLLTSWLPTLMRDSGASLEQAAFIGALFQFGGVLSAVAVGWAMDRFNPHKVIGLFYLLAGVFAWCVGQSLGQVTLLATLVLLAGMCINGAQSAMPSLAARFYPTQGRATGVSWMLGIGRFGAILGAWIGATLLGLGWNFEQVLTALVLPAALATAAVLLKGLVSHADAG

SEQ ID NO: 4261 - protein, 200 aa, Arabidopsis thaliana
MSFTGTQQKCRACEKTVYPVELLSADGISYHKACFKCSHCKSRLQLSNYSSMEGVVYCRPHFEQLFKESGSFSKNFQSPAKPLTDKPTPELNRTPSRLAGMFSGTQDKCATCTKTVYPIEKVTVESQCYHKSCFKCSHGGCPISPSNYAALEGILYCKHHFAQLFKEKGSYNHLIKSASIKRATAAATAAAAAVAAVPES

SEQ ID NO: 4262 - protein, 368 aa, Oryza sativa (japonica cultivar-group)
MGSTAADMAAAADEEACMYALQLASSSILPMTLKNAIELGLLETLQSAAVAGGGGKAALLTPAEVADKLPSKANPAAADMVDRMLRLLASYNVVRCEMEEGADGKLSRRYAAAPVCKWLTPNEDGVSMAALALMNQDKVLMESWYYLKDAVLDGGIPFNKAYGMTAFEYHGTDARFNRVFNEGMKNHSVIITKKLLDLYTGFDAASTVVDVGGGVGATVAAVVSRHPHIRGINYDLPHVISEAPPFPGVEHVGGDMFASVPRGGDAILMKWILHDWSDEHCARLLKNCYDALPEHGKVVVVECVLPESSDATAREQGVFHVDMIMLAHNPGGKERYEREFRELARAAGFTGFKATYIYANAWAIEFTK

SEQ ID NO: 4263 - protein, 230 aa, Glycine max
MQIFVKTLTGKTITLEVESSDTIDNVKAKIQDKEGIPPDQQRLIFAGKQLEDGRTLADYNIQKESTLHLVLRLRGGMQIFVKTLTGKTITLEVESSDTIDNVKAKIQDKEGIPPDQQRLIFAGKQLEDGRTLADYNIQKESTLHLVLRLRGGMQIFVKTLTGKTITLEVESSDTIDNVKAKIQDKEGIPPDQQRLIFAGKQLEDGRTLADYNIQKESTLHLVLRLRGGDF

SEQ ID NO: 4264 - protein, 589 aa, Bacillus clausii KSM-K16
MKVAIYHRPKSEDAYAYDKDTIHIRLRTRKDDAHEVMLIYGDPYDWAGNEWVTAKKTMTQAGADGEYDYWFVEVKPPYHRLRYGFEIKAKDETIYYGESGFCDTPAKDISDYFCFPFMNQADLFTPPEWVKETIWYQIFPERFANGDHSRDPENTLAWGSAPPTATNYFGGDLQGIVDHLDYLQKLGINGIYLTPIFKAFSNHKYDTIDYLKVDPQFGDETTLKLLVDECHKRGIRVMLDAVFNHAGLYFPPFQDVLKHQQESEYRDWFHIRQFPVRAEEPPNYDTFAFTPLMPKLNTANEAVKDYLLNVATYWIKEFDIDGWRLDVANEVDHAFWREFRNRVKALKPDLYILGEIWHNAYPWLQGDQFDGVMNYPLTDAIFDFVQHGKSATTFQYAVTKHLYSYPKLVNEVQFNLLGSHDTPRILTVSGGNKKLVKLSYLLLFSFPGSPCIYYGDEIGMAGENDPGCRACMVWEEDQQDQELFQFLQKLIKIRKTHQAMGTYNTLKFYDSGTEDVLLYSTSAGGELLLFAVNRSKQEATVKLPDSLKSLAFVDVICESPLQSEELHVEGECFLFLHSVDANKCGQVDK

SEQ ID NO: 4265 - protein, 95 aa, Brassica napus
MTMDDATPSQRRSSGSSSNDAAAPLLPKSQGEEVAAYDEFNGASFSGAVFNLSTTIIGAGIMALPATMKILGLVLGIAMIVVMAFLTDASIEFLL

SEQ ID NO: 4266 - protein, 377 aa, Magnetococcus sp. MC-1
MREATEAWQRVAAAQRIVVKIGSNLLTTKDGVCEDWIAARCAEIAALMGRGKQVVVVTSGSVAAGASRLGLGRRPATLPEKQAAAAAGQGKLMQIYEQAFNTHGLHTGQILLTRDDVANRRRYLNARDTLETLLTLGLVPVVNENDTVVVEEIRFGDNDTLAALVAGLVEAELLVLLSDVDGLYSADPRKDERAQRIELVVEVTPEIEALAGGTGSEVGSGGMVTKLRAAKMAARTGCMTVLANGFQADPIGAVMGGGVGTLFLSLGDAISSRKRWIANGLTCEGSLFLDEGAVAALLKGKSLLARGVVAVEGVFDRGAALYCCDVQGRRIAKGLVNYRSDHMEQIKGKHSWEIEAALGFIIDEEVMHRDDMVQLVK

SEQ ID NO: 4267 - protein, 423 aa, Magnetococcus sp. MC-1
MSNDSIKLIDEIGKKARKAARQLAWLDSGSKNATLHAMADALIACKKILQVENEKDLEAGEKNGLTDAMLDRLRLTDQVIASMAEGIRQVAALPDPIGEINHMRRLANQLQVGKMRVPLGVIGIIYESRPNVTADAAALCVKSGNAVILRGGSEAFHSNRAIAAALAQGMEKGRVPSDAVQVVSTTDRAAVSALLKADQYVDIIIPRGGKGLIQRVMDEATIPVIKHLDGICHTYIDADADPAKAIDITFNGKMQRTGVCNATETLLIHEKVAKTILPALAKRLNQADCVLRGCPETIRLVGEVAPVIPATEEDWDTEYLAAILAIRVVKNLEEAMDHIDAHSSRHTEVIVTENHATAMRFVREVDASAVMVNASSRFNDGFQFGLGAEMGISTDKLHVRGPVGLEGLTCEKWIVLGDGQLRS

SEQ ID NO: 4268 - protein, 328 aa, Silicibacter sp. TM1040
MPRERLSVVVTRRLPEPVETRLSELFDVRLRTDDTPMTRTELAAAMKEADVLVPTVTDTIDAGLLGQAGERLRLIANYGAGVDNIDVATARQRGILVSNTPGVLTDDTADMTMALIMAVVRRIPEGLAIMQRGDWEGWSPTAMLGGRLAGRRLGILGMGRIGQAVARRARAFGMQVHYNNRRRLRPEVEEELEATWWESLDQMVARMDVISIHCPSTPSTFHLMNARRLKLLKPDAVIVNTSRGEVIDENALTRGLRAGEIAGCGLDVYEHGTTVNPRLRELPNVVLLPHMGSATIEGRIEMGEKVLLNIKTFEDGHRPPDQVVPAML

SEQ ID NO: 4269 - protein, 197 aa, Nicotiana tabacum
MSASRFIKCVTVGDGAVGKTCLLISYTSNTFPTDYVPTVFDNFSANVVVNGSTVNLGLWDTAGQEDYNRLRPLSYRGADVFILAFSLISKASYENVSKKWIPELKHYAPGVPIVLVGTKLDLRDDKQFFIDHPGAVPITTAQGEELRKTIGAPAYIECSSKTQQNVKAVFDAAIKVVLQPPKTKKKKGKSQKSCSIL

SEQ ID NO: 4270 - protein, 492 aa, Photorhabdus luminescens subsp. laumondii TTO1
MANYFNTLNLRQQLAQLGKCRFMAREEFVDETGYLKGKKVVIVGCGAQGLNQGLNMRDSGLDIAYALRKEAIEEKRASWRKATENGFQVGTYEELIPQADLVINLTPDKQHSSVVSAVQPLMKEGAALGYSHGLNIVEVGEQIRKDITVVMVAPKCPGTEVREEYKRGFGVPTLIAVHPENDPKGEGMAIAKAWAAATGAHRAGVLESSFVAEVKSDLMGEQTILCGMLQAGSLLCYDKLVADGAEPGYAGKLIQFGWETITEALKQGGITLMMDRLSNPAKLRAYALSEQLKEMMTPLFQKHMDDIISGEFSSGMMADWANDDKKLLGWREETGNTSFENSPEYDGKISEQEYFDHGVLMVAMVKAGVELAFEIMVDTGIIAESAYYESLHELPLIANTISRKRLYEMNVVISDTAEYGNYLFSHVAVPLLKEKFMGSLQAGDLGKPVVDNGIDNAQLRDVNEAIRHHPIEVVGRVLRGYMTDMKRIAVGG

SEQ ID NO: 4271 - protein, 474 aa, Oryza sativa (japonica cultivar-group)
MPPQEPAPAANGAAPAPAPAAAAAAAGGKRRKRGRWAAAAGVGALLVALLAVAVSSRSFPAASSSSRGGDCGCPGTRKYTGMVEDCCCDYETVDAINEEVLHPILQELVTLPFFRYFKVKLWCDCPFWPDDGMCRLRDCSVCECPENEFPEPFKKPYSGLSPDSMICQEGKPQATVDRTLDAKVFKGWIETDNPWTYDDETDNAEMTYVNLQLNPERYTGYTGDSARRIWDSVYKENCPKYPSEEMCQEKKALYKLISGLHSSISVHIAYDYLLDESANLWGHNLPLLYDRVLKYPERVQNLYFTYLFVLRAVTKAADYLEQAEYNTGNPEEDLKTQSLVKQLLYNPKLRSACPLPFDEAKLWQGENGPELKQEIQKQFRNISAIMDCVGCEKCRLWGKLQVLGLGTALKILFSVDGENHLNQSLQLQRNEVIALVNLLNRLSESVNFVHEKGPSIEDVIKQQSSSTVKPVFPI

SEQ ID NO: 4272 - protein, 554 aa, ASPERGILLUS NIDULANS FGSC A4
MEFPEASIFPLLKDKVAIVTGGAQGMGKATASVFLRAGAKVVIADIKAEQGEQVASELSSLGEVRFVKTDISKSEDVQNLVAQTVGFFGRLDVAINNAAMTPDKTVLIETDEEYWRRLVDVNLTGTALCCKYEMQQMRKQGSKGSIVNITSINAFMPQPNMPAYTSTKHALLGLTKHAATEGGPLGIRVNAVAPGAIFSEMSAKALEIMGTTHDEFAPKVSSLNRFGQPHEVAQASLWLASDSSSLSNGLPVPRTYEGKLALVTGSARSTSSLRTLVFAFLLNQWLTQPGIGACIVRNLASKGCNVIMNYATTSSDKAAEWLAQELTETQHIRALPIRADISKEEECERLISTAKEFFTGDGESRFHIDILVHNAAILFLGPLESVDPVEFHRIYEVNVLGSILLTAVCKPYLPTDRSGRIVMLSSINSKVGAENTTLYSGTKGTIEAMTRVWCRELADRTTVNAINPGLAMTDMYLSAPDEVKVDLAKWNPLTPLVPVRETDSEEVKKLGEKFGGRAAYAEEIAGFVATICNPEFGWCTGSIISAKEGLSFSI

SEQ ID NO: 4273 - protein, 396 aa, Shewanella sp. MR-4
MFNSLVAMPADPILGLLTQYREDSHPQKVDLGVGVYKDPAGNTPILNCVKKAEKFRLDTETTKVYIGPTGSPQFNTLITELAFGSDHSAIIANRIRTVSTPGGTGALRVAGDFIKRCNPNAVLWVSDPTWANHIGLFEAAGLTVKTYPYYDYDTKSLKFDEMLSALAQIGPNDVVLFHACCHNPSGMDLTAEQWDKVVALTKEQGFTPLIDMAYQGFGDGVDIDAYGVRKMAAAVDNMILCSSCSKNFGLYRERIGSCSVVAKDANTASIAQSVLLYVVRCLYSMPPAHGAAIVETILGSAELKQEWLDELKVMRDRINGNRAILVENLKTNGVDRDFSFIARQKGMFSFLGVNPEQVARLQKEFSIYMVGSSRISIAGISEDNVDYLAKSIAEVL

SEQ ID NO: 4274 - protein, 504 aa, Arabidopsis thaliana
MASALSCSASDLIPLLSGGANATAAAAAAEYICGRFDTVAGKFTDAAYAIDNTYLLFSAYLVFAMQLGFAMLCAGSVRAKNTMNIMLTNVIDAAAGGLFYYLFGFAFAFGSPSNGFIGKHFFGMYDFPQPTFDYPYFLYQWTFAIAAAGITSGSIAERTQFVAYLIYSSFLTGLVYPIVSHWFWSSDGWASPARSENLLFQSGVIDFAGSGVVHMVGGIAGLWGALIEGPRIGRFGVGGKPVTLRGHSATLVVLGTFLLWFGWYGFNPGSFATIFKAYGETPGSSFYGQWSAVGRTAVTTTLAGCTAALTTLFGKRLIDGYWNVTDVCNGLLGGFAAITSGCSVVEPWAALVCGFVAAWVLMGCNRLAEKLQFDDPLEAAQLHGGCGAWGIIFTGLFAEKRYIAEIFGGDPNRPFGLLMGGGGRLLAAHVVQILVITGWVSVTMGTLFFILHKLKLLRIPAEDEIAGVDPTSHGGLAYMYTEDEIRNGIMVRRVGGDNDPNVGV

SEQ ID NO: 4275 - protein, 634 aa, Frankia sp. CcI3
MRTHHSVEGHSTKAPSSTKRDKISYFCPRSSVQRGHRSDAGEGNENTEGNEGAEASKDNSAGAGDAGELDRPNGADGRGRSPGQDGTWWRRAVLYEVYLRSFADSDGDGIGDLEGLRRHLPVLAELGVDAIWITPFYSSPMADHGYDVADHRGVDPLFGDLADLDAVLADAAETGLAVLIDLVPNHSSSAHPAFQAALASAPGSPERGLYIFRDGRGPGGEQPPNNWESVFGGSAWTRVADGQWYLHLFDAEQPDWNWDHPAVRADHAATLRFWLDRGVDGFRIDVTHGLVKDTELRDNPPGARLAPDSGFREEHEPRVWDQDGVHEIYREWRAITDEYTARDGRPRVLIGETWVRDPARLARYVRPDELHLTFSFSLLSIPWSAAAWRAAIDAERAALTAVGAPGTWVLANHDVVRPATRYGGGPTGTRRARAALLTLLALPGTAVLYQGDELALPQAEVPPAARRDPIWTRSGGTSPGRDGARIPLPWSGDAPPYGFTSAGADPWLPQPADWADLAVLAQAADPMSTWLLVRSALALRRALPHLRGDDLRWRNDSPAGCLAFDRPAPAGSSVPPTPPTSVGSASMTCVTTTEGEATIPLPGRLVLASGPVGYDGATLTLPPDTTAWIAPRDG

SEQ ID NO: 4276 - protein, 548 aa, Cryptococcus neoformans var. neoformans B-3501A
MGRKKIEIRPLTDERNRNVTFLKRKAGLMKKAWELSVLCAADVSIIIFSAAGKAFEFSSKELDSEIDRYHDYEGMIERRRAAEFAAMALAGEDDDDDEDDDTSRRGSASKSKAAAAANGNPPPTRSLKGKETFKHRTVRPGEDRKRKRQDKKQRRKSEPSEKRSFIDEIMSGGESDSEEEEKPRRRSNAEHGNGKRMSSLREEDELADDVPHASRQSLDGLQYALSMHASQPSFERFASRHRSPHAEFLAPAASSSQTPLTTPTIHRHPSDTIPYPMTNSLAAAPMQASLGVPQLGVHPSYSHNPNGHPGYLGYPKSLLGMQASYLPRQPFADAPQPSPYYGAQGPGSHPGGPPQPGLPTQMPGGQPIQWDQNLLARYAEFQLQQNHQRQQRILLERQRQQLAELGVPLDEKNLLDEIFGGVGASRSVSGGADPSGAGPGSALLTGLGNTASEGREEGNSLEFIWPLGNNAAAAAPISDEDRNDVSSRSVISAGHHQAAYGYGKPHVQQQKTGWGFDGAGFESMEEVASGSGVGLPSPVSAGAGGGRK

SEQ ID NO: 4277 - protein, 511 aa, Arabidopsis thaliana
MNAAVFSPSALSLPISFSKTRSSFLSRKKGVKGEFRVFAVFGDESGLVEKKSQWRPLFDVEDPRSKAPPYKGKFLDVNQAIEVARFDIQYLDWRARQDLLTIMILHDKVVDVLNPLAREYKSIGTVKKELAGLQEELSKAHQQVHISEARVSTALDKLAHMEELVNDRLLPGRVVTELDKPSSSTTASAVELDREKTNTGAKSLNVSGPVPPYSPHLKNFWYPVAFTADLKHDTMVPIECFEQPWVIFRGEDGKPGCVRNTCAHRACPLDLGTVNEGRIQCPYHGWEYSTDGECKKMPSTKLLKVKIKSLPCLEQEGMIWIWPGDEPPAPILPSLQPPSGFLIHAELVMDLPVEHGLLLDNLLDLAHAPFTHTSTFAKGWSVPSLVKFLTPTSGLQGYWDPYPIDMEFKPPCIVLSTIGISKPGKLEGKSTQQCATHLHQLHVCLPSSKNKTRLLYRMSLDFAPILKNLPFMEHLWRHFAEQVKVHHKWIDHLQPSSQSCFLSYRFYISRS

SEQ ID NO: 4278 - protein, 410 aa, Mycobacterium bovis AF2122/97
MTVFSALLLAGVLSALALAVGGAVGMRLTSRVVEQRQRVATEWSGITVSQMLQCIVTLMPLGAAVVDTHRDVVYLNERAKELGLVRDRQLDDQAWRAARQALGGEDVEFDLSPRKRSATGRSGLSVHGHARLLSEEDRRFAVVFVHDQSDYARMEAARRDFVANVSHELKTPVGAMALLAEALLASADDSETVRRFAEKVLIEANRLGDMVAELIELSRLQGAERLPNMTDVDVDTIVSEAISRHKVAADNADIEVRTDAPSNLRVLGDQTLLVTALANLVSNAIAYSPRGSLVSISRRRRGANIEIAVTDRGIGIAPEDQERVFERFFRGDKARSRATGGSGLGLAIVKHVAANHDGTIRVWSKPGTGSTFTLALPALIEAYHDDERPEQAREPELRSNRSQREEELSR

SEQ ID NO: 4279 - protein, 433 aa, Arabidopsis thaliana
MNAAVFSPSALSLPISFSKTRSSFLSRKKGVKGEFRVFAVFGDESGLVEKKSQWRPLFDVEDPRSKAPPYKGKFLDVNQAIEVARFDIQYLDWRARQDLLTIMILHDKVVDVLNPLAREYKSIGTVKKELAGLQEELSKAHQQVHISEARVSTALDKLAHMEELVNDRLLPGRVVTELDKPSSSTTASAVELDREKTNTGAKSLNVSGPVPPYSPHLKNFWYPVAFTADLKHDTMVPIECFEQPWVIFRGEDGKPGCVRNTCAHRACPLDLGTVNEGRIQCPYHGWEYSTDGECKKMPSTKLLKVKIKSLPCLEQEGMIWIWPGDEPPAPILPSLQPPSGFLIHAELVMDLPVEHGLLLDNLLDLAHAPFTHTSTFAKGWSVPRFLLTLITLFSAKMKLGLSFLFLVLQFGEVFNTYLGSPRILGSISNRYGI

SEQ ID NO: 4280 - protein, 470 aa, Pseudomonas fluorescens Pf-5
MSTSNQQPQPAAPRSTQDYQAADAAHHIHAFLDQKALNAEGPRVIVRGEGLHLWDNDGKRYLDGMSGLWCTNLGYGRKDLAAAASAQLEQLPYYNMFFHTTHPAVVELSELLFSLLPGHYSHAIYTNSGSEANEVLIRSVRRYWQILGQPQKKVMIGRWNGYHGSTLAATALGGMKFMHDMGGLIPDVAHIDEPYWFAHEGNLTPAEFGLRCARQLEEKILELGAENVAGFIAEPFQGAGGMIFPPESYWPQIQRICRQYDVLLCADEVIGGFGRTGEWFAHQHFGFEPDTLSIAKGLTSGYIPMGGLVLSKRIAQVLVEQGGVFAHGLTYSGHPVAAAVAIANLKALRDEGVVSQVKNDTGPYLQQCLREVFGNHPLIGEIQGTGLVAALQFAEDKASRKRFANENDIAWRCRTLGFEEGVIIRSTFGRMIMAPALVASRGDIDELVDKTRRAVERTAGEIEAGTLPSS

SEQ ID NO: 4281 - protein, 329 aa, Solanum tuberosum
MAVNGSAPSSGLIVSFGEMLIDFVPTVSGVSLAEAPGFLKAPGGAPANVAIAVTRLGGKSAFVGKLGDDEFGHMLAGILKTNGVQADGINFDKGARTALAFVTLRADGEREFMFYRNPSADMLLTPDELNLDLIRSAKVFHYGSISLIVEPCRSAHLKAMEVAKEAGALLSYDPNLRLPLWSSEEEARKQIKSIWNYADVIKVSDVELEFLTGSNKIDDECAMSLWHPNLKLLLVTLGEKGCNYYTKKFHGSVGGFHVKTVDTTGAGDSFVGALLTKIVDDQAILEDEARLKEVLRFSCACGAITTTKKGAIPALPTVSEVLTLLKGGA

SEQ ID NO: 4282 - protein, 339 aa, Triticum aestivum
  misc_feature (216)..(216): Xaa can be any naturally occurring amino acid
  misc_feature (293)..(293): Xaa can be any naturally occurring amino acid
  unsure (1)..(339): unsure at all Xaa locations
HYRTSLYKKAGWYRSGIPGISSTHASGCGHCKKLAPEYEKLAASFKKAKSVLIAKVDCDEHKSVCSKYGVSGYPTIQWFPKGSLEPKKYEGQRTAEALTEYVNSEAATNVKIAAVPSSVVVLTEETFDSVVLDETKDVLVEFYAPWCGHCKSLAPIYEKVASVFKQDEGVVIANLDADKYTSLAEKYGVSGFPTLKFFPKGNKAGEEYESGRELDXLFVKFINEKSGTSRDSKGQLTSEAGLVASLDALVKEFHSAADDKRKEILSKIEEEAAKLSGPAVKHGKIYVNVAKEXMQKGSDYTKKETERLYSLGWRSRSVLSKADEIRHQGKNILSSLLPS

SEQ ID NO: 4283 - protein, 270 aa, Triticum aestivum
  misc_feature (246)..(246): Xaa can be any naturally occurring amino acid
  unsure (1)..(270): unsure at all Xaa locations
MVNVPNIKLNSGFDMPQIGFGLWKVDDNCAEVVYNAIKAGYRLLDGACDYGNEKACGEGVARAIKEGIVKREDLFIVSKLWQTYHDKKNVEPITRRQLADWQIDYFDLFLIHFPVALEYVDPEVRYPPGWHYDDAGTEIRWSKATNQETWEGMEDLVEKGLAKSIGISNFQAQGIYDMLKYAKIRPATLQVELHPYHQQSELVSLAKAEGIALTAYSSFGPTGFIELDMDIAKSASPLMQHEVFTXLASKYNKTFRPVLLRWATQQGLAV

SEQ ID NO: 4284 - protein, 287 aa, Solanum tuberosum
MTKEVEAVHEQAAEYSAKDYTDPPPAPLIDFEELTKWSLYRAVIAEFIATLLFLYITVLTVIGYKHQADVDAGGDVCGGVGLLGIAWAFGGMIFVLVYCTAGISGGHINPAVTFGLFLARKVSLIRAVLYMVAQCLGAICGVGFVKAFQSAYYNRYGGGVNVMAPGHTKGVGLAAEIIGTFVLVYVVFSATDPKRSARDSHVPVLAPLPIGFAVFMVHLATIPITGTGINPARSFGAAVIFNGDKAWDEHWIFWVGPFIGAFIAAVYHQYILRAGAIKALGSFRSNA

SEQ ID NO: 4285 - protein, 525 aa, Oryza sativa
  misc_feature (178)..(178): Xaa can be any naturally occurring amino acid
  unsure (1)..(525): unsure at all Xaa locations
MNGKRKRSGGTMETRAIKCRTMQLLHELQINELGTSAKIIDAPPRRGDISTGIMRELPLDKLPEDILHHVYSLMPLKDAARAACVSHGFLRCWRRYPILILNNKTIGLIKRKLSLDDMESYAVSKIDHIIKSHSGIGVKVLKLQLFACPNISAAVLDKWFVTVIKPGIEELSLEMSFXKKRTEYNFPCSVLSNKAEGWTIQSLFLSSCAFHPTVTLGCNISLTSLHLCKVDICGEELGQFLSNSFSLERLVISECSDIVQFKVPCLMQQLKYLEVTKCQMLQVIEIDAPKLSTFIYGDVGVKISLGDPLQVKDIRLMGYNEADTVCYARTKLPSILPNIESLVVSSPNEMTSTPVVPSKFLHLKFLEIYLKELFASLPSYDFFSLVSFLDASPALETFILHVEQQFERHDSILDGEPTDLRRILHDGHANLQNVTITGFNSTKSMIELTTHILENAPSLKCITLDTANFSGKNHLAMGECSPMMRGGILEARRAFEAARRHIAGKIPSFVEYKFLEPCRHCHFGY

SEQ ID NO: 4286 - protein, 142 aa, Brassica napus
MESHNVNNSLNIDMEKDQEKAFDYSKRAQWLRAAVLGANDGLVTTASLMMGVGAIKPDVKTMVLTGFAGLVAGACSMAIGEFVSVYSQYDIEVAQMKRDNGGVIDKEKLPSPIKASTASGIADSIGAIEPLWAGAGGETCKG

SEQ ID NO: 4287 - protein, 316 aa, Yersinia pseudotuberculosis IP 32953
MKNSKQAVLIIAPVMDYLTEKLEQTFTVHKLYQVTDQAEFLAEQGKNIKGIVTRGDIGVTNEVLALLPEVQIISIFGVGTDAVDLDYTRERNIIVTTTPGVLTDDVADTALGLIIATSRRFYQASQFLRAGEWPNGSLPLSSKVTGKRLGIFGMGRIGRAIARRAVGFDMQIAYTDTVHDSSLPYQYVPDLISLAKQSDILVVAISGGKDSAGLVDKAIFAAMPNHGILINIARGSMVNQDDLISALQQQQIGGAGLDVFADEPHVPQALIEMDNVFLLPHIASATTDTRIQMSDIVFSNILAHFSGETAPTAITY

SEQ ID NO: 4288 - protein, 664 aa, Chromobacterium violaceum ATCC 12472
MEARSQALQQANVQLTEARDAAEAANRAKSEFLAVMSHEIRTPLNGVIGMTDLLQRTRLDDRQRHYVSVVHRSGEDLLAIISDILDFSKIEAGKFELDRQPFCLNLLVEEIVERLAPVAYGKGLELMCALPLMPVEVVGDGKRLGQVLTNLVGNAIKFTESGHVLAKVDRAGESDAGVTCRISVKDTGIGIAPDQQKRLFKPFSQADSSTTRRFGGTGLGLVISQRLVGMMGGRIELESEPGSGSEFHFTLTLPRASDSQLCPPAEDVARMRVLVLDDNVTNLEILEQQLASWHCRVAAFHRPREALDWLTAGNEVDLIISDMMMPEMDGLMFLGEARERLGEAAPPAIILSSAADDFQKLTGASRLARQVLTKPIRRSDLYNALLQLGSAAAKVEPAPDGHDQPRLSGRVLLVEDNLVNQELATAMLRNLGCEVELARNGEEALRLCEAGGFDLALMDCEMPVMDGWQATGAIRARERPGGARLTIVALTANAGLGERERCLQAGMDDYLSKPFTQNELGAVLSRWLSPGEEAEASAEPAGIAARDDGEWVDAGALDAIRAIQQDLLPRMLAAWMSEGPMLLAGIREAIDAVDGPALFRAAHALKNCAGSVGAQPLASLCMELERLGKGEDLAGAANLLPELDQAFGCSMAALKAVDEGSGLA

SEQ ID NO: 4289 - protein, 466 aa, Acinetobacter sp. ADP1
MFHCKGLYMSDQNDKLKNLKTSSMDRRLSIAKASLLAGTRWATASATSMFSSEAEKEKKRKKAMTEQANYLVSEIGKLKGSIVKIGQMMALYGEHFLPEEITQALNTLNNQTVALAWPAIKAHLQEQLGSKLDDLIIDHEPIGTASLAQVHRATRKSDGLELVLKIQYPGVAEAIDSDMSLFKNMLKLTRMVPQTREFDQWFDEVREMMHREVSYDIEAATTRRFAERLKTDPRYAVPQIIDAYCTTKILCMTFERGVPINSPVMLSLPQERRNKLGEASLEIAVREIFEWGEMQTDPNFGNYLVRLGNGTDIQDKIVLLDFGAIRQFDEHLLSVARNLIRAGYNHSNEEMVRAMTGYSFFDSIPESIKPDMAKVFLLATEAFSCPENNPDMPTGLMDEDNRYDWKKSQLHSRVMQQASKSMASRYFSVPPKEFMFISRKFIGAYTFMTVIEAKTNVRRMISHFVK

SEQ ID NO: 4290 - protein, 155 aa, Treponema denticola ATCC 35405
  misc_feature (35)..(35): Xaa can be any naturally occurring amino acid
  unsure (1)..(155): unsure at all Xaa locations
MGIYNYTVKDSLGNDFSFNDYKDYVILIVNTACEXGLTPHFQGLEALYKEYRDKKFLVAAFPCNQFGGQDPGTNEEIRNFAQSKYGVSFPIMAKIEVNGENTEPIFSFLKKASNGEDIKWNFAKFLVDKTGERVTAYAPTVAPEDLKKDIEKLLN

SEQ ID NO: 4291 - protein, 331 aa, Prochlorococcus marinus subsp. pastoris str. CCMP1986
MEKVLVTGASGFIAIHCIHELIKAGYLVKGSLRNMNREDEVRKSLDKDSDNHKLEFCKLDLLDNEGWDEAASDCDYLLHVASPFTIEEPKKESILIKPAVEGTLRALNASKNSSKVKKVVLTSSMAAIAYGHDKQLCSPEDWTDTTKNVGAYVKSKTIAEKAAWDFIHNDTEHSFSMTTIHPGMVFGPLLSDDNDGASAELISKMINGKFPALPDAYFTVVDVRDVAKLHVESLRKNQSDNKRIIATSPQGINIMEISNILRKNGYKKAPQNFIPTKMINSLAPFNKEMKSMAAMVNRGSYGADITETISIYNWEPISLEKTLIDMGNSIK

SEQ ID NO: 4292 - protein, 244 aa, Magnaporthe grisea 70-15
MSTQVDLSTIPISPDGENAPTSSGDKEVTVFHDSNNFNVKHPLMHKWTLWFTKPPTGKGDNWAELLKEVITFNSVEEFWGIYNNIAPVSELALKSDYHLFKEGVRPEWEDPQNKHGGKWSYSFKEKRNIPIDDIWLHTMLAAIGETLESEDDGEVMGVVVNVRKAFYRVGVWTRTTGKSIPNRGDGDVAGGKGRSPEKGRAILMDIGKRFKDVLRLPANEVLEFSGHTESAHSGSTRAKAKFTV

SEQ ID NO: 4293 - protein, 423 aa, Streptomyces coelicolor A3(2)
MSDTARTVLAGLGSVRSDLEDLYQDLHRHPELGLREHRTAKKAAESLRRSGYDVTEGVGGTGVIGVLANGDGPVVMARADMDALPVRERTGLPYASTATVTDEDGREQPVMHACGHDVHVTSLVGCARLLAGHRDDWRGTFVALFQPSEENGAGARAMVEDGLTDRSPRPDVVLAQHVLPYPAGYVGTRSGSFLSAADSLRVTVHGRGAHGSAPQASVDPVVIAASVVVRLQTVVSRELAATTPAVVTVGSIHAGSGPNVIPDRAVLELNVRTYDDATRTQVLDAIKRIVRAECEASRSPREPEFERLSTFPPTVNDEEPTRRVAEAFGVYFGDDAHTVELQTASEDMSEIPGAFGVPFTYWAIGGTDPDRYAEAARKGTVAQDIPVNHSAAFAPVVQPTLDTGVSALTVAALAWLGDGDRAA

SEQ ID NO: 4294 - protein, 725 aa, Oryza sativa (japonica cultivar-group)
MEINSSGEEAVVKVRKPYTITKQRERWTEAEHNRFLEALKLYGRAWQRIEEHVGTKTAVQIRSHAQKFFTKLEKEAINNGTSPGQAHDIDIPPPRPKRKPNSPYPRKSCLSSETSTREVQNDKATISNMTNNSTAQMAGDAALEKLTYIQKLQRKEISEKGSCSEVLNLFREVPSASFSSVNKSSSNHGASRGLEPTKTEVKDVVILERDSISNGAGKDAKDINDQEMERLNGIHISSKPDHSHENCLDTSSQQFKPKSNSVETTYVDWSAAKASHYQMDRNGVTGFQATGTEGSHPDQTSDQMGGASGTMNQCIHPTLPVDPKFDGNAAAQPFPHNYAAFAPMMQCHCNQDAYRSFANMSSTFSSMLVSTLLSNPAIHAAARLAASYWPTVDGNTPDPNQENLSESAQGSHAGSPPNMASIVTATVAAASAWWATQGLLPLFPPPIAFPFVPAPSAPFSTADVQRAQEKDIDCPMDNAQKELQETRKQDNFEAMKVIVSSETDESGKGEVSLHTELKISPADKADTKPAAGAETSDVFGNKKKQDRSSCGSNTPSSSDIEADNAPENQEKANDKAKQASCSNSSAGDNNHRRFRSSASTSDSWKEVSEEGRLAFDALFSRERLPQSFSPPQVEGSKEISKEEEDEVTTVTVDLNKNAAIIDQELDTADEPRASFPNELSNLKLKSRRTGFKPYKRCSVEAKENRVPASDEVGTKRIRLESEAST

SEQ ID NO: 4295 - protein, 481 aa, Zea mays
MVSSEMTSVTVTRAQGSKLFRGKILLPGGSSDVVPSENVEFDFSDVFGPSAVHTHTEVSVLTLGSPAPVAESNDEVYNDPDVIVKRSHSLVGPSSLVSQSLPFSKLTLHKTESPLELSECPSKGKQINQGSLSDDEFDDVKKENEGVGLDDFEVLKLVGQGAFGKVYQVRKKGTSEIYAMKVMRKDKIVEKNHAEYMKAERDILTKVDHPFVVQLRYSFQTKYRLYLVLDFINGGHLFFQLYHQGLFREELARIYTAEIVSAVAHLHANGIMHRDLKPENILLDADGHAMLTDFGVAKEFDENTRSNSMCGTVEYMAPEIVQGRGHDKAADWWSVGVLLFEMLTGKPPFVGGNRDKIQQKIVKEKIKLPTYLSSEVHSMLKGLLHKEAGRRLGSGPGGSDEIKNHKWFKSVNWKRLEARQIEPSFRPNVAGKTCIANFDECWTNMPVLDSPVASPVAANSNFVGFSYVRPAPFLQKPSPLG

SEQ ID NO: 4296 - protein, 156 aa, Brassica napus
  misc_feature (13)..(13): Xaa can be any naturally occurring amino acid
  misc_feature (142)..(142): Xaa can be any naturally occurring amino acid
  unsure (1)..(156): unsure at all Xaa locations
VPLEFRSTHAKAXLSHYEMNPGKGQAVLFLGDLSYADRYPLHDNRRWDTWGRFVERSVAYQPWIWTAGNHEIDFVPDIGETEPFKPFTNRYHTPYKASGSISPLWYSIKRASAYIIVMSCYSSYGVYTPQYIWLQKEFQRVXRTETPWLMVLVHCP

SEQ ID NO: 4297 - protein, 356 aa, Camellia sinensis
MSLLSDLINLNLSDTTEKVIAEYIWIGGSGMDLRSKARTLSGPVSDPKKLPKWNYDGSSTGQAPGEDSEVIIYPQAIFKDPFRRGNNILVMCDTYTPGGEPIPTNKRFNAAKIFSHPDVVAEEPWYGIEQEYTLLQKQVKWPLGWPLGGFPGPQGPYYCGIGVDKAYGRDIVDSHYKACLYAGVNISGINGEVMPGQWEFQVGPSVGISAGDELWVARYILERITEIAGVVVSFDPKPIEGDWNGAGAHTNYSTKSTRSDGGFEVIKKAIEKLGLRHKEHIAAYGEGNERRLTGRHETADINTFLWGVANRGASIRVGRDTEKAGKGYFEDRRPASNMDPYVVTSMIAETTLLWKP

SEQ ID NO: 4298 - protein, 729 aa, Oryza sativa (japonica cultivar-group)
MTVMELKKLPLGFRFHPTDEELVRHYLKGKITGQIRSEADVIPEIDVCKCEPWDLPDKSLIRSDDPEWFFFAPKDRKYPNGSRSNRATEAGYWKATGKDRVIRSKGDKKKQQVIGMKKTLVFHRGRAPKGERTGWIMHEYRTTEPEFESGEQGGYVLYRLFRKQEEKIERPSPDEVDRSGYSPTPSRSTPDNMEPIEDGNTPLNRESPESALHESPIDLPALTEAQAAPITRWLADRTDNATTNEVNISHMPHHGLDGGAKASPSAGAFPQLIGSQQNIHDNNELATVSAPMLPHEDFNNFPLGAIGNFDGNMNPRDPVEEFLNQTIADPDEHSSTTSKAQYDSDTGIIPTEFENHGVMQGEFMDDLSGLENLDFWPDDRNPQLSALYEDTPLLPYDSTDQDVLSMDSGAESLQDLFNSMDDSNARNNVWGNEPFLQGTGFPMSWPLQPNSAFPNQGTANRRLMLQLSESLSPDFDVSMTRDECEDEEPGIVVTSKYVNEAPEESTAEKDMPSDGDDAEPTGITILRRRHAPTASSFSDGDDAESTGITILRQHQAPNASLLSDGDDAESTGITILRRRQAPTASSASSFTQQGAAVQRVRLQSNLDAAPCSSVDGSSSCIINEGESERTMEKPEIEENAGSTLAEGGTCHEDDQKEHDASAANAKSVLRLRKTAEGSDKENKQEEEEGVLASHVRAPGNKRGFPSYIIWLVLSVALVLLISLGIYGWV

SEQ ID NO: 4299 - protein, 162 aa, Rhodospirillum rubrum
MTSIVRTLRSLTLWELVSGMALTFRYMLKPKVTINYPFEKGYLSPRFRGEHALRRYANGEERCIACKLCEAICPAQAITIEAEPRTDGSRRTTRYDIDMTKCIYCGFCEEACPVDAIVEGPNFEFAAETREELLYNKAKLLANGDRWEPELALRLRKDAAYR

SEQ ID NO: 4300 - protein, 533 aa, Glycine max
MGNCCRSPAAVAREDVKSSFSNADHGKRGGGGSASAAAKQKAPITVLAGVPKENIEDRYLVDRELGRGEFGVTYLCIDRDTRELLACKSISKRKLRTAVDVEDVRREVAIMRHLPDSPSIVSLREACEDDNAVHLVMELCEGGELFDRIVARGHYTERAAAAVTRTIVEVVQLCHKHGVIHRDLKPENFLFANKKENSPLKAIDFGLSIFFKPGERFSEIVGSPYYMAPEVLKRNYGPEIDIWSAGVILYILLCGVPPFWAESEQGVAQAILRGLIDFKREPWPSISESAKSLVRQMLEPDPKLRLTAKQVLEHPWIQNAKKAPNVPLGDVVKSRLKQFSMMNRFKRKALRVIADFLSNEEVEDIKDMFKKMDNDNDGIVSIEELKAGFRNFGSLLADSEVQLLIEAVDSNGKGTLDYGEFVAVSLHLRRMANDDHLHKAFSYFDKDGNGYIEPDELRNALMEDGADDCTDVANDIFLEVDTDKDGRISYDEFVAMMKTGTDWRKASRHYSRGRFNSLSLKLMKDGSLNLGNE

SEQ ID NO: 4301 - protein, 421 aa, Photorhabdus luminescens subsp. laumondii TTO1
MNIQTGYHRVAVTGYGSICSLGQNTQEIWDAILNYRVGYKKEEHPDASVVAKFFGNIPFSPDVSRFSKKLLKNLPKFSKLGLIAADEAIKMAFGNDKTALDENYSPFERGVIFGTGWGGEDATVENSHSYADQGIASPMTNIMSMHSVGTAAISMNWNLRGYQNTPVAACATGSMAIGDAFELIRSGRTKMMLAGGGESIRDPFIVWSIDILGALSKEQESVEKACCPFSKDRSGFVMSEGAAILCLEDYDCAVARGAKILAEVIGYGNNSDASDMTAPAPDCKGRVMAIQMALEQAKLSTSDIHYINAHGTSTPLNDINETDVLKMSLGEHAYRIPISSTKSYTGHLIAGAGAIESIFCLKAIETATIPATMHLNNPDPLCDLDYVPNIHRTHQLIDTALNVNYGFGGTNCALIFRKADR

SEQ ID NO: 4302 - protein, 571 aa, ASPERGILLUS NIDULANS FGSC A4
MANQKDENTLTPPDPEVASPATPQSRPSKSDSEGTETGQEMDEFVLGRRGIMAFFTLSVLTLMVALDGTSISVALPIITQDLKGTAIEAFWSGTSFLLASTVFQPNFASLSSIFGRRPLVLVALTLFFVGTVVCSVANNFTHMLVGRSIQGVGGGGLIALSEVIVTDLVPLRLRGQYFGILSAMWSVGSVTGPILGGGFSQDVTWRWIFYINFPFIGVGLVAIILFLKLNIIPTSLAEKLRQIDYVGTIIFVGSMSSFLIPLSWGGILYDWDSWRTLVPLIIGVVGLLVFSFYEYRFAKDPIIPPKIFQNRTAAVSFAGSFLQGLVLWCLLYYQPLYYEAVKGYSPIMAGVALFPATFTVAPSAGLVGVLVTKYGHYRWAVWLGWVLSTFGLGLLCYMDVDTSIPAFIFINIVPGIGLGLLFPSIGFAIQASATNDTLAIAVGMFSFFRAMGQAVGVAIGGVVFQNQMYSNLVESGIPALASMASEYSQDAAGLVEVIKRMPDGTEKLGLRTAYTDSLRIVYAVCCGICGIALALSVLTQSYDLNRALETTQGLRKEKNPRPNGDLEKVGK

SEQ ID NO: 4303 - protein, 397 aa, Carica papaya
ALDTLMVGKLTTESLFILLAILTGLSNGSLENQLCFDLIEKWVKKNPNASICTALEGVENFKHIANFQDYHGLKEFRQEVAKLMGKARGGRVTFDPERIVMSGGATGASETIMFCLADPGDAFLVPTPYYPAFNRDLRWRTGVQIIPVQCSSSNNFTVTREAVEAAYQKAQEANINVKGLIITNPSNPLGTTLDSQTLQSLVIFVNDKTIHLVCDEIYAATVFSSPEFVSIAEIIQEIDVNRDLIHILYSLSKDMGLPGFRVGIVYSYNDVVLSCGRRMSSFGLVSSQTQYFLATLLSDDEFVDYFLRESSKRLARRHHKLTRGLEQVGIKCLKSNAGLFVWMDLRRLLEDPTSFDAEMKLWRTIVNDVKLNVSPGSSFHVAEPGWFRVCFANMDEF

SEQ ID NO: 4304 - protein, 138 aa, Propionibacterium acnes
MSDEERTLVLLKPDAVKRRLMGEIIGRYEAKGLTVRAMELSTIDTKIARKHYAEHVGRDYYAALEEFITSGPLVAMVLEGRRAISVVRAMNGTTDCAEALPGTIRGDFGTEKNHNLVHASDCLESAEREIGLWFPHLV

SEQ ID NO: 4305 - protein, 181 aa, Oryza sativa
  misc_feature (76)..(76): Xaa can be any naturally occurring amino acid
  misc_feature (82)..(82): Xaa can be any naturally occurring amino acid
  misc_feature (95)..(95): Xaa can be any naturally occurring amino acid
  misc_feature (118)..(118): Xaa can be any naturally occurring amino acid
  unsure (1)..(181): unsure at all Xaa locations
MAPTVMASSATSVAPFQGLKSTAGLPVSRRYHQLRASATYSNGGRIQVHSRCRPIEGIQEVRDPNTYLPPLTVEDXLLKQIXEYLLRSKWVPCLXEFSKVGFVYRENHRSPGYYDGRXWTMWKLPMFGCTDATQVLKELEEAKKAYPDAFVRIIGFDNVRQVQLISFIAYKPPGCEESGGN

SEQ ID NO: 4306 - protein, 318 aa, Shewanella sp. MR-4
MANTLEQLKSYTTIVADTGDIEAIKRYQPEDATTNPSLILKAAQIPEYSALIDNAIAWAKLQSADIEQQIDDASDKLAVNIGVEILKLVPGRISTEVDARLSFDKEKSIAKAHKLVRLYQEAGVDKSRILIKLASTWEGICAAKELEQEGINCNLTLLFSFAQARACAEAGVYLISPFVGRILDWYKKDTGKDYDAVNDPGVVSVTEIYNYYKQHGYNTVVMGASFRNIGEIIELAGCDRLTIGPSLLEELANSQVTIQPKLIPASTTVAAGEPLTEAQFRWDFNQDPMAVDKLAEGIRNFAIDQGKLEVMLKAKLAN

SEQ ID NO: 4307 - protein, 290 aa, Oryza sativa (japonica cultivar-group); identical to SEQ ID NO: 1146

SEQ ID NO: 4308 - protein, 440 aa, Dechloromonas aromatica RCB
MPMSTSCPHQPYCEMREQTDMRFISHLTRNTFAIILAGGRGTRLKQLTDFRSKPAVPFAGKFRILDFTLSNCVNSGIRKIGVATQYKAHSLIRHIQRGWSFLDGRFDEFIQLLPAQQQIDETQWYQGTADAVYQNLHFLRRYQPDHILVVAGDHIYKMDYGRMLAHHVKHHADMTVACIDVPLDEAREFGVMGVDEQDRVIDFVEKPQNPPAIPGQPDRALASMGIYIFNTKFLFEQLERDAMTKGSNRDFGKDIIPYIVPRYRVFAHRFADSCVGSDNHRPYWRDVGTIDAYWEANMEMTKVTPELNVYDRDWPIWTYQEQIPPAKFVFDDEDRRGTAVDSLIAGGCIISGASVKRSLLFSSVNVHSWASVEDSVVLPDVDIGRHAVLKRCVIDKHCRIPEGMVIGVDPEEDRKRFHVSPKGITLVTAEMLGQGAAEGR

SEQ ID NO: 4309 - protein, 554 aa, Bacillus cereus E33L
MNKTWWKEAVAYQIYPRSFMDSNGDGIGDLQGIIAKLDYLKDLGIDVIWICPMYKSPNDDNGYDISDYQDIMDEFGTMEDFDALLDEVHKRDMKLIIDLVINHTSDEHPWFIESRSSKDNPKRDWYIWHDGKDGAEPNNWESIFNGSAWEYDEVTGQYYLHLFSRKQPDLNWENKEVREVLYDTVNWWLDKGIDGFRVDAISHIKKEDGFKDMPNPKGLKYVPSFDKHMNVDGIQPLLEELKENTFSKYDIMTVGEANGVKIEDAELWVGEEQGKFNMVFQFEHLSLWDAEKKKDLDVVGLKKVLTKWQKGLENKGWNALYIENHDKPRIVSTWGDDKQYWRESATALGAMYFFMHGTPFIYQGQEIGMTNVQFPNIEDYDDVAIKNLYREKIAEGVSHQDMMEIIWASCRDNSRTPMHWDDEINAGFTTGTPWFDMNPNYKEINVAKQKNEENSIFNFYKKMIALKKEHDVLNYGTYDLLLEDDPQIYAYTRTLNDEKIVVISNISKEEAVYNEDLFALERKRLLLNNYEVAEHEEVTTIALKPYETRVYRIS

SEQ ID NO: 4310 - protein, 368 aa, Staphylococcus aureus
MSDNTVKIKKQTIDPTLTLGDVKKQLIEKGKKEGHLSHEEIAEKLQNFDIDSDQMDDFFDQLNDNDISLVNEKDSSDTDEKLNPSDLSAPPGVKINDPVRMYLKEIGRVNLLSAQEEIELAKRIEQGDEVAKSRLAEANLRLVVSIAKRYVGRGMLFLDLIQEGNMGLIKAVEKFDFNKGFKFSTYATWWIRQAITRAIAHQARTIRIPVHMVETINKLIRVQRQLLQDLGRDPAPEEIGEEMDLPAEKVREILKIAQEPVSLETPIGEEDDSHLGDFIEDQEAQSPSDHAAYELLKEQLEDVLDTLTDREENVLRLRFGLDDGRTRTLEEVGKVFGVTRERIRQIEAKALRKLRHPSRSKRLKDFMD

SEQ ID NO: 4311 - protein, 279 aa, Corynebacterium glutamicum
MEQSVPLNGFLFGGWRFSYGLMGILRLMTHTTKRVEGKVAFITGAASGMGASHARVLAAHGAKVVITDLNDELGQELVKEIGEEKAHYVHLNVTSFEEWEVAVQKALERFGKIDTLINNAGIFSSGSVEDATAADWDKTIAIDLNGTFYGMKAALPALKENPTASIINISSIAGVTGFKNRAAYSAAKWGVQGLTKTSAMDLGKYNIRVNSVHPGSVETPLTANLKRGLGQIPLGRAAQVEEISNLILYLSSDESSFVTGSSFVIDGGETAGNNLRDDQ

SEQ ID NO: 4312 - protein, 465 aa, Chromobacterium violaceum ATCC 12472
MLFELNRASRAEILAEARQIAGLALPMMVAQIAQVATSFVDTVMAGRVGTDDLAAVSLGASVFITVYVTLMGVVAALNPILSHHLGSRDRRAFSRDAAQGLWFGLMLGALGAGLMLLLEAPLRHWLHLPPDVTDKVMLFITGAAIGMPAAMAHRALHAYASSLGHPKAIMVVSLLALALNIPLNYILIHGLFGMPRMGGAGCGWATGIVFWFNCLALLTYVSWHRHFRDSRILAGLAAPDWRRFLAFLKLGVPIGLSFFVEVSLFSFIALLIAELGTVVVATHQSVLNFSSLIYMLPQSVATALSVRVGHHAGAGDYRAARFISGVGMLMGLAMAGGAMALVLLLREPIMWMYSADPRVIAMGTTLLLFAAVYQLTDAAQTIASGALRGYKLTAVPMLIHITSFWVAGLGLGMLLGLTDWIVPRMGIYGFWTALVISLTVAGLLLTYYLARASRKRLHRDQGILL

SEQ ID NO: 4313 - protein, 579 aa, Glycine max
MCGILAVLGCSDSSQAKRVRVLELSRRLKHRGPDWSGLHQYGDNYLAHQRLAIVDPASGDQPLFNEDKTVVVTVNGEIYNHEELRKQLPNHTFRTGSDCDVIAHLYEEHGENFVDMLDGIFSFVLLDTRDNSFIVARDAIGVTSLYIGWGLDGSVWISSELKGLNDDCEHFESFPPGHLYSSKERAFRRWYNPPWFSEAIPSAPYDPLALRHAFEKAVVKRLMTDVPFGVLLSGGLDSSLVAAVTARYLAGTNAAKQWGTKLHSFCVGLEGAPDLKAAKEVADYIGTVHHEFHYTVQDGIDAIEDVIYHIETYDVTTIRASIPMFLMSRKIKSLGVKWVISGEGSDEIFGGYLYFHKAPNKEEFHQETCRKIKALHKYDCLRANKSTFAWGLEARVPFLDKDFIRVAMNIDPEYKMIKKEEGRIEKWALRRAFDDEEHPYLPKHILYRQKEQFSDGVGYGWIDGLKAHAEKHVTDRMMLNAANIFPFNTPTTKEAYHYRMIFERFFPQNSARLSVPGGPSVACSTAKAVEWDAAWSNNLDPSGRAALGVHASAYGNQVKAVEPEKIIPKMEVSPLGVAI

SEQ ID NO: 4314 - protein, 710 aa, Yarrowia lipolytica CLIB122
MSADHQYQQAGQEINREGEAGVGDDLSNMRSLYQTINDDKDIMTSSGLPPGKDNIQHSLNILRAAQSHLKETGSVKGVYSSSGFDIVSLLYQVINRKNPQVDIGPVDLSCSFLVTDVSTDDNHIVYMSGAFEQLTGYPEAYIINQNCRFLQNPQGAPRPAEAGFTDAASVFALRKAITNGNEVQVPLLNYKRGGESFVNMVTCIPLFLDKADKDRVTHFIGFQMDLNQYPDAILQRMLNRSYTMNYRLSSIPRQPRVIKPASPAGVDIMSTITSTDPLSTEELVQRFLYHTSADTIMTVSLKGQIVQVSPAVYAQLEYTPEEVVGLSLADFIHPSDVTVVLRELREIPVTKTLSTLFRIRTKRSGYIWMDAHGKINGGFKRMTHCVVFTLRHRPVSGLPLKVVLESFDKNVIDTKPNSEALDMDPSPSSSEGATAIGNFKRKKFSVLPKESIMPMDLWLRVSHNGLILYTARTVQYLYGYKDMTSQRLQTFLEDGPAWDELMEVVGSTRRITTAFLRLKNASGFSVISRAIIYPGEIFGGKLVDASVQLTPLSESSAPLIEKMGLQKFGNIKYKHGPCQEAFSLHQDSIIGKRQESVEPEHAPKRGPSSVSSASTTSSAAAAAHVPSPPSASSQASNAAATMITPQGSSVGRSSASASSADSDSFYRTTDANLLSMVGPSRVNGWQFEHNQLQVGNKKLAEQLLSRVSVK

SEQ ID NO: 4315 - protein, 356 aa, Camellia sinensis
MAQLSDLINMNLSDSTEKIIAEYIWIGGTGLDLRSKARTLSGPVNDPKKLPKWNYDGSSTGQAPGEDSEVIIYPQAIFKDPFRKGNNILVMCDAYTPAGEPIPTNKRYNAEKIFSHTDVVAEEPWYGIEQEYTLLQKDVKWPIGWPKGGYPGPQGPYYCGAGADKAFGRDIVDSHYKACLYAGINISGINGEVMPGQWEFQVGPAVGISAGDELWVARYILERITEIAGVVVSFDPKPIEGDWNGAGAHTNYSTKSMRKDGGYQVIKKAIEKLGLKHKEHIAAYGEGNERRLTGRHETADINTFLWGVANRGASVRVGRDTEKAGKGYFEDRRPASNMDPYVVTSMIAATTILWKP

SEQ ID NO: 4316 - protein, 641 aa, Treponema denticola ATCC 35405
MRTLDKSLPLLLKRISEKYPSIRAQMFKGEDKEFKSLSYKELYETALDFAAGLLSIGARPKDHIGLIADNRKEWLHASFGIMNIGAADVPRGCDATEQEITHILSFSECKFAVLENEAQIRKVLVHLAEIPLLESIISIDNVDFKKLEEEFNLKERKIEFHTYADIIDLGKSARIEGKFKPEEYAENVDTDDLASIIFTSGTTGNPKGVTMTHRNFMTQLMELPDRIILKPGQKAISVLPVWHSFERACEYVIIISGGTIAYSKPIGSVLLADMVKINPTLFPSVPRIWEAVYDGIFKAMKKRGRPLYYLFLFFIEVGIKTMRLKRRVTGQCPHFQRKTKVIYPILAVLPLLCIAPLYYIGDLLIYRAIRKKFGKCFRAGVSGGGALPPNVDEFFWAIRINVMEGYGITETAPVISVRPMPKPVFGTLGKPLACFESKIIDKNGKELPHNRKGLLLVRGDAVTKGYYKDPERTAEVIDKDGWFDTGDLAIKTVDGELILKGRKKNTIVLRGGENIEPVPIEVKLQESPLISLAVVLGQDQRSLGALIVVHKENLQSWAANNGLRNVPVTELIHDSNVQKMYEAEVAELVNSKTGFKLFERINKIVLLPEEFQAGRELSAKGEMMRHKINQLYRNEIYELFK

SEQ ID NO: 4317 - protein, 427 aa, Helicobacter hepaticus ATCC 51449
MASITLTNNETKESFEFELIECTRGPKAVDFSKLFERTNIFSYDPGYGSTAGCKSTISYINGKNGELLYKGLPIEKIVEKYQFTDVCKLLITGEVPKNETETKEFEIELVHRSFLNEGLINIFNAFPDSAHPMANLSASLSALSTFHFRHLDMGNEEERQVMARRAIAKIPTLAAFSYRHSLGIPYIYPDVARGYVENFLYMLRAYPGGKMKHTIKGEVEITPLEIEALDKIFTLHADHGQNASTTTVRNVASTGAHPYAALSAGVNALWGAAHGGANEKVLDMLNEIGDAKNVDKFINKAKDKNDPFRLMGFGHRVYKNYDPRAKILKKLKDDLDAKGIKMNTRLSDLAHKVEEVALSDSYFVERNLYPNVDFYSGIILSALKIPVSLFTPIFVIGRMPGWCAQLLEHVKDPTTRITRPRQVYIGE

SEQ ID NO: 4318 - protein, 104 aa, Glycine max
TPHQLYPSLPQHPDIRALVGRSMEASRRLLSAALLLVLLLAATGELGGPVMVAEARTCESRSHRFRGPCVRRSNCANVCKTEGFPDGKCRGFRRRCFCTTHCHH

SEQ ID NO: 4319 - protein, 487 aa, Escherichia coli CFT073
MLPLRINPTFLLPSNKFKEFEMDQKLLTDFRSELLDSRFGAKAISTIAESKRFPLHEMRDDVAFQIINDELYLDGNARQNLATFCQTWDDENVHKLMDLSINKNWIDKEEYPQSAAIDLRCVNMVADLWHAPAPKNGQAVGTNTIGSSEACMLGGMAMKWRWRKRMEAAGKPTDKPNLVCGPVQICWHKFARYWDVELREIPMRPGQLFMDPKRMIEACDENTIGVVPTFGVTYTGNYEFPQPLHDALDKFQADTGIDIDMHIDAASGGFLAPFVAPDIVWDFRLPRVKSISASGHKFGLAPLGCGWVIWRDEEALPQELVFNVDYLGGQIGTFAINFSRPAGQVIAQYYEFLRLGREGYTKVQNASYQVAAYLADEIAKLGPYEFICTGRPDEGIPAVCFKLKDGEDPGYTLYDLSERLRLRGWQVPAFTLGGEATDIVVMRIMCRRGFEMDFAELLLEDYKASLKYLSDHPKLQGIAQQNSFKHT

SEQ ID NO: 4320 - protein, 549 aa, Escherichia coli CFT073
MLNQKIQNPNPDELMIEVDLCYELDPYELKLDEMIEAEPEPEMIEGLPASDALTPADRYLELFEHVQSAKIFPDSKTFPDCAPKMDPLDILIRYRKVRRHRDFDLRKFVENHFWLPEVYSSEYVSDPQNSLKEHIDQLWPVLTREPQDHIPWSSLLALPQSYIVPGGRFSETYYWDSYFTMLGLAESGREDLLKCMADNFAWMIENYGHIPNGNRTYYLSRSQPPVFALMVELFEEDGVRGARRYLDHLKMEYAFWMDGAESLIPNQAYRHVVRMPDGSLLNRYWDDRDTPRDESWLEDVETAKHSGRPPNEVYRDLRAGAASGWDYSSRWLRDTGRLASIRTTQFIPIDLNAFLFKLESAIANISALKGEKETEALFRQKASARRDAVNRYLWDDENGIYRDYDWRREQLALFSAAAIVPLYVGMANHEQADRLANAVRSRLLTPGGILASEYETGEQWDKPNGWAPLQWMAIQGFKMYGDDLLGDEIARNWLKTVNQFYLEQHKLIEKYHIADGVPREGGGGEYPLQDGFGWTNGVVRRLIGLYGEP

SEQ ID NO: 4321 - protein, 396 aa, Bacillus thuringiensis serovar konkukian str. 97-27
MIQTKDIIELTDTYGANNYHPLPIVISKAEGVWVEDPEGNRYMDLLSAYSAVNQGHRHPKIINALIDQANRVTLTSRAFHSDQLGPWYEKVAKLTNKEMVLPMNTGAEAVETAIKTARRWAYDVKKVEANRAEIIVCEDNFHGRTMGAVSMSSNEEYKRGFGPMLPGIIVIPYGDLEALKAAITPNTAAFILEPIQGEAGINIPPAGFLKEALEVCKKENVLFVADEIQTGLGRTGKVFACDWDNVTPDMYILGKALGGGVFPISCVAANRDILGVFEPGSHGSTFGGNPLACAVSIAALEVLEEEKLTERSLQLGEKLVGQLKEIDNPMITEVRGKGLFIGIELNEPARPYCEQLKAAGLLCKETHENVIRIAPPLVISEEDLEWAFQKIKAVLS

SEQ ID NO: 4322 - protein, 458 aa, Staphylococcus epidermidis ATCC 12228
MENNELQRGLNARQMQMIALGGTIGVGLFMGATSTIKWTGPSVILAYLIAGIFLFLIMRAMGEMIYINPTTGSFATFASDYIHPAAGYMTAWSNVFQWVVVGMSEVIAVGEYMNYWFPSLPNWIPGVIAVLFLMAANLVSVKAFGEFEFWFALIKVVTIVLMIIAGLGLILFGIGNGGNPIGISNLWSHGGFMPNGFIGFFFALSIVIGSYQGVELIGISAGETKNPQTNIVKAVNGVIWRILIFYIGAIFVIVSVYPWNQLGSIGSPFVATFAKVGITFAAGLINFVVLTAALSGCNSGIFSASRMIYTLAKKGQMPKVFTKVMKNGVPFYTVFAVSMGILIGALLNVILPLIIDGADSIFVYVYSASILPGMIPWFMILFSHLRFRRLHPEKVHNHPFKMPGGAIANYLTIMFLLLVLVGMLLNKETVVSVVIGIVFLTAVTLYYLIRYHKKERQI

SEQ ID NO: 4323 - protein, 485 aa, Pseudomonas syringae pv. syringae B728a
MLKNQLKDPSLLVDRAYVDGQWISADDGATLTISNPATGEALAQVPALQGVETRRAIEAADRAWPAWRARPAAERAALLERWHQAMLDNVEDLALIMTFEQGKPLNESRGEIRYGASFVKWFAEEARRSYGETIPAPSADRRLMTLKQPVGVCAAITPWNFPNAMITRKCAPALAAGCPIIVKPSDLTPLSALALALLAERVGIPAGVFNVITGMPTGIGEELTGNPVVRKISFTGSTPVGRLLMRQSAEHIKRLSLELGGNAPFIVFDDADLEQAVTGIMLSKFRNAGQTCVCANRILVQNGIYDRFAARLVEEVSKLKVGNGLEEGVTIGPLINPAAVSKVARHIDDALSQGAKLLHGGSPDGTSQFVQPTVLGDTHAGMLLANEETFGPVAPLMRFTDEAEALALANATPYGLGAYYFTQDLRRSWRFGEALEFGMVGLNTGIISMEVAPFGGVKQSGLGREGSSYGLDEYLEVKAFHVGGL

SEQ ID NO: 4324 - protein, 441 aa, Escherichia coli O157:H7 EDL933
MTHDNIDILVVDDDISHCTILQALLRGWGYNVALANSGRQALEQVRERVFDLVLCDVRMAEMDGIATLKEIKALNPAIPVLIMTAYSSVETAVEALKTGALDYLIKPLDFDNLQATLEKALAHTHIIDAETPAVTASQFGMVGKSPAMQHLLSEIALVAPSEATVLIHGDSGTGKELVARAIHASSARSEKPLVTLNCAALNESLLESELFGHEKGAFTGADKRREGRFVEADGGTLFLDEIGDISPMMLVRLLRAIQEREVQRVGSNQTISVDVRLIAATHRDLAAEVNAGRFRQDLYYRLNVVAIEVPSLRQRREDIPLLAGHFLQRFAERNRKAVKGFTPQAMDLLIHYDWPGNIRELENAVERAVVLLTGEYISERELPLAIASTPIPLAQSLDIQPLVEVEKEVILAALEKTGGNKTEAARQLGITRKTLLAKLSR

SEQ ID NO: 4325 - protein, 399 aa, Zea mays
MDALRLRPSLLPVRPGAARPRDHFLPPCCSIQRNGEGRICFSSQRTQGPTLHHHQKFFEWKSSYCRISHRSLNTSVNASGQQLQSEPETHDSTTIWRAISSSLDAFYRFSRPHTVIGTALSIVSVSLLAVQSLSDISPLFLTGLLEAVVAALFMNIYIVGLNQLFDIEIDKVNKPTLPLASGEYTLATGVAIVSVFAAMSFGLGWAVGSQPLFWALFISFVLGTAYSINLPYLRWKRFAVVAALCILAVRAVIVQLAFFLHIQTFVFRRPAVFSRPLLFATGFMTFFSVVIALFKDIPDIEGDRIFGIRSFSVRLGQKKVFWICVGLLEMAYSVAILMGATSSCLWSKTATIAGHSILAAILWSCARSVDLTSKAAITSFYMFIWKLFYAEYLLIPLVR

SEQ ID NO: 4326 - protein, 425 aa, Escherichia coli CFT073
MIDRLPGVSTLTLQPKTPFLQALDACFRVAYSLDNLPYHQRCPVFKSDAARTRQRLSARKGRTLPPGRGKFPHSTMESFRNTFWLKKIMEHCFNMVDQQTTTAQTNANFLQIRFTTMSKKIAVIGECMIELSEKGADVKRGFGGDTLNTSVYIARQVDPAALTVHYVTALGTDSFSQQMLDAWRGENVDTSLTQRMENRLPGLYYIETDSTGERTFYYWRNEAAAKFWLESEQSAAICEELANFDYLYLSGISLAILSPTSREKLLSLLRECRANGGKVIFDNNYRPRLWASKEETQQVYQQMLECTDIAFLTLDDEDALWGQQPVEDVIARTHNAGVKEVVVKRGADSCLVSIAGEGLVDVPAVKLPKEKVIDTTAAGDSFSAGYLAVRLTGGIAEDAAKRGHLTASTVIQYRGAIIPREAMPA

SEQ ID NO: 4327 - protein, 636 aa, Idiomarina loihiensis L2TR
MSDWNIDQAEELYGVNRWGAGYFSIGENGNIQIRPNHRLPDVTIDMKEVVDEIISEGIQFPAVIRFHDILRSQVEIINETFGKQIEEANYQGQYCGVFPIKVNQMREVVEEIMDAGEPYNYGLEAGSKPELMAVMAYNDNPEALTILNGYKDKDYLTLALLGRQLKRKMIIVIEKFSELEMLIPLAKQMGVKPMIGLRSKMMVKSSGKWAGSSGDRAKFGLSIAEILNVIERLREEDMLHCAKLLHFHIGSQLSDIRKIKEAVNEGARLYAKLVLEGMPLEYLDIGGGLGIDYDGTSTTNDSSRNYSTEEYVADVVWGVKQICDLEKVPHPNLVSESGRAMTAHHSCVVTNIVGEMKPAGTQYDISASSDEHILVKNMRELHSSGDQFHPQERYNDAAGYKQNAYEAFKLGILSLNEMAKLDTMYWQILADIHHSLDKDTYVMQELEELEDMLASQYLCNFSVFQSAADTWAIGQVLPVVPISRLNEQPEVRCSIVDITCDSDGKLSKYIEGTDISDHIPMHNLRKGEDYHVGLFLTGAYQDVMGDMHNLFGRLTEVHVYCHDDEPGDFYIEEVVPGTSAEKVLQTMQYNTEYMAKTVKKQIDRQVRKGSLAPREGVRWTNFYEHCLAGSTYLRVE

SEQ ID NO: 4328 - protein, 137 aa, Triticum aestivum
  misc_feature (131)..(131): Xaa can be any naturally occurring amino acid
  unsure (1)..(137): unsure at all Xaa locations
RRFMALADVADDVHRWVREAATDEHFRGLIDWVEALRPKPAAARAYLGGTGGTKATACIVSSGMGFPVREINFGTGLPAFASYHFPWPAGAAYVMPMPSARDDGEWVVYVHAAPELVKVMEEEPTVFKVLXNSYVFG

SEQ ID NO: 4329 - protein, 760 aa, Mycobacterium leprae TN
MDELVTTQSFTATVTGSPRIGPRRELKRATEGYWAKRTSRSELESVASTLRRDMWSDLAAAGLDSVPVNTFSYYDQMLDTAFMLGALPARVAQVSDDLDQYFALARGNNDIKPLEMTKWFDTNYHYLVPEIEPATTFSLNPGKILGELKEALEQRIPSRPVIIGPVTFLLLSKGINGGGAPIQRLEELVGIYCTLLSLLAENGARWVQFDEPALVTDLSPDAPALAEAVYTALGSVSKRPAIYVATYFGNPGASLAGLARTPIEAIGVDFVCGADTSVAAVPELAGKTLVAGIVDGRNIWRTDLESALSKLATLLGSAATVAVSTSCSTLHVPYSLEPETDLDDNLRSWLAFGAEKVAEVVVLARALRDGRDAVADEIAASNAAVASRRSDPRLHNGQVRARIDSIVASGTHRGDAAQRRTSQDARLHLPPLPTTTIGSYPQTSAIRKARAALQDAEIDEAEYISRMKKEVADAIKLQEQLGLDVLVHGEPERNDMVQYFAEQLGGFFATQNGWVQSYGSRCVRPPILYGDVSRPHPMTIEWITYAQSLTDKPVKGMLTGPVTILAWSFVRDDQPLADTANQVALAIRDETVDLQSAGIAIIQVDEPALRELLPLRRADQDEYLCWAVKAFRLATSGVADSTQIHTHLCYSEFGEVIGAIADLDADVTSIEAARSHMEVLDDLNAVGFANSIGPGVYDIHSPRVPSTDEIAKSLRAALKAIPMQRLWVNPDCGLKTRSVDEVSASLQNMVAAARQVRAGA

SEQ ID NO: 4330 - protein, 463 aa, Pseudomonas putida KT2440
MNTVGSDGNLAQGFKPRHVTMLSIAGIIGAGLFVGSGHAIAAAGPATIISYFVAGTLVVLVMRMLGEMAVAHPDTGSFSTYADQAIGRWAGYTIGWLYWWFWVLVIPIEALAAGHVLNAWFPQVDSWIFALASVLLLAGTNLFSVAKYGEFEFWFAILKVTAILGFIGLGFAALMDWLPNREVSGLSGLMAEYGGFAPKGWSAVVGAFITVMFSFIGTEAVTIAASESSDPSRNIAKATRSVIWRISTFYILSIFVIISVVPWNDPQLAVVGSYQRALEIMNIPNAAFMVDLVVLVAVTSCMNSSIYIASRMMFSLAKRGDAPAFLNKTSKVGVPRAAVFGSTLIGAAIAVLNYFAPKGVFEFLLASSGAIALLVYMVIAISQLRMRRRLERENTELKFRMWLFPYLTWAVIIFIAGALAVMMYTPEHRAEVSSTLGLAIVISFLGIVTSRGHAQPVAARSMG

SEQ ID NO: 4331 - protein, 441 aa, Salmonella typhimurium LT2
MIRGKIDILVVDDDVSHCTILQALLRGWGYNVALAYSGHDALAQVREKVFDLVLCDVRMAEMDGIATLKEIKALNPAIPILIMTAFSSVETAVEALKAGALDYLIKPLDFDRLQETLEKALAHTRETGAELPSASAAQFGMIGSSPAMQHLLNEIAMVAPSDATVLIHGDSGTGKELVARALHACSARSDRPLVTLNCAALNESLLESELFGHEKGAFTGADKRREGRFVEADGGTLFLDEIGDISPLMQVRLLRAIQEREVQRVGSNQTISVDVRLIAATHRDLAEEVSAGRFRQDLYYRLNVVAIEMPSLRQRREDIPLLADHFLRRFAERNRKVVKGFTPQAMDLLIHYDWPGNIRELENAIERAVVLLTGEYISERELPLAIAATPIKTEYSGEIQPLVDVEKEVILAALEKTGGNKTEAARQLGITRKTLLAKLSR

SEQ ID NO: 4332 - protein, 202 aa, Crocosphaera watsonii WH 8501
MTIKQTKNVILIIVKTIFNNENNKMSETIVLGGGCFWCVESVYQNVGGVEAVESGYAGGNTDNPTYEQICTGRTGHAEVVKVTFDPAKVSLTEILEVFFIASHDPTTLNRQGNDVGTQYRSIILWNSEQQLETAKTVIDKLNTDNVFSGKIVTELKELTDYYKAEQYHQNYFKRNPMQPYCLFSIPPKLSKLKKYFPEKALA

SEQ ID NO: 4333 - protein, 392 aa, Corynebacterium glutamicum
MKALTWQASNTVNVEEVPDPQIQEPTDAVIRVTSTAICGSDLHLYEVLTPFMDKGDIIGHEPMGIVEEIGSAVTHIKPGDRVVIPFNISCGHCFMCRQGLQSQCETTQVREYGTGAQFLGYSRLYGSVPGGQAEYLRVPHADYGAIKVPNVGEDERYLFLSDVVPTAWQAVDYAAVPDGGTLAVLGLGPIGQMSARIGKHLGYRVIATDAVPERRAMAERYGIETLDSSEDGVAEQLKDLTDGRGPNSVVDAVGMEAHGSPVASAVQAAVGKLPSPLDRKAMERAGVDRMSALYTAIDSVRRGGTISISGVYGGMKDPMPMLTMFDKQIQLRMGQCNVRSWTETLLPLVDDPSDPLGVLDLKTHTAPLEEAPAMYEKFQKKQDGCIKVVLKP

SEQ ID NO: 4334 - protein, 436 aa, Bacillus cereus E33L
MNTMQPSAPPHLESTKTIFSNSITKLVVFICWLAILADGYDLGIYGAVLPKLLEDNSWALSPAHAGTIASYALFGMFIGAILVGTITDLIGRKWTLICCLALFSITMGLAALAPSPELFGLWRFIGGIGLGGVIPTASALTVEYSPKKRQSFIYALMFTGYPLGIVLGAILSMFMLEDFGWRIMFGIGMIPLLLIPFIIRYLPESIQFLLSRNRQEEVDKILNRFQIEFHAKEKTHQAPSNIRKKNGFLTLFSKEYIKATLLFWITYIMGMFLIYGLNTWLPQMMRQAGYPLGSSLSFLLMLNITAAIGALFAGAIADRIGAKIVISISYLMAAICIGLLTIKPSVSIIYLLIGLAGIGSVGITQILNAYVIQYFPSHIRATSLGWGLGLGRVGAIAGPILVGIIMTMQYDLAWNFYLFSFAGLLSAISVFFIPTK

SEQ ID NO: 4335 - protein, 439 aa, Mycobacterium avium subsp. paratuberculosis K-10
MHERSSHRPAGRGPPASRGPSPKLLQGIGFAVSRRTMMRRLSRRYGNVFTLRLPMWGPVVMVSDPQLAKQIFTTTPDELGNIQPNLSRLFGSGSVFGLEGDDHRRRRRLLAPPFHGKSMKNYESIIEEETLRETAGWPEGESFPTLPPMMRITLNAILRAVFGAEGAELDELRRLIPPWVTLGSRLAALPKPQRYPRFGPWGQLDRWRRHYDGVIERLIAAEQADPNFAERTDVLALLLRSTYDDGAAMSHKEIGDELLTLLAAGHETTASTLAWAFERISRHPELLARLVEEADNGGNELRQATILEVQRARTVIDFAGRHVYPDVYRLGEWVIPRGYSIIVGIAQIHDNPDVFPDPRRFDPQRFIDNKPSALSWIPFGGGTRRCVGAAFANMEMDVVLRTVLRHFTIETTDAPDEPWHCRGVAFTPKHGGRIVVHRR

SEQ ID NO: 4336 - protein, 532 aa, Pseudomonas aeruginosa UCBPP-PA14
MLVGVNVLADAVKATLGPKGRNVVLDKSFGAPTITKDGVSVAKEIELKDKFENMGAQLVKDVASKANDAAGDGTTTATVLAQAIVNEGLKAVAAGMNPMDLKRGIDKATVAIVAQLKELAKPCADTKAIAQVGTISANSDESIGQIIAEAMEKVGKEGVITVEEGSGLENELSVVEGMQFDRGYLSPYFVNKPDTMAAELDSPLLLLVDKKISNIREMLPVLEAVAKAGRPLLIVAEDVEGEALATLVVNNMRGIVKVAAVKAPGFGDRRKAMLQDIAILTGGTVISEEVGLSLEGATLEHLGNAKRVVINKENTTIIDGAGVQADIEARVLQIRKQIEETTSDYDREKLQERLAKLAGGVAVIKVGAATEVEMKEKKARVEDALHATRAAVEEGVVPGGGVALVRALQAIEGLKGDNEEQNVGIALLRRAVESPLRQIVANAGDEPSVVVDKVKQGSGNYGFNAATGVYGDMIEMGILDPAKVTRSALQAAASIGGLMITTEAMVAEIVEDKPAMGGMPDMGGMGGMGGMM

SEQ ID NO: 4337 - protein, 171 aa, Mycobacterium avium subsp. paratuberculosis K-10
MTNTQKAILAGGCFWGMQELIRKQPGVVSTRVGYTGGDVPNATYRNHGTHAEAVEIIYDPAVTDYRQILEFFFQIHDPTTKDRQGNDRGPSYRSAIFYTDDEQKRIALDTIADVEASGLWPGKVVTEVSPAGDFWEAEPEHQDYLQRYPNGYTCHYIRPGWKLPRRATSGS

SEQ ID NO: 4338 - protein, 129 aa, Arabidopsis thaliana
MGRLFLVNLEGKSYSCKHCKTNLALCDDVVSKSFQSRHGKAYLFSKVVNVYAGKKEDRMMMTGMHTVVDIYCVKCGSYVGWKYEFAFEKNQKYKEGKSVLERYKVWGPDGNNYWVAQEVEAGDSDTDDA

SEQ ID NO: 4339 - protein, 454 aa, Rhodobacter sphaeroides 2.4.1
MNVLIWFRNDLRVADHPALARAADDRVLPLAIVDPAEWADPARSGRQWAFRAECLADLRADLAALGAPLAVRVGDAQAVLSKLCKLHRIGRILCLEDPAFAELDLALQAWAGGTGLDFIRLKPGAGAPAALTPLPAVEPGPIPPARALRLAEDRCPHRQPGGRPQGQLLLQSFLERRGALYRDGRNRLLQAERASSRLSPHLAAGTLSREEVLAAVAARLAERPDADWVRSLGAFRAALASGAPGARGAVCPPGRPGGGGSPRGYLDQTEGEADALRLRLAALHAGETGLPFVDAALRAMAASGWLPARLRGMLASVALHHLGLSEQAAGAALAAGLTDHSPPIHWAQMRRVALGRPVDPERLAGVLDPDGAFTRRWLPELAEVPDRVLQAPWRWEGARGLLGRRYPEPLVDPSAARAAGRTLARRPTARVEVIEGAAPRRPASDPTQQLCLDL

SEQ ID NO: 4340 - protein, 160 aa, Malus x domestica
MSLIPNSRRGSSSVFDPFSLNLWDPFKDFPFPSSSSLSAFPEFSRENSAFVNTRVDWKETPEAHVFKADVPGLKKEEVKVEVEDDRVLKISGERNVEEEDKNDKWYRVERSSGKFLRRFQLPENAKVDQIKAAMENGVLSVTVPKAELKNVDVRAIEISG

SEQ ID NO: 4341 - protein, 251 aa, unidentified bacterium
MNTGDLAWVLISAALVWLMTPGLALFYGGLGERRNLLHTMFVPILIIGIATMVWFTVGYSLAFGGAGDIIGNFKHLFLSGVSFTHSTKSLTIPDGAFALFQGMFPIITAAIITGSVIGRVRIKAMIVFITLWLIFIYTPLAHMVWGGGLLAKLGAIDFAGGTVVHISSGVTGLVLALMIGHRHNDKHVPVRPSYVLIGGALLWVGWFGFNSGSALAANGIAVLALVNTWLASAAGVLTWGLAEYKMHGPGI

SEQ ID NO: 4342 - protein, 51 aa, Brassica napus
  misc_feature (10)..(10): Xaa can be any naturally occurring amino acid
  misc_feature (12)..(12): Xaa can be any naturally occurring amino acid
  misc_feature (22)..(22): Xaa can be any naturally occurring amino acid
  unsure (1)..(51): unsure at all Xaa locations
QRYGLDGKGXRXLGEIAGNLNXSREMVRKHEVKALMKLKHQARVDYLRQYI

SEQ ID NO: 4343 - protein, 304 aa, Agrobacterium tumefaciens
MTRQMILAVGQQGPIARAETREQVVGRLLDMLTNAASRGVNFIVFPELALTTFFPRWHFTDEAELDSFYETEMPGPVVRPLFETAAELGIGFNLGYAELVVEGGVKRRFNTSILVDKSGKIVGKYRKIHLPGHKEYEAYRPFQHLEKRYFEPGDLGFPVYDVDAAKMGMFICNDRRWPETWRVMGLKGAEIICGGYNTPTHNPPVPQHDHLTSFHHLLSMQAGSYQNGAWSAAAGKVGMEEGCMLLGHSCIVAPTGEIVALTTTLEDEVITAALDLDRCRELREHIFNFKAHRQPQHYGLIAEF

SEQ ID NO: 4344 - protein, 493 aa, Corynebacterium glutamicum
MTSSFSRRQFLLGGLVLAGTGAVAACTSDPGPAASAPGPSLRPTPTPTALGEPTVRRTLTARPLSLDIGGIEAKTWGYVSDTGDAAIEATAGDVLQVDITNELPESTSIHWHGIALHNAADGVPGMTQDPIEPGESFSYVFEVPHAGTYFYHSHTGLQLDRGLHAPLIIRDPQDAEDQDVEWTIVLDDWVDGIQGTPDDELDKLTGMGSGDHNGRMGMGGHGQMMHGTPDRVLGGDVGDVMYPHYLINGRIPRAHRTFEARPGDKARLRFINSGGDTIFKVALGGHRMTVTHTDGFPVQPWETESIYLSMGERVDVEVILGDGIFPLTALAVGKDDRAFAVIRTAGGQAPRPDVDFPELSSTGLLLSSLKPADRALLPEGTPDREVSIDLGGQMMPYEWSILTDGQSSSATVQEGQRLRMVMRNRTMMPHPMHIHGHTWALPGSGGLRKDTVLLRHGETMIADLIADNPGEWAFHCHNAYHMETGMVSSLRYE

SEQ ID NO: 4345 - protein, 642 aa, Streptomyces coelicolor A3(2)
MSTPLPSFAASAAYADSPGPTLVAPETRMLDGAVREAYVPPFAPPVRRGSLADLPFDNAAAVPGQVVLSRRSPEGDWSDVTAAEFAGQVLAVAKGMIAEGLVPGDRIAIMARTTYEWTLLDFAAWAAGLVTVPIYPTSSLFQTRWILQDSGAVTLVTETTAQAAALGPELDRIPDLGHLWVMEKGHVERLAELGARVPDAEVEVRRGMLGPGTLATLIYTSGTTGRPKGCVLTHGNFFAEVDNAIELLYPVFKAETGEEPSILLFLPMSHVFGRMVAVACVRARVRLGHAPSLKPEDLLPDLAAFRPTCLLTIPYMLEKVFNSARAKAESGGRAAVFDRAVSVAVRYGEAKEARQTGTGGGPGRGLKTARSFYDPLVYRKIRNAMGGRVKYAICGGSPLGRRLAAFYAGAGIEIFEGYGLTETTAAATVTPPLKPRLGTVGWPLPGTRIRIAADGEILVAGEQVLHGYWDPQAGGVVQAAPDGWFATGDIGSLDDEGYLTITGRKKELLITAGGKSVAPAPLENWLRSHPLISQCIVLGDRRPYVSALFTLDPDGVTHWRRMNGKHPVPPELLVDDEEVRAVLQRAVDEANRLVSRPESIRRFAVLPRDFTEWEGHLTPSMKLRREVIMRDFAGAVEGLYEG

SEQ ID NO: 4346 - protein, 1323 aa, Arabidopsis thaliana
MEVCNCIEPQWPADELLMKYQYISDFFIAIAYFSIPLELIYFVKKSAVFPYRWVLVQFGAFIVLCGATHLINLWTFTTHSRTVALVMTTAKVLTAVVSCATALMLVHIIPDLLSVKTRELFLKNKAAELDREMGLIRTQEETGRHVRMLTHEIRSTLDRHTILKTTLVELGRTLALEECALWMPTRTGLELQLSYTLRHQHPVEYTVPIQLPVINQVFGTSRAVKISPNSPVARLRPVSGKYMLGEVVAVRVPLLHLSNFQINDWPELSTKRYALMVLMLPSDSARQWHVHELELVEVVADQVAVALSHAAILEESMRARDLLMEQNVALDLARREAETAIRARNDFLAVMNHEMRTPMHAIIALSSLLQETELTPEQRLMVETILKSSNLLATLMNDVLDLSRLEDGSLQLELGTFNLHTLFREVLNLIKPIAVVKKLPITLNLAPDLPEFVVGDEKRLMQIILNIVGNAVKFSKQGSISVTALVTKSDTRAADFFVVPTGSHFYLRVKVKDSGAGINPQDIPKIFTKFAQTQSLATRSSGGSGLGLAISKRFVNLMEGNIWIESDGLGKGCTAIFDVKLGISERSNESKQSGIPKVPAIPRHSNFTGLKVLVMDENGVSRMVTKGLLVHLGCEVTTVSSNEECLRVVSHEHKVVFMDVCMPGVENYQIALRIHEKFTKQRHQRPLLVALSGNTDKSTKEKCMSFGLDGDGCPMPQRSNSAPAFFSRKTSEADVLWFNCVHIRDCRSVLDDILKQKGNNKIETLNRYVSVAISVIEEQDGGALRRLVEQQQWRYLVSQSTRSPKLIHGFFSFSSKTNPNPNKQQQILIDYISKSLQSNDTWETLSTKFSSIDLSDSLIETILLRFKNPETAKQALSFFHWSSHTRNLRHGIKSYALTIHILVKARLLIDARALIESSLLNSPPDSDLVDSLLDTYEISSSTPLVFDLLVQCYAKIRYLELGFDVFKRLCDCGFTLSVITLNTLIHYSSKSKIDDLVWRIYECAIDKRIYPNEITIRIMIQVLCKEGRLKEVVDLLDRICGKRCLPSVIVNTSLVFRVLEEMRIEESMSLLKRLLMKNMVVDTIGYSIVVYAKAKEGDLVSARKVFDEMLQRGFSANSFVYTVFVRVCCEKGDVKEAERLLSEMEESGVSPYDETFNCLIGGFARFGWEEKGLEYCEVMVTRGLMPSCSAFNEMVKSVSKIENVNRANEILTKSIDKGFVPDEHTYSHLIRGFIEGNDIDQALKLFYEMEYRKMSPGFEVFRSLIVGLCTCGKVEAGEKYLKIMKKRLIEPNADIYDALIKAFQKIGDKTNADRVYNEMISVR

SEQ ID NO: 4347 - protein, 190 aa, Cryptococcus neoformans var. neoformans B-3501A
MAGLMGKYAAFLTRRPVLGNMISSAVLFGTGDVIAQQLIEKKGADHDLPRTARIVTWGGILFAPTVNLWFRTLERIPIRSRWPATFARVGLDQFGFAPVILSGFFTAMTFMEGKDFNAAKVKWHESFFPTLQANWMLFIPFQILNMGLVPLQYRLLAVNAVNIPWNAFLSLQNAKGRKAEEDPVAISKKE

SEQ ID NO: 4348 - protein, 339 aa, Treponema denticola ATCC 35405
MIKRVLVTGGAGFIGSHIVADLCEKGYEPIILDNFSNSSPKIIPVLEKICSKKLELVQIDIKDKEKLFNFFKSTSIDAVIHLAAYKAVGESVEKPLKYYENNISGLVNLLLAMQEHKVKNFIFSSSATVYGDAKVVPIPENSPISAANPYGRTKLMSEEILKDTAFSDKDLSIIALRYFNPIGAHKSADIGELPSGIPNNLFPYIAQVALGKLPHLNVFGNDYDTPDGTCIRDYIHILDLASGHTVAIEKIASGFKGFDVYNLGTGIGYSVLDIVNAFKKASGIDLPVKPAARRAGDVPRSCANPDKANKELNWKAKYNLEEMCKDGWAWYKKHPEGFV

SEQ ID NO: 4349 - protein, 711 aa, Pseudomonas putida
MPSKKTDAPKQSEAAGTQTPDRANTNAKLQSLETFRSDATGQALRTNQGVKIADNQNSLKAGARGPSLLEDFIMREKITHFDHERIPERIVHARGTGAHGYFQSYGNHADLTKAGFLQDPDKITPVFVRFSTVQGPRGSGDTVRDVRGFAVKFYTDEGNFDLVGNNMPVFFIQDAIKFPDFVHAVKPEPHNEIPTGGSAHDTFWDFVSLVPESAHMVMWAMSDRAIPRSLRMMEGFGVHTFRLINAEGVASFVKFHWKPRQGVHSLLWDEAQKLAGKDTDFQRRDLWEAIENGDYPEWELGVQIVPEADEHKFDFDLLDPTKIIPEELVPVTPLGKMVLNRNPDNFFAEVEQVAFCPGHIVPGIDFTNDPLLQGRLFSYTDTQISRLGGPNFHQIPINRPVAPNHNNQRDALHQHVVHKGRASYEPNSIDGGWPKETPAAAQDGGFESYQERIDAHKIRQRSESFGDHFSQARLFFQSMSPTEQQHIIKAYSFELGKVEREHIRAREVNEILANIDLKLAAAVAANLGLPAPKAGTVQVKGSQLAQSPALSQMNHPGSVGIKGRKIAVLVANGVDAASVDKLIKALEAHSARPMLLGPTSAPVKATDGKQLPVEASMEGMPSIMFDGIVVPSGKASTDALAASGLAKHFLLEGYKHLKAMVLTKELATGLGLKEDKGLLLADDQKAVDAFVKAVEGHRVWEREAAAEAVPA

SEQ ID NO: 4350 - protein, 330 aa, Magnaporthe grisea 70-15
MDGKRHLNSFQQLEKLGEGTYATVFKGRNRHTGELVALKEIHLDSEEGTPSTAIREISLMKELKHENIVGLHDVIHTENKLMLVFEHMDGDLKKYMDTKGDRGALQPMVIKSFMYQLLKGIDFCHQNRVLHRDLKPQNLLINNKGALKLGDFGLARAFGIPVNTFSNEVVTLWYRAPDVLLGSRTYNTSIDIWSAGCIMAEMFTGRPLFPGTTNEDQIVRIFRIMGTPSERTWPGFSQFPEYKKTFHTYATQDLRNILPQIDATGIDLLGRMLQLRPEMRISAHDALKHPWFNDILMQQHQQQHAIQAQAQAHQARTQSGSTDTFAGAAV

SEQ ID NO: 4351 - protein, 261 aa, Zea mays
MADPAEENVVSPPPTPAAPAVGASDSPLQPAADGASTEKVSAPAPEVRSRGFRLLGEDTSVHKSLGGGKRELSAAADVLLWKDKKTSAVVIGGATVIWVLFEVLDYHLLTLISHVLIGVLATLFLWSKATTFIKKSPPDIPVVQVSEDLVVNVSRALRNDINRALHLFREIAMGHDLKKFLGVIVGLWVLSGVGSSCDFLTLTYIAVLMLHTVPILYDKYQDKVDHVAGRAHTEALKQYKVLDAKVLSKIPRGAVKSKKQN

SEQ ID NO: 4352 - protein, 292 aa, Silicibacter sp. TM1040
MALDETTKNPLPKQAMKAELLDAETELALAYAWRDEKDVQALHRLITAYMRLAVSMASKFRRYGAPMNDLIQEAGLGLMKAAEKFDPDRGVRFSTYAVWWIKASIQDYVMRNWSMVRTGSTSSQKSLFFNMRRVQAQLEREAAGEGVELDRHKLMQMVAEEIGVPLRDVEMMDGRLAGADFSLNAVQSADEDGREWIDALEDDSEQAADRVEADHDRRQLREWLLSALNGLNERERFIVRERKLREEARTLESLGNELGLSKERVRQLEAAAFSKMRKSLEGQSREVQNFLA

SEQ ID NO: 4353 - protein, 200 aa, Oryza sativa
  misc_feature (144)..(144): Xaa can be any naturally occurring amino acid
  unsure (1)..(200): unsure at all Xaa locations
SPACRHRPSTPRLPPLLSQSTRWSLQFLASLLCWISSSCSASCSALVFGLSGRCAEAERFGRSQESLVRAGELSWEVGMERYEVIKDIGSGNFGVAKLVRDVRTKELFAVKFIERGQKIDENVQREIMNHRSLRHPNIVRFKEXMEYAAGGELFERICSAGRFSEDEARFFFQQLISGVSYCHSMQICHRDLKLENTLLD

SEQ ID NO: 4354 - protein, 511 aa, Cylindrotheca fusiformis
MAEFDNTFILDFCSGGNESSSDVQALCQVAGLANGTSASAAGLVEGINTFFLLFAGALVFLMQAGFAMLCAGSVRQKNVKNIMLKNMLDACGGAIGFWTIGYAFAYADNSSGDKTFIGGKNFFVNQLDESGGAWIGFFFQFAFAATAATIVAGTVAERCKMSAYLCYSVFLTGFVYPVVVHSIWSADGWLTAFRDDPWKGVGVIDFAGSGVVHMTGGATALVAAIVLGPRKGRFYDEDGNALETPASFPAHSVALQVLGTFLLWFGWYGFNPGSALVIDNAASASTSALCAVTTTLAAASGCVCAMFTDTIIEMMATGEASYDLTMAMNGALGGLVAITAGCSVVTPWASIIIGIIAGWVYIAFSKLLVKLKIDDAVDAVPVHFANGMWGVLAVGFFAEPDAMVTAGYNDVPGVFYKGDGKLLLCQFVAIIWICAWIFFLMTPFFVVLNILGMFRVDPLEEEVGLDISHHRGAAYDMTSAKKEDVEELMEHRSSKHGKVEVPKEVQKEDTA

SEQ ID NO: 4355 - protein, 459 aa, Bacillus thuringiensis serovar konkukian str. 97-27
MRILVVIGGGPAGYVAAITAAQNGKEVILIDEANLGGTCLNVGCMPTKSLLESAEVHDIVRKANHYGITLNNGSISIDWKQLQARKSQIVTQLVQGIQYLMKKNKIKVIQGKAKFETDHRVRVTNGNKEDVVDGDQFIIAAGSEPAELPFAPFDGKWILNSSHAMSLENIPKSLLIVGGGVIGCEFASIYSRLGTKVTIVEMAPQLLPGEDKDIAQILKEKLESDGVEIFTGAALKGLNNYKKQASFEYKGSIQEANPEYVLVSVGRKPRAQGLDLEKAGVQFSNKGISVNEHMQTNRSHIYAAGDVIGGIQLAHVAFHEGTTAALHASGEDVKVNYHAVPRCIYTAPEIASVGLSEKLAREQYGDILIGEFPFSANGKALIIGEQTGKVKVIVEPKYQEIVGISIIGPRATELIGQGTVMIHTEVTADIMRDYIAAHPTLSEAIHEALLQAIGHAVHA

SEQ ID NO: 4356 - protein, 764 aa, Rhodospirillum rubrum
MAADVVFPGLCVFLSAGLLLALVHGRRVGRRADRQCRHLAAITDTMSEGFYVVDGDDRIVMANAAAGRILGYTQDDLIGACAHALFHARSADDPDPVPLEECRLNRAVRERRAAFLDVGHFRHRSGKIIAVEVSCNPVADTLAEEGRRGGLLGWLLDGDDAEGAPGALLSMVTFVDITARRESEAAVIKLSHAVEQSSASIVITDADGRIEYANPAFTKISGYTAQEAIGRRPSILKSGLVPAETYRALWQTITNGGEWRGEFHNRRKDGTLYWEMASISPIRDARGKITNFVAVKDDVTERKAIESELYHRANYDALTGLPNRQLLLDRVSTALDLARRHDRRVAVMFMDIDRFKQINDSMGHAAGDVLLKQAASRLAAVLRPQDTLGRLGGDEFLVVAPGLRWESEATALASRLLEVARRPFTIDGREVYVSVSIGVSLGPVDGTTAQALMRNADAAMYLAKGGGRDAAHFFTPDIEAAARRRMLIENGLRTAVSDGSLYLALQPIIACADHTMIKAEALLRWTHPQLGGVPPSEFIPIAEESGLIRAIGAWVIEEAARLLVSLDPPRDGAFRLGINIASSQFTGGLHHHVAGMLARYDLDPRMLEIEITERMLLDPSPAILEQVDALRAMGVSIAIDDFGTGYSALSYLSVFHVDTLKIDRAFVSVMTDEARSQALIGAIVALGHELGCAVVAEGVETADQARLLGELAVDALQGYFLGRPTTAEAISDRLNPGTGRPYDKAALGTEFAEGGDLGLSVGAL

SEQ ID NO: 4357 - protein, 383 aa, Arabidopsis thaliana
MEESRESPAEHGYYMPAEWDSHAQTWIGWPERQDNWRHNALPAQRVFAGVAKAISKFEPVTVCASPAQWENARKQLPEDIRVVEMSMNDSWFRDSGPTFIVRKRPVKLSSLNRNIAGIDWNFNAWGGANDGCYNDWSHDLLVSRKILALERIPRFQHSMILEGGSIHVDGEGTCLVTEECLLNKNRNPHMSKEQIEEELKKYLGVQSFIWLPRGLYGDEDTNGHIDNMCCFARPGVVLLSWTDDETDPQYERSVEALSVLSNSIDARGRKIQVIKLYIPEPLYMTEEESSGITQDGEAIPRLAGTRLAASYVNFYIANGGIIAPQFGDPIRDKEAIRVLSDTFPHHSVVGIENAREIVLAGGNIHCITQQQPAEPTSVAENGH

SEQ ID NO: 4358 - protein, 227 aa, Triticum aestivum
QVCTKKQAGTGPEFPGYRRPTRPARERIQSKTPSGPSSSNQSSSRFGDTDDFDPFGDNYDNDRTENQALESATKLNYHSYMDKKTRAKWTKSDTDLFYQGLQQFGSDFAMIQQLFPDKSRDQVRQKFKSEDKKHPMQVHDAILHRSRDNLYLKQVMKQLNIEDSLKDIHITQKQEVAFTEGNTGNDVISETNTFRCGKCFEFVRLRKWAPPNLRSKKGKIHLEMLII

SEQ ID NO: 4359 - protein, 372 aa, Staphylococcus epidermidis ATCC 12228
MTNYSTYVDWRRTFHQYPELSDEEYETTEKLRKILKSYGIRILEVPLKTGLVAEIGQGEEMIAVRTDIDALPIEEQVKHEFTSKYQGAMHACGHDIHMASILATGIQLKEIEDELNGRVRLIFQPAEELGHGAFEIINTGVLKGAKAVLGFHNYPTLKVGEFAIKSGAITSAVDRFEFNVKGKGAHAAKPEQGNDPVIVVGQLINSLQTIVSRNLSAFDSAVVTIGEISCGNTWNVIADKAYIQGTVRSFDEDIRHYIENRMKNIADGLSRVFNVDIDLTYSRLPGAVVNDAHLTQEAIEVAKNVGYHVSMLDEPVTIGEDFSGYTEEYPGVFAFIGSDSKYDLHHPKYHPDERILEKVPQYFVQLVQRLLT

SEQ ID NO: 4360 - protein, 649 aa, Magnaporthe grisea 70-15
MSTINESPPPTYTKEAPQQTATEERHVQSDEESAVVKTQDGVKAMEAVSMTWSKWGLIVAYLGIFLMAFSTSLEAQTTFSYSAFATSSFQSHSLLSTVTVVQSVVLAVMKPIMSKVSDVTGRLEAFTLSIVLFVLGFIQQAASTSIDSYASAQIFYSAGSTGVQILQQIFIADTSNLLWRALFSSLPDIPFLVTVWVGPEISARMLEQGSWRWRWGYGMWAIILPVAFLPFAISLFLNQRKAKKLGVLDDRGDWISAIKRQGPATTFIKMVQSVDLFGILLLSAGFALLLIPLTIATRQTGGWGNGSIIAMLIIGAISLIAFCFWECASARINPHPLIPLYLFKSKTFCAGCGIAFFYFMVFYLSVFPYYNSYLLVVHRMDIATAGRITQVFSFSSTVMSVLVSLAIRYTKHYKYFITAGSLLYLLGIALMINYRSENAGMPALIGTQVCIGVGGGMLNVPTQLGVQATAKHQNLAIATAVWLTVLELGGAVGSAISGAIWTKVVPATLTELLPEASRANATMIFNNVNTAMALEWGSPERMAINAAYQAGMRQMLIVAVCMCVPIVLLSLLMRNMKLDEVDQGVKGYVIGGRVDGDSKKDANTAVASSSGVAAGPQHHQQEQDQPVQEATKSDQVVDRSTATSPEIRG

SEQ ID NO: 4361 - protein, 136 aa, Corynebacterium diphtheriae
MTERTLILIKPDGVERGLIGEIIARIERKGLKISALDLRVADRETAEKHYAEHADKPFFGELVNFITSAPLIAGVVEGPRAIEAWRQLAGGTDPVAKATPGTIRGDFALEVSTNVVHGSDSPESAEREISIWFPNL

SEQ ID NO: 4362 - protein, 299 aa, Novosphingobium aromaticivorans DSM 12444
MSEEKTALTVPALGGEASLNRYLSEIRKFPVLTAEQEYMLAKRFQEHQDPEAAAQLVTSHLRLVAKIAMGYRGYGLPVSELISEGNIGLMQGVKKFEPDRGFRLATYAMWWIKASMQEFILRSWSLVKMGTTAAQKKLFFNLRRMKKNLEAFEDSDLHPDDVRKIATDLGVPEQEVVNMNRRMMMGGDASLNVSMREDGEGSWQDWLTDDRPLQDETVADAEEAQYRHELLVEAMESLNERERHILTDRRLIDDPKTLEELSQVYNVSRERVRQIEVRAFEKLQKAIQRIAVERKLLPA

SEQ ID NO: 4363 - protein, 496 aa, Zinnia elegans
MCSTTLNMCDLEFFILASCLVLALFLILKLVKRRTNNGSTRNLPPGNMGWPFIGETIGYLQPYSATTIGKFMEQHISKYGKIYKSSLFGEPTIVSADPGLNKYILQNEGRLFECSYPRSIGGILGKWSMLVLVGDMHRDMRQISLNFLSNARLKTQLVNEVEKNTLWVLDSWKENSPFCAQEEAKKFTFNLMATHIMSLDPGEPETERLKKEYVTFMKGVVSPPLNFPGTAYWKALKSRATILKFIETKMEERIRMDEGNGLGKLDNDLLGWSMKNSNLTKEQILDLVLSLLFAGHETSSVSISLAVYFLEACPTAVRQLREEHEEIVMKKKLLGEKYLTWDDYKKMEFTQCVINETLRFGNVVRFLHRKAIKDVRYKGYDIPCGWKVLPVIAAVHLDPTHFDQPYLFDPWRWQNASVTSSTCSTPPSASNFMPFGGGPRLCTGSELAKLEMAIFIHHLVLKYEWELVDSDEAFAYPYLDFPKGLPIKIRHRKQSC

SEQ ID NO: 4364 - protein, 500 aa, Neisseria gonorrhoeae
MTTSKCPVTHLTMNNGAPVADNQNSLTAGTRGPLLTQDLWLNEKLADFVREVIPERRMHAKGSGAFGTFTVTRDITKYTRAKIFSEVGKKTEMFGRLATVAGERGADAYTRVRGFALKFYTEEGNWDVVGNNTPVFYPDLRKFPDLNKAVKRSAHQYSSATNNWDFWALLPEALHQVTIVMSDRGIPASYRHMHGFGSHTYSLWNEAGERFWVKFHFRSQQGIKNLTNEEAAKIIADDRESHQRDLYEAIERGEFPKWTMYIQVMPEADAAKVPYHPFDLTKVWPKKDYPLIEVAEFELNRNPENFFADVEQSAFAPSNLVPGIGASPDKMLQARLFNYADAQRYRLGVNFRQIPVNRPRCPVHSNQRDGQGRATELRQPAHYEPNSFGQWSQQPDFAEPPLKINGDAAHWDYRQDDDDYFSQPRALFNLMNDAQKQALFDNTAAAMGDAPDFIKYRHIRNCYRCDPAYGEGGSKALGLTVEEPQAARATDPALGQGGLL

SEQ ID NO: 4365 - protein, 479 aa, Pseudomonas putida
MSKILTTASGAPVADNQNSRSAGPRGPLLLDDFHLIEKLAHFNRENIPERRVHAKGSGAYGTFTVTRDITGYTSAKLFEQVGKQTETFLRFSTVGGERGSADTERDPRGFAVKFYTEEGNWDIVGNNTPVFFIRDPLKFPDFIHTQKRHPQSNLKNAQIFWDSWSHSPEALHQVTILFSDRGIPDGYRHMHGFGSHTYSLINAQGERTWVKWHFKTQQGIKNLAPADAARLAGTDPDYAQRDLFEAIERGDYPRWTVCIQVMSEAEAASRDENPFDVTKTWSQKDYPLIEVGVLELNRNPLNYFAEVEQAAFGPSNMVPGVGLSPDRMLQGRVFAYADAHRYRVGTNHQQLPVNAPRCPVNSYQRDGSMATGSYGSAPNYEPNSYAAAPKQSPRHAEPALALNGSADRYDHREDADYYSHAGALFRLMSDEQKALLISNIAGTMAGVSENVIQRQLQYFFKADPAYGEGIAKGLGINLA

SEQ ID NO: 4366 - protein, 479 aa, Desulfovibrio vulgaris (strain Miyazaki)
MTKHKLTTNAGAPVPDNQNAMTAGPRGPMLLQDVWFLEKLAHFDREVIPERRMHAKGSGAYGTFTVTHDITSYTKAALFSKIGKKTDLFVRFSTVAGERGAATAERDIRGFAIKFYTEQGNWDLVGNNTPVFFLRDPLKFPDLNHAVKRDPRTNMRSAKNNWDFWTSLPEALHQVTVVMSDRGIPASYRHMHGFGSHTFSFISPDNQRYWVKFHLRTQQGIKNLTDAEAEAIVARDRESHQRDLYDSIERGDFPRWTMYVQVMPEKDAEKLPYHPFDLTKVWFHKDCPLIEVGVLELNRNPENYFAEVEQAAFNPANVVPGISFSPDKMLQGRLFSYGDAHRYRLGVNHHLIPVNAARCPVHSYHRDGAMRVDGNHGSTLAYEPNSYGEWQEQPDFAEPPLAIRGDAAHWNFREDADYYDQPGRLFRLMTPQQQDELFQNTARAMGDAPEEIKRRHVGNCAKADPAYGAGVARALGLKM

SEQ ID NO: 4367 - protein, 277 aa, Streptomyces avermitilis MA-4680
MSGAAFSRQRGQLLSDTLAAAKAEGRSALIAYLPAGFPTVDGGIAAIKAVFDGGADVVEVGLPHSDPVLDGPVIQTADDIALRGGVRIADVMRTVREAHEATGKPVLVMTYWNPIDRYGVERFTAELAEAGGAGCILPDLPVQESALWREHAEKHGLATVFVVAPSSKDARLAEITAAGSGFVYAASLMGVTGTRASVGEQAQDLVRRTRATTDLPVCVGLGVSNATQAAEVAGFADGVIVGSAFVKLMLDAEDEAAGLEAVRALAGELAKGVRGGD

SEQ ID NO: 4368 - protein, 447 aa, Rhodospirillum rubrum
MSDFDPALAGGLSRAELEAHWMPFTANREFKANPRMVVGAEGVHYIDARGRKLYDSLSGLWCCGAGHGRREIIEAVSAQIAALDYAPAFQFGHPSSFKLANKVASLTPKGLDHVFFTNSGSESVDTALKMARAYWRLKGEPARTKLIGRAKGYHGVNFGGLGVGGIGGNRKLFGVGIDADHLPHTMLPENAFTKGCPETGAELADALEDLVALHDASNIAAVIVEPLAGSTGVLPPPKGYLQRLRAICDKYGILLIFDEVITGFGRMGAAFGADAFGVVPDIMTIAKGLTNGAVPMGAVVASGEIYRTFMENSGPDHLVEFPHGYTYSAHPVACAAGLAALEIFEKDQLAARAAALAPYFENSLHGLRGLKHIVDIRNYGLAGAVQIENAPGQPAKRPLEIGRKCWEAGYYVRFGGDSLQFGLPFFSEPAQIDGLMNAVADAVSSVA

SEQ ID NO: 4369 - protein, 283 aa, Burkholderia mallei ATCC 23344
MHLINLSFLVPTMRREFGGCAGNIAYALNLLGGDARMMGTLGAVDAQPYLDRMDALGLSREYVRVLPDTYSAQAMITTDLDNNQITAFHPGAMMQSHVNHAGEAKDIKLAIVGPDGFQGMVQHTEELARAGVPFIFDPGQGLPLFDGATLRRSIELATYIAANDYEAKLVCDKTGWSEDEIASRVQALIITRGEHGATIRHRDGNEQIPAVRAERVIDPTGCGDAFRGGLLYGIEHGFDWATTGRLASLMGSLKIAHQGPQTYAPTRAEIDARFETAFGYSPK

SEQ ID NO: 4370 - protein, 386 aa, Francisella tularensis subsp. tularensis SCHU S4
MISICANTIKELQRIRQHIHQYPELGFDVYNTADFIANELEKIGLEIKRGIGKTGLIADLKVTAAKKTIALRADMDALPIHEQNNCEYKSKIAGKAHMCGHDAHCAMVIVAAQQFAANKDKLNVNIRFIFQPSEEVLPGDAPAMIADGAIDGVDEIYGIHVLPTINEGTMQISTPVALAGVDLFEITFYGRGGHASTPMKANDPIIMACQFVNQVQTIVSRNANSFDPLVISVTAIEAGSAFNVIPDQAKLKGAIRYLSSSGEDIAKKRLHEIANGIATTYQGEVEINYFHGYPETRNDSNSSARAINSAKKALGDNNVIESKYPWMASEDFSYFAKKVPACYAFLGVKNEAKGFTSMVHEPNFDLSNEAMLNGVKYYVSLISSFE

SEQ ID NO: 4371 - protein, 232 aa, Haemophilus influenzae R2866
MNYISFPTAQHAVDKIAQEFLIYSQLNHPVHISLSGGSTPKLLFKTLAKLPYAEQINWKNLHFWWGDDRMVLPSDPESNYGEVQKLLFDHIQIPTENIHRIRGENEPHFELKRFEEELSAVIPKGIFDWIILGMGADGHTASLFPHQTNFDDENLAVIAKHPESGQIRISKTAKLIEQAKRITYLVTGESKAEILKEIQTISSENLPYPAAKIKAKNGVTEWYLDKIAAQLL

SEQ ID NO: 4372 - protein, 271 aa, Glycine max
MACSLNSVFCVPDLNESMFGSRTKGALVPCPSKTGKVKSWGCSVLSNAFMGKSISLDEKGSGCCNSKSSSNIPVHAQATICVSKALKWWKKTLKPNMIEIHSAQELVHSLVNAGDSLLVVDFYSLGCGGCKALHPKICQIAELYPNATFLKVNYEELKTMCHGLRIHVLPFFRFYRGSEGRVCSFSCTNATIKKFKDALAKHGSERCSFGPTKGLEESELKILASIGEINSSPLLCPKLGKLEDLVMESHDFSGVWSMESNSRGIMLDAIY

SEQ ID NO: 4373 - protein, 305 aa, Nicotiana tabacum
MQIFVKTLTGKTITLEVESSDTIDNVKSKIQDKEGIPPDQQRLIFAGKQLEDGRTLSDYNIQKESTLHLVLRLRGGMQIFVKTLTGKTITLEVESSDTIDNVKSKIQDKEGIPPDQQRLIFAGKQLEDGRTLSDYNIQKESTLHLVLRLRGGMQIFVKTLTGKTITLEVESSDTIDNVKSKIQDKEGIPPDQQRLIFAGKQLEDGRTLSDYNIQKESTLHLVLRLRGGMQIFVKTLTGKTITLEVESSDTIDNVKSKIQDKEGIPPDQQRLIFAGKQLEDGRTLSDYNIQKESTLHLVLRLRGGQ

SEQ ID NO: 4374 - protein, 358 aa, Listeria monocytogenes EGD-e
MTLKVGIIGCGGIANGKHMPSLLKAEKAEMVAFCDIVLEKAEAAAKEFGSENASVYTNYVELLQDKSIDVIHVCTPNISHAEISIAAMEAGKHVMCEKPMAKTTEEAKSMIEAAERTGKKLTIGYQNRFRKDSDYLHQVCENGELGDIYYAKAKAIRRRAVPTWGVFLDEEAQGGGPLIDIGTHALDLTLWMMDNYKPKYVVGNSYHKLAKKENAANAWGSWDPNKFTVEDSAFGFITMENGATIVLEASWTLNTLDVGEARTSLSGTEGGADMEDGLRINGEAHSQMYEKKIQLEAGGVDFYDGTGDDPALIEAEQWLEAIEKNTDPVVKPEQALVVTQILEAIYESSKTGQPVYFN

SEQ ID NO: 4375 - protein, 344 aa, Zea mays
PDQQRLIFAGKQLEDGRTLADYNIQKESTLHLVLRLRGGMQIFVKTLTGKTITLEVESSDTIDNVKAKIQDKEGIPPDQQRLIFAGKQLEDGRTLADYNIQKESTLHLVLRLRGGMQIFVKTLTGKTITLEVESSDTIDNVKAKIQDKEGIPPDQQRLIFAGKQLEDGRTLADYNIQKESTLHLVLRLRGGMQIFVKTLTGKTITLEVESSDTIDNVKAKIQDKEGIPPDQQRLIFAGKQLEDGRTLADYNIQKESTLHLVLRLRGGMQIFVKTLTGKTITLEVESSDTIDNVKAKIQDKEGIPPDQQRLIFAGKQLEDGRTLADYNIQKESTLHLVLRLRGGQ

SEQ ID NO: 4376 - protein, 587 aa, Idiomarina loihiensis L2TR
MNNEFNKGRRKFIKSAFTAASALAIAKVAPTWAAPQGRSFKDQILTNDEIDLTIAKSPLLVGNKVGAPITINGQMPGPLIRLKEGQRAKLNVTNRLSEDTSIHWHGIILPENMDGVPGVSFEGIKPGRTFKYRYDVEQNGTYWYHSHSGLQEQLGHLGPLVIEPKDGDIGADREHTIILSDWTFEDPDTVFRNLKVAEGYYNYQKRTIFETFEDVRQQGLEKTWKQREMWGQMRMSPRDIADVTGSTYTYLMNGRDSQMNWSALFKPGEKVRLRIINGSAMSYFDVRIPGLEMTVVAADGQPIKPVSIDEFRIGVAEVYDVIVQPRKNQAYTIFAESFDRSGYVRGTLTPEMGLEAEVPELRPAVERGMAAMGMGAMAMSGDMKGNSMNMKHMGGNNSHMTHKMTHKKELPVENIKIKHRESGHGAGAAMIATNPVSRLHEPGIGLEDVDHKVLVYTDLVGAHEWPDTREPERQIELHLTGHMERYMWSFDGKKFTEVDGPVQFHHGERLRLVMVNDTMMDHPIHLHGMWMELENGQYPRPRKHTISLKPSEKVSLLITADAPGSWAFHCHLLYHMKAGMFRVVNVA

SEQ ID NO: 4377 - protein, 509 aa, Arabidopsis thaliana
MDVEQKKPLIESSDRNLPDFKKSVKLKYVKLGYHYLITHGMYLFLSPLVLVIAAQISTFSVTDLRSLWEHLQYNLISVVVCSMLLVFLMTIYFMTRPRPVYLVNFSCFKPDESRKCTKKIFMDRSKLTGSFTEENLEFQRKILQRSGLGESTYLPEAVLNVPPNPCMKEARKEAETVMFGAIDELLAKTNVNPKDIGILIVNCSLFNPTPSLSAMVVNHYKLRGNILSYNLGGMGCSAGLISIDLAKHLLHSIPNTYAMVISMENITLNWYFGNDRSKLVSNCLFRMGGAAILLSNKRWDRRRSKYELVDTVRTHKGADDKCFGCITQEEDSASKIGVTLSKELMAVAGDALKTNITTLGPLVLPTSEQLLFFATLVGRKLFKMKIKPYIPDFKLAFEHFCIHAGGRAVLDELEKNLKLTEWHMEPSRMTLYRFGNTSSSSLWYELAYSEAKGRIKKGDRIWQIAFGSGFKCNSSVWRAVRSVNPKKEKNPWMDEIHEFPVEVPKVSTI

SEQ ID NO: 4378 - protein, 381 aa, Nicotiana tabacum
MQIFVKTLTGKTITLEVESSDTIENVKQKIQDKEGIPPDQQRLIFAGKQLEDGRTLADYNIQKESTLHLVLRLRGGMQIFVKTLTGKTITLEVESSDTIENVKQKIQDKEGIPPDQQRLIFAGKQLEDGRTLADYNIQKESTLHLVLRLRGGMQIFVKTLTGKTITLEVESSDTIENVKQKIQDKEGIPPDQQRLIFAGKQLEDGRTLADYNIQKESTLHLVLRLRGGMQIFVKTLTGKTITLEVESSDTIENVKQKIQDKEGIPPDQQRLIFAGKQLEDGRTLADYNIQKESTLHLVLRLRGGMQIFVKTLTGKTITLEVESSDTIENVKQKIQDKEGIPPDQQRLIFAGKQLEDGRTLADYNIQKESTLHLVLRLRGGF

SEQ ID NO: 4379 - protein, 424 aa, Frankia sp. CcI3
MKPNRRVVITGIGVRAPGGGGAKNFWNLLTAGRTATRRISFFDAGPFRSQVAGEVDFDAQAEGLTPRQIRRMDRAAQFAVVCTRDAVEDSGLELDRVEPHRIGVSLGSAVAAATSLEAEYLVLFDSGRTREMDTRHLTPHMFDHMVPSVMAAEVAWTVGAEGPVTMVSDGCTSGLDAIGHALHLIEDGVVDVMAAGATDTPISPIVLACFDAIKATTSYNDEPATASRPFDRSRNGFVLAEGCAMFVLEEYEHARRRNAEIYAEVTGYATRLNAFHMTGLKPDGREMAEAIRTALAQSRLDPSDVDYVNAHGSGTRQNDLHETAAVKASLGEHARRVPISSIKSMVGHSLGAIGSIEVAACALALRYSVIPPTANLRLPDPQCDLDYVPRVAREATLDTVLTIGSGFGGFQSAMVLRQPGGRAA

SEQ ID NO: 4380 - protein, 428 aa, Rhodobacter sphaeroides 2.4.1
MTKSAKLTIGEKVIDLPIHSPTLGPDVVDIRKLYAEADVFTYDPGFTSTAACESTITYIDGDKGELFYRGYPIEQLADRSHYLEVCYLLLYGELPNAAQQADFEYRITRHTMLHEQIHYFFRGFRRDSHPMATMVGVVGAMSAFYHDSLDINDPWQREVAAIRMIAKLPTIAAMAYKYSIGQPFNYPQNHLDYAGNFLHMCFAVPAEPYTVNPVLAKAMDRIMMLHADHEQNASTSTVRLAGSSGANPFACIAAGIACLWGPAHGGANRACLEMLREIGTVDRIPEYIRRAKDKDDPFRLMGFGHRVYKNFDPRAKVMKESADEVLGLLGIENNPTLQVAKELERIALEDDYFVAKKLYPNVDFYSGIILDAMGFPTSMFTPIFAISRTVGWISQWKEMIGDPTQKIGRPRQLYKGETRRDYVDLRHR

SEQ ID NO: 4381 - protein, 329 aa, Solanum tuberosum
MAVNGSAPSSGLIVSFGEMLIDFVPTVSGVSLAEAPGFLKAPGGAPANVAIAVTRLGGKSAFVGKLGDDEFGHMLAGILKTNGVQADGINFDKGARTALAFVTLRADGEREFMFYRNPSADMLLTPDELNLDLIRSAKVFHYGSISLIVEPCRSAHLKAMEVAKEAGALLSYDPNLRLPLWSSEEEARKQIKSMWNYADVIKVSDVELEFLTGSNKIDDECAMSLWHPNLKLLLVTLGEKGCNYYTKKFHGSVGGFHVKTVDTTGAGDSFVGALLTKIVDDQAILEDEARLKEVLRFSCACGAITTTKKGAIPALPTVSEVLTLLKGGA

SEQ ID NO: 4382 - protein, 289 aa, Ralstonia solanacearum
MSTTTLAPAAAASVPDAPFDAPFRVAAIQTVTGIDVDANLARADALLAEAAARGAQLALLPEYFCMMGRKDSDKVAIREADQDGPIQAFLADAARRHRLWLVGGTLPLWCEDAERVRNTSLAFDPAGQRVARYDKIHLFNFVRGEERYDEARTIEPGATPVAFEAPCGRVGMSVCYDLRFPELYRALSAQGNLNLILMPAAFTYVTGAAHWEILLRARAVENQCYVLAAAQGGRHENGRRTWGHSMLVDPWGEIIASVPEGEGVAIGDMDPARLAQVRRDLPALKHRVM

SEQ ID NO: 4383 - protein, 319 aa, Mycobacterium leprae TN
MAEATTNRVDSDLDAQSPAADLVRVYLNGIGKTALLNAADEVELAKRIEAGLYAEHLLQTRKRFGEGRKRALAAVARDGAAARRHLLEANLRLVVSLAKRYTGRGMPLLDLIQEGNLGLIRAMEKFDYTKGFKFSTYATWWIRQAITRGMADQSRTIRLPVHLVEQVNKLARIKREMHQNLGREATDEELAAESGIPIEKINDLLEHSRDPVSLDMPVGSEEEAPLGDFIEDAEAMSAENAVIAELLHTDIRSVLATLDEREHQVIRLRFGLDDGQPRTLDQIGKLFGLSRERVRQIERDVMCKLRNGERADRLRSYAS

SEQ ID NO: 4384 - protein, 371 aa, Bacillus cereus E33L
MKTLELQERLTEIFQHLHENPEVSWKEYETTAYITNFLKEEGISYKTFDDCPGVIAEIGTGNPVVAIRADMDALWQEVNGEFKANHSCGHDAHMTIVMGLILQLKNMRWKSGTVRFIFQPAEEKGNGALKMVEKGAVDDADFLFGVHLRPIEELSLKQAASSIRHGAAGFLEGTIHGEDAHGARPHQGINAIDVISMINIGLKNIWLPPQSSYSVKMTRCQAGGDNLNIIPGNGHFSLDVRAENNTLLEELKKRIEHVIESAASMGSKTSYEWIDLAPGAEVSEEAERYMRKGILEVYGENKCTGPLYTTGSDDFHYYTVKRPYLKAVMLGLGADLQPGLHHPYMKFDHSCIMDGVEILKQTVLKVLEDRG

SEQ ID NO: 4385 - protein, 364 aa, Zea mays
MGSTAGDVAAVVDEEACMYAMQLASSSILPMTLKNAIELGLLEVLQKEAGGGKAALAPEEVVARMPAAPSDPAAAAAMVDRMLRLLASYDVVRCQMEDRDGRYERRYSAAPVCKWLTPNEDGVSMAALALMNQDKVLMESWYYLKDAVLDGGIPFNKAYGMTAFEYHGTDPRFNRVFNEGMKDHSVIITKKLLDFYTGFEGVSTLVDVGGGVGATLHAITSRHPHISGVNFDLPHVISEAPPFPGVRHVGGDMFASVPAGDAILMKWILHDWSDAHCATLLKNCYDALPENGKAIVVECVLPVNTEATPKAQGVFHVDMIMLAHNPGGKERYEREFRELAKGAGFSGFKATYIYANAWAIEFIK

SEQ ID NO: 4386 - protein, 376 aa, Pseudomonas sp. BG33R
MTTLHSTPRADGFHMPAEWAPQTQTWMIWPERPDNWRLGGKPAQAAHVAVAKAIARFEPVTVAVSAGQYENARARLDVPNIRLVEMSSDDAWVRDTGPTFVINDSGEVRGVNWDFNAWGGFDGGLYAPWNRDSQVGGKILEIERAPRYRTQGFVLEGGSIHVDGEGTLITTEECLLNRNRNPHLDRAAIEAVLADHLAVDKIIWLPDGLFNDETDGHVDNFCCYVRPGEVLLAWTDDPQDPNYPRCHAAMDVLQNSTDAKGRAFIVHKMPIPGPLYATEEECAGVDPVDGSQERNPSVRLAGRNVNFLIVNGGIIAPSFDDPLDHTGQTNPAEPVPAARSSDGAGPRTVTGGRQYSLPDPTAARTAQKLSVVVTVL

SEQ ID NO: 4387 - protein, 464 aa, Burkholderia vietnamiensis G4
MKQSIDALLRADRAHFMHPSTHAYDHESGALPGRIVRGAHGIHIEDHEGRRYIDAFAGLYCVNIGYGRTEVADAMHEQAKQLAYYHTYVGHASDAIIELSSRIIECAPVGMKKVYYGMSGSDANETQVKLVWYYNNVLGRPNKKKIISRERGYHGSGIVTGSLTGLPSFHQHFDLPIDRVKHTVCPHWYRNAPVGMSEAQFVAYCVDELEKLIAREGADTIAAFIAEPVMGTGGIIAPPAGYWPAIQAVLRQHDILLISDEVVCGFGRLGSKMGAQHFGIEPDLITVAKGLTSAYAPLSGVIVGDKVWDVIARGSQAHGPMGHGWTYSGHPVCAAAALANLAILERENLVGNAAEVGAYFGAKLRDAFGAHPLVGEVRSVGMLAALEFMADRDARTPFDPALKIGAQVSAAALRRGVIARAMPHGDILGFAPPLVMTRAEADEIVGIVKEAVDEVAERNLAAVS

SEQ ID NO: 4388 - protein, 492 aa, Burkholderia vietnamiensis G4
MLPGHPVLFKSMCYVDGRWIHSDSAATRAVVNPADQSVIGHVPMLERAQIVGAVDAAQRAFGTWRWTPQAARSAALLRWHALILRHLDDLAALLSLEQGKPLAEARGEIRYAASFVEWFANEAKRAVGRTIPTHIDGAHLGTVMEPVGVAALITPWNFPAAMITRKAAAALAVGCTVIVKPAHETPFSALALAQLADEAGFPAGVFNVVLGEPQMAMEALVGDARVRAVSFTGSTRVGRLVTETAAKAGIRKIALELGGNAPFIVTDDADLDDAVRIAVGAKFQTSGQDCCAANRIFVARALYDAFVGRYASAVRALKTGPAFEPGVDVGPLMHQAAFDATVARVDDARARGARIVAGGRPHALGGWFYEPTVIADAAPGMRVYDEENFAPISAVCAFDTLDEVVARANDTEYGLAAYVCATRIDTIFRLVRRLDFAMVSVNGVKFTGAPIPFGGMKASGLGREGGVEGFEPFTETKYFCFGNLGLPVAATA

SEQ ID NO: 4389 - protein, 529 aa, Magnaporthe grisea 70-15
MATMPTNGNVNHQDQNAASASSRSQSNTESSSLSKDEVGWYFVEQYYTTLSKNPERLHLFYGKHSQLVYGLEAEVANVSVGRQQIQERIKSLDLQDCKVRVSNVDSQASEESIVIQVIGETVNKGGEPKKFVQTFILAKQPSGYFVLNDILRYINDDAEEDAAETAAAEEEAAAPETQAAAEPEAAKVEPEAAKPEAEAAEVDAAVSKDAEKTAESKEAPAAEAASTQPATQKDAVATPAKAESAAATPDPEKVAEEIAEEEVKKPELPKDPSPTPVAPRPAAPAAAEPEKAKEPPKPMTWASRAAAAARPAVALPKPAVPAAAPAARPAAAAPAATPAAAAPAAAAPKPAAPAPAAEAPAAQESGSEWQTAGADSKRQKGSQSVVGAPQEDKGTLGYVKFVTEKVKTENLKTHLSSFGELVYFDINRTKNCAFVEFANIAGYTAAAAANPHTVDGEQIYVEPRRPKASAYGGSNYSNRGGSVPGRGRGGFDGNRSGSQGGRGSYGNQGRGGRGGAPRGRGGVSQPTNA

SEQ ID NO: 4390 - protein, 477 aa, Bacillus thuringiensis serovar konkukian str. 97-27
MKIVLRKESNIPYYKQIYMQIVERIQSGMLSHGDSLPSLRSMAEDLQISLLTVRKAYKHLEKKEYIRIEQGKGAYIHKHVKKDSKPIPYKWQQTKTINVMRSQYAMNQHRKYYDFSQAILYPRLLPNPFLADEMHKILNKDKMILATYGPVQGDYELRVEIANYLHEHQNLVTDPSQLLITSGAQQGIDLIAQTLLKPGDIVLVESPCYSAALDIFINKGAQIIPVSLDNHGVRSDLIDDICQSENPVLLYTNPTFQNPTGTVMSKERRMELIELAELYEFFIIEDDSFGEIYFEDAIVPPPIKNFDTNGHVLYIKGFSKTLAPGLRIASLIADGPIFAWLYAVKGSMDIGSPLLTQKALLPFLRAERMKHHLEKLRTALQIRRDITIDMLSPLKEIQFEIPDGGFNLWITLPNSIDPFTLLQKANEVDVSFLPGTACLLHNDINNNQFRISYSMLNEKDMLIGLEKLHDSIRNYKL

SEQ ID NO: 4391 - protein, 243 aa, Streptomyces avermitilis MA-4680
MAIIETEATLHEAHRDNHTHRDVNGGWLRPAVFGAMDGLVSNLALMTGVAGGSVGQQTIVITGLAGLAAGAFSMAAGEYTSVASQRELVEAELDVERRELRKHPKDEEAELAALYAARGVEPELAREVARQLSRDPEQALEIHAREELGIDPGDLPSPAVAAVSSFGSFALGALLPVLPYLLGASALWPALLLALIGLFACGAVVARVTARSWWYSGLRQLALGGAAAGVTYVLGSLIGAAVG

SEQ ID NO: 4392 - protein, 231 aa, Bacillus thuringiensis serovar konkukian str. 97-27
MMGYKAMLFDLDDTLLNRDKAVDNLFLLLFEKCYEDVSDTIKNNMLRKFKEYDKREYGMSDKTIVLESLFDEFPPKYKLPRNYIQDFWNENFPKCFSIDQNTIHFLNHIKKHFEVGIITNGSTQRQKAKIINTNLNNYFDTIIISEEVGFSKPDKRIFELALNKLNVQPENTLFVGDDLEKDIAGPQNANIKGVWFNPQKIKNTTKIQPYAEINTLDSLLSYVTPQYFFNK

SEQ ID NO: 4393 - protein, 199 aa, Brassica napus
  misc_feature (164)..(164): Xaa can be any naturally occurring amino acid
  unsure (1)..(199): unsure at all Xaa locations
PRIRGLFGTGAGSSVSIENAGLLALTRVGSRRVVQIAAGFMIFFSILGKFGAVFASIPGPIIAALYCLSFAYVAAGGLSFLQFCSLNSFRTKFILGFSVFLGLSIPQYFNEYTAIRGYGPVHTGAPWFADMVNVPFPSEPFVAGRVPFFLDNTLPKKDSSIRKXRGKHWWDKFRSFKGDTRSEEFYSLPFNLNKYFPSG

SEQ ID NO: 4394 - protein, 379 aa, Neurospora crassa
MPSTIALEKEDHQRDAEFKKVMHGDSAKAAGGVAALLKKNTEAQQIAVDEYFKHFDNKTAEAETQADREARTKEYATLTRHYYNLATDIYEYGWGQCFHFCRYSPGESFYQAIARHEHYLAAQIGIKKDMKVLDVGCGVGGPAREIAKFTDAHITGLNNNDYQIDRATHYAVRDGLSGQLKFVKGDFMQMSFPDNSFDAVYAIEATVHAPKLEGVYGEIYRVLKPGGTFGVYEWLMTDNYDNDNVEHRDIRLAIEVGNGISNMVTISEGLAAMKNVGFELVHHEDLADRNDPMPWYWPIAGELRYMQSYLDFFTVVRMTHTARRILHGFAGILETVGLAPKGTKKTADALARGADGLVAGAKKKLFTPMYLMVGKKPLN

SEQ ID NO: 4395 - protein, 257 aa, Arabidopsis thaliana
  misc_feature (112)..(112): Xaa can be any naturally occurring amino acid
  unsure (1)..(257): unsure at all Xaa locations
MEGITHPIPRTVEEVFSDFRGRRAGLIKALTNDMVKFYQTCDPEKENLCLYGLPNETWEVNLPVEEVPPELPEPALGINFARDGMQEKDWVSLVAVHSDSWLLSVAFYFGAXRFGFGKNERKRLFQMINELPTIFEVVSGNAKQSKDLSVNNNNSKSKPSGVKSRQSESLTKVAKMSSPPPKEEEEEEDESEDESEDDEQGAVCGACGDNYGTDEFWICCDACEKWFHGKCVKITPAKAEHIKHYKCPTCSNKRARP

SEQ ID NO: 4396 - protein, 256 aa, Brassica napus
  misc_feature (124)..(125): Xaa can be any naturally occurring amino acid
  misc_feature (151)..(151): Xaa can be any naturally occurring amino acid
  misc_feature (180)..(180): Xaa can be any naturally occurring amino acid
  unsure (1)..(256): unsure at all Xaa locations
VDPRVRADYCRERMHLALTEEILKEKPEFCDGDTWQEKWKRALFNSFMRVDFELDFVPETVGSTSVVAVVFPTHIFVSNCGDSRAVLCRGKTPLALSVDHKPDREDEAARIEAAGGKVIQWNGXXRVFGVLAMSRSIGDKYLKPSVIPDPXVTSIRRVKEDDCLILASDGLWDVMTNEEXVCDMARKRILLWHKKNAMAGDALLPAEKRGEGKDPAAMSAAEYLSKMALQRGSKDNISVIVVDLKGIRKFKSKALN

SEQ ID NO: 4397 - protein, 396 aa, Methanosarcina acetivorans C2A
MRKRGNEEKGCANMRCIILGGFLGSGKTTTIRKLVETPGIKGEKTAVIVNEIGEIGIDGDTVSAGGVETREITSGCICCTLRISLEQTLRSLMQDYRPETVIIEPTGIAFPKQIKDNILAMNIPGISMAPIVNILDASRFKPEESLQNFIKYQIEDAEVLCINKVDLIDRVSLLEICVFLRKMNPKARIIHFSAREDGEIEELVEILFGGNTGNIKKSTISKSSKRGQMESSASERTPPYDRIPVACRVQVGEKIPLEGRNSVAMSGVSAYSSEFEVFSDSMTLDDAIFVSTELLESIKSRTRSLNPDFTGHIKLSFSHLDTLIRGSVTSASSSPEIEIFKRGSDTGSKMKVFSAITDVSQKALSEAINEAVAEQFEKGQTEIKKVWHAAASSHEH

SEQ ID NO: 4398 - protein, 598 aa, Corynebacterium glutamicum ATCC 13032
MNSQPSADHHPDHAARPVLDAHGLIVEHESEEFPVPAPAPGEQPWEKKNREWYKDAVFYEVLVRAFYDPEGNGVGSLKGLTEKLDYIQWLGVDCIWIPPFYDSPLRDGGYDIRNFREILPEFGTVDDFVELVDHAHRRGLRVITDLVMNHTSDQHAWFQESRRDPTGPYGDFYVWSDDPTLYNEARIIFVDTEESNWTYDPVRGQYFWHRFFSHQPDLNYDNPAVQEAMLDVLRFWLDLGLDGFRLDAVPYLFEREGTNGENLKETHDFLKLCRSVIEKEYPGRILLAEANQWPQDVVEYFGEKDKGDECHMAFHFPLMPRIFMGVRQGSRTPISEILANTPEIPKTAQWGIFLRNHDELTLEMVSDEERSYMYSQFASEPRMRANVGIRRRLSPLLEGDRNQLELLHGLLLSLPGSPVLYYGDEIGMGDNIWLHDRDGVRTPMQWSNDRNGGFSKADPERLYLPAIQNDQYGYAQVNVESQLNRENSLLRWLRNQILIRKQYRAFGAGTYREVSSTNESVLTFLREHKGQTILCVNNMSKYPQAVSLDLREFAGHTPREMSGGQLFPTIAEREWIVTLAPHGFFWFDLTADEKDDME

SEQ ID NO: 4399 - protein, 215 aa, Corynebacterium diphtheriae
MTTATAGLAVELKQSTAQAHEKAEHSTFMSDLLKGRLGVAEFTRLQEQAWLFYTALEQAVDAVRASGFAESLLDPALNRAEVLARDLDKLNGSSEWRSRITASPAVIDYVNRLEEIRDNVDGPALVAHHYVRYLGDLSGGQVIARMMQRHYGVDPEALGFYHFEGIAKLKVYKDEYREKLNNLELSDEQREHLLKEATDAFVFNHQVFADLGKGL

SEQ ID NO: 4400 - protein, 172 aa, Salvia miltiorrhiza
SSQVSDGAGAVLLMKRSVALQKGLPILGVFRTFVAVGVDPAIMGVGPAVAIPAAVKSAGLELEDIDLFEINEAFASQFLYCRNKLGLDPEKINVNGGAMAIGHPLGATGARCVATLLHEMKRRGKDCRYGVVSMCIGTGMGAAAVFERGDACDELCNTRKVEAQNFLSKDAR

SEQ ID NO: 4401 - protein, 427 aa, Pseudomonas putida KT2440
MSRSEALFAQAQKHIPGGVNSPVRAFKSVGGTPLFFKHAEGAYVVDEDDKRYVDYVGSWGPMILGHGHPDVLDSVRRQLEHGLSYGAPTAMETEMADLVCSIVPSMEMVRMVSSGTEATMSAIRLARGYTGRDAIIKFEGCYHGHSDSLLVKAGSGLLTQGVPSSAGVPADFAKHTLTLPFNDIAAVEKTLAEVGQTVACIIVEPVAGNMNCVPPAPGFLEGLREQCDKHGVVLIFDEVMTGFRVSLGGAQGHYGIKPDLSTFGKIVGGGMPVGCFGGKREIMGCIAPLGPVYQAGTLSGNPLAMAAGLTTLKLISRPGFHAELTDYTSRMLDGLQQRADAAGVPFVTTQAGAMFGLYFSGADDIVTFEDVMASDAERFKRFFHLMLDGGVYLAPSAFEAGFTSIAHGDKELQITLDAAEKAFAALK

SEQ ID NO: 4402 - protein, 253 aa, Listeria monocytogenes EGD-e
MGKLNGKVAVVTGAASGMGQQIAILFAKEGAKVVVADLNLEAAQKTVELVEKEHGTGLAVVANVTKQEDIENMINQAIEAFGTLDILVNNAGIMDNFVPAGELTDELWDKVFAINTTGVMRATREALHIFEEKGQGVIVNIASAGGLFGSRAGAAYTASKHAVVGFTKNVGFQYANKNIRCNAIAPGAVNTNIGTTIYAPDEFGQERAMIGMGINPRAGDASEIAKVALFLASDDSSFVNGTVITADAGWTAY

SEQ ID NO: 4403 - protein, 308 aa, Oryza sativa
MERYEVMRDIGSGNFGVAKLVRDVATNHLFAVKFIERGLKIDEHVQREIMNHRSLKHPNIIRFKEARFFFQQLISGVSYCHSMQVCHRDLKLENTLLDGSVTPRLKICDFGYSKSSVLHSQPKSTVGTPAYIAPEVLSRKEYDGKVADVWSCGVTLYVMLVGAYPFEDPDDPRNFRKTITRILSVQYSIPDYVRVSADCRHLLSRIFVGNPEQRITIPEIKNHPWFLKNLPIEMTDEYQRSMQLADMNTPSQSLEEVMAIIQEARKPGDAMKLAGAGQVACLGSMDLDDIDDIDDIDIENSGDFVCAL

SEQ ID NO: 4404 - protein, 422 aa, Glycine max
MLPLLHLTHSSMALRLNPIPTQTFSLPQMASLRSPRFRMASTLRSGSKEVENIKKPFTPPREVHVQVTHSMPPQKIEIFQSLEDWAEENILAHLKPVEKCWQPQDFLPDPSSDGFEEQVKELRERAKELPDDYFVVLVGDMITEEALPTYQTMLNTLDGVRDETGASLTSWAIWTRAWTAEENRHGDLLNKYLYLSGRVDMKQIEKTIQYLIGSGMDPRTENSPYLGFIYTSFQERATFISHGNTARLAKEHGDIKLAQICGMIASDEKRHETAYTKIVEKLFESDPDGTVMAFADMMRKKIAMPAHLMYDGRDDNLFDNYSSVAQRIGVYTAKDYADILEFLVGRWKVEQLTGLSGEGRKAQEYICGLPPRIRRLEERAQARVKESSTLKFSWIHDRESTTLNAPREEHGEIFRQYRSEKC

SEQ ID NO: 4405 - protein, 574 aa, Mycobacterium leprae TN
MEQSRRVPPLQWLSAVARPIARVLTLISTPTFDIADTFGYACPNPPEVSPTEGVYVVATKTSPATGQPVKRTATKTPATPAKRSTTKAANGSAPTKRATSTASRATKSTTPPKASGASDAAKKARTSVKSVDTKAPSAQDHTTKASAAKDTLNDPEATLNTLDSDATADDLDAEPDLDVEPSEDIDIDIEAADLGLDDLEDDDVVTDIEPGETEDGEATAATKTDEASTDDDEEIVEPTEKDKASGDFVWDEDESEALRQARKDAELTASADSVRAYLKQIGKVALLNAEEEVELAKRIEAGLYATQLMTELSERGTKLPTAQRRDMMWICRDGDRAKNHLLEANLRLVVSLAKRYTGRGMAFLDLIQEGNLGLIRAVEKFDYTKGYKFSTYATWWIRQAITRAMADQARTIRIPVHMVEVINKLGRIQRELLQDLGREPTPEELAKEMDITPEKVLEIQQYAREPISLDQTIGDEGDSQLGDFIEDSEAVVAVDAVSFTLLQDQLQSVLETLSEREAGVVRLRFGLTDGQPRTLDEIGQVYGVTRERIRQIESKTMSKLRHPSRSQVLRDYLD

SEQ ID NO: 4406 - protein, 364 aa, Zea mays
MGSTAGDVAAVVDEEACMYAMQLASSSILPMTLKNAIELGLLEVLQKEAGGGKAALAPEEVVARMPAAPGDPAAAAAMVDRMLRLLASYDVVRCQMEDRDGRYERRYSAAPVCKWLTPNEDGVSMAALALMNQDKVLMESWYYLKDAVLDGGIPFNKAYGMTAFEYHGTDSRFNRVFNEGMKNHSVIITKKLLDFYTGFEGVSTLVDVGGGVGATLHAITSRHPHISGVNFDLPHVISEAPPFPGVRHVGGDMFASVPAGDAILMKWILHDWSDAHCATLLKNCYDALPENGKVIVVECVLPVNTEATPKAQGVFHVDMIMLAHNPGGKERYEREFRELAKGAGFSGFKATYIYANAWAIEFIK

SEQ ID NO: 4407 - protein, 539 aa, Fusobacterium nucleatum subsp. nucleatum ATCC 25586
MAKIINFNDEARKKLEIGVNTLADAVKVTLGPRGRNVVLEKSYGAPLITNDGVTIAKEIELEDPFENMGAALVKEVAIKSNDVAGDGTTTATILAQAIVKEGLKMLSAGANPIFLKKGIELAAKEAVEVLKDKAKKIESNEEISQVASISAGDEEIGKLIAQAMAKVGETGVITVEEAKSLETTLEIVEGMQFDKGYVSPYMVTDSERMTAELDNPLILLTDKKISSMKELLPLLEQTVQMSKPVLIVADDIEGEALTTLVINKLRGTLNVVAVKAPAFGDRRKAILEDIAILTGGEVISEEKGMKLEEATIEQLGKAKTVKVTKDLTVIVDGGGQQKDISARVNSIKAQIAETTSDYDKEKLQERLAKLSGGVAVIKVGAATEVEMKDKKLRIEDALNATRAAVEEGIVAGGGTILLDIIESMKDFNETDEIAMGIEIVKRALEAPIKQIAENCGLNGGVVLEKVRMSPKGFGFDAKNEKYVNMIESGIIDPAKVTRAAIQNSTSVASLLLTTEVVIANKKEEEKAPMGAGGMMPGMM

SEQ ID NO: 4408 - protein, 540 aa, Klebsiella pneumoniae
MAAKDVKFGNDARVKMLRGVNVLADAVKVTLGPKGRNVVLDKSFGAPTITKDGVSVAREIELEDKFENMGAQMVKEVASKANDAAGDGTTTATVLAQAIVNEGLKAVAAGMNPMDLKRGIDKAVLAAVEELKALSVPCSDSKAIAQVGTISANSDETVGKLIAEAMDKVGKEGVITVEDGTGLEDELDVVEGMQFDRGYLSPYFINKPDTGAVELESPFILLADKKISNIREMLPVLEAVAKAGKPLLIIAEDVEGEALATLVVNTMRGIVKVAAVKAPGFGDRRKAMLQDIATLTGGTVISEEIGMELEKATLEDLGQAKRVVINKDTTTIIDGVGEESAIQGRVAQIRKQIEEATSDYDREKLQERVAKLAGGVAVIKVGAATEVEMKEKKARVDDALHATRAAVEEGVVAGGGVALVRVAAKLAGLTGQNEDQNVGIKVALRAMEAPLRQIVSNAGEEPSVVANNVKAGDGNYGYNAATEEYGNMIDFGILDPTKVTRSALQYAASVAGLMITTECMVTDLPKGDAPDLGAAGGMGG

SEQ ID NO: 4409 - protein, 90 aa, Fusobacterium nucleatum subsp. nucleatum ATCC 25586
MNIKPIGERVLLKPIKKEEKTKSGILLSSKSSNTDTQNQAEVIALGKGEKLEGIKVGDKVIFNKFSGNEIEDGDVKYLIVNAEDILAIIG

SEQ ID NO: 4410 - protein, 175 aa, Batophora oerstedii
  misc_feature (40)..(40): Xaa can be any naturally occurring amino acid
  unsure (1)..(175): unsure at all Xaa locations
MSFATTNKTIVPCATTKQIVRPRFLSNGTISKSRAMMVWXPFNNKFFETFSYLPPLTDDQITKQVDYILRNNWTPCLEFAGSDQAYVTHDNTVRMGDCASTYQDNRYWTMWKLPMFGCIDGSQVLTEISACTKAFPDAYIRLVCFDANRQVQISGFLVHRPESATDYRLPADRQV

SEQ ID NO: 4411 - protein, 363 aa, Vicia faba
MDRRFIFAIVLFAAVATSSTDNTNTDDFIIRQVVDNEEDHLLNAEHHFTSFKSKFSKSYSTKEEHDYRFGVFKSNLIKAKLHQKLDPTAEHGITKFSDLTASEFRRQFLGLKKRLRLPAHAQKAPILPTTNLPEDFDWREKGAVTPVKDQGSCGSCWAFSTTGALEGAHYLATGKLVSLSEQQLVDCDHVCDPEQAGSCDSGCNGGLMNNAFEYLLQSGGVVQEKDYAYTGRDGSCKFDKSKVVASVSNFSVVSLDEEQIAANLVKNGPLAVGINAAWMQTYMSGVSCPYVCAKSRLDHGVLLVGFGKGAYAPIRLKEKPYWIVKNSWGQNWGEQGYYKICRGRNVCGVDSMVSTVAAAQSNN

SEQ ID NO: 4412 - protein, 371 aa, Glycine max
MALGDDAQHHSPSFLDALLCEERETFEEDFDENGYERETENNEPSVIKSQSLPLVLHDNDLFWEDEELVSLIAKEGETHLCFHGVVANGALEGPRVEAVNWISKVCGHYGFSALTTVLAVNYFDRFITSLKFQNDKPWMTQLTAVACLSLAVKTEETHVPLLLDLQVEESRFVFEAKTIQRMELLVLSTLKWRMHPVTPISFFEHIVRRLGLKSRLHWEFLWRCERVLLNVIADSRVMSYLPSTLAAATMIRVIKEIESFNATEYIDQLLGLLKISEEQVNQCYKIIQKLLGCYEGIYSLHQKRKRLSEPGSPGAVTDASFSCDSSNDSWTVSSSVSLSLEPLLKRRKSQDQQMRLPSVNCVSIDVLNSPR

SEQ ID NO: 4413 - protein, 325 aa, Bacillus subtilis subsp. subtilis str. 168
MKYTFNEEKAFDIVAIGRACIDLNAVEYNRPMEETMTFSKYVGGSPANIAIGSAKLGLKAGFIGKIPDDQHGRFIESYMRKTGVDTTQMIVDQDGHKAGLAFTEILSPEECSILMYRDDVADLYLEPSEVSEDYIANAKMLLVSGTALAKSPSREAVLKAVQYAKKHQVKVVFELDYRPYTWQSSDETAVYYSLVAEQSDIVIGTRDEFDVMENRTGGSNEESVNHLFGHSADLVVIKHGVEGSYAYSKSGEVFRAQAYKTKVLKTFGAGDSYASAFIYGLVSGKDIETALKYGSASASIVVSKHSSSEAMPTAEEIEQLIEAQS

SEQ ID NO: 4414 - protein, 212 aa, Dechloromonas aromatica RCB
MKKPVWLFDLDNTLHNATPHIFPHINRSMREYIERHLGVDEHEATRIRQDYWDRYGATLLGLMRHHDTDPNHFLRETHQFTNLKQMVVFEKPLIHMLNRLPGRKIIFSNAPRHYTEAILAITGLKPCFDAIYSVENLHFQPKPMLAGFRALLKAEHLNPRNCIMVEDSLANLVSAKKLGMKTVWVSTGLRQSPFVDVKISSALQLSKRCSRL

SEQ ID NO: 4415 - protein, 165 aa, Ralstonia solanacearum
MSDIYAFEADSLAGQRVPLSQYRGKVLLIVNTASQCGFTPQYAGLEAVYKRLNEKGLEVLGFPCNQFGKQEPGGAEEIGAFCEKNYGVSFPMFGKIEVNGSNAHPLYKWLTSEKPGVLGTEAIKWNFTKFLLRRDGTVYKRYAPLTKPEEMLGDIETLLAEPDPL

SEQ ID NO: 4416 - protein, 327 aa, Salmonella enterica subsp. enterica serovar Typhi Ty2
MATRIEFHKHGGPEVLQTVEFTPTEPAEHEIQVENKAIGINFIDTYIRSGLYPPPSLPAGLGTEAAGVVSKVGSGVEHIRVGDRVVYAQSTLGAYSSVHNVPADKAAILPDAISFEQAAASFLKGLTVFYLLRKTYEVKPDEPFLFHAAAGGVGLIACQWAKALGAKLIGTVGSAQKAQRALDAGAWQVINYREESIVERVKEITGGKKVRVVYDSVGKDTWEASLDCLQRRGLMVSFGNASGPVTGVNLGILNQKGSLYATRPSLQGYITTREELTEASNELFSLIASGVIKVDVAENQRYALKDARRAHEVLESRATQGSSLLIP

SEQ ID NO: 4417 - protein, 695 aa, Yarrowia lipolytica CLIB122
MSYKKIGGEDLELNNINSRNYDSPEAPPNDLDDLADLDDFEHDHEDDYSVDDDRADIGEGLLGGKKSTGKQRQFRRKPKISLKLGLVIAFVIVVLIVGFVIRYLKTSKGWSSDVDSLGRRLQPWQRNTLDEYNLSKNGLWNSSSEPQTREYFWTISDIVGAPDGVQRKMTVINGKFPGPLIEANEGDRIIVHVKNEGADPTGMHFHGMFQKGTNFMDGVLGVTQCGIMPGHEFTYNFTLDGQYGTYWYHSHWDLQAIDGVAGPLVIHSPKEDEAYKHLYDEEMVLFVNDWYHEMGREYMPGYLFPNGENDEPVPQAGLIQGMGEFDCSKYTDRECQQLQKQIIPVEENKTYRIRIINAGAMSEIDFSIDQHKFDLIEVEGFSVEPYELQAARVANAQRYSFLVKTDKREIDEQFWLRTEFNPHCYAEMNDELDINVRAIFSYPSHTEKVKKLIAKGDPNYLVAHGDPQDVKWKDFDGTVECLELNTTMLTPKYNDPIPGRGDFVELHAAFHRQQGAIKRGVFNATTWNPAKEATLSQFLREKPLEMFADGPSKHWGPDQLTVTVNSTRTIDLVINNLDDGAHPFHLHGHKFWILDSGNSYFNFGRYDNIPDRGQVMRDTLQVDGYGWVLIRFVIDNPGIWAFHCHFAWHMEAGLSVQFLALPEELMEMQPPSGWNDMCKAALEEEKEGQKEGQTN

SEQ ID NO: 4418 - protein, 334 aa, Arabidopsis thaliana
NLFTSFFCRKKNETCNHFRPYLKPVEDSWQPQDFLPAPENDDEFYDRVKEIRERTKEIPDDYFVVLVGDMITEEALPTYQTTLNTLDGVKDETGGSLSPWAVWIRAWTAEENRHGDLLNKYLYLTGRVDMRHVEKTIQYLIGSGMDSKFENNPYNGFIYTSFQERATFISHGNTARLATTYGDVTLAKICGTIAADEKRHETAYTKIVEKLFEIDPDGSVQALASMMKKRITMPAHLMHDGRDNDLFDHYAAVAQRIGVYTAADYAGILEFLLRRWKVESLGLGLSGEGRRAQEYLCTLPQRIKRLEERANDRVKLVSKPSVSFSWVFGRDVKL

SEQ ID NO: 4419 - protein, 397 aa, Salmonella enterica subsp. enterica serovar Typhi Ty2
MFQKVDAYAGDPILSLMERFKDDSRHDKVNLNIGLYYNEDGIIPQLKTVAEAEARLNAQPHGASLYLPMEGLNTYRHTIAPLLFGADHPVLQQQRVATIQTLGGSGALKVGADFLKRYFPDAGVWVSDPTWENHIAIFAGAGFEVSTYPWYDDATNGIRFNDLLATLNTLPARSIVLLHPCCHNPTGADLTPSQWDAVIEIVKARDLIPFLDIAYQGFGAGMDEDAYAIRAIASAGLPALVSNSFSKIFSLYGECVGGLSVVCEDAEIAARVLGQLKATVRRIYSSPPCFGAQVVATVLGDEALKASWLAEVDAMRTRIISMRQTLVKELKAEMPDRNFDYLLQQRGMFSYTGLSAEQVDRLRDEFGVYLIASGRMCVAGLNASNVHRVAKAFAAVM

SEQ ID NO: 4420 - protein, 482 aa, Helicobacter hepaticus ATCC 51449
MFGLESKSPKILVIGDLMIDHYVWGSCERISPEAPVQVVDVKDENNRLGGACNVVHNLIALNAQVFVCGVVGNDEAGFWLGEKLESMGVDISYLFVDTSRPTTKKTRVIIANQQVLRVDRESKTPIDSHIHNNIVQHLHAVLDEVDCIIISDYGKGLLNDELTHFVIDYAKSKSKLVLCDPKGKDYSKYTGATLLTPNKKEAELATGITICDKDSLIKAGMTLKTQCQLDISLITLSEDGIGIFDNNQIHIIPTRAKEVYDVTGAGDTVIAALSFALSSGCDIFQACEFANVAAAVVVGKVGSAVATHSEILQYIHTQPSNLQQYIESKIISQESLFTLLKDLKQSKIVFTNGCFDILHIGHLSYLNKARDLGDILIVGLNDDDSIKRLKGKERPINTLHNRALMLAGLECVDYVVSFCQDTPLELIKAIKPDVLVKGGDYHNKEVVGKEYAKEVVLIDFIEGHSTSNIIESIQRSKICKHS

SEQ ID NO: 4421 - protein, 314 aa, Solanum habrochaites
MGSKYSKATNSISDASNSFESYRFPLVDLEEATNNFDDKFVIGESGFGKVYRGVLRDGTKVALKRHNRDSRESIEEFETEIEILPRRSHPHLVSLIGYCDDRNEMILIYDYMENGNLKSHLTGSDLPSMSWEQRLEICIGAARGLLYLHTNGVIHRDVKSTNILLDENFVPKITDFGLSKKGPQLYQTHVSTNVKGTFGYMDPEYVIRQKLTEKSDVYSFGVVLFEVFCARSTIDPYLRREIVTLAEWAVKSHNNGQLEQIVDPNLAAKIRPESLRKFGETAVKCLALSGKDRPSMGDVLWKLEYALCLQESVI

SEQ ID NO: 4422 - protein, 168 aa, Oryza sativa
MAAAPSATSVHDFTVKDASGKDVNLSTYKGKVLLIVNVASQCGLTNSNYTELSQLYEKYKVQGFEILAFPCNQFGGQEPGSNEEIVQFACTRFKAEYPIFDKVDVNGNNAAPLYKYLKSNKGGLFGDSIKWNFSKFLVDKEGRVVDRYAPTTSPLSIEKDIKKLLGSS

SEQ ID NO: 4423 - protein, 320 aa, Solanum habrochaites
MGSKYSKATNSINDASNLSYGVPFENYRVPFVDLDEATNNFDDKFFIGEGGFGKVYRGVLRDGTKVALKRHNHDSRQSIKEFETEIEILSFCSHPHLVSLIGFCDERNEMILIYDYMENGNLKSHLYGSDLPTMSMSWEQRLEICIGAARGLHYLHTNGVIHRDVKSSNILLDENFVPKITDFGISKTMSELDQTHLSTAVKGNIGYIAPEYALWGQLTEKSDVYSFGVVLLEVLCARPALDLSEMMSLGDETQTMGQLEQIVDPTIAAKIRPESLRMFGETAIKCIAPSSKNRPSMGDVLWKLEYALCLQEPTIQDDPE

SEQ ID NO: 4424 - protein, 277 aa, Bacillus thuringiensis serovar konkukian str. 97-27
MSLTSLKDYTTLHNGVKMPWFGLGVFKVEDGSQVIDSVKAAIKNGYRSIDTAAIYQNEEGVGQAIRESGVSREELFITSKVWNSDQGYETTLQAFETTLEKLGLEYLDLYLVHWPVKGKYTESWKALEKLYKDGRVRAIGVSNFHIHHLQDVFEIAEIKPMVNQVEYHPRLAQEELHAFCKEHNIQLEAWSPLMQGQLLDNPTLQDIAKKYNKSTAQIILRWDLHNEVVTIPKSIKEHRIIENANIFDFELSSDDMKAIQALNEDHRVGPDPDNFNF

SEQ ID NO: 4425 - protein, 423 aa, Haemophilus influenzae R2866
MNLDLNQLVKWRREFHRFPEIGWSEFWTTSRIADYLEDLDCFEIFLGKQIINPDFVRGRKQAVVDKGLANAKAYGANEKWLEKMEGYTGCVALFDSGKPGKTIALRFDIDCVNVTETRSPEHIPNKEGFASINDGFMHACGHDSHITIGLGVALWIAQNKDKLTGKVKIVFQPAEEGVRGAAAIAQSGIIDDADYFASSHISFCANTGTVIANPRNFLSTTKIDIRYKGKPAHAGAAPHLGRNALLAAVHTVTQLHGIARHGKGMTRINVGVLKAGEGRNVIPSSAELQLEVRGENKAINEYMTEQVMQIAKGISISFDVAYETEIVGEAVDMNNDVELIKLIEEISLEQPQINNVNSDYAFNASEDATILGRRVQEHGGKAIYFILGADRTAGHHEAEFDFDENQLLTGVNIYTSLVQKLLA

SEQ ID NO: 4426 - protein, 405 aa, Candida albicans
MVSIITFTKNVLVTLAFALLAQGLAIPEDIDKRAEKVVSLDFTVTRKPFNATAHGQHHQSQQQQQQQQQQPAQKRGTVQTSLINEGPSYAATITVGSNKQQQTVIVDTGSSDLWVVDSAAVCQVTYPGQSPTFCKQDGTYKPSSSTTSQNLGKAFSIRYEDGSSSQGTVYKDTIGLGGASITNQQFADVTTTSVDQGILGIGFTGDESSPTYDNVPVTLKKQGIINKNAYSLYLNSASASSGTIIFGGVDNAKYTGSLTALPITSSNELRVQLSTINIAGTTVSASTTPVLDSGTTLTYFSQTIADKLAAAVGAKWNSYYQLYTSSCNLAGNIVFNFAKGVTISVPLSEFVLQDGNSCYFGVSRDSATILGDNFLRRAYAVYDLDGNTISLAQVKYTTSSSISTL

SEQ ID NO: 4427 - protein, 328 aa, Escherichia coli CFT073
MERSMKPSVILYKALPDDLLQRLQEHFTVHQVANLSPQTVEQNAAIFAEAEGLLGSNENVDAALLEKMPKLRATSTISVGYDNFDVDALTARKILLMHTPTVLTETVADTLMALVLSTARRVVEVAERVKAGEWTASIGPDWYGTDVHHKTLGIVGMGRIGMALAQRAHFGFNMPILYNARRHHKEAEERFNARYCNLDTLLQESDFVCLILPLTDETHHLFGAEQFAKMKSSAIFINAGRGPVVDENALIAALQKGEIHAAGLDVFEQEPLSVDSPLLSMANVVAVPHIGSATHETRYGMAACAVDNLIDALQGKVEKNCVNPHVAD

SEQ ID NO: 4428 - protein, 369 aa, Corynebacterium glutamicum ATCC 13032
MRERISNAKRVVVKIGSSSLTNDEDGHTVDPNRINTIVNALQARMEAGSDLIVVSSGAVAAGMAPLGLSTRPTELAVKQAAAAVGQVHLMHQWGRSFARYGRPIGQVLLTAADAGKRDRARNAQRTIDKLRILGAVPIVNENDTVATTGVNFGDNDRLAAIVAHLVSADALVLLSDVDGLFDKNPTDPTAKFISEVRDGNDLKGVIAGDGGKVGTGGMASKVSAARLASRSGVPVLLTSAANIGPALEDAQVGTVFHPKDNRLSAWKFWALYAADTAGKIRLDDGAVEAVTSGGKSLLAVGITEIIGDFQQGEIVEILGPAGQIIGRGEVSYDSDTLQSMVGMQTQDLPDGMQRPVVHADYLSNYASRA

SEQ ID NO: 4429 - protein, 445 aa, Pseudomonas syringae pv. syringae B728a
MTLRQFAGLGALLSLALPGLALAADPVAEPVLNSGDTAWMLTSTALVLFMTIPGLALFYGGMVRSKNILSVMMQCFAITGLISILWVVYGYSIAFDTTGMEAGVVNFNSFFGGMGKAFLAGITPASITGPAALFPEAVFVTFQMTFAIITPALIVGAFAERMKFSAMLVFMGIWFTLVYAPIAHMVWGGVGGLLWDWGVLDFAGGTVVHINAGVAGLVACLVLGKRKGFPTTPMAPHNLGYTLIGAAMLWVGWFGFNAGSAAAANGTAGMAMLVTQIATAAAALGWMFAEWLTHGKPSALGIASGVVAGLVAVTPAAGTVGPMGALIIGLAAGVICFFCATSLKRKLGYDDSLDAFGVHGIGGIVGAILTGVFAAPALGGFGTVTDIGAQVWIQFKGVAFTVVYTAIVTFIILKVLDAVMGLRVTDEEESVGLDLAQHNERGYNL

SEQ ID NO: 4430 - protein, 281 aa, Corynebacterium glutamicum ATCC 13032
MDQKNKLSKSEGIPLVTLNDGKTIPQLGFGVFKVDPDEAERVVTEALEVGYRHIDTAAIYGNEEGVGRAIAKSGIPREELFITTKLWNDRHLDVEAAFEESLQKLGLDYVDLYLVHWPAPKNDNYVAAWKGLEKLGDRARSIGVCNFLPEHLEKLLAEATTVPAINQIELHPALQQRDAVEASLAAGITVESWGPLGQGRFDLGAEEPIAAAAKNHGKTPAQVVIRWHLQNGFVVFPKTVTKSRMVENIDVFDFELSDEEMAAITALERNDRGGSHPNDLN

SEQ ID NO: 4431 - protein, 416 aa, Bacillus halodurans C-125
MQPLKALHVPARTIMTPGPVEVDPRVLQAMSRSILGQFDPAFTAIMNDTMEGLRRVLQTQNQWAYPIDGTSRAGIEAMLCSIIEPGDRVLIPSFGRFGGLLAEITERCGGEVHMIHTEWGTVFAPDTIIAAIKETEPKVVAMVHGDTSTGRIQPLQEIGYACREHDCLFIVDAVATVGGTDVKTDDWMIDGLITGTQKCLSVPSGMAPLTYNHRIEEILMERKSIEQGLVTGEQEELNHQRRIRSNYFDLSQLQEYWSPARLNHHTEATAALYGLYEGLRLILEEGLEQRFERHRTNERALVAGIEAMGLTLFGDPGCKLPTVTCVEIPEGINGETVRAMLLEDFAIEVASSFGPLHGKIWRIGTMGYSCQKKNVLQTLAALEAVLLRLQVKIPAGEAVQAALDVYKQVEYEKVSH

SEQ ID NO: 4432 - protein, 271 aa, Oryza sativa (japonica cultivar-group)
MGRRACCAKEGMKRGAWTSKEDDVLASYIKSHGEGKWREVPQRAGLRRCGKSCRLRWLNYLRPNIKRGNIDDDEELIVRLHTLLGNRWSLIAGRLPGRTDNEIKNYWNSTLSRKIGTAATAAAGSRGGSTPDTARATDAASSSSVVPPGQQQQPASRADTDTATAAAAAAATTTTVWAPKAVRCTRGFFFHDRETAPLAAAAPAPAGELGDGDDVDCDYYCSGSSSAATTTSSSSLPAVVEPCFSAGDDWMDDVRALASFLDTDDAWNLCA

SEQ ID NO: 4433 - protein, 683 aa, Magnetococcus sp. MC-1
MDGKSNMAEDTKREDMKKLIARGKERGFLTYDEVNDVLPNDMTSAEDMEDVVGLLDNMGIDLIDDEREEGARPKSRPAAGIGNLDSLDDDVDEEILGISDFDSEDDESDDEDGLRSDGAIEDIDLGKTDDPVRMYLREMGSVELLTREGEIAIAKRIEEGCNEVIATICDAPSTFNEVMMLAERLRAGEISLREVLDISTPQDEGSEDEDLNNDDDEVEASTESDDEDVDEDDIVNGPVKVRNPVPEPPPVKTEEEIAAQREADNEQFRELYEATLAIFDEITRENEVLVELRDPLNDALQNDPEGETCKRLLAEYQAHKARIVEIVAGIKFSPKQRDRLVERIKSYVAAVRAQEQKIITIVTQCNVKKPEFIEQFTGNESDTTWIQNFAKTRSAPWKRLYEQSELICEAQLVIRSIEEEAGQTVADLKKCNKKLMDGERRANQAKKEMVEANLRLVISIAKKYTNRGLQFLDLIQEGNIGLMKAVDKFEWRRGYKFSTYATWWIRQAITRSIADQARTIRIPVHMIETINKLVRTSRQMVQEMGREPTPEEIAERMSMSLEKVRKVLKIAKEPISLETPVGDEEDSHLGDFIEDKSMLSPSEHAIMSNLRDTTGRVLQTLTSREEHVLRMRFGIGLPTDHTLEEVGKQFNVTRERIRQIEAKALRKLRHPTRSRKLRSFLES

SEQ ID NO: 4434 - protein, 504 aa, Neurospora crassa
MAAEVANSAANGSGPDTNPLSTMIRENARKTKLIYAATATTTDASGTSGRKRLKLDPGLASEDPDITKTGLSLRLHAEYSDVQTLPEAIASKLPAGGPRKKKAKPAIEEAPSKSEEHARKLIEGIPPSKSAAANSNALVLSRSKPGGAGASSTRPNAQRNEPQTNSLARRSDVLVQPRPDWHPPWKLLKVLSGHLGWVRALAVEPDNKWFASGAGDRTIKIWDLASGALKLTLTGHISTVRGLAVSPRHPYLFSCGEDKMVKCWDLETNKVIRHYHGHLSGVYTLALHPTLDVLVTGGRDGVARVWDMRTRSNIHVLSGHTGTVADLVCQEADPQVITASLDSTVRMWDLAAGKTMGVLTHHKKGVRALTTHPTEFTFATGSTGSIKQWKCPEGAFMQNFEGHNAIINTLSVNDQNVMFSGGDNGSMSFWDWKSGHRFQALDTIAQPGSLDAESGIMSSTFDKSGARLICGEADKTIKIWGEDLSATPESHPLEWKPTLAKRKF

SEQ ID NO: 4435 - protein, 74 aa, Oryza sativa (indica cultivar-group)
MSCSCGSSCSCGSNCSCGKKYPDLEEKSSSTKATVVLGVAPEKKAQQFEAAAESGETAHGCSCGSCCRCNPCNC

SEQ ID NO: 4436 - protein, 184 aa, Zea mays
  misc_feature (178)..(181): Xaa can be any naturally occurring amino acid
  unsure (1)..(184): unsure at all Xaa locations
RRNQYTQKRRSSRSTAAASRPAGRFRRSGRGVRRWRSGTWRRGRTPSAPSAPAAGGPSPPSAPPRTACAPRPRRHPAAPPAPGPGPQGSRPSPTTPAAAPTTCHPPPPPQWRGSRRRAAGQRKGPALGGRGRRRRRRVRTVPSPFRSGWDASVGSLWGAGFCDETARLLLIAFSIRMXXXXGLV

SEQ ID NO: 4437 - protein, 667 aa, Candida glabrata CBS138
MSQENSNVPALKRTESKYKIGRVKSLPTVQIDEKTGDSYIELAPRSEGKIYGCTTFQGNYKEEEKLGQGTFGEVYKGLHLQTQRKVAMKRIIVNQENDLFPITAQREITILKRLNHKNIIKLLEMVYDFPPESNNKDYAQFNQNNSANPPAVPKKFFYMILPYMVADLSGILHNPRIELKMADIKNMMKQILEGVNFIHCSKFMHRDIKTANLLIDHNGVLKLADFGLARQYYGSPPNIKFPGSAGSGAKYTSVVVTRWYRAPELVLGDKYYTTAVDIWGVGCVFAEFFEKKPILQGKTDIDQGHVIFKLMGTPDERTWELAKYLPGAELTKTEYKSTIDERFGKHLTPTGLSFLKGLLALDPYKRLTAMSAMKHPFFQEEPLAADRLTLPCEESHEADIKRYKEELHEAMSQKGPSAPPGHIKEATPSPAKFEKKSGIKREQPYQSNQKNDQYPIKRQKFNQNPSVPHPQPKANRYGGSSLPSGPKYGRYEGNNHSGSLRNRITPSNMGTHSNPRAENMGSKPYQSEGRYSSNEDRKNGYNRGYSSSVNSRYNNRAAFNETEDQSITTTTLNRYRHKGYHDNNQSQTRLQGHSSLPGKPTSKYNSTQTNIPYRRTEIPNPNEYNASKLGSQDTKKNDYPKHSETQKQQNNEEKKIHSEQKDIADLY

SEQ ID NO: 4438 - protein, 417 aa, Oryza sativa
LLAMAEICCEEAMSPPATATAAVAAAVSASAAAAVSSAIDRRRRRMEMRRIRIASDLELQAGEDGRPGKRQRLARTASGAPRPDEDSASERPSCGRTEEFPRYGVTAVCGRRREMEDAVSIRPDFLPASGKFHFYGVFDGHGCSHVATTCQDRMHEIVAEEHNKGASGEVAPWRDVMEKSFARMDGEVGNRASTRSDDEPACPCEQQTPSRRDHAGSTAVVAVVSPTQVVVANAGDSRAVISRAGVPVALSVDHKPDRPDELERIEAAGGRVIYWDGARVLGVLAMSRAIGDGYLKPYVTSEPEVTVTERTDDDECLILASDGLWDVVTNEMACEVVRACFHNNGPPAPAARPSGVPSSAEAAETENGGAASVKGISKAESSDKACSDAAMLLTKLALARRSADNVSVVVVDLRRGL

SEQ ID NO: 4439 - protein, 331 aa, Prochlorococcus marinus str. MIT 9313
MAQLFYDSDADLGLLNGKTVAIIGYGSQGHAHALNLKDSGVDVVVGLYEGSRSAEKARADGLEVLSVAEAAAKADWIMVLLPDEFQKDVYAKEIASHLSSGKVLSFAHGFNIRFGLIQPPADVDVVMIAPKGPGHTVRWEYQNGQGVPALFAIEQDASGQARALAMAYAKGIGGTRAGILETNFKEETETDLFGEQAVLCGGLSELVKAGFETLVEAGYQPELAYFECLHEVKLIVDLMVKGGLTAMRDSISNTAEYGDYVSGPRLINADTKAEMKRILADIQDGTFAKNFVAECESGKPEMKKIRDRDANHPIEQVGKGLRAMFSWLKTA

SEQ ID NO: 4440 - protein, 138 aa, Dechloromonas aromatica RCB
MANITRLDPFDDLFRGFFVRPVDFNSAQAQSPSIKMDVKEEGDSYLVHAELPGVKKEDIHVVVDGNQVSISAETKQEKEVKEGDRVLRSERYFGKVSRSFLLEQDLDDTKATAKFNDGVLELTLPKRTASPNKKLNIE

SEQ ID NO: 4441 - protein, 483 aa, Bacillus cereus E33L
MDKKATFVNVEKKAMYINGEWITLQEQIEVNNPATKEIFATVPKGGVTEAKQAVDAAHEAFKSWSKLTAADRAAKLKKWFTLIDENKEEIAAIMTKEQGKPFAEALGEVNYANSFVEWYAEEGKRVYGEMIPASHPNKRILVMKQPVGVMAAITPWNFPAAMITRKVAPALAAGCTAVVKPASQTPLTALKLAELAHEADIPKGVINIVTGSAKAIADTWMEDGRVRKVSFTGSTEIGKELMASAAQTMKKVSLELGGHAPFIVMNDADLDKAVEAVIGSKFRNAGQTCICTNRVFVQEEVYEAFVEKFQKAVGQLKVGDGFGDGTTVGPLIDENAVSKVQEHIEDAIQKGGTVLYGGQKVAELDGHFMQPTVIGLANDTMLCMNEETFGPVAPVAKFKTVDEVIERANHTPYGLAAYIFTKDISQAFQISEALEYGIIGLNDGLPSVAQAPFGGFKESGIGREGGHFGIEEYLEIKYISLGL

SEQ ID NO: 4442 - protein, 372 aa, Crocosphaera watsonii WH 8501
MSIPSQPQPLSIPPRLLLGPGPSNANPRILAAMSLPAIGHLDPFYLQMMDEIQTLLRYVWQTENELTISISGTGSAGMEASLANVVEPGDVVLIGVMGYFGNRLVDMATRYGADVRKINKPWGENFSLAELKEALETHKPAILALVNAETSTGVRQPLEGVGELCREHNCLLLVDAVTSLGGVPFYADQWGVDLAYSCSQKGLGCPPGLSPFTMSDRAWEKLQKRTTPVSNWYLDMNLLNQYWGEPRKYHHTAPCNMNYGLREALSLIVEEGIENSWQRHQQNAELLWEGLEKIGLVCHVEKQFRLPTLTTVRIPEGVNGKAVSSYLLQEYNIEIGGGLGELAGKVWRIGLMGYNSRPENVLLLLEALRKVL

SEQ ID NO: 4443 - protein, 171 aa, Pringlea antiscorbutica
KLWPNAKYVSSIMTGSMLPYLKKLRHYAGGLPLVSADYGSTESWIGVNVDPHFPPEDVSFAVIPTFSYFEFIPLYRQQNQQDICSDGDFVEEKPVPLSQVKLGQEYELVLTTFTGLYRYRLGDVVEVTGFHKGTPKLSFIYRRKLILTINIDKNTEKDLQRVVDKASQLLS

SEQ ID NO: 4444 - protein, 541 aa, Pantoea agglomerans
MAAKDVKFGNDARVKMLRGVNVLADAVKVTLGPKGRNVVLDKSFGAPTITKDGVSVAREIELEDKFENMGAQMVKEVASKANDAAGDGTTTATVLAQSIITEGLKAVAAGMNPMDLKRGIDQAVIAAVEKLKALSVPCSDSKAIAQVGTISANSDETVGQLIAQAMEKVGKEGVITVEEGTGLQDELDVVEGMQFDRGYLSPYFINKPETGAIELESPFILLADKKISNIREMLPVLEAVAKAGKPLLIIAEDVEGEALATLVVNTMRGIVKVAAVKAPGFGDRRKAMLQDIAILTGGTVISEEIGMELEKAALEDLGQAKRVVINKDTTTIIDGVGEEATIQGRVTQIRQQIEEATSDYDKEKLQERVAKLAGGVAVLKVGAATEVEMKEKKARVEDALHATRAAVEEGVVAGGGVALVRVAAQLVDLRGQNEDQNVGIKVALRAMESPLRQIVSNAGEEPSVVANNVKAGDGNYGYNAQTEEYGNMIDFGILDPTKVTRSALQYAASVAGLMITTECMVTDLPKGDAPDLGGGAGGMGG

SEQ ID NO: 4445 - protein, 677 aa, Azoarcus sp. EbN1
MPPAAHTNPRNVTPPVFNPVTGAIRALAMDAVQQANSGHPGAPMGMAEIAEVLWRHHLRHNPANPQWADRDRFVLSNGHGSMLIYALLHLTGYDLPIEELKRFRQLHSKTPGHPEYGYTPGVETTTGPLGQGLSNAVGMAIAEKVLAAEFNRPGHAIVDHHTYVFVGDGCLMEGISHEVCSLAGTLGLGKLIAFYDDNSISIDGDVAGWFTDDTPKRFEAYGWHVVRDVQGHMSAEIDDAIRAAKAETRRPTLICCKTVIGAGSPAKQGGHDCHGAPLGAAEITAARAHIGWTHAPFEIPADVYAEWDAREAGKAREADWNATFAAYAESFPEAAAEFERRMKGELPASWAQHVDSVLAKFGEKAETIATRKASQNSIEAFAPALPELIGGSADLASSNLTLWSGSKGVSKDSGGNYIYYGVREFGMAAIANGIGLHGGLIPYTATFLMFSEYARNALRMAALMKLRQVFVFTHDSIGLGEDGPTHQPVEQTATLRLIPNMDVWRPCDTVETAVAWANAIERRDGPSSLLFSRQNLPFQARNPEQVAAIRRGAYVLSEAANGKPQAVVIATGSEVGLAMAAQQALAGDDIHVRVVSMPSTNVFDRQEAAYKASVLPLGVPRVAVEAGVTGLWHKYVGLEGAVVGIDTFGESAPAGDLFRHFDITADAVARAVRSVLL

SEQ ID NO: 4446 - protein, 482 aa, Azoarcus sp. EbN1
MPRHTKIVATLGPASSDPQVLERMVHAGVDVVRMNFSHGKAEDHVARAEAIREAASLAGRPVGILADLQGPKIRVGKFAEGQVELQRDAGFILDARCELGNAERVGLDYKDLPKDVKAGDVLLLDDGRLKLTVTRVIGHEIHTVVKVGGTLSNNKGINRQGGGLTAPALTAKDMDDIKTAAKIGVDFVAVSFPKSAADMYMARQLMRASGVDALLIAKIERTEAVANLDEILDASDGIMVARGDLAVEVGDAAVPALQKKMIRAARDRNKLTITATQMMESMITSPVPTRAEVSDVANAVLDGTDAVMLSAETASGRFPVEVVEAMSRVCLEAEKSSDVALDRDVLNRVFTRIDQSIAMAAIWTAWHLKVKAIASLTQTGSTALWMSRLNSGVPIYALTPEASARNQMTLYREVFPLLMSQTHQDRDVLLWEAEQILIDQGVAERGDLIVLTIGEPIGASGGTNTLKIVRVGEHPPPHVTDQ

SEQ ID NO: 4447 - protein, 313 aa, Thiobacillus denitrificans ATCC 25259
MEKNAAMHTAYLTHADCLMHDMGSWHPESPARLRAIDDRLHAAHLFDHLAHHEAPRVQRAQLLRVHDAAYVDFIEASSPEHGVRALDADTSMNPHTLSAALRAAGGAAMAVDLVMGDDTANAFVACRPPGHHATRRRAMGFCIFNNVAVAAAQALDVHGLERVAIVDFDVHHGNGTEDIFRDDPRVMLCSTFQHPFYPFAGADTASAHIVNVPLPAGTDGARYRDAFRAQIVPRLDAFAPQMLFCSAGFDGHREDDMAQFGLLEADYVWITEQVMAVAARHACGRIVSVLEGGYDLSSLGRSAAAHIKTLAAL

SEQ ID NO: 4448 - protein, 103 aa, Prochlorococcus marinus subsp. pastoris str. CCMP1986
MAAVSLTVSTVKPLGDRIFIKVSESEEKTAGGILLPDSAKEKPQVGEVAQVGPGKLNDDGSRQTPEVSIGDKVLYSKYAGTDIKLGGDEYVLLSEKDILAVVG

SEQ ID NO: 4449 - protein, 235 aa, Medicago sativa subsp. X varia
MAMEALNSPTTATPFTPFEEPNLSYLETPWTKGKRSKRSRMDQSSCTEEEYLALCLIMLARSGNNNDKKSDSVATPLTTVKLSHKCSVCNKAFSSYQALGGHKASHRKAVMSATTAEDQITTTSSAVTTSSASNGKNKTHECSICHKSFPTGQALGGHKRCHYEGSVGAGAGAGSNAVTASEGVGLSHSHHRDFDLNLPAFPDFSKKFFVDDEVFSPLPAAKKPCLFKLEIPSHY

SEQ ID NO: 4450 - protein, 544 aa, Candida albicans
MRLNSVALLSLVATALAAKAPFKIDFEVRRGESKDDLSPEDDSNPRFVKRDGSLDMTLTNKQTFYMATLKIGSNEDENRVLEDTGSSDLWVMSHDLKCVSAPISKRNERSFGHGTGVKLNERELMQKRKNLYQPSRTIETDEEKEASEKIHNKLFGFGSIYSTVYITEGPGAYSTFSPLVGTEGGSGGSGGSNTCRSYGSFNTENSDTFKKNNTNDFEIQYADDTSAIGIWGYDDVTISNVTVKDLSFAIANETSSDVGVLGIGLPGLEVTTQLRYTYQNLPLKLKADGIIAKSLYSLYLNTADAKAGSILFGAIDHAKYQGDLVTVKMMRTYSQISYPVRIQVPVLKIDVESSSGSTTNILSGTTGVVLDTGSTLSYVFSDTLQSLGKALNGQYSNSVGAYVVNCNLADSSRTVDIEFGGNKTIKVPISDLVLQASKSTCILGVMQQSSSSSYMLFGDNILRSAYIVYDLDDYEVSLAQVSYTNKESIEVIGASGITNSSGSGTTSSSGTSTSTSTRHSAGSIISNPVYGLLLSLLISYYVLV

SEQ ID NO: 4451 - protein, 388 aa, Oryza sativa (japonica cultivar-group)
MLEKQWELPFDDDNHAMAIGLAEDDDDTSKATVVVARSSVSARQRRMSGRRRGRTKNGAAHFAVSPELIQSRNRIYLRGTVSKELLTHKQVVHLSHKIKDGIWLQQQRSKLKEKLGNEPSYKQLAHSLKISPPELRSRMHESFLAREMLTMSNLRLVISIAQKYDNLGVELADLIQGGLIGLLRGIEKFDASRGFRISTYVYWWIRQGVSRALAENSKTFRLPTYLHERLIAIRGAKYELEDQGIAPTIENIAGSLNISEKKVLNATEAVNKVLSLDQQAFPSLNGLPGETLHSYIEDQNVANDPWHGFEEWYLKEEVNKLLNSTLNERERDIIRLYHGIGKQCHTWEDISRQFGLSRERVRQVGLIAMEKLKHAARRKNLEALLEDY

SEQ ID NO: 4452 - protein, 338 aa, Magnetospirillum magnetotacticum MS-1
MADKTIHVAGIGNAIVDVLVHADDLLLHRLGLTKGVMTLIDAEQAESIYAQLPPGIECSGGSAANTIAGIAALGGRAAYVGKVKSDQLGQVFRHDIRNMGVHFETEADDGGPSTARCFVLVTPDAQRTMLTYLGACVELGPDDVDIGLITGAEITYLEGYLYDPPEAKRAFLKAATVAHGAGRLVSLSLSDPFCVDRHRDAFLDLVAGHVDILFANESELCSLYKTESFDEAVRAVRGHCRVAAVTRGDKGSVVVTEDETQVVAADEIEQLVDTTGAGDLYAAGFLFGFTQGRDLATCAMLGGIAAGEVISHYGARPERSLKDLVRAKLGPHILENLR

SEQ ID NO: 4453 - protein, 213 aa, Bacillus anthracis str. A2012
MEDAVNEYLLSFIDPKDKLILEMEDYAKENHVPIMDRLGMEFMLQFLRLIGPKSILELGTAIGYSSIRMMQAIPNSRIVTVERNRDRYEKALEYIERSPVKERISVIYGDALETGEQVEEHGTFDVIFIDAAKGQYRRFFDLYEPLLNPGGVIISDNVMYHGLVTTKEKIENRRTRGLIRRIKTYNEWLMNHEGYDTTIFPIGDGVAVSKKRG

SEQ ID NO: 4454 - protein, 134 aa, Corynebacterium glutamicum ATCC 13032
MISNGEGPVVALRGDIDALPMAERSGKEYAATGVTQVDNTTGQETPVAHTCGHDVHISSLLGAVQAFNSHRELWNGTLMAVFQPAEETAAGARMMADQDNAPGNHSPAFAPDMQPTLDRGVEALVVAASAWLVK

SEQ ID NO: 4455 - protein, 342 aa, Oryza sativa (japonica cultivar-group)
MSGRRRGRTKNGAAHFAVSPELIQSRNRIYLRGTVSKELLTHKQVVHLSHKIKDGIWLQQQRSKLKEKLGNEPSYKQLAHSLKISPPELRSRMHESFLAREMLTMSNLRLVISIAQKYDNLGVELADLIQGGLIGLLRGIEKFDASRGFRISTYVYWWIRQGVSRALAENSKTFRLPTYLHERLIAIRGAKYELEDQGIAPTIENIAGSLNISEKKVLNATEAVNKVLSLDQQAFPSLNGLPGETLHSYIEDQNVANDPWHGFEEWYLKEEVNKLLNSTLNERERDIIRLYHGIGKQCHTWEDISRQFGLSRERVRQVGLIAMEKLKHAARRKNLEALLEDY

SEQ ID NO: 4456 - protein, 217 aa, Corynebacterium glutamicum ATCC 13032
MAWFFAPEPVMVTADEALKGGRHPVLENPAPHTVLGTPVTGPWKEGQQRIWIGLGCFWGVEQMYWQMDGVEGTSVGYAGGFTPNPTYREVCSGRTGHTEIVEVVYDPSKISLEQLVARGLEAHDPTQGFRQGNDVGTQYRSAYYTENEEDAARVKAVVDAYGETLKQHGFGEITTEIGVISPSDYFLAEDYHQQYLDKNPDGYCPHHSTGIPCGVEA

SEQ ID NO: 4457 - protein, 166 aa, Bordetella pertussis Tohama I
MNTMYDFSAPTITGAERALADFRGQVALVVNVASRCGFTPQYSGLEELYRSYRNEGFVVLGFPCNQFGRQEPGDEAAIAQFCETQYAISFPLFAKIDVNGAHAHPLYRWLKARKPGLLGTRAIKWNFTKFLVGRDGLPLRRYAPAHTPESLRHDIARACAAPGPTP

SEQ ID NO: 4458 - protein, 185 aa, Glycine max
FITFHIVINSSYVSMKRQRDFKGFESIDLANCLMMLSHPQQNEKLLQKKIEAVEFECKTCNRKFSSFQALGGHRASHKRSKLEGDHELKAHAISLSLANKPKMHECSICGQEFSLGQALGGHMRRHRTTIHEDFSSIKQVITQMPVLKRSNSTRVVTCLDLNLTPLENDLKLLFGKMAPNAGAFA

SEQ ID NO: 4459 - protein, 208 aa, Thermus thermophilus HB8
MLKAVLFDLDGTLADTDPLHLLAWREVLAPYGLKVDPAFYRERISGRLNPEIVRDLLGLEGKEAERLIAAKEARFRALAQGLRPTPGLPEFLERIREKGLLWGVVTNAPKENARHVLEALGLRPPLLVLAEEVGRGKPDPLPYQLALRRLGVAPEEALAFEDSPSGVRSAVGAGIPTYGLLTGHKGEALLQAGAKGVFRDFREALGLL

SEQ ID NO: 4460 - protein, 208 aa, Ashbya gossypii ATCC 10895
MSSRKKNILKVIILGDSGVGKTSLMHRYVNDKYSQQYKATIGADFLTKEVTVDGDKVATMQVWDTAGQERFQSLGVAFYRGADCCVLVYDVTNAKSFENVKSWRDEFLVHANVPSPESFPFVILGNKIDVEESKKVVTTRTSQELAKSLGNIPFFLTSAKNAINVDDAFEEIARSALQQSQADAGAYEDDFNDAINIQLDGEPSSCNC

SEQ ID NO: 4461 - protein, 599 aa, Haemophilus influenzae R2866
MQTVNVDIAIVGAGGGGLRAAISAAEANPNLKIALVSKVYPMRSHTVAAEGGAAAVIKEEDSYDKHFQDTVAGGDWLCEQDVVEYFVQHSPVEMTQLERWGCPWSRKADGDVNVRRFGGMKIERTWFAADKTGFHLLHTLFQTSIQYPQIQRFDEHFVLDILVDDGHARGMVAMNMMEGSLVQINANAVVIATGGGCRAFKFNTNGGIVTGDGLSMAYRHGVPLRDMEFVQYHPTGLPNTGILMTEGCRGEGGILVNKDGYRYLQDYGLGPETPIGKPQNKYMELGPRDKVSQAFWQEWKKGNTLKTAKGVDVVHLDLRHLGEKYLHERLPFICELASAYEGVNPVNEPIPVRPVVHYTMGGIEVDFNSETRIKGLFAVGECASSGLHGANRLGSNSLAELVVLGRVAGEYAAQRAVEAQSVNQSAVDAQAKDVVARLEALHKQEGNESWSEIRDEMGTVMEEGCGIYRDQASMQKAVDKIAELKERYKRIRVSDNSSVFNTDVLYTVELGYILDVAQSIANSAIERKESRGAHQRLDYTERDDVNYLKHTLAFYNENGAPRIEYSPVKITKSQPAKRVYGAEAEAQEAAAKAKEQANG

SEQ ID NO: 4462 - protein, 1150 aa, Magnaporthe grisea 70-15
MYTARKSHSPLLCTSIAADPKAAENKPINSISGLFSQLLVSSKAGSFKVVHNHSLTELITGPIRKATSRTSTPVQSPVACHTTNSQTSPRSKSRGHRSSDDDSYRSDSLERKARKEADKLERRLQEQELIDARRRSEDLKAREHLDEATRARFGDDVVFRELTPIAQLVTLPVGSEITFRARIHHQRDISKALDFLLLRDQTHSIQGVLQGPPEMVKWAQRLHPESIVQITGHLQCPREPVRSATHQGLEVLIDTIHLVAPAKNLSFNNYQPPESLHPRLTNRVVDLRHPANQALFRVRAAVTRTFRWTLDQQDFVEIQTPKIMAGATESGAEVFKVNYFGRSAYLAQSPQLSKQMAISADFKRVYEVGPVFRAENSNTHRHLTEYTGLDIEMCIDQSHHEIIRMVDRVLKNIFAAVHQMEELKIIRERWPSEDLVWLEETPILTFPEALQMLREDGNEDIEEDDLSTRDEYRLGELVKEKYKTDYFILDKFPTIARPFYTHKDDSDPKWTNSFDIFVRGQEICTGGQRIHKYDELRQSMTDSGISGDGMEEYLAAFESGAPPHGGAGLGLERIITFMLQLGDVRNAAPFHRDPKSLPSRPPGLPHPEASTRRRKSATAPASQNNKESLHGTESSDMTPKSSAETEYPPLEKLIANYGDATNTSWLDDRFQIWRHSPTGAAVGYVRQAKDLVIMTGDPLCDPTQYAEIIGAYLDFVRNTLKCKPVWLLVSEEVQRILANEPHNWRTLTCNEEQRIPADDQARRGLSRPGAQRSARRVQREGIRLHEVRPEKDENFKQRANKAIDEWYRAREGKKQVHLTEVRPWIDAEHRRYFAAERDGRVLSLVVLHRLAPRYGWQVKWALDMPSAPNGTIEALVDLALMSISGSPATFGADVSGKLVPVAHIGGAKTKILTKAYETFVKGTGISRKKDFRGKFGIVGEAVFICYPRGAMGMGEIREIYRVNLTTQKRLAASVLDCGKNKIWLDPNEVSEISNANSRQTIRKLVQDGLIIKKPVTMHSRARARELNLARRIGRHRGFGKRKGTADARMPTQVVWMRRQRVLRRLLVKYRASGKIDKHLYHELYHSAKGNTFKHKRALVEHIHRAKAEKQRERLLKDEMDAKRAKTKAARERKLERQAAKRNALAGEAEE

SEQ ID NO: 4463 - protein, 237 aa, Oryza sativa (japonica cultivar-group)
MTSRKVAGGAPSDGGVLFQEIWNCPYSMETLPSHGEDIDGGASPSVSMLSEVAARRRITIVGGSIPERSSGRLFNTCCVIGPDGQIKAKHRKLHLFEIDIPGDITFRESDTFTAGQEPTIVDTDVGRIGIGICHDIRFPELAMLYRSRGAHLICYPSAFNMSTGQLLWDLMQKSRAVDNQLFVVTCSPARDPNAESDYMIWGHSSLIGPFGEVIATAGHEEATVVGEIDHSMIQTIR

SEQ ID NO: 4464 - protein, 334 aa, Kluyveromyces lactis NRRL Y-1140
MSEPSAKKQKFANSLEALKATGTTVVADTGDFESIAKFTPQDATTNPSLILAAAKQQAYAKLIDSAVQYGKKQGQNIDEQVEIAVDKLLVEFGTAILKVVPGRVSTEVDARLSFDKDATVKKALEIIKLYEAEGISKDRVLIKIASTWEGIQAAQELEKEHDIHVNLTLLFSFAQAVAAAEANVTLISPFVGRILDWYKASTGETYTAETDPGVISVKSIYNYYKKHGYNTIVMGASFRNVGEIKALAGVDFLTISPKLLDELLSSDEPVAKILDPESAKAEGSERVSFINDEPKFRFELNEDAMATEKLSEGIRKFSADIVTLFDLIKAKIQA

SEQ ID NO: 4465 - protein, 195 aa, Zea mays
  misc_feature (10)..(10): Xaa can be any naturally occurring amino acid
  unsure (1)..(195): unsure at all Xaa locations
MVGYSDSGKXAGRLGGAWQLYRAQEEMAQVAKRYGVKLTLFHGRGGTVGRGGGPTHLAILSQARGTINGSIRVTVQGEVIEFCFGEEHLCFQTLQRFTGATLEYGITTLRAIPWIFSWTQTRFHLPVWLGVGAAFKFAIDKDVRNFQVLKEMYNEWPFFRVTLDLLEMVFAKGDPGIAGLYDELLVAGELSPFGS

SEQ ID NO: 4466 - protein, 40 aa, Neurospora crassa
MPSHKTFRVKQKLAKAQKQNRPIPQWIRLRTGNTIRYISP

SEQ ID NO: 4467 - protein, 588 aa, Geobacillus stearothermophilus
MRKEAIYHRPADNFAYAYDSETLHLRLRTKKDDIDRVELLHGDPYDWQNGAWQFQMMPMRKTGSDELFDYWFAEVKPPYRRLRYGFVLYSGEEKLVYTEKGFYFEVPTDDTAYYFCFPFLHRVDLFEAPDWVKDTVWYQIFPERFANGNPSISPEGSRPWGSEDPTPTSFFGGDLQGIIDHLDYLVDLGITGIYLTPIFRSPSNHKYDTADYFEVDPHFGDKETLKTLIDRCHEKGIRVMLDAVFNHCGYEFAPFQDVWKNGESSKYKDWFHIHEFPLQTEPRPNYDTFAFVPQMPKLNTANPEVKRYLLDVATYWIREFDIDGWRLDVANEIDHEFWREFRQEVKALKPDVYILGEIWHDAMPWLRGDQFDAVMNYPFTDGVLRFFAKEEISARQFANQMMHVLHSYPNNVNEAAFNLLGSHDTSRILTVCGGDIRKVKLLFLFQLTFTGSPCIYYGDEIGMTGGNDPECRKCMVWDPMQQNKELHQHVKQLIALRKQYRSLRRGEISFLHADDEMNYLIYKKTDGDETVLVIINRSDQKADIPIPLDARGTWLVNLLTGERFAAEAETLCTSLPPYGFVLYAIEHW

SEQ ID NO: 4468 - protein, 461 aa, Trichodesmium erythraeum IMS101
MNSVWKKLTLTNLSFSDSEWLNASYLYGLLNGSLYNWRRGSWLMQWGEPLGFVLLAIVFTLAPFVNTTLIGFLLLASAGFWVLLKVSDNTQEYLTPIHLLIFLYWSIATLAVVISPAKTAAFSGWVKLTLYLLLFASGSLVLRSPRLRSWLINIYLLVSLVVSFYGIRQWIDKVEPLATWNDPTSAQAGATRVYSYLGNPNLLGGYLLPAIALSFVAIFAWSSWARKSLAVTILLVSCACLRYTGSRGSWIGFLALMFAMLILMWYWWRSYMPSFWQIWSLPIAVGSFAGLLILAVVLLEPLRDRVLSVFAGRQDSSNNFRMNVWMSVFDMIRDRPILGIGPGNDVFNKIYPLYQRPRYSALSSYSVPLEIVVETGFIGLTAFLWLLLVTFNQGVLQLKRLRDADNPQGYWLIGAIAAMVGLIGHGLVDTVWYRPQVNTIWWLMVAIIASYSSQQGVRSRE

SEQ ID NO: 4469 - protein, 478 aa, Streptomyces avermitilis MA-4680
MRRAKIVCTLGPATDSYDQIKALVEAGMDVARFNLSHGTYAEHEERYQHVRKASDETGRSVGVLGDLQGPKIRLGRFNEGPVLLERGDTFTITVEEGVEGDRQTCGTTYAGLAADVTPGERILVDDGKVCLEVTSVDGPRVHTTVVEGGMVSDHKGLNLPGVAVSVPALSDKDEADLRWALRQGFDVIALSFVRSGKDIKDVHRIMDEEGRRLPVIAKVEKPQAVENIDDIVAAFDGIMVARGDLGVEMPLEQVPIVQKRAIKLARRNAKPVIVATQMLDSMIDNSRPTRAEASDVANAVIDGTDAVMLSGETSVGKYPVETVRTMSRIVEAAEEDILATGLPPLTERNKPRTQGGAVARAAAEMGDFLGAKFLVAFTQSGDTVRRLSRYRSPIPLLAFTPMPATRSQLNLTWGVETFLGPHVDSTDAMVDQVDELLLKYGRCEKGDVVVITAGSPPGVSGSTNLVRVHHIGEDDSPK

SEQ ID NO: 4470 - protein, 397 aa, Kluyveromyces lactis NRRL Y-1140
MFRQAARQLIANSRVITAKRAISFAARQSTVSGLRSTAFASKPLVATRGIKQINFGGVEETVYERADWPTEKLLQYFKDDTLALIGYGSQGYGQGLNLRDNGLNVIVGVRKNGASWKAAIEDGWVPGENLFDVNEAVQKGTIVMNLLSDAAQSETWSSLKPLLTKGKTLYFSHGFSPVFKDLTHVEPPTDIDVILVAPKGSGRTVRSLFKEGRGINSSYAVWNDVTGKAHEKAQALAVAVGSGYVYQTTFEKEVNSDLYGERGCLMGGIHGMFLAQYEVLRENGHSPSEAFNETVEEATQSLYPLIGKYGMDYMYDACSTTARRGALDWYPIFKDALKPVFQDLYESTKNGSETKRSLEFNSQPDYREKLEAELQIIRNMEIWKVGKEVRKLRPENN

SEQ ID NO: 4471 - protein, 588 aa, Geobacillus stearothermophilus
MRKEAIYHRPADNFAYAYDSETLHLRLRTKKDDIDRVELLHGDPYDWQNGAWQFQMMPMRKTGSDELFDYWFAEVKPPYRRLRYGFVLYSGEEKLVYTEKGFYFEVPTDDTAYYFCFPFLHRVDLFEAPDWVKDTVWYQIFPERFANGNPSISPEGSRPWGSEDPTPTSFFGGDLQGIIDHLDYLVDLGITGIYLTPIFRSPSNHKYDTADYFEVDPHFGDKETLKTLIDRCHEKGIRVMLDAVFNHCGYEFAPFQDVWKNGESSKYKDWFHIHEFPLQTEPRPNYDTFAFVPQMPKLNTANPEVKRYLLDVATYWIREFDIDGWRLDVANEIDHEFWREFRQEVKALKPDVYILGQIWHDAMPWLRGDQFDAVMNYPFTDGVLRFFAKEEISARQFANQMMHVLHSYPNNVNEAAFNLLGSHDTSRILTVCGGDIRKVKLLFLFQLTFTGSPCIYYGDEIGMTGGNDPECRKCMVWDPMQQNKELHQHVKQLIALRKQYRSLRRGEISFLHADDEMNYLIYKKTDGDETVLVIINRSDQKADIPIPLDARGTWLVNLLTGERFAAEAETLCTSLPPYGFVLYAIEHW

SEQ ID NO: 4472 - protein, 149 aa, Brassica napus
  misc_feature (32)..(33): Xaa can be any naturally occurring amino acid
  unsure (1)..(149): unsure at all Xaa locations
FTYRSIFSKKAMTDMDSTNVYAYISIIALIVXXPPAIIVEGPQLLKHGFSDAIAKVGMTKFISDLFWVGMFYHLYNQLATNTLERVAPLTHAVGNVLKRVFVIGFSIVIFGNKISTQTGIGTGIAIAGVAMYSIIKAKIEEDKKKGKTA

SEQ ID NO: 4473 - protein, 476 aa, Idiomarina loihiensis L2TR
MLRRTKIVTTLGPATDSEETLRELIKAGANVVRLNFSHGNGDDHKQRASMVRKIARELNAHIAILGDLQGPKIRVARFQQKQITLAVGDKFILDAALGKDSGNQERVGLDYKDLPTDVSPGDLLLLDDGRIQLKVEEIDGSQVKTEVTVGGVLSNNKGINRQGGGLSAAALTEKDLADIKLAAEINVDYLAVSFPRSGDDINQARHLLREAGGQGVLCAKIERAEAVASEHALDDIIRASDAVMVARGDLGVEIGDAQLVGKQKQIISRARQLNRVVITATQMMESMIENPMPTRAEVMDVANAVLDGTDAVMLSAETAAGKHPVATVKAMAEICLGAETHPTAQLRHQDLEEMFSSITEATAMSAMYAATHLNGVKAIIALTESGFTAKLMSRITSHLPIFALSRHPQSRDKSALYRGVYPIDFDSTSVSNPITEAIEVVKKSGHIKAGDLIILTHGDVMETVGSSNTCKMIEVR

SEQ ID NO: 4474 - protein, 567 aa, Pirellula sp. 1
MQLMDQDLSQLIARGTKDGFLTYDEVNAYLPDEDVNPEKLNSLLLALENRGIQLIEASEKKARDAAARRPSPNVRGLRSVDMTADEESPEQILANEAASQSFSSADMPKASEDPIRMYLSQMAEIPLLSREEEIALAKKIEITRKQYRRSLLETDYALRATVDTLQKVHSGELPFDRTIKVSLTERLTKEQISQRMPHNLRTLNDLIAKNKADFEILVRRSASPRLKAEVRKQFLRRRRKCLELVEELSLRSRRVTPLLHQLEKISGRMTFIRERLADLGNDAMSRDEAADLRQELRELMLVTQESPTSLHNRMAKVRRHFDQYEATKRELSAGNLRLVVSIAKKYRNRGLSFLDLIQEGNTGLMRAVDKYEYRRGFKFSTYATWWIRQAITRAIADQARTIRIPVHMIDVLSKLRQAQKRLTQTLRREPTYEDIAEATDVPIEEVRRVMDIGRHPVSLDRPVGEGEDSSFGEFVQDSETDNPVRIAASGMLRNKIDELLKTLTFREREIIRLRYGLVDGYSYTLEECGRIFKVTRERVRQIEAKAVAKMQSPSRAERLSSYLKPAA

SEQ ID NO: 4475 - protein, 432 aa, Alkalilimnicola ehrlichei MLHE-1
MSEKTVTLTDNSTGKSVELPVYQGTHGPEVIDIKNVYGELGYFTYDAGFTSTASCKSDVTFIDGDNGVLLYRGYPIEHLAEKSSFLEVSYLLLHGELPNKAELDQFVSSVTNHTMLNESLKDFFDGFHYNAHPMAMLTGVVGSLSAFYHGELDINDPKNRELTAHRVIAKMPTIAAAAYKHLVGEPFVYPQNHLSYAGNLLNMLFSRPTEKYEVNPVAERALDQLLILHADHEQNASTSTVRLAGSTGTNPFAAIAAGCAALWGPAHGGANEAVLNMLNEIGDVSNVPKFIEKAKDKNDPFRLMGFGHRVYKNFDPRATIIRKTCHEVLEELGVGKDPQLELAMELEDIALQDEYFVERKLYPNVDFYSGIIYRALGIPTEFFTVLFALGRTPGWLAQWMEMVNDPEQRIGRPRQLYTGAAKRDYVPVDQRS

SEQ ID NO: 4476 - protein, 133 aa, Idiomarina loihiensis L2TR
MSEHDWSNRNEQEWREILGDEAYYVLREKGTERPFSGKYLSCDKDGVYHCAGCGQKLFEAGHQFDAHCGWPSFDEAIKGSIDYVKDSSHGMTRTEILCSQCGGHLGHVFDDGPTETGQRYCVNSLAMRHEDDE

SEQ ID NO: 4477 - protein, 341 aa, Oryza sativa (japonica cultivar-group)
MVRPPCCDKDGVKKGPWTPEEDLVLVSYVQEHGPGNWRAVPTRTGLMRCSKSCRLRWTNYLRPGIKRGNFTDQEEKLIVHLQALLGNRWAAIASYLPERTDNDIKNYWNTHLKRKLQGGGAGGDGDGGAAGDAVSPKPAAQRPASSSKGQWERRLQTDIDMARRALREALTSLDDVKPPHQPDAANAAAGGGGATTGAAASAGADSPAASSTSGASQCSPSSAGYVLTTENISRMLDGWARKKGGGGGRRAAGSGPATPGATESASGSSEASEVSYGGTALSAAAAPASAFEYETKPTVTAAAAADAGDETQLSAIESWLFADADGIESGSLLDAAMDYTF

SEQ ID NO: 4478 - protein, 121 aa, Saccharomyces pastorianus
MTKPIAPSEVVGGIPVFKPTYEQFEDFYSYCKAINKYGMKSGVVKVIPPPEWKKKLDLPHPAETLQKIKIRSPIQQHISGNKGLFMVQNVEKNKTYNITQWKTHRRITCLQRTLNRDGTLG

SEQ ID NO: 4479 - protein, 428 aa, Arabidopsis thaliana
  misc_feature (61)..(61): Xaa can be any naturally occurring amino acid
  misc_feature (156)..(156): Xaa can be any naturally occurring amino acid
  misc_feature (166)..(166): Xaa can be any naturally occurring amino acid
  unsure (1)..(428): unsure at all Xaa locations
MMTLWRHKLELLVNDRWLVFVCAMWVQSVAGVGYLFGGSMSPAIKTSLGYNQKQIALLGVXKNLGDAIGFVSGALSEVSPSWVVLLVGATQNLFGYGVVWLVVTGQLPNLPLWMLFVAIFVGTNGETYYNTASLVSCIHDFPESRGPVVGILKGFXGLSGAILTQXKPEEGTSNVDQHEARTLLKRSDRPPEKKRAPCIGEDFTLLQALGQADFWLIFMSLVLGVGSGITIIDNLGQICYSLGYSNTKIFVSLISISNFLGRVAGGYFSELIIRKLSLPRTLAMSVVQAIMSLGLIYYAIDWPGKIYVVTIVIGMGYGAHWAIAPASVSDIFGLKSFGSLYNFQITALPIGSFVFSGVIASNIYDYYARKQAGPTTETESLVCTGSVCYSVTCSLMSMLCLMAMVLSLSVVYRTRKFYLRLHHRVSKT

SEQ ID NO: 4480 - protein, 604 aa, Arabidopsis thaliana
MVKEIASWLLILSMVVFVSPVLAINGGGYPRCNCEDEGNSFWSTENILETQRVSDFLIAVAYFSIPIELLYFVSCSNVPFKWVLFEFIAFIVLCGMTHLLHGWTYSAHPFRLMMAFTVFKMLTALVSCATAITLITLIPLLLKVKVREFMLKKKAHELGREVGLILIKKETGFHVRMLTQEIRKSLDRHTILYTTLVELSKTLGLQNCAVWMPNDGGTEMDLTHELRGRGGYGGCSVSMEDLDVVRIRESDEVNVLSVDSSIARASGGGGDVSEIGAVAAIRMPMLRVSDFNGELSYAILVCVLPGGTPRDWTYQEIEIVKVVADQVTVALDHAAVLEESQLMREKLAEQNRALQMAKRDALRASQARNAFQKTMSEGMRRPMHSILGLLSMIQDEKLSDEQKMIVDTMVKTGNVMSNLVGDSMDVPDGRFGTEMKPFSLHRTIHEAACMARCLCLCNGIRFLVDAEKSLPDNVVGDERRVFQVILHIVGSLVKPRKRQEGSSLMFKVLKERGSLDRSDHRWAAWRSPASSADGDVYIRFEMNVENDDSSSQSFASVSSRDQEVGDVRFSGGYGLGQDLSFGVCKKVVQVSFLTYLFLKFLSLV

SEQ ID NO: 4481 - protein, 318 aa, Oryza sativa (japonica cultivar-group)
MNMDELLRSIWTAEESQAMASASAAAAAAEGGLHKQGSLTLPRTLSVKTVDEVWRDLQREASPGAAAADGGGGGGEHHQPRRQPTLGEMTLEEFLVRAGVVRENTAAAAAMVAAAAAPPVAPRSIPAVNNSSIFFGNYGGVNDAAAAAAGAMGFSPVGIGDPTMGNRLMSGVAGIGGGAITVAPVDTSVGQMDSAGKGDGDLSSPMAPVPYPFEGVIRGRRSGGNVEKVVERRQRRMIKNRESAARSRARKQAYTMELEAEVQKLKEQNMELQKKQEEIMEMQKNFFPEMQKNQVLEAVNNPYGQKKRCLRRTLTGPW

SEQ ID NO: 4482 - protein, 747 aa, Bacillus subtilis subsp. subtilis str. 168
MCGLAGIINLAAPRSQECTFHILKGMADAISYRGPDDEQYHIDSKVGFAFRRLSILDLVNGQQPFLNEDGSIVVMVNGEIYNYKELKASLHNHMFKTTSDCEVIVHLYEEKGIGFVDDIIGMFSIAIWDKNKNKVFLVRDRFGIKPLFYTELKHELIFASEIKSLFSHPHCPRQFNWKEALSDICLSGEAASNHKETTSFFVNIQNLDAGHYLEINLTTNERKTASYWSLQDILLRQGYRENLHPDDLIEGYRELLADSVHRCLQSDVEVGLFLSGGIDSAAVAHFAAEKQDLHTFTVLSQSTFTNEDAKYAHWLAKDLHLPNHQVLYQLGNDELLQPESYKHLLWICETPFCGPEQLYKFHLHKYAKAIRPNLKVMLTGQGSDEFNGGYSTTLSPAENPSWEGFIESVNTMEMNRLHRLQGNIFRVWEEHFGLSPINLSYLKSNDSSQADPWQSYVLTKYRDLQMYNCWHEDRIAAANHIENRVPFLDHRLVEWVCGIPDGLRKDLLWDKSVLRKSLTNELHTSYTHRPKVPFFYGKDVRYTHKMMFHLLKKNNYQLIEEAFSHSDASSIIQVEHIHAIMTYLEDDPEFTNFEFLLRLVNMGLLSKMTKETPSVQLDITSHLESITIKDWHSQEGDIASRLNISANKCEGQDILALNPGVTLLRPESDSEHCIYIAEEGFIQFIVSEEDVGAWLHILCDINGKDTLHTILDRHGVSLEEVAKYIQEAIEHNIILIKQKNLPEGAYR

SEQ ID NO: 4483 - protein, 224 aa, Yersinia pestis biovar Medievalis str. 91001
MCCFLFVAIFFCHDIGGCMLTVWGRNNSTNVKKVLWCLEELGIPYQRIDVGGQYGKLNDPQYRALNPNGLIPCLQDKDFILWESNTIVRYLAAQYGQNSLYLADHHQRASAEKWMDWATSSVVEPFKAVFIGLVRTPPEQQDKVKIAQGMEKMNTLMSIANDALGEQADLSGDAFGIGDIPLGCLAYAWFNLPIERPELPHLQRWYQSLTQRIAFQKVIAIGLS

SEQ ID NO: 4484 - protein, 633 aa, Pseudomonas aeruginosa UCBPP-PA14
MSHQSDLISEDILAYLGQHERKELLRFLTCGNVDDGKSTLIGRLLHDSKMIYEDHLEAITRDSKKVGTTGDDVDLALLVDGLQAEREQGITIDVAYRYFSTAKRKFIIADTPGHEQYTRNMATGASTCDLAIILIDARYGVQTQTRRHSFIASLLGIRHIVVAINKMDLKDFDQGVFEQIKADYLAFAEKIGLKTSSLHFVPMSALKGDNVVNKSERSPWYAGQSLMEILETVEIAADRNLDDMRFPVQYVNRPNLNFRGFAGTLASGVVRKGDEVVALPSGKGSKVKSIVTFEGELEQAGPGQAVTLTLEDEIDVSRGDMLVHADNRPLVTDGFDAMLVWMAEEPMLPGKKYDIKRATSYVPGSIPSIVHKVDVNTLERTPGSELKLNEIARVKVSLDAPIALDGYEQNRTTGAFIVIDRLTNGTVGAGMIVSAPPAAHGSSAHHGSNAHVTREERAGRFGQQPATVLFSGLSGAGKSTLAYAVERKLFDMGRAVYVLDGQNLRHDLNKGLPQDRAGRTENWLRTAHVAKQFNEAGLISLCAFVAPSAEGREQARALIGAERLITVYVQASPQVCRERDPQGLYAAGEDNIPGESFPYDVPLDADLVIDTQALSVEDGVKQVLDLLRERQAI

SEQ ID NO: 4485 - protein, 326 aa, Arabidopsis thaliana
MAASNGEKSLIVSFGEMLIDFVPTVSGVSLADAPGFIKAPGGAPANVAIAISRLGGRAAFVGKLGDDEFGHMLAGILKQNGVSAEGINFDTGARTALAFVTLRSDGEREFMFYRNPSADMLLRPDELNLDVIRSAKVFHYGSISLIVEPCRSAHLKAMEVAKEAGALLSYDPNLRLPLWPSKEEAQKQILSIWDKAEVIKVSDEELMFLTGSDKVDDETALSLWHSNLKLLLVTLGEKGCSYYTKSFRGSVDPFHVDAVDTTGAGDSFVGALLCKIVDDRAVLEDEARLREVLRFANACGAITTTKKGAIPALPTESEVQSLLKGN

SEQ ID NO: 4486 - protein, 257 aa, Nicotiana attenuata
QRAQIQDGGRLLTLSLDKISGSGFQSKNEFLFGRFDMQLKLVPGNSAGTVTTFYLSSQGAGHDEIDFEFLGNSSGQPYTVHTNVYSQGKGNKEQQFHLWFDPTTSFHTYSIIWNSQRIIFLVDNIPIRVYNNHEALGVAFPKNQAMRVYASLWNADDWATQGGRVKTDWSMAPFTASYRNFNTNACVWSAASSTSSCGGSKSTDSVNNDQTWQTQELDANGRNRLRWVQQKYMTYNYCADVARFSQGIPPECKRSRF

SEQ ID NO: 4487 - protein, 325 aa, Mesorhizobium loti MAFF303099
MSKAIRIHAHGGPEVLTYEDADPGQPGSGQILVRHTAIGLNFIDVYHRSGLYPPPGGFPLIPGSEAAGVVREVGEGVDWLKPGDRIAYSTNVGAYAEQRVIAAGLVVKIPDGISDEQAAAMMLKGMTAEYLLRRTFKVKAGDTILFHAAAGGVGLILGQWAKHLGATVIGTASSTDKIELAKAHGFDHVINYREQDFVAGVAAITGGKKCDVVYDSVGNDTFPASLDCLKPLGMFVSFGQSSGPIPPFSMSLLAQKGSLFATRPTLFVYNAKREDLDASAAALFDVVLSGAVKIQINQRYALKDAGKAHADLEGRRTTGTTILIP

SEQ ID NO: 4488 - protein, 632 aa, Desulfovibrio desulfuricans G20
MCGIAGYIGRRCLPDDAVRRCHAAMRHRGPDGSGTFRRCTADGRHVLLLHARLSILDPDPRSGQPMQRGGGVLAFNGELYNFSEVRERLERGGLAFDTTGDTEVLLRALDPQGRSLLCGGHAAEDLLHGMAGALDACEGMWAFAYFDASRGTLVLGRDRFGEKPLYYLRDDDGGLYFGSEPKLLAALTGRPLRPDTEHLRRYLVNGYKSLYKTRQTFFAGLRQVPAGTMLAADAGGLRGLCYWERPHAAHDPVQEDMSFADAVRGTRERLIRSVELRLRADVPLAFCMSGGIDSNSLICIARRVFGYDVHGFTVMNTDARYEERECVEHVVRELGLRHTSVSPSVAGFLDGLRTLVRAHDAPVLTISYYVHWLLMQRIRQQGYAISISGTAADELFTGYYDHHNLYLAAMYGSGALYDKALENWRRHVAPVVRNPYLQDPEVFVHAPQERGHIYLHNDRFAGALRQPFDEPFTEHAYHAVPLRNRMLNELFHEAVPVILHEDDLNAMYHSVENRSPFLDRDLFDFSLRIPVRHLVRDGMAKAVLREAMRGIVPDMILDNRRKVGFNAPVLDFLDVRDSAVRAQVLADSPVWDFVRRDAVAQLLDGRSLGNSESKFLFNILCCKMFLEDCADA

SEQ ID NO: 4489 - protein, 326 aa, Bacillus halodurans C-125
MKTVKFPAQMTEKKLVDLFKQMWLIRYFEEKVDEFFAKGMIHGTTHLAVGQEASAVGSIAVLEERDKLTSTHRGHGHCIAKGADVNRMMAELFGRETGYCKGKGGSMHIADVERGNLGANGIVGGGFSIATGAALTSKMKKEGYVVLCFFGDGASNEGSFHEAVNLASIWKLPVVFICENNQYGMSGSVKEMINIEHISDRAAGYGIPGMVVDGNDVFAVMNVVGRAVDRARRGEGPTIVEAKTYRWKGHSKSDAKKYRTREEEKEWREKDPIARLRATLVKEGIVTEEEADSIQEEAKQKIEDSVQFARNSPEPEIESLLEDVYA

SEQ ID NO: 4490 - protein, 400 aa, Trichodesmium erythraeum IMS101
MLNKIKELATTLAPRLIEIRRHIHSHPELSGQEHQTAAYVAGVLSSCGLHVREAVGKTGIVGELKGSTNNNQWLAIRTDMDGLPIKECTNLDFASRNTGVMHACGHDIHTTVGLGTAMVLSELGELLPGDVRFLFQPAEEISQGANWMIKDGVLENVEAILGVHVYPSILAGSVGIRHGALTAAADDLELTIIGESGHGARPHEATDAIWISSQIITNLQQAISRTHNPLRPVVLTIGKISGGRAPNVIADQVKMSGTVRSLHPDTHKTLPAWIENIVANICNSYGAKYELNYRQGVPSVQNNPVLTQLVESVALEAWGSDRVIVLPEPSLGAEDFSMYLQKVPGMMFRLGVGYKDKYNYPLHHPQFEVDESSIVTCVVVLAYAAYKYWHNHTKVTTTDS

SEQ ID NO: 4491 - protein, 462 aa, Bacillus halodurans C-125
MKSYDIVVIGGGPGGYVAAIKAAKLGKKVALVEAKDLGGTCLNRGCIPSKTLLHQGEIIEKIKQAKEWGIETGAVTLSLPKMLARKNEIIQKLRAGIHFLLKQGKIDVYFGYGEIERDRSVKIKMKETAEIVSVRTENMIVATGTEPTIPPVPGLAEAVVDTSDTIFELDSIPQSIVIIGGGVIGVEIACIFSSLQVDVTIVEMGKRILPQEDEEAAKVLAKALAAKGVHLLTNTKVTAVLQGDKQKVEIETSTGDRDWLEGERILLAVGRTPNLSVVKELGLGMAGPFLKVDDQMRTSDPSIYAIGDVIGGWQLAHVASAEGLVAAANASGKVEIINRQVIPRCIYTQPEIASVGLTEQEAKEKGYSYKVVKVDLRANGKAMALGETTGFVKMIADPNYGEILGVTMVGPHVTEMIGEPAAFIHLEGTVDELKAMIHPHPTVSEALYEAAASWLGQGVHQP

SEQ ID NO: 4492 - protein, 307 aa, Glycine max
MGRSPCCSKEGLNRGAWTAHEDKILREYIRVHGEGRWRNLPKRAGLKRCGKSCRLRWLNYLRPDIKRGNISPDEEELIIRLHKLLGNRWSLIAGRLPGRTDNEIKNYWNTNLGKKVKDGHQTTTGNNTQNPMPNPSPSLSPPKLDSHVVRTKATKCSKLLFLNPPPHPSMQNKFKTEAEEEEEEARLVNGVIRNQMEHTTYDNGFLSFPDEEKELSTDLLIDFNVGDFCLSDFLNSDFSNSYNFSCNINNVNNHEQLSPCSDQPDPMFSDEVLKDWTHSNFADEANASNNLRSFISFLESTEERLGE

SEQ ID NO: 4493 - protein, 236 aa, Oryza sativa
  misc_feature (11)..(11): Xaa can be any naturally occurring amino acid
  unsure (1)..(236): unsure at all Xaa locations
MGRGKIEIKRXENTTNRQVTFCKRRNGLLKKAYELSVLCDAEVALIVFSSRGRLYEYANNSVKSTVERYKKANSDTSNSGTVAEVNAQHYQQESSKLRQQISSLQNANSRTIVGDSINTMSLRDLKQVENRLEKGIAKIRARKNELLYAEVEYMQKREVELQNDNMYLRSKVVENERGQQPLNMMGAASTSEYDHMVNNPYDSRNFLQVNIMQQPQHYAHQLQPTTLQLGQQPAFN

SEQ ID NO: 4494 - protein, 148 aa, Arachis hypogaea
MADPLTDEQISEFKEAFSLFDKDGDGCITTKELGTVMRSLGQNPTEAELQDMINEVDADGNGTIDIPEFLNLMARKMKDTDSEEELKEAFRVFDKDQNGFISAAELRHVMTNLGEKLTDEEVDEMIREADVDGDGQINYEEFVKVMMA

SEQ ID NO: 4495 - protein, 451 aa, Bacillus halodurans C-125
MTSNDLLAKSKKHLWLPFTQMSDYEKDPLIIESGNGVYLKDIEGNTYLDGYSSLWLNVHGHRKKEIDEAIEKQLQLIAHSTLLGAANIPSIQLAEKLVELAPEAITRVFYSDSGAEAVEIAVKMAYQYWQNRGYENKKSFVTLSNGYHGDTVGTMSVGSIELYHKVYTSLLFDAIVIPFPASKEEQTESDLCRESLKQLRELFEAKHEEIAGITVEALIQGAGGMNLMPKGYLKGVEQLCKEFHILLIVDEVATGFGRTGKMFAVEHENVQPDIMTVAKGITGGYLPIAATLTQEHIYEAFYGEYTDLKTFFHGHSYTGNQLGCAAALANLEIFEKENIIQQVEEKALFLEEQLKHVAELEFVGAVRQLGLMCGIQLVQHKRTSEPFPWEQRVAYRSTLKMRALGMLTRPLGDVIVLMPPLAATNDQLKQMVDIMKEGIMEAATECLEQQV

SEQ ID NO: 4496 - protein, 732 aa, Schizosaccharomyces pombe
MNVNSSAFERTNRFPSFPVLKDDQKTSSDSIAAAKKKDLLSLISSKSLLSSETLGWFSVICAFSITGSGLEVNTMSIPFYLIFGIFAFVSFTTQYLGIYSFSFQPFQLLNVIIASLSMVFITLGAFVLGTLDTTCLLLLAFKLFFIRNDPTPFNARSANLKNYIAFPICLFVINHILILLGYFQCSYSVFYASVFYILLGVFIRVFYLVNKEKFEKKELAFLFSSIVVACLIQFNVLPLGTINLSVTRFTILCFMQIFCINWDGIARIQFYLGKFDISLIMALISAIINKTASQNSIKIISCLYQVGFCFFKIGSSITANLKLPDNSRIYRLYNDFIVNGVLADKESRSIFYFFLLNVSYMFVQVIYGLWTNSLGLISDAIHMAFDCIAILVGLVATTLAKMPLNYAYPFGFAKIEALSGFTNGIFLVLISFSIVGEALYRLFHPPQMNTDQLLLVSFLGLVVNLVGILAFNHGHNHDHGSHHHHSHSNHSMCLPNTTNDINIFEEFEEEKDNVEAQKMGYTNDDHVSQHEHTHENSQEHHHEHNHNHDHIHKYNEKCDHESISLQNLDNDHHCHHHHENHNMHGIFLHIIADTMGSVGVIVSTILIQWFSWTGFDPLASLIIAALIFVSVLPLIKDSAKNLLSVTDPESEYLLKQCLSNISLSNSVISLSNPKFWTNERGEVYGILHIQVSIDGDLNVVRNEVFRKLSIAVPNLKHICIQSERPNNCWCGK

SEQ ID NO: 4497 - protein, 413 aa, Listeria monocytogenes EGD-e
MDKRRVVVTGVGAVTPIGNDAETSWENAKKGVNGVAKMTRLNPDDFPVKIAAELKDFDVEKYLEKKEARKMDRFTHYAIASAEMAVQDSGLVIDDSNANRVGVWIGSGIGGMETFETQYEIFLNRGHRRVSPFFVPMMIPDMGSGQVSIRFGAKGINSTTVTACATATNSIGDAFKVIERGDADAMITGGAEAPITKMSLAGFTANKALSLNPDPETACRPFDKDRDGFIIGEGAGIVILEEYEHAKARGAKIYAEIVGYGATGDAYHITAPAPNGEGAARAMKMAIDDAGLTPDKVDYINAHGTSTPYNDEYETQAIKTVFGEHAKKLAISSTKSMTGHTLGASGGIEAIFALLTIRDNIIAPTIHLKNQDEVCDLDYVPNEAREANVNVVISNSFGFGGHNATLVFKRIED

SEQ ID NO: 4498 - protein, 423 aa, Pseudomonas putida KT2440 [sequence omitted]

SEQ ID NO: 4499 - protein, 664 aa, Trichodesmium erythraeum IMS101
MSYCLNPQCQNPQNPEGTLYCIACGSKLLLRERYRPIKPIGRGGFGRTFFAVDEDKPSHPPCVIKQFLPQNTGDPKKAAELFQQEAVRLDELGKHPQIPELLAHFEQDNYQYLVQEFIDGSNLAQESIKNGPFDSNQIQQMLNELLPVLKFIHEQKVIHRDLKPENIICRSSTPETIGWMTNTNKLVLVDFGAAKVITGTSLMQPGTIIGSPEYVAPEQLRGHAIFASDIYSLGVTCIYLLTQISPFDLFDVMADKWVWRDYLNQPFNSKLGKVIDKMLMTNPQIRYQSALEVMKELNPTQAFPTAPNTFPPTASTTKRSTSSPIPNRPTMATYTSPKQPTKQSTNSITAPPYVIQPTVLPQPQQSTWKCVLTLTGHFDSVNSVAFSPDNQILASGSRDKTIEIWDMTKGKRWFTLTGHGNSVSSVAFSPDNQMLASGSRDKTIEIWDMKKGKRWFTLLGHSDWVDTVAFSPDNQMLASGGRDRAIEIWNLQKARRWFTLAGHQDRVYTVAFNKDGGILASGGRDQTIKIWDLQKAKELFSIQGHSDWVRSLSFSPDGGVLGSGSRDGTVKLWQVYGGELISTPIQHLKYGVSDVLSVGFSPNGKIVAAGYRNGVINLWDAVTGELLETLNGHSSDVFSVVFSQDGRSLASGSNDKTIKIWQVP

SEQ ID NO: 4500 - protein, 397 aa, Glycine max
MESAFASASAITDQRQKIEQYKQILAAVISSNDIVQARKFIDHMLSDDVPLVVSRQLLQTFAQELGRLEPEIQKEIAHYALAQIQPRVVSFEEQVLVIREKLAELYESEKQWSKAAQMLSGIDLDSGMRVIDDAFRLSKCVQIACLYLEDDDAVNAEAFINKASFLVSNSQHEVLNLKYKVCYARILDLKRKFLEAALRYYDISQIEKRQIGDEEINEEALEQALSAAVTCTILAAAGPQRSRVLATLYKDERCSKLKIYPILQKVYLERILRKPEIDAFAEELKPHQQALLPDNFTVLDRAMIEHNLLSASKLYTNISFNELGTLLGIPPHKAEKIASRMIYEDRMRGSIDQVEAVIHFDDDTEELQRWDQQIVGLCQALNDVLDSMAKKGFPVPV

SEQ ID NO: 4501 - protein, 229 aa, Listeria monocytogenes EGD-e
MKLVLIRHGQSEWNKLNLFTGWHDVDLSQEGVVEAMTAGKRIKEAGLEFDVAFTSVLTRAIKTLNYVLEESDQMWVPVHKSWRLNERHYGALQGLNKQETAEKYGADQVQKWRRSYDTLPPLLEENDERQAKNDRRYQLLDTHAIPSGENLKVTLERVIPYWMDTIAPEIKEGRRVVIAAHGNSLRALVKFLEGISDDEIMDLEIPTGVPLVYELNADLKPVNKYYLDK

SEQ ID NO: 4502 - protein, 133 aa, Saccharomyces pastorianus
EFTEVAVPEILEKEAGATTAVGPALTTSSPAPSYIELIDPGVRNIEIYAEQYSRPLYRVGLFFSLFLIAYAYGLDGSVRYTFQAYATSSYSKHSLLSTVNCIKTVIAAVGQIFFARLSDIFGRFSILIISVIF

SEQ ID NO: 4503 - protein, 204 aa, Pisum sativum
FLPDSKHVTASEDDNWILGCLLLLASSVFWSCWMIMQVPISSSCPDHVLSTFWMCLFATIQSAMFALLKEPDLQAWILPSPLQISCSLYAGIGIAVSFFIQSWCISERGPLYCAMFNPLATVITALVAATFLEEKLYVGSLVGAIGVTVGLYIVLWGKAKDFDGTKQELPQSNMVDDERSNRTDLEEPLLAEKSEYVAEIKMEG

SEQ ID NO: 4504 - protein, 489 aa, Prochlorococcus marinus str. MIT 9313
MSEASFDFDVIVIGAGYGGFDAAKHAADDGLKVAIVESGEMGGTCVNRGCVPSKALLAASGRVRELADAEHLSGFGIHAAPVRFERQKIADHANQLVATIRSNLTKTLQRAGVTILRGHGRLEGSQRIGLREKSGVDRLLTARDVILATGSDPFVPPGIETDGRTVFTSDEAVNLEWLPRWIAIIGSGYIGLEFADVYTALGCEVTMIEALDRVMPTFDPDITKMAARHLIEGRDIDARAGVLASKVIPGCPVRIELAEMKSRELVDSLEVDAVLVATGRVPSSKGLNLESVGVETNRGFVPIDDSMRVLVNGKPLPHLWAVGDVTGKLMLAHTAAAQGTLAVDNIQGHSRTIDYRSIPAATFTHPEISSVGLSEADAKDLAAKDGFELGSVRSYFKANSKALAELESDGLMKLLFRKDNGEVLGAHIYGLHAADLIQEVANAVARRQSVAQLATEVHTHPTLSEVVEVAYKQAAKQLAKAVVASASAS

SEQ ID NO: 4505 - protein, 204 aa, Pisum sativum
FLPDSKHVTASEDDNWILGCLLLLASSVFWSCWMIMQVPISSSCPDHVLSTFWMCLFATIQSAIFALLKEPDLQAWILPSPLQISCSLYAGIGIAVSFFIQSWCISERGPLYCAMFNPLATVITALVAATFLEEKLYVGSLVGAIGVTVGLYIVLWGKAKDFDGTKQELPQSNMVDDERSNRTDLEEPLLAEKSEYVAEIKMEG

SEQ ID NO: 4506 - protein, 309 aa, Glycine max
EGLTAEDIEALTTEVAILKQMNHPNIMILHDFFSEEKYYYLVTEFMAGGELFDRIVEKSYYSEREARDLVKLLLEAIKYCHDADIVHRDLKPENLLLTSKDDDASIKLADFGFAKKIEFNGDGLVTACGTPGYVAPEILEGQAYGKGVDIWSIGVITYILLCGYPPFHDDNHNALFKKIKKGKFQFDSPYWDHVSDEAKDLIAKMLVVNPAERATVGQLLEHRWVTGTEVATVQLTSALEELRRFNARRKFKAAVSTVQATIALNKTFSKSKSTTSDEGASANGDEVLSADGDEVLSADGVALQLEKSA

SEQ ID NO: 4507 - protein, 655 aa, Fremyella diplosiphon Fd33
MNIAACDLLGLPRQQLKGQALSNFITAEFTRQPKSVGFPSGKSLMGELLVVSAAQTPREMEYTLTPNVLPHCHLLLLRDISQRRESMQAELRQQQQRVELFSEVTLKIRQSLQLKEILHTTVTEVQRILQADRVLIYHVLPDGTGKTISESVLPDYPTLMDLEFPQEVFPQEYQQLYAQGRVRAIADVHDPTAGLAECLVEFVDQFHIKAKLIVPIVQNLNANSQNQLWGLLIAHQCDSVRQWVDFELELMQQLADQISIALSQAQLLGRLEEVVAARTAELQEEINVRMQAEAALRQSEEQLRLITNALPVLIAYVDEQQQYRFNNQAYQDWLGQSPQKIYGSHLRQVWGEDCYQRMEVYVKTALSGQAVNYENDIVLRDGSWRAVDVTYIPHLDDENMVKGFFALSSDISDRKAIERMKDEFISIISHELRTPLTSLHSALKILATGRLGTLSTEGQQMLGIADDSTERLVRLVNNVLDLQRIESGKVIMECQACNAANLMIQAAEAMQAMAQQQEVTLVKQPQDISVWADADYILQALTNLLSNAIKFSSPGGTVWLTVEQEKNSSNNPKEVVFRVRDEGQGIPADQLERIFERFQQVDSSDSRKKGGTGLGLTICRKIIEQHNGRIWAESTPGCGSTFAFTLPTLEYANIQ

SEQ ID NO: 4508 - protein, 462 aa, Oryza sativa (japonica cultivar-group)
MGMLRWGAHLLLLLLAAATWTCAGAGAGVTSEYRRKLEATVDMPLDADVFRVPPGYNAPQQVHITLGDQTGTAMTVSWVTANELGSNTVRYGSSPEKLDRAAEGSHTRYDYFNYTSGFIHHCTLTGLTHATKYYYAMGFDHTVRTFSFTTPPKPAPDAPFKFGLIGDLGQTFDSNSTLAHYEANGGDASLFVGDLSYADNYPLHDNNRWDTWARFVERSAYQPWIWTAGNHELDYAPELGETVPFKPFTHRYPTPYRAAGSTEPFWYSVKIASAHVIVLASYSAYGKYTPQWTWLQEELATRVDRKLTPWLIVLMHSPWYNSNNYHYMEGETMRVQFERWLVDAKVDVVLAGHVHSYERSRRFANIDYNIVNGKATPAANVDAPVYITIGDGGNIEGIANNFTVPQPAYSAFREASFGHATLEIKNRTHAHYAWHRNHDGAKAVADAVWLTNRYWMPTNDDV

SEQ ID NO: 4509 - protein, 488 aa, Arabidopsis thaliana
MGSKLKLYPLLNHSSVFHPDSRYQSAPTMEEEQQQLRVLFAKYEMGRLLGKGTFGKVYYGKEITTGESVAIKIINKDQVKREGMMEQIKREISIMRLVRHPNIVELKEVMATKTKIFFIMEYVKGGELFSKIVKGKLKEDSARKYFQQLISAVDFCHSRGVSHRDLKPENLLVDENGDLKVSDFGLSALPEQILQDGLLHTQCGTPAYVAPEVLRKKGYDGAKGDIWSCGIILYVLLAGFLPFQDENLMKMYRKIFKSEFEYPPWFSPESKRLISKLLVVDPNKRISIPAIMRTPWFRKNINSPIEFKIDELEIQNVEDETPTTTATTATTTTTPVSPKFFNAFEFISSMSSGFDLSSLFESKRKLRSMFTSRWSASEIMGKLEGIGKEMNMKVKRTKDFKVKLFGKTEGRKGQIAVTAEVFEVAPEVAVVELCKSAGDTLEYNRLYEEHVRPALEEIVWSWHGDNHNNNIVKSNGNYVSDENSGSDC

SEQ ID NO: 4510 - protein, 250 aa, Rhodobacter sphaeroides 2.4.1
MLLNGKTIIISGASSGIGAAAARLFAAEGARLILGARRAALLEEITNEILAGGGEADFVVGDVEDSGFAAELVQRAEDRFGGLDGAFNNAGVTGEMCPIPDMPESNWHKVIAVNLSSGFYAAKHQIPAMRKRGGGSIVFTSSFVGHTIGLPGMGAYAAAKAGLIGMTQVLAAEHGPEKIRVNALLPGGTMTPMAGEDAGFHEVVRGFHALKRMADPSEIAQAALFLLSDQASFVTGTALIADGGNSISKL

SEQ ID NO: 4511 - protein, 493 aa, Mentha x piperita
MAALLVFFSVSLILLAVLFHKRKSSLSSRKRPPPSPLRLPVIGHFHLIGALSHRSFTSLSKRYGEVMLLHFGSAPVLVASSAAAAREIMKNQDVIFASRPRLSIFDRLMYSGKGVAFAPYGEHWRNARSMCMLQLLSAKRVQSFGGIREEETSAMIEKIRRSKPTTVVNLSEMFMALTNGVIHRAVLGRKGDGGDDFNRILIKVIKLLGSFNVGDYVPWLSWINRINGVDAEVEKVGTKLDGSMEGILRKYRRKKVGDDETNFVDTLLQFQRESKDTDPVEDDVIKALIFDMVSAGTDTTFAALEWTMAELIKNPRTLKTLQNEVREVSRNKGGITEDDVDKMPYLKAVSKEILRLHPPFAILLPRELTQDANMLGYDIPRGTVVLVNNWAISRDPSLWENPEEFRPERFLETSIDYKGLHFEMLPFGSGRRGCPGSTFAMALYELALSKLVNEFDFRLGNGDRAEDLDMTEAPGFVVHKKSPLLVLATPRQS

SEQ ID NO: 4512 - protein, 280 aa, Listeria monocytogenes str. 4b H7858
MTLSFSDTYRLNNGIEMPRHGFGVYKLTDEARMRTALETAVDVGYRLFDTASFYHNEKELGDFFASSGLKRDEFFVTTKMWNTEQGYDETLRAFEKSQKKLQLDKIDLYLVHWPKQDTFFDTWRAVEKLYDEGLVRAIGVSNFEAHHLDRLRTSANVLPVVDQLETHPHFPNHLLHRYLEELHIVHQAWSPLGRGGVLQEQILIDLAEKHGKSPAQIVLRWHLQNNISIIPKSETPSRIRENAAIYDFELSEADMRQVERLNTGERVSHAPDVMYVRSEI

SEQ ID NO: 4513 - protein, 86 aa, Triticum aestivum
  misc_feature (57)..(57): Xaa can be any naturally occurring amino acid
  unsure (1)..(86): unsure at all Xaa locations
VKRVLTKMEGVESFDIDMEQQKVTVKGNVKPEDVFQTVSKTGKKTAFWEAEATPAPXATPAAPAAEAAPAADAAPAPEATPANTVA

SEQ ID NO: 4514 - protein, 470 aa, Glycine max
MAVSAITGARLTLGIGLAIPLSSPTRSRTVAMAVSVDPKTDNKLTLTKSEEAFAAAKELMPGGVNSPVRAFKSVGGQPIVIDSVKGSRMWDIDGNEYIDYVGSWGPAIIGHADDQVLSALVETMKKGTSFGAPCLLENTLAELVINAVPSIEMVRFVNSGTEACMGALRLARAYTGREKIIKFEGCYHGHADPFLVKAGSGVATLGLPDSPGVPKAATFETLTAPYNDTAAVEKLFEANKGEIAAVFLEPVVGNAGFIVPKPDFHNFLRKITKENNTLLVFDEVMTGFRLSYGGAQEYFGITPDITTLGKIIGGGLPVGAYGGRRDIMEKVAPAGPMYQAGTLSGNPLAMTAGIQTLQRIKEPGTYEYLDKITGELVQGIIEAGKRAGHAICGGHIRGMFGFFFTEGPVYNFADAKKSDTDKFARFFWGMLAEGVYLAPSQFEAGFTSLAHTSDDIKKTIAAAEKVFREI

SEQ ID NO: 4515 - protein, 1113 aa, Bordetella pertussis Tohama I
MPATHPAPDPLWYKDAVIYQLHVKSFFDANDDGVGDFAGLLAKLDYIVELGVNTIWLLPFYPSPRRDDGYDIADYRGVHPDYGSLADARLLVRAAHARGLRVITELVINHTSDQHPWFQRARAARPGSAHRAYYVWSDDDKAYAGTRIIFCDTEKSNWTWDPVAGAYFWHRFYSHQPDLNYDNPQVLREVLGAMRYWLDMGVDGLRLDAVPYLVEREGTNNENLPETHAILRRIRRVIDSEYPGRMLLAEANQWPEDAQEYFGAGDECHMAFHFPLMPRMYMAIAQEDRLPVTDIIRQTPSIAPQCQWAIFLRNHDELTLEMVTSRERDYLWNVYAAEPRARINLGIRRRLAPLLERDRRRIELMNSLLLSMPGTPVLYYGDELGMGDNIHLGDRDGVRTPMQWSPDRNGGFSRADPERLPLPLLMGPLYGYEAVNVEAQQRDPHSLLNWTRRMLAKRRQSHVFGRGELSFLYPGNRKILAYLRTWEDTVVLCVANLSQAAQPVELHLSEYAGRVPVEMLGGTAFPQIGELPYLLTLPPFGFYWLDLSAGAAPPAWHSELPPQMPESITLVSRGAGAALRLTEASRRQLEADVLPAYLQRQRWYAARRKPGVMRLAYSVPLNDDVESYYEAEIEVSDDGPPRRFHTPVALAWQDDTAAQYPLARVRRGAQLGTLTDASLQPGYARVLLAALTAGRDIQAGGEPAVRLRFLPEPGLADLALRDDSEVRALSADQSNSSLLVGERVVFKLLRELHAGPHPEAEMTRYLTQAGYAHTPALLGEVVRVQGDQAPHTLALAHAYVVNEGDAWNWTVAYLKRTLDAAILTGASADDYQQELAGYEVLAGTIGQRLAQMHSVLARAGELPGFAPRPASERDAALAGERAVAQLDRALQALRACESGLAPASHACAQWLFEHRDRLAAHIMTLAQAETGALRIRVHGDFHLGQILVAQTDAYLIDFEGEPARPMAERRQLSSPFKDVAGILRSFDYAVAELSRDDPLGGAPRDFNTGVAEPADPASAPRETREALLARFRQRAGAALLASYGNAIDPVLALPPERAQALTCLYLLEKAAYEICYESAYRPERLPVPIHGLAETARAALLAAAVDHDEGPAP

SEQ ID NO: 4516 - protein, 767 aa, Arabidopsis thaliana
  misc_feature (532)..(532): Xaa can be any naturally occurring amino acid
  misc_feature (674)..(674): Xaa can be any naturally occurring amino acid
  unsure (1)..(767): unsure at all Xaa locations
MASHIVGYPRMGPKRELKFALESFWDGKSSADDLQKVSADLRSDIWKQMSAAGIKYIPSNTFSHYDQVLDTTAMLGAVPSRYGFTSGEIGLDVYFSMARGNASVPAMEMTKWFDTNYHYIVPELGPEVKFSYASHKAVNEYKEAKALGVETVPVLVGPVSYLLLSKLAKGVDKSFDLLSLLPKILPVYKEVIAELKAAGASWIQLDEPLFVMDLEGHKLQAFSGAYAELESTLSGLNVLVETYFADIPAEAYKTLTSLKGVTAFGFDLVRGTKTIDLIKSGFPQGKYLFAGVVDGRNIWANDLAASLITLQSLEGVVGKDKLVVSTSCSLLHTAVDLINETKLDAEIKSWLAFAAQKVVEVDALAKALAGQTNESFFTANADALSSRRSSPRVTNESVQKAAAALKGSDHRRTTEVSARLDAQQKKLNLPILPTTTIGSFPQTVELRRVRREYKAKKISEEDYVKAIKEEIKKVVDIQEDLDIDVLVHGEPERNDMVEYFGEQLSGFAFTANGWVQSYGSRCVKPPVIYGDXVSRPKPMTVFWSSTAQSMTKRPMKGMLTGPVTILNWSFVRNDQPRHETCYQIALAIKDEVEDLEKGGIGVIQIDEAALREGLPLRKAEHSFYLDWAVHSFRITNCGVQDSTQIHTHMCYSNFNDIIHSIIDMDADVITIENXSRSDEKLLSVFREGVKYGAGIGPGVYDIHSPRIPSTDEIADRINKMLAVLEQNILWVNPDCGLKTRKYTEVKPALKAMVDAAKLIRSQLGSAK

SEQ ID NO: 4517 - protein, 237 aa, Triticum aestivum
GGHSRTSGVQKSRLPPVRNSRDIVDPRVRFAAGREAEEDESANASATPVRTASKNYQAISTISHISFAEDESVSPKKPTSIAEVAKQRELSGTLQSEDDSKLQKQVSNAKSKELSGHGIFSPPEDPRPRNSENGSTSQTPGKNAQVSSIKFGEADDADSVVKTAKKIPTKKFNDLTGNNIFKGDAAEAPGTAEKQLSDAKLKEMSGSNIFADGKAPARDFLGGIRKPPGGESSIALV

SEQ ID NO: 4518 - protein, 166 aa, Lactuca sativa
MFPMVTEFMNYGQQTVRAARYIGQGFMITLSHANRLPVTIQYPYEKLITSERFRGRIHFEFDKCIACEVCVRVCPIDLPVVDWKLETDIRKKRLLNYSIDFGICIFCGNCVEYCPTNCLSMTEEYELSTYDRHELNYNQIALGRLPMSVIDDYTIRTIFNLPEIKT

SEQ ID NO: 4519 - protein, 463 aa, Mesorhizobium loti MAFF303099
MAGYDYDLFVIGGGSGGVRAARVAATLGKRVGIAEEYRFGGTCVIRGCVPKKLYVYASQFPEHFADAAGYGWTVPEASFNWQTLVANKDREISRLEAIYKKNVEGAGGETFPSRAMIVDPHVVHLLDDDRTVTADQILIATGGRPAAHPALPGHEHCIFSNEAFDLKELPKAIMIEGGGYIAVEFANIFHGLGVDTTLVYRGKEILSRFDMDLRRTLHETMEKKGIKILCHAVSERVHKRPDGRLDALLTSGQTLTVDQVMLAIGRIPNTENMGLEGIGLEMTQAGAIKVDEYSRTNIDNIWAIGDVTNRVQLTPVAIHEAMCFVETAFKGNPTAPDHDTIATAVFSQPEIGTVGLSEDEAVKRFADVEIYRASFRPMRHTLSGRDEKMLIKLVVDGASRKVLGAHILGPDAGEMAQLLGIPLKAGLSKDDFDRTMAVHPTAAEELVTMYKPTYRVKDGQRVQ

SEQ ID NO: 4520 - protein, 572 aa, Neurospora crassa
MPPPPINRFPSGPSPYHQQFPTHGQHTASHPPQLTGNPAYLNQNAQVNPFSANSNLLGLGGGLNAGGGGFNVGGDSGLASHAARMGFQHGAQLQQQQQSQQQQHQQQQAQQQTAQHSQHAQHAQHQQHMQHAPQQGHGALADHVTRSQSKSRIREVWRHNLHEEMAILRDLVDKYPYIAMDTEFPGVVSRPMGGFRGKSDYHYQCLRTNVDMLKVIQIGIALFNEDGEQPPARPNSTDAMDLAGKRAANQQGPFPFAWQFNFKFSLKEDMFNQTSIESLQQAGIDFSLLERDGIDPKEFAALLIPSGLVCFEDVRWISFHGGYDFGYLTKLLICSQLPNDEVEFDQIMKLYFPSTYDVKHLMKHAIKQYNTGALTPNDPGAAEILQKFEQKSGLEHIADTLKVKRVGSAHQAGSDSLITGKVFFELRKRIFNGDIGGEHVGKVWGLGIPDFSVVASLPTLNTAAATASNNNTNNTNTESSATGQQANGAQNGTPSTPNGAPVNLAGALAAAGANAAQAAVAAQAAAAASHNTNGGAAALGNLGPMTPGGGGGVFGQFAFGSNNNTNSSSNRG

SEQ ID NO: 4521 - protein, 246 aa, Methanothermobacter thermautotrophicus str. Delta H
MVSLTKRCIAEFIGTFFLVFFGAGAAAITLMIASGGTAPNPFNIGIGLLGGLGDWVAIGLAFGFAIAASIYALGNISGCHINPAVTIGLWSVKKFPGRDVVPYIIAQLLGAAFASFIFLQCAGITAATIGGLGATAPFPGIGYWQAMLAETVGTFLLMITIMGIAVDERAPKGFAGIIIGLTVAGIITTIGNITGSSLNPARTFGPYLNDMVFAGTNLWNYFPIYVIGPVVGAVLAALTYQYLTSE

SEQ ID NO: 4522 - protein, 125 aa, Carboxydothermus hydrogenoformans Z-2901
MMYSEKVMDHFTNPRNVGEIPDADGVGEVGNPSCGDIMRIYIKVDGDKITDVKFKTFGCGAAIATSSMVTEMVKGKTIEEAMKITNKAVADALDGLPPQKMHCSNLAADALKVAIEDYLKKKGQK

SEQ ID NO: 4523 - protein, 430 aa, Bacillus subtilis subsp. subtilis str. 168
MRSYEKSKTAFKEAQKLMPGGVNSPVRAFKSVDMDPIFMERGKGSKIFDIDGNEYIDYVLSWGPLILGHTNDRVVESLKKVAEYGTSFGAPTEVENELAKLVIDRVPSVEIVRMVSSGTEATMSALRLARGYTGRNKILKFEGCYHGHGDSLLIKAGSGVATLGLPDSPGVPEGIAKNTITVPYNDLESVKLAFQQFGEDIAGVIVEPVAGNMGVVPPQEGFLQGLRDITEQYGSLLIFDEVMTGFRVDYNCAQGYFGVTPDLTCLGKVIGGGLPVGAYGGKAEIMEQIAPSGPIYQAGTLSGNPLAMTAGLETLKQLTPESYKNFIKKGDRLEEGISKTAGAHGIPHTFNRAGSMIGFFFTNEPVINYETAKSSDLKLFASYYKGMANEGVFLPPSQFEGLFLSTAHTDEDIENTIQAAEKVFAEISRR

SEQ ID NO: 4524 - protein, 467 aa, Brucella melitensis 16M
MSYDVVVIGTGPGGYVAAIKAAQLGLKVAVVEKRKTFGGTCLNIGCIPSKALLHASEVFAEAGHSFDTLGVEVTPKLNLTKMLAHKDTTVKANVSGVEFLFKKNKITPYIGTGKIVGKGKVSVTSEDGKVEEIEAKNIIIATGSDVAGIPGVKVDIDEKVIVSSTGALSFDKVPGSLIVVGGGVIGLELGSVWARLGAKVTVVEYLDKVLGPMDGEVSKQFQRLLEKQGIAFKLGAKVTGVEKVGKGAKITFEPVKGGDAETLEADAVLIATGRRPYTDGLGLQEAGVAVDERGRVAIDDHWRTNVEGIYAIGDVVQGPMLAHKAEDEGIAVAEIIAGQAGHVNFDVIPSVVYTQPEVASVGKTEEELKAAGINYKVGKFPFTANGRARAMLHTGGFVKILADKATDRVLGAHILGYNAGEMIHELAVLMEFGGSSEDLARTCHAHPTMSETVRESALATFAKPIHM

SEQ ID NO: 4525 - protein, 364 aa, Zea mays
MGSTAGDVAAVVDEEACMYAMQLASSSILPMTLKNAIELGLLEVLQKEAGGGKAALAPEEVVARMPAAPGDPAAAAAMVDRMLRLLASYDVVRCQMEDRDGRYERRYSAAPVCKWLTPNEDGVSMAALALMNQDKVLMESWYYLKDAVLDGGIPFNKAYGMTAFEYHGTDPRFNRVFDEGMKNHSVIIAKKLLDFYTGFEGVSTLVDVGGGVGATLHAITSRHPHISGVNFDLPHVISEAPPFPGVRHVGGDMFASVPAGDAILMKWILHDWSDAHCATLLKNCYDALPENGKVIVVECVLPVNTEATPKAQGVFHVDMIMLAHNPGGKERYEREFRELAKGAGFSGFKATYIYANAWAIEFIK

SEQ ID NO: 4526 - protein, 263 aa, Triticum aestivum
  misc_feature (129)..(129): Xaa can be any naturally occurring amino acid
  unsure (1)..(263): unsure at all Xaa locations
AYLGDTIEQVCTKKQAGTGPEFPGYRRPTRPRHPPPPSSKQVPSLSSSPPPLPPLRPFSRWTPPLERLKTGFEKFKTEVYDQKPDLFEPLKAHQSPKYMVFACADSRVCPSVTLGLEPGEAFTVRNIAXAMVPCYCKNKHTGVGSAIEYAVCALKVEFIVVIGHSRCGGIKALLNLKDGADDTFHFVEDWVRIGYPARKKVKDECSEMPFEEQCGVLEKEAVNVSLQNLSTYPFVKEGVANGTLKLVGGHYDFVSGKFDTWTL

SEQ ID NO: 4527 - protein, 313 aa, Prochlorococcus marinus str. MIT 9313
MVSAAPKSAETQRRRSSDPVSWYLTTIGRIPLLTPAEEIELGNQVQTMMSLTQDGSVAPDDKEFTTHQRRMIRIGRRAKERMMKANLRLVVSVAKKYQGKGLELLDLIQEGSLGLERAVEKFDPTRGYKFSTYAFWWIRQSMTRAIACQSRTIRLPVHLSERLTTIRKVSLDLAHKLGAIPSRSEIAEAMDIPVDELDSLLRQALTTSSLDAPVNGEERRSFLGDLIADSSLGEPLDKVEQRIHHEQLGRWLSHLSEQEQHVLKLRFGLETHDRHTLAEIGRLMEVSRERVRQVELKALRKLRNLTRRVPNEI

SEQ ID NO: 4528 - protein, 363 aa, Prochlorococcus marinus str. MIT 9313
MSQKTSVSSGQTTANPLAAGRHGERISTLISSKRAKVDRQIGLELFRDMTLGRRFEDKCAEMYYRGKMFGFVHLYNGQEAVSTGVIGAMKRQHDWFCSTYRDHVHALSAGVPAREVMSELFGKETGCSKGRGGSMHLFSQEHHLLGGFAFIGEGIPIALGAAFTSRYKRDALGDASSNAVTAAFFGDGTCNNGQFFECLNMAQLWQLPILFVVENNKWAIGMAHERATSEPEIWQKAAAFGMAGEEVDGMDVLAVRAATQRAIKRARAGEGPTLLECLTYRFRGHSLADPDELRAEEEKQFWAKRDPLKALEKDLTSESLVRAEELRAIEKEIDAEINDCVEFALAAAEPNPNELTRYIWAED

SEQ ID NO: 4529 - protein, 523 aa, Yersinia pestis biovar Medievalis str. 91001
MQALLGIDIGTSGCKALLIGIDGAVIAADTASYPLSQPQLGWAEQDPELWVEGARRAVAGALAKAPTLELLCVGLSGQMHGLVSLDAGHQVLRPAILWNDQRNSAECEQITEAAGGLKGLLAATNNRMLVGYTGGKIVWMQQHEPDLFARMTTVLNPKDYLRLRLTGEVATEVSDASGTGLFDVRARQWASDLIENVGIDRALLPPVFESQVISGQVSAVGAELFGIPKGTPVAGGGGDAVIQTFGSGVIAPGELQTTIGTAGILAAALDTPQANPDGRLQVFCHVVADKWHCMGVSLNAGGAMSWFRDTFYVGVNAAVPSFDQFTPSDQITPSDQITPSFEQIVAEAAASPAGARGLLFLPYLNGERCPHPDPAARGAFIGLTACHNRGDVARAVMEGVVHALVDMHTLMKPLGINGRVVKTSGGGARSPLWRQMQADIFGCDVLTTKGAAEGAAFGAALVAGLAIGVWPDATSATANCRIITREPPNPATAAVVAEAQRIYRTLYPALRETFAELGDPTFM

SEQ ID NO: 4530 - protein, 166 aa, Oryza sativa (japonica cultivar-group)
MVIAAHRHQGLSCKSSPLATMVITTLHSKSSELAARSDKLTFGSSGGGMKTRSQTAPKPLKTVRLPPVKPRPKPPPPQPQPPPSRKKGQPLVDRRRPKKPPTAFFYFMEDFRKTYKEENPSVKSMQEERVKYYDIATEKRAEYEKAVAEFDKKKESGELSEESDYD

SEQ ID NO: 4531 - protein, 367 aa, Bifidobacterium longum bv. Infantis
MTEATQRTSDNGVSIWLDDLSRSRIESGSLQDLIANKNVVGVTTNPSIFQKALSQVGPYDAQLKELGKVDVETAVRELTTTDVRNATDIFREIAEATDFVDGRVSIEVDPRLAHDTENTVKQAVELWEKVNRPNAMIKIPATLEGLPAITVTLAKGISSTFTLIFSLERYEQVIDAFIEGIAQADANGHDLKHIGYVAFFFVSRVDSAVDKLLEANGSDEAKALEGKAAVANARLAYELFEKKFAEDPRWAALAAKGAKAQRPLWASTGTKNAAYSDCKYVDELVAKHIVNTMPEKTLNALADHGNGAPSIEGTFEESHAVINKLAELGINLKDVTDKLEADGVAAFIKSWDSVLADVQSGIDRVNA

SEQ ID NO: 4532 - protein, 290 aa, Triticum aestivum
  misc_feature (229)..(229): Xaa can be any naturally occurring amino acid
  unsure (1)..(290): unsure at all Xaa locations
MEDERSTQSYQGGEAAEQVEVTDRGLLGNLLGKKKAEEDKEKEEELVTGMEKVSVEEPEVKKEEHEDGEKKETLFSKLHRSSSSSSSSSDEEEEEVIDDNGEVIKRKKKKGLKEKLQGKLPGHKDTKGEHVTGLPAPAAPASVQTHGGHHDTDVVVEKIDGDVKTEAAPAVPEEEKKGFLEKIKEKLPGGHKKPEDAAGVPVTHAAPATVHAPARAPREVSSPDAKEKXGLLGKIMDKLAGYHKKKKKGGAGLEYPSRGPGLAFPGFSDIGGPSGGSFYKASPGRRFQKS

SEQ ID NO: 4533 - protein, 321 aa, Yersinia pestis biovar Medievalis str. 91001
MSESKMRLVVTDQAFGNTVYEQAAANAVGADFAAYQCRTEDETRDAVQGADVVLNNFAPMTERVMAAMPPGAVIVRYGVGVDNIDLSAARKRGMRICNVPDYGIEEVADHAAAMTLALARKLGRYEAGIRSGRWEIDQMVDGVRSLRDTTVGLIGLGRIARAYATRMAVFGCRIIGFDPYVTETEARSAGIEPLPQDKVIASAHILSLHVPLTPETRDLIDTTAIARMPEGAILINCARGGLVNEAALIEALTRGHLSGAGLDVFEQEPLPADSALRKAPHLLLSPHAAFFSDASVKKLQQLASEEALRGLRGEPLRCPLT

SEQ ID NO: 4534 - protein, 990 aa, Azoarcus sp. EbN1
MGRLVTEEWIGAARSKGLPQCNIRVGANGARAGRHSSMGANCAFRAPAGASPHHVSRRANRPLPQRSHPHPEQTMTEDKDAPLREDIRLLGRVLGDTVRDQHGEAAFALIERIRQTSVRFRRDDDNAARLELEGILDALSREQTIEVVRAFSYFSHLSNIAEDQHHIRRSRAHLIAGSAPREGSVAHALVRALASGLPPARLAAFFDTALISPVLTAHPTEVQRKSILNCETDIAHLLDARDRMTLTPEERQESDEALRRTVLTLWQTRMLRPAKLSVVDEVANGLSYFDATFLRELPHLYANLEDQLVSRDPALAGLELPAFLQVGSWIGGDRDGNPFVTADVLERTLAMQAGAVLGFYLDELHALGARLSLALGLVTASDALLALAARSPDHSPHRNDEPYRRAISGIYARLAATHHALLGTEPPRHPVAVAEPYAAVAELADDLDVIHRSLVANGSAALARGQLRRLRRAVRVFGFHLAPIDLRQNSEVHERVVAELLATARTGTDYATLDEAARVELLIEELATPRPLASPHVRYSDETEGELAIFRTARAAHRRYGGPAIPNCIISKTDDVSDLLELALLLKEAGLLRPHERALDVNIVPLFETIEDLANAPSVMDRLFALPGYMNLLAASRDRTHEVMLGYSDSNKDGGFLTSGWALYKAEIGLIEVFARHGIRLRLFHGRGGSVGRGGGPSYEAILAQPGGAVQGQIRLTEQGEVIAAKYGNPEVGRRNLEVIVAATLEASLLADRAPAPRVEFLDTMQALSDVAFAAYRGLVYDTEGFERYFWESTVISEIAELNIGSRPASRKKGTRIEDLRAIPWVFSWSQCRLMLPGWFGFGSAVKTWLAAHADDGIARLQAMHREWSFFAALLSNMDMVLAKTDLAIASRYAGLVKDVNLRDAIFERIRNEWHDTVDALLAITGQRELLDGNPLLKRSIRNRFPYLDPLNHVQVELLRRHRETHDDARIRLGIHISINGIAAGLRNSG

SEQ ID NO: 4535 - protein, 132 aa, Brassica napus
  misc_feature (123)..(123): Xaa can be any naturally occurring amino acid
  unsure (1)..(132): unsure at all Xaa locations
DTSPDLKVVGSKLKDILEVPTTSLKMRKVVVSLCDIIASRGARLSAAGIYGILKKLGRDAPKDGETQKSVIAMDGGLFEHYTQFSECMESSLKELLGDEASGSVEVIHSNDGSGVGAALLAAXHSQYLDDFS

SEQ ID NO: 4536 - protein, 450 aa, Nicotiana attenuata
MREILHIQGGQCGNQIGSKFWEVICDEHGVDPTGRYKGTAAESDLQLERINVYFNEASGGRYVPRAVLMDLEPGTMDSIRSGPYGQIFRPDNFVFGQSGAGNNWAKGHYTEGAELIDAVLDVVRKEAENCDCLQGFQVCHSLGGGTGSGMGTLLISKIREEYPDRMMLTFSVFPSPKVSDTVVEPYNATLSVHQLVENADECMVLDNEALYDICFRTLKLTTPSFGDLNHLISATMSGVTCCLRFPGQLNSDLRKLAVNLIPFPRLHFFMVGFAPLTSRGSQQYISLTVPELTQQMWDAKNMMCAADPRHGRYLTASAMFRGKMSTKEVDEQMINVQNKNSSYFVEWIPNNVKSSVCDIPPTGLKMASTFVGNSTSIQEMFRRVSEQFTAMFRRKAFLHWYTGEGMDEMEFTEAESNMNDLVAEYQQYQDATADDEEEYEEEGAEEHYES

SEQ ID NO: 4537 - protein, 599 aa, Ashbya gossypii ATCC 10895
MPSAGELEQQPLRGSPSSNVQYISIPIERQSSVTAEAGGHAAAGTPGAHRGSFLDQPLGSFRGVNSLGRFASSFHRSNSFKAIELNAGKERAFLKDGYDELYDPDTLGPSLDGRRLSIAINAPGTVSVRPPASDFYGSVGGGGWRDSTAVVDEDEQSTRLMRVLSNQSLTFVDVNNAAGPDADSIMLKRVETKTGKVVTVLAGQSTAPQTIFNSVNVLIGIGLLALPLGLRYAGWALGIPMLLVFAAGTFCSAELLSRCIDADPSMISYGDLGYAAFGSKGRALISVLFTLDLLGCGVSLIILFGDSLNALFPQYSVTQFKILSFFAVTPQVFLPLSVLSNFSLLGITATLGTVLTILYCGLTKTQSPGSLLDPAPTRVWPASFLEFCLSIGILSACWGGHAVFPNLKSDMRHPSKFKDCLRTTYAITSLTDIGTATVGFLMFGVAVKDEVTRSVMLSDGYPPFVYVLISALMAIIPLAKTPLNARPIISILDVMMGIRNAETELEGHKLFVARALKLTNRLLINVMFVIIAILFPEFDKLIAFLGAGLCFMICLILPCLFYLRICKDRVTPRERMACYATIAVSAVLSVLGVGAAILS

SEQ ID NO: 4538 - protein, 240 aa, Corynebacterium glutamicum ATCC 13032
MIISTNTAHPLHEPHVPSHHNRMNTLRAGVLGANDGIVSIAALLLGVIATGASDTVVFGAGLASTIAGAVSMALGEYVSVSSQRDTERVLIAKEAKELAEDPTAEHVELSEILHSYGISPETANQAATEIGQGDALGAHLQLELGIDNEQLTSPLAAAFSSAVAFLLGALLPMVSVFIAPAGWDAGVVFVVTLLVLAVTGFISAQISGTSPMRACGRLVIGGALGLALTYGVGVLFGAAV

SEQ ID NO: 4539 - protein, 484 aa, Sinorhizobium meliloti
MNLKDPSLFRQAALVGETWIEADPKNAIEVNNPATGEIIGRVPKLGAADTRTAIEAAARVQKEWAARTAKERSAVLRRWFELMIENKDDLGRILTMEQGKPLAEATGEIVYGASFIEWFAEEARRVYGDLVPGHQKDKRILVMKQPIGVVAAITPWNFPNAMITRKAGPALAAGCAMVLKPAAQTPFSAIAIAVLAERAGMPKGLFSVITGSAREIGAEMTSNPTVRKLTFTGSTEVGAELYRQSAATIKKLGLELGGNAPFIVFDDADLDAAVEGALIAKFRNNGQTCVCANRIYVQDGVYEAFSDKLAQAVAKLKTGNGMEDGVILGPLIDQPALKKVEEHVADALAKGARVVQGGRRHSLGGTFYEATVLADVTQAMAVAREETFGPVAPLFRFKDESDVIAQANDTEFGLASYFYAKDLARVFRVAEALEYGMVGVNTGLISTAEAPFGGVKLSGLGREGSKYGIEEFMEIKYVCLGGIA

SEQ ID NO: 4540 - protein, 301 aa, Gossypium barbadense
LPLTMTAACGVDCANLKSAFFLDVIFIAVTTYVSVLAAKEVPLGSVEMSTASHEERPEHSGGNAEEAFLWELFGTFRYFSGTIWIILFVTALNWIGWFPFLLFDTDWMGREIYGGQPNEGANYNSGVRMGAVGLMLNSVVLGITSVLMEKLCSKWGAGFIWGVSNIVMALCFLSMLILSYVTDHMDYIGHDLPPAGIMIAALLIFSILGFPLAVTYSVPYALISTRIESLGLGQGLSMGVLNLAIVIPQVVVSMGSGPWDELFGGGNSPAFAVAGVASLTSGLIAILAIPRSSPQKIRALP

SEQ ID NO: 4541 - protein, 101 aa, Frankia sp. CcI3
MTTATKVAIKPLEDRIVVQPSDAEQTTASGIVIPDTAKEKPQEGIVLAVGPGRFEDGKRVPLDVKVGDVVLYSKYGGTEVKYSGEEYLVLSARDVLAIIEK

SEQ ID NO: 4542 - protein, 546 aa, Frankia sp. CcI3
MPKILTFNEDARRALEHGVNALANAVKVTIGPRGRNVVIDKHYGAATITNDGVTIAREIELEDPYENLGAQLAKEVATKTNDVAGDGTTTATVLAQEMVRFGLKQVTAGAAPLTLKLGIEAAVEAVSAALLKQAIEVNSKETIAQVAAISAQDPQVGELIAEAIDKIGKDGVITVEESQTLGLDLELTEGMQFDKGYISPYFVTDAEAQEAVLEDAYVLLYPGKISALNEILPVLEQVVQERKPLLIIAEEVEGEALSTLVVNSIRKTFQVVAVKAPGFGDRRKALLQDIAVLTGGQVVASEVGLSLDAVTLADLGRARRVVVDKDNTTIVDGVGEASSIADRVRQLKQEIEVSDSDWDREKLQERLAKLAGGVAVIRVGAATEVELKERKHRLEDAVSATRAAIEEGIIAGGGSALTHVASVLDDGLGRTGDELAGVRIVRRALDAPLSWIARNAGLEGAVIVSKVKELEPGRGYNAATGEYTDLIAAGVIDPVKVTRSAVANAASIAALLITTEGLVVEKPAEPAPQDGHGHGHGHSHPQGPGF

SEQ ID NO: 4543 - protein, 174 aa, Enterococcus faecium
LYLGNRHARVEGETYYEFIDQFVQSATELFPELLLHWEDFGRGNAAAILEKYEDQITTFNDDIQGTGIVVLAGVLGGLNISGEQLKDQIILTFGAGTAGVGIANILLDEMIRQGVPEEEARQHFYQVDKQGLLFEDTEGLTPGQIPFARKRSEFINADELTNLEAVVKAIHPTI

SEQ ID NO: 4544 - protein, 498 aa, Colwellia psychrerythraea 34H
MSETSNQNQHNQHKPRLSFWQIWNVSFGFLGVQFGFALQNANASRILSDLGADLHSLSLFWLVAPIMGLIIQPIVGSASDKTWNRLGRRNPYILAGGVAAAIGMLLMPNSATLASFITPLFFGAMMLALMDASFNLAFQPFRALVSDMVPAEQRNVGYSIQSFLINIGAVFGSILPFVLTNVIGLENTASSGQVAPSVIWAFYIGATVMLGSVLWTVLRTKEYQPGTNGLAELEEQKESQSLSEKLVEFFSLVKTMPKTMKQLALVQFFSWFALFIMWVYTMPAIAQHIWGIDAKWFDPTYLESVGTIPAHIAKAKGTAGDWVGIIFAAYSLFAAIASIFMAKVANKIGRKLTYSLSLLAGGIGYLSIMLVHNPELTLVNLGITQISVPQGAVSLFLPMIGVGIAWAAILAMPYAILAGSLPVKQTGVYMGIFNFTIAAPQIVSGIFAGWILTAVFDNQAIYIIMLAGISMLLGAISVYFVKEDTEQAIVTKQVNLTS

SEQ ID NO: 4545 - protein, 518 aa, Funaria hygrometrica
RSSTKKSRKERRPNPFAQDGYHGNLQILKNQPKARILDKYVLGRELGRGEFGITYLCTDKETQEIFACKSISKKKLRTAVDVEDVRREVAIMKHLPEHPHVVTLKGAYEDDNAVHLVMELCEGGELFDRIIARGHYTERGAAQVTRTIVEVVQACHRQGVMHRDLKPENFLFANKNENSPLKAIDFGLSVFFKPGEKFSEIVGSPYYMAPEVLKRNYGPEVDVWSAGVILYILLCGVPPFWAETEQGVAQAILRGILDFKRDPWPKVSDSAKSLVRHMLEPDPKARYIAQQVLDHPWLQNAKKNPNVPLDAVRSRLKQFSAMNKLKKRALQVIAEHLGGEEIDGLKEMFEKLDSDNTGAITFEKLKMGLIEIGSQLTEHEVRLLMEAADVDGNGTLDYGEFVAATVHLQRLDDDEHLRRAFDVFDVNESGFIEVEELREAVGQSLMGSPSESDVVQAILSEVDLDKDGRISYEEFAVMMRRGTDWRKASRQYSRDRFNSLSMRLLRDGSLNPPSYSMR

SEQ ID NO: 4546 - protein, 156 aa, Rickettsia akari str. Hartford
MQLATIEIAQNLIGIKDAVTEEFKVAGTKIIKKINKNYEYSKITIENVKKTMRLGSYPCSLVPNTIAANAYKSLEINERHRHRYKFNNEFQNIFEKHGVVFSGFSKDEEIVEIIELPVLRWFIGVQFHPEFKSKPFEAHPLFIQFINAAIEYNKCN

SEQ ID NO: 4547 - protein, 250 aa, Rickettsia akari str. Hartford
MVRFIFVTGGVVSALGKGITAASLAMLLQAKGFKVCVRKLDPYLNVDSGTMNPHEHGEVYVTDDGAETNLDLGHYERFTGVSSCKFDSITTGAIYSKLLKDKRLGNYTGVTVQIIPHVTHIIKDFILSNTKDFDFVICEIGGTAGDIEGLPFFEAIRQIGNKLKSENCLFIHLTLLPYVKTARELKTKPTQHSVKALSAIGITPNILICRAERNISKSDIDKIALFCNIESEYVIPAIDQKNIFSTDCVS

SEQ ID NO: 4548 - protein, 94 aa, Lactobacillus helveticus
MLQPIGDRVIVKVKDEEEKTVGGIVLASNAKKKPTEGEVVAVGEGAYASNGEKIPMSVKKGDVVLYDRYSGTNVEYEGEKYLVLHEKDILAIAK

SEQ ID NO: 4549 - protein, 234 aa, Trichodesmium erythraeum IMS101
MTKIILFDAVGTLFGVRDTVGEVYQKFAIEWGVDVSPSAVNQAFFDSFKAAPPMAFPGAESAKILDLEFEWWCQVAAETYKKVGVFEQFSNFRSFFGQLYDYFATGAPWFVYPDVKPALTKWHENGIKLAVLSNFDSRLYPVLAALKLADFFSDITISTEVGAAKPDQKIFTAALQKCNFTIEKALHIGDSLTADYEGAINVGIEAFWLNRNTISQPDINQFANLLDCFNSYFT

SEQ ID NO: 4550 - protein, 473 aa, Nocardia farcinica IFM 10152
MAVTTSTTSGGHSNPPLPHPKWRLPIINDLLTINPIKPTLTSLRDAEQLGGIFERRLVDWPMIVVSDSELITEICDERNWAKHLGVPLRKMRHIARDGLFTARNDEPNWAKAHAVLAPAFTKEAMRSYHQTMLTTIGELLDYWAKRDGQWVDVGEDMNKLTLEIIARTGFDYTFDSFTRSEVHPFVAAMLRGLTYISRNSNMPPFLQKTIGARAAARHSRDITYVRTVVDDVIKARQASGTVGDHHDLLDRMLTVPDPASDELLDTTNVRSQILTMLVAGHETSAGVLAFALYELSRRPELVAAARAEIETRFADGDLSTIAYDDVAKLRTLRRIVDETLRLYPVAPGFFREARHETTIGGGRYRFGPGDWVLVLTLHAHRDPATWGPDAGEFQPDRWLPERMRSLDGRQVFKPFGTGLRACIGRQFAYHEIVLALAHILHTFEFTPDPGYELDIAEQITLKPHRFRLRLNHR

SEQ ID NO: 4551 - protein, 209 aa, Glycine max
  misc_feature (29)..(29): Xaa can be any naturally occurring amino acid
  misc_feature (38)..(38): Xaa can be any naturally occurring amino acid
  unsure (1)..(209): unsure at all Xaa locations
CDVAFFGDGTCNNGQFYECLNMAALWKLXMCFVVENNXWAIGMSHLRATSDPQIWKKGPAFGMPGVHVDGMDVLKVREVAKEAVGRARRGEGPTLVECETYRFRGHSLADPDELRDPAEKEHYAGRDPITALKKYLFENNLANEQELKTIEKKIDEILEDAVEFADKSPLPPRSQLLENVFADPKGFGIGPDGSYRCEDPKFTQGTAHV

SEQ ID NO: 4552 - protein, 406 aa, Pirellula sp. 1
MEGVGIRFPESVSAQSVRSTWHTSSGKGAVSVRRSGTLCFADELHRIIFRKREALVAGQRSIMSVSEKAAKGNRVDETSRLGMETMKHSVLVTRQIPGESLKRLREVCEVEVWPEAIPPSREELCRLVKGRHGLLTMLSDRIDGELMDVAGEQLCVVSNYAVGFNNIDVDAAKTRGVVVGNTPDVLTDATADLAVSLLFAASRHVLPAGNQVREGEWKTWEPTGWLGVEPSDKTLGIVGMGRIGKATAKRLVGGWGMNLLYTSRSDQGDVEKELGGRRVELDTLLAESDFVSVHVALTDETRNLIDADAIGKMKSTSVLVNTARGEIVDQDALVDALNRRAIFAAGLDVTTPEPLPADHALVKSPHCVILPHIGSATHTSRNAMSEIAVDNLIAGLAGKPLRCSVT

SEQ ID NO: 4553 - protein, 278 aa, Oryza sativa
RYLRNKHRLTLCQQRLIFAGKQLEDGRTLADYNIQKESTLHLVLRLRGGMQIFVKTLTGKTITLEVESSDTIDNVKAKIQDKEGIPPDQQRLIFAGKQLEDGRTLADYNIQKESTLHLVLRLRGGMQIFVKTLTGKTITLEVESSDTIDNVKAKIQDKEGIPPDQQRLIFAGKQLEDGRTLADYNIQKESTLHLVLRLRGGMQIFVKTLTGKTITLEVESSDTIDNVKAKIQDKEGIPPDQQRLIFAGKQLEDGRTLADYNIQKESLLHLVFRLCGGQ

SEQ ID NO: 4554 - protein, 227 aa, Pyrus pyrifolia
MRYSNTLILIKLLIIQYLSVLCVSQDFDFFYFVQQWPGAYCDTKHTCCYPKSGKPTADFGIHGLWPNYKDGGYPSNCDPDSVFDKSQISELLTSLNKNWPSLSCPSSNGYRFWSHEWEKHGTCSESELDQKEYFEAALKLREKVNLLQILKNAGIVPNDELYNLESIVEAIKVGVGHTPGIECNKDSAGNSQLYQIYLCVDTSGQDIIECPLLPKGRCASKIQFPKF

SEQ ID NO: 4555 - protein, 258 aa, Zea mays
  misc_feature (150)..(150): Xaa can be any naturally occurring amino acid
  misc_feature (175)..(175): Xaa can be any naturally occurring amino acid
  unsure (1)..(258): unsure at all Xaa locations
KWIPSFLNFAIDSPAEYPYIASMGVYVFKRDVLLDLLKSRYAELHDFGSEILPKALHEHNVQAYVFTDYWEDIGTIRSFFDANMALCEQISIQTNTVFISYAPSQPPKFEFYDPKTPFFTSPRYLPPTKSDKCRIKDAIISHGCFLRECXIEHSIVGVRSRLNSGCELKNTMMMXADLYETEDEISRLLAEGKVPIGVGENTKISNCIIDMNARVGRNVSITNKEGVQEADRPDEGYYIRSGIVVVLKNATIKDGTVI

SEQ ID NO: 4556 - protein, 151 aa, Arabidopsis thaliana
  misc_feature (121)..(121): Xaa can be any naturally occurring amino acid
  unsure (1)..(151): unsure at all Xaa locations
SDEEGEDGEKKKKEKRKKIVEGDHVKTVEEQNQGVMDRIKEKFPLGEKPGGDDVPVVTTMPAPHSVEDHKPEEEEKKGLMDKIKEKLPGHSKKPEDSQVVNTTPLVETATPIADIPEEKKXGFMDKIKEKLPGGSPAKTTGEEEKKEKVSD

SEQ ID NO: 4557 - protein, 185 aa, Chlamydomonas reinhardtii
MAAVIAKSSVSAAVARPARSSVRPMAALKPAVKAAPVAAPAQANQMMVWTPVNNKMFETFSYLPPLSDEQIAAQVDYIVANGWIPCLEFAESDKAYVSNESAIRFGSVSCLYYDNRYWTMWKLPMFGCRDPMQVLREIVACTKAFPDAYVRLVAFDNQKQVQIMGFLVQRPKSARDWQPANKRSV

SEQ ID NO: 4558 - protein, 186 aa, Triticum aestivum
  misc_feature (160)..(160): Xaa can be any naturally occurring amino acid
  unsure (1)..(186): unsure at all Xaa locations
MMREMYMDVLPPVDHIAARSNWFPAAARLWTAEENKRFESALAGLDLCHPDWEKVAQAIPGRTVREVVSHFKNLQLDVQQIESGQVPLPVYGSGASSFTLQWDGNGGYGPGDFRHGYRFGGGCGKRHHGRTPEQERKKGVPWTEEEHKLFLLGLKKYGKXGDWRNISRNFVQTRTPTQVASHAQKY

SEQ ID NO: 4559 - protein, 108 aa, Gossypium barbadense
KGTRSAGHSKEEKFAARRAVLPVLQAEEDERYSMIQTTPIPLHSKSALNISMFACLLALFRFVKEWKKYLEYEAEVMKDVPGWKVGENVYNSGRWMPPATGELRPEVW

SEQ ID NO: 4560 - protein, 338 aa, Sinorhizobium meliloti
MKAVVCSEPGRLALVARSGPEAPPPGSVRLAVSRVGICGTDYHIFEGKHPFLEYPRVMGHEISARVIEGGPGTRLAPGTLVVVNPYLSCGECIACRKGKPNCCTAIRVLGVHTDGAFCEEIVMPEQNLYPAEGLSPEAAAAVEFLAIGAHAVRRSAAGRGVRSLVIGAGPIGLGTAVFSRIAGHDVRLLDTSEERLAFATEKLGFSPGILAGDDAALAQATGGDGFDVVFDATGNAQSMERAFGHVAHGGTLVFVSVVKEEIRFSDPEFHKREMTLVASRNATREDFDHVIQSLAAGLVPIEALVTHRTTLEDLVRDLPRWVHDKSGLVKAVVAVSAG

SEQ ID NO: 4561 - protein, 315 aa, Sinorhizobium meliloti 1021
MPKIELLQVGPYPSWDEERLNANFTMHRYFEAADKAAFLAEHGAAIRGIATRGELGANWAMIEALPRLEIISVYGVGYDAVDLAAARERGIRVTNTPDVLTKDVADLGVAMMLAHARGMIGGETWVKSGDWAKKGLYPLKRRVHGKRAGVLGLGRIGFEVAKRLAGFDMEIAYSDTGAKDFARDWSFIADPVELAARSDFLFVTLAASAETRHIVGRRVIEALGPDGMLINISRASNIDEEALLDALESKVLGAAALDVFEGEPNLNPRFLALDNVLLQPHMASGTAETRKAMGQLVFDNLSAHFGGRPLPTPVL

SEQ ID NO: 4562 - protein, 352 aa, Saccharomyces cerevisiae
MSDWKVDPDTRRRLLQLQKIGANKKCMDCGAPNPQWATPKFGAFICLECAGIHRGLGVHISFVRSITMDQFKPEELLRMEKGGNEPLTEWFKSHNIDLSLPQKVKYDNPVAEDYKEKLTCLCEDRVFEEREHLDFDASKLSATSQTAASATPGVAQSREGTPLENRRSATPANSSNGANFQKEKNEAYFAELGKKNQSRPDHLPPSQGGKYQGFGSTPAKPPQERSAGSSNTLSLENFQADPLGTLSRGWGLFSSAVTKSFEDVNETVIKPHVQQWQSGELSEETKRAAAQFGQKFQETSSYGFQAFSNFTKNFNGNAEDSSTAGNTTHTEYQKIDNNDKKNEQDEDKWDDF

SEQ ID NO: 4563 - protein, 447 aa, Solanum tuberosum
MGKKKIHISIVVIGHFNSGNSTTTGHLIYNLGGIDNLFIERFEKEPAEINKRSFNYAWVLDKLKAELERGITIDIALWNFETTNYYCTVIDAPGHRDFIKNIITGTSQADCAVLIIDSTTGGFKPGISKNGQTREHPLLAFTLGVNQIICCCNKMDATTPKYSKARYDEIVKEISSYLKKVGYNPDKIPFVPISGFEGDNMIERSTNLDWYKGPTLLDALDQINEPKRPTDKPLRLPLQDVYKIGGIGTVPVGRVETGVIKPGMVVTFGPTGLTTEVKSVEMHHEALLEALPGDNVGFNVKNVAVKDLKRGFVASNSKDDPAKGAASFTAQVIIMNHPGQIGNGYAPVLDCHTSHIAVKFAEILTKIDRRSGKELEKEPKFLKNGDAGMVKMIPTKPMVVETFSEYPPLGRFAVRDMRQTVAVGVIKSVDKKDPSGAKVTKAAQKKK

SEQ ID NO: 4564 - protein, 540 aa, Lactobacillus helveticus
MAKDIKFSENARRSLLKGVDKLADTVKTTIGPKGRNVVLEQSYGNPDITNDGVTIAKSIELKDRYENMGAKLVAEAAQKTNDIAGDGTTTATVLTQAIAREGMKNVTAGANPVGIRRGIEKATKAAVDELHKISHKVESKDQIANVAAVSSASKEIGALIADAMEKVGHDGVITIEDSRGINTELSVVEGMQFDRGYLSQYMVTDNDKMEADLDNPYILITDKKISNIQDILPLLQEIVQQGKSLLIIADDITGEALPTLVLNKIRGTFNVVAVKAPGFGDRRKAQLQDIAALTGGTVITEDLGLELKDTKIDQLGQARRITVTKDSTTIVGGAGSKEAIDERVDTIRKQIEDSTSDFDKKKLQERLAKLTGGVAVIHVGAATETELKERRYRIEDALNSTRAAVDEGYVAGGGTALVNVEKAVREVKGETTDEQTGINIVLRALSAPVRQIAENAGKDGSVILDKLEHQENEIGYNAATDKWENMVDAGIIDPTKVTRTALQNAASIAALLLTTEAVVAEIPEPKQAAPQGGAGAPMGM

SEQ ID NO: 4565 - protein, 343 aa, Sinorhizobium meliloti 1021
MKAIVIHTAKDLRVEECAVEKPGPGEVEIRLAAGGICGSDLHYYNHGGFGTVRLKEPMILGHEVSGHVAALGEGVSDLAIGDLVAVSPSRPCGACDYCLKGLPNHCFHMRFYGSAMPFPHIQGAFRERLVAKASQCVKAEGLSAGEAAMAEPLSVTLHATRRAGEMLGKRVLVTGCGPIGTLSILAARRAGAAEIVAADLSERALGFARAVGADRTVNLSEDRDGLVPFSENKGTFDVLYECSGAQPALVAGIQALRPRGVIVQLGLGGDMALPMMAITAKELDLRGSFRFHEEFATAVKLMQGGLIDVKPLITHTLPLGEALKAFEIASDKGQSMKTQIAFA

SEQ ID NO: 4566 - protein, 762 aa, Neurospora crassa
MLKKPGFGPKVKPKVVARRNAPPSAKSTDSTPAPTESTTSQPTTAAATPTAESGPSTRQVSPASASAQPTPPATLASDTVPEKESSSVAKPVSRDAAPTDKQAQPATISATASVLAPAPTPAPTATASTPVEKPVEKPVEKPAEKPTSEKSSNATTATENPKAAAPRQTPSKARGTPAAVITPTIIEITRPRGRSSVATSEIIAQSPSRATRPTPTADPSSTTSSATPSGTSSTEAASTRSSTDTTQPVTQSESSAESRAESSAEATAAPTTKTTKKAPVPRAPRAPRKRKADATVDEEGNDEAVAEAEAAAPPPKKRTRTTKKTAAEPSADGEEAAEAEGEAAVPAPRKRAPRKRKTDAATGEGEADNGEAEGVAAAAAPKKRARTRKSAAEPSVEGEDSQEAAPKPKRVRKPRKPRTESNNIDPALLGDEEQNEEAQANTKKGRQQREATPENAEQVQIDRTQLTMAELAKDLHIGKKFSLHDELAERERAKRQKYYEKRKKQKRGETADGDGDNADGGASGEQSASGTPAPGGTSATNPAASSRPAAAIDEPPLVDSSVGAVGEQYIMIDGEIRLNERSLQVDRHAAVDQANYEVQEENDFTHLTTSATYLRRNMKPGQWSDEETDKFYSALTMFGTDFETIARLFKDKTRKHIKLKFNREERADPDRIQKALVGERTVMIDIEQYQRDTGQEFETAEKIYEEQRKAEEEFEARQKAIEDAKAEEERKKAELLFGKDGQGGVAGGKKRRGKKARPEPTW

SEQ ID NO: 4567 - protein, 258 aa, Leuconostoc mesenteroides subsp. mesenteroides ATCC 8293
MTRISQALENKNAFIGFAVAGYPDFEKSAKYIVDMAEAGADLIEIGIAFSDPSADGPTIMNADQEVLENGSTTADVFNLVAEVRKHTDVPLVFLTYTNPVFKYGYEKFLSKMQSLDIQGVIMPDMPMEEQDEFLELVHQYGRDFIQLVTLQSGNRLPKIVERASGFIYVVSSLGITGSRSKLSNEADEIVTKIKRLTDLPVAVGFGITTYDQAKQFESADAIIVGSALVKIIEDHPEDATSYLTDFIKNMKGARHATN

SEQ ID NO: 4568 - protein, 251 aa, Sinorhizobium meliloti 1021
MSTELFDLTGKRALVTGSSQGIGYALAKGLAATGAEIILNGRDAAKLAAAARDLGAGHTLAFDATDHQAVRKAVDAFEADVGAIDILVNNAGMQHRTPLEDFPADAFERLLKTNVSSVFNVGQAVARHMIKRGAGKIINIASVQTALARPGIAPYTATKGAVGNLTKGMATDWARYGLQCNAIAPGYFDTPLNAALVADPSFSDWLERRTPAGRWGKVEELVGACIFLSSDASSFVNGHVLYVDGGITASL

SEQ ID NO: 4569 - protein, 493 aa, Corynebacterium glutamicum ATCC 13032
MTSSFSRRQFLLGGLVLAGTGAVAACTSDPGPAASAPGPSLRPTPTPTALGEPTVRRTLTARPLSLDIGGIEAKTWGYVSDTGDAAIEATAGDVLQVDITNELPESTSIHWHGIALHNAADGVPGMTQDPIEPGESFSYVFEVPHGGTYFYHSHTGLQLDRGLHAPLIIRDPQDAEDQDVEWTIVLDDWVDGIQGTPDDELDKLTGMGSGDHNGRMGMGGHGQMMHGTPDRVLGGDVGDVMYPHYLINGRIPRAHRTFEARPGDKARLRFINSGGDTIFKVALGGHRMTVTHTDGFPVQPWETESIYLSMGERVDVEVILGDGIFPLTALAVGKDDRAFAVIRTAGGQAPRPDVDFPELSSTGLLLSSLKPADRALLPEGTPDREVSIDLGGQMMPYEWSILTDGQSSSATVQEGQRLRMVMRNRTMMPHPMHIHGHTWALPGSGGLRKDTVLLRHGETMIADLIADNPGEWAFHCHNAYHMETGMVSSLRYE

SEQ ID NO: 4570 - protein, 229 aa, Gossypium barbadense
MQIFVKTLTGKTITLEVESSDTIDNVKTKIQDKEGIPPDQQRLIFAGKQLEDGRTLADYNIQKESTLHLVLRLRGGMQIFVKTLTGKTITLEVESSDTIDNVKAKIQDKEGIPPDQQRLIFAGKQLEDGRTLADYNIQKESTLHLVLRLRGGMQIFVKTLTGKTITLEVESSDTIDNVKAKIQDKEGIPPDQQRLIFAGKQLEDGRTLADYNIQKESTLPLVLRLRGGF

SEQ ID NO: 4571 - protein, 342 aa, Bacillus subtilis subsp. subtilis str. 168
MVKVYYNGDIKENVLAGKTVAVIGYGSQGHAHALNLKESGVDVIVGVRQGKSFTQAQEDGHKVFSVKEAAAQAEIIMVLLPDEQQQKVYEAEIKDELTAGKSLVFAHGFNVHFHQIVPPADVDVFLVAPKGPGHLVRRTYEQGAGVPALFAIYQDVTGEARDKALAYAKGIGGARAGVLETTFKEETETDLFGEQAVLCGGLSALVKAGFETLTEAGYQPELAYFECLHELKLIVDLMYEEGLAGMRYSISDTAQWGDFVSGPRVVDAKVKESMKEVLKDIQNGTFAKEWIVENQVNRPRFNAINASENEHQIEVVGRKLREMMPFVKQGKKKEAVVSVAQN

SEQ ID NO: 4572 - protein, 332 aa, Glycine max
MESCVPPGFRFHPTEDELVGYYLKRKINSLKIDLDVIVEIDLYKMEPWDIQDRCKLGYEQQNEWYFFSHKDKKYPTGTRTNRATAAGFWKATGRDKAVMSKNRIIGMRKTLVFYKGRAPNGRKTDWIMHEYRHQTSEHGPPQEEGWVVCRAFRKPSPSHRPGFDHPWCSTSSQQQHFFRDQIQSYSSRPLSIADILDETNNVPHPNAEGTSFSHPFSSDHQQHLNNLLSNQTVAIMDKQLIELPQLDSPTASLAIKECNQQQHNGLTNEEYCSDERSNNSNAQGIDWKSLDNLFGSQLSDNAAYFSHPNLPLMMPHNHDQASHILGCFPDSS

SEQ ID NO: 4573 - protein, 279 aa, Sinorhizobium meliloti
MTARMEQRFADVAAEGRPVLVTYFMGGDPDFDTSLAIMKALRQAGADIIELGVPFSDPMADGPAIQLAGQRALKAGQSLAKTLELARLFRAEDQRTPIVLMGYYNPIYIYGVERFLADALEAGVDGLIVVDLPPEMDDELCIPALEKGISFIRLATPTTDDRRLPKVLENTSGFVYYVSMTGITGSALPDPSLIAGAVARIKAHTPLPVCVGFGVKTADHARAIGASADGVVVGTAIVNQIASSLTEEGRATEATVPGVEALVRGLAAGVRAARLAAAE

SEQ ID NO: 4574 - protein, 416 aa, Oryza sativa (japonica cultivar-group)
MAAEICREEAAKSMPAAAAGATAIARRRRRVEGFRFAAGSLEPPQEDADAGVARCGKRQRVAGARAGAGAATAGPCRPSAGAEFGSRWWPRYGVTSVFGRRREMEDAVSIRPDFLRGSTSSGKHHFFGVFDGHGCSHVARMCQDRMHELVVDAYKKAVSGKEAAAAAPAWKDVMEKGFARMDDEATIWAKSRTGGEPACRCELQTPARCDHVGSTAVVAVVGPNRVVVANSGDSRAVLCRAGVPVPLSVDHKPDRPDELERIKAAGGRVIYWDGARVLGVLAMSRAIGDGYLKPYVTSEPEVTVTERADDDECLILASDGLWDVVTNEMACEVVRACFRSNGPPSPPGCSRPKAVLPPPAGASGGGGGDAVVKGVDKAESDKACADAALLLAKLAIARRSADNVSVVVVDLRRPVP

SEQ ID NO: 4575 - protein, 312 aa, Forsythia x intermedia
MGKSKVLIIGGTGYLGRRLVKASLAQGHETYILHRPEIGVDIDKVEMLISFKMQGAHLVSGSFKDFNSLVEAVKLVDVVISAISGVHIRSHQILLQLKLVEAIKEAGNVKRFLPSEFGMDPAKFMDTAMEPGKVTLDEKMVVRKAIEKAGIPFTYVSANCFAGYFLGGLCQFGKILPSRDFVIIHGDGNKKAIYNNEDDIATYAIKTINDPRTLNKTIYISPPKNILSQREVVQTWEKLIGKELQKITLSKEDFLASVKELEYAQQVGLSHYHDVNYQGCLTSFEIGDEEEASKLYPEVKYTSVEEYLKRYV

SEQ ID NO: 4576 - protein, 407 aa, Polaromonas sp. JS666
MKPITKSAKLANVLYDIRGPIMDAAKQMEEEGHHLIKLNLGNLAVFGFDAPEEIQQDMIRNLPSSAGYSDSKGIFAARKAVMHETQKQGISGVTLDDIYLGNGASELIAMATNALLDDGDELLLPTPDYPLWTASTSLSGGKPVHYLCDEDNGWMPNLDDIRAKITPKTKGIVVINPNNPTGALYSDELLKQIVEIARTHGLVILADEVYDKVLYDGAHHTAIASLSTDVLTLTFNSLSKSYRSCGYRAGWLVVSGPKKRAEDYIEGLNMLANMKLCSNVPGQWAIQTALGGYQSINDLTGEGGRLRRQRDLAYELITAIPGVSCVKPSAALYMFPKLDPKVYPIKDDRQFFLELLKETKVMLVQGTGFNWASPDHFRIVFLPHEEDLREAVGRIAKFLENYRNNNI

SEQ ID NO: 4577 - protein, 465 aa, Haemophilus influenzae R2846
MGPSTDRDNNLEKIIAAGANVVRMNFSHGTPDDHIGRAERVRSIAKKLGKTVAILGDLQGPKIRVSTFKDGKIFLNVGDKFILDAELPKGEGTQESVGLDYKTLPQDVVPGDILLLDDGRVQLKVLSTDGAKVFTEVTVGGPLSNNKGINKLGGGLSADALTEKDKADIITAARIGVDFLAVSFPRSSADLNYARELAQQAGLNAKIVAKVERAETVANDEAMDDIILASDVIMVARGDLGVEIGDPELVGVQKKLIRRSRQLNRAVITATQMMESMISNPMPTRAEVMDVANAVLDGTDAVMLSAETAAGQYPSETVAAMASVCLGAEKMPSINVSRHRMDKEFETIEESVAMSAMYAANHMKGVAAIVTLTSTGRTPLLMSRISSGLPIFALSRNQETLNLCALYRGVTPIYHGEESRTEAGAKAALQSLKEKGYLSTGDLVLVTQGGQGATQTNVCRTLIVE

SEQ ID NO: 4578 - protein, 630 aa, Brucella melitensis 16M
MPAFSRSSSSALEVDGPMASAVNNAAPAAASKYTYVDHKFDVVVVGAGGAGLRATLGMAEQGLKTACITKVFPTRSHTVAAQGGIAASLKNMGPDSWQWHMYDTVKGSDWLGDTDAMEYLTREAPAAVYELEHYGVPFSRTEEGKIYQRPFGGHMQNFGDGPPVQRTCAAADRTGHAILHTLYGQSLKNNAQFFIEYFALDLIMTDGVCTGVVAWNLDDGTIHRFSAKMVVLATGGYGRGYFSATSAHTCTGDGGGMVARAGLPLQDMEFVQFHPTGIYGAGCLITEGARGEGGYLVNSEGERFMERYAPSAKDLASRDVVSRCMTMEIRAGRGVGKNKDHIYLHLDHLDPAVLHERLPGISESAKIFAGVDVTKEPIPVLPTVHYNMGGIPTNYWGEVLNPTKEDPDRVQPGLMAVGEAGCASVHGANRLGSNSLIDLVVFGRAAAIRAGQVIDRKSKIPDIDIAACDKIMERFDRLRFANGSTPTAVLREKMQRTMQEDAAVFRTEESLKQGVERMEKLWHELPDIKVTDRSMIWNSDLVETLELENLMANALTTVVSAEARQESRGAHAREDFPDRNDAEWRKHTLSRLSPDGKVTLDYRPVHLDPLTTEEEGGISLAKIAPKKRVY

SEQ ID NO: 4579 - protein, 201 aa, Brassica napus
  misc_feature (121)..(121): Xaa can be any naturally occurring amino acid
  misc_feature (190)..(190): Xaa can be any naturally occurring amino acid
  misc_feature (193)..(193): Xaa can be any naturally occurring amino acid
  unsure (1)..(201): unsure at all Xaa locations
MALAFDEFGRPFIILREQDQKTRLRGIDAQKANIAAGKAVARILRSSLGPKGMDKMLQGPDGDVTITNDGAAILEQMDVDNQIAKLMVELSRSQDYEIGDGTTRVVVMAGALLEQAERQLXDRGIHPIRVAEGYEMASRVAVEHLERISQKFEFDVNNFEPLVQTCMTTLSSKIVNRCKRSLAEIAVKAXLAXADLERRDV

SEQ ID NO: 4580 - protein, 316 aa, Escherichia coli K12
MNELDGIKQFTTVVADSGDIESIRHYHPQDATTNPSLLLKAAGLSQYEHLIDDAIAWGKKNGKTQEQQVVAACDKLAVNFGAEILKIVPGRVSTEVDARLSFDKEKSIEKARHLVDLYQQQGVEKSRILIKLASTWEGIRAAEELEKEGINCNLTLLFSFAQARACAEAGVFLISPFVGRIYDWYQARKPMDPYVVEEDPGVKSVRNIYDYYKQHHYETIVMGASFRRTEQILALTGCDRLTIAPNLLKELQEKVSPVVRKLIPPSQTFPRPAPMSEAEFRWEHNQDAMAVEKLSEGIRLFAVDQRKLEDLLAAKL

SEQ ID NO: 4581 - protein, 333 aa, Mycobacterium avium
MFYDDDADLTIIQGRKVGVIGYGSQGHAHSLSLRDSGVQVKVGLKEGSKSRAKVSEQGLDVDTPAAVAKWADVIMLLAPDTAQADIFKNDIEPNLSDGDALFFGHGLNIHFGLIKPPAEVTVAMVAPKGPGHLVRRQFVDGKGVPCLIAVDQDPTGKGEALALSYAKAIGGTRAGVIKTTFKDETETDLFGEQAVLCGGTEELVKAGFDVMVESGYPPEMAYFEVLHELKLIVDLMYEGGIARMNYSVSDTAEFGGYLSGPRVIDAGTKDRMREILRDIQNGDFVKKLVANVEGGNKQLEQLRKENVEHPIEVVGKRLRDLMSWVDRPITETA

SEQ ID NO: 4582 - protein, 78 aa, Castanea sativa
MSRSMRVFSTVFVVLLLLVATQYMGPMVAEARTCESQSHRFKGPCVRKSNCASVCQTEGFHGGQCRGFRRRCFCTKHC

SEQ ID NO: 4583 - protein, 315 aa, Triticum aestivum
  misc_feature (170)..(170): Xaa can be any naturally occurring amino acid
  unsure (1)..(315): unsure at all Xaa locations
MAEKQQQGSNVEEGSSRAAGKVVCVTGASGYIASWIVKLLLDRGYTVHGTVRDTADPDKTWHLRALDGANDRLQLFNANLLEEGSFDAAIDGCECVFHAASPVFFTIKDPKAELLEAAVSGTLDVLRSCKKASVKRVVITSSMAAVTFNGKPRTPDVIVDETWISDSEAXEKHQQWYVLSKTLAEEAAWKFSKDNELEIVVMHPTMVIGPLLQPTLNASVEVILNLINGSSSTYPNIAHGWVNVKDVALAHILAYEVPSADGRYCIVERVAHYLELVKIISKMYPNIPLPYNIFHLQGRRRWRAPAAFPGPERER

SEQ ID NO: 4584 - protein, 433 aa, Brucella melitensis 16M
MLITGRNKQTALMASLPALFALAGTAMAQDTAPAPTLDTGDTAWMLTSTALVLMMTIPGLALFYGGMVRKKNVLSTVMQSFAITCLMSILWMIAGYSLAFTDGGSLHSYIGGFSKVFFSGVTMESLTGTIPEYLFITFQMTFAIITPALITGSFAERMKFSSMLVFLTLWLFIVYVPVAHWVWGGGFMASDGVLDFAGGTVVHINAGVAGLVAALVIGKRDGYGHTNMAPHNLVLSVIGAALLWVGWFGFNAGSAAGANALAGVAMLNTQVATAGAALAWMFVEWAISGKPSVLGIISGAVAGLVAVTPAAGFVNPTGALIIGIVAGAVCYVAAVKIKHVLGYDDSLDAFGVHGVGGFVGAVLTGFFADATINPASEGATIGKQFFGAAITIIYTAIATVIILYVVKAIMGLRPGKQAEIEGLDIALHGEAVQ

SEQ ID NO: 4585 - protein, 216 aa, Escherichia coli
PGNVLRLENLPAADADQLAGNGGCHSLAGAIRGNKTMTLKELLVGFGTQVRSIWMIGLHAFAKRETRMYPEEPVYLPPRYRGRIVLTRDPDGEERCVACNLCAVACPVGCISLQKAETKDGRWYPEFFRINFSRCIFCGLCEEACPTTAIQLTPDFEMGEYKRQDLVYEKEDLLISGPGKYPEYNFYRMAGMAIDGKDKGEAENEAKPIDVKSLLP

SEQ ID NO: 4586 - protein, 478 aa, Yersinia enterocolitica
MKKTTLVLSALALSIGLAMGPVSSVVAAETASSSSQQLPSLAPMLEKVMPSVVSINVEGSAQVSNAGGIPPQFQQFFGDDSPFCQDGSPFQGSPMCQGGPGSRGGAPSKQDFRALGSGVIIDAAKGYVVTNNHVVDNATKINVKLSDGRSYEAKVIGKDPRTDIALLQLKDAKNLTAIKIADSDQLRVGDYTVAIGNPYGLGETVTSGIVSALGRSGLNVENYENFIQTDAAINRGNSGGALINLNGELIGINTAILAPDGGNIGIGFAIPSNMVKNLTSQMVEFGQVKRGELGIMGTELNSELAKAMKVDAQKGAFISQVLPKSAAAKAGIKAGDVIVSMNGKAINSFAGFRAEIGTLPVGSKMTLGLLRDGKPVNVEVTLEQSSQTQVDSGNLYTGIEGAELSNSDVNGKKGVKVDSVKPGTAAARIGLKKGDVIMGVNQQPVQNLGELRKILDTKPSVLALSIQRGDTSLYLLMQ

SEQ ID NO: 4587 - protein, 326 aa, Burkholderia sp. 383
MAHAVRFHETGGPEVLRWEEVDVGDPGPGQVRLRHDAVGLNFADTYFRSGLYPVPLPAGLGVEAAGVVEAVGPGVTNVAVGDRVTYTGFLNTLGAYSTERLIPAAPLVRLPAGISCETAAAMTMRGLTSAYLLRRIHAFAPGDTILLHAAAGGVGLIVSQWAKLLGLNVIGTVSSEHKAGIARAHGCDHTIDYSREDVAKRVRELTDGAGVDVVFDSVGKDTFEGSLDSLKRRGLMVCVGTASGPIPPFDPQRLAMKGSLYLTRPALADYIADPAEKNDLAGELFAHVAAGRIRIEINQRYALQDAAQAHRDLESRKTTGSSVFIV

SEQ ID NO: 4588 - protein, 103 aa, Brassica napus
  misc_feature (12)..(12): Xaa can be any naturally occurring amino acid
  misc_feature (21)..(21): Xaa can be any naturally occurring amino acid
  unsure (1)..(103): unsure at all Xaa locations
PGQIYPMSCLCXHIMPPPPQXVEKEIGEKRLVGSHGTGLSIAPEISFSDVTADCSNPNEAKEAYSQALYNSVDEQYKTLNSAINHRRGIEASTSTVSLSQPWN

SEQ ID NO: 4589 - protein, 550 aa, Azoarcus sp. EbN1
MAAKEVKFGDSARDRMVAGVNILANAVKVTLGPKGRNVVLERSFGAPTVTKDGVSVAKEIELKDKFENMGAQMVKEVASKTSDIAGDGTTTATVLAQSIVREGMKFVAAGMNPMDLKRGIDKAVIAVTEELKKLSKPCSTNKEIAQVGSISANSDADIGEIIAKSMDKVGKEGVITVEDGKSLQNELDVVEGMQFDRGYLSPYFINNPDKQVAILENPFILLFDKKISNIRDLLPVLEQVAKAGRPLLIVAEDVEGEALATLVVNNIRGILKTCSVKAPGFGDRRKAMLEDIAVLTGGQVIAEEVGLTLEKATLAELGQAARIEIGKENTIIIDGAGEGSRIEGRVKQIRAQIEEATSDYDREKLQERVAKLAGGVAVIKVGAATEVEMKEKKARVEDALHATRAAVEEGIVPGGGVALLRARANLGTLKGDNHDQDAGIKIVLRALEQPLREIVANAGDEPSVVVNRVVEGTGNFGYNAATGEYGDLVDMGVLDPTKVERIALQNAASVAGLMLTTDCMVGELAEEKPSMGGMGGMGGMGGMGGMDMGM

SEQ ID NO: 4590 - protein, 281 aa, Pseudomonas syringae pv. tomato str. DC3000
MTFAVIQMVSQSDVQANLASARRLLEQAAEGGARLAVLPENFVAMGRRDVADIGRAEADGHGPILPWLKLAARDLKLWIVAGTLPLPPTAQPAGKVTACSLLVDEHGEQIARYDKLHLFDVDVADSRGRYRESDDYAHGSKVVVVDTPVGRLGLSVCYDLRFPELYTALREAGAELITAPSAFTAVTGAAHWDILIRARAVETQCYVLAAAQGGVHPGPRETYGHAAIVDPWGRVLDQQAQGEAVLLATRDSEEQASIRARMPVSSHRRFFSQDAMRPASE

SEQ ID NO: 4591 - protein, 217 aa, Triticum aestivum
  misc_feature (58)..(58): Xaa can be any naturally occurring amino acid
  misc_feature (186)..(186): Xaa can be any naturally occurring amino acid
  misc_feature (205)..(205): Xaa can be any naturally occurring amino acid
  unsure (1)..(217): unsure at all Xaa locations
MASGEKVDYVFKVVLIGDSAVGKSQILARFARNEFSLDSKATIGVEFQTRTLVIDHKXVKAQIWDTAGQERYRAVTSAYYRGALGALLVYDITKRQSFDHIPRWLEELRGHADKNIVIMLVGNKSDLEDERAVSTEDAKEFAEKENLFFLETSALQATNVESAFQTVLSEIFKIHSKKNIVTDPKXANGAAPPLAGKKVLVPGPXQEIPKSKCCSSM

SEQ ID NO: 4592 - protein, 467 aa, Bacillus subtilis subsp. subtilis str. 168
MNTNQDNGNQLQRTMKSRHLFMISLGGVIGTGFFLGTGFTINQAGPLGAVLSYLVGGFIMFLTMLCLGELAVAFPVSGSFQTYATKFISPAFGFAFGWLYWLGWAVTCAIEFLSAGQLMQRWFPHIDVWIWCLVFAALMFILNAITTKAFAESEFWFSGIKILIILLFIILGGAAMFGLIDLKGGEQAPFLTHFYEDGLFPNGIKAMLITMITVNFAFQGTELIGVAAGESEDPEKTIPRSIKQTVWRTLVFFVLSIIVIAGMIPWKQAGVVESPFVAVFEQIGIPYAADIMNFVILIALLSVANSGLYASTRILYAMANEGQAFKALGKTNQRGVPMYSLIVTMAVACLSLLTKFAQAETVYMVLLSLAGMSAQVGWITISLSQIMFRRKYIREGGKIEDLKFKTPLYPVLPLIGLTLNTVVLISLAFDPEQRIALYCGVPFMIICYIIYHVVIKKRQQANRQLEL

SEQ ID NO: 4593 - protein, 96 aa, Azoarcus sp. EbN1
MKIRPLHDRVIVKRLEAERKTASGIVIPDSAGEKPDQGEVLAVGNGKILDDGKVRPMAVKVGDKVLFGKYAGQTVKVEGDELLVMREEDIMGVVEA

SEQ ID NO: 4594 - protein, 246 aa, Oryza sativa (japonica cultivar-group)
MCMNKNLLILAEILGTYFMIFAGCGAVVVNQSTGGAVTFPGICAVWGLVVMVLVYTVSHISGAHFNPAVTVAFATCGRFRWKQVPSYVVAQVLGSTMASLTLRVVFGGGGGGARGEHLFFGTTPAGSMAQAAALEFVISFFLMFVVSGVATDNRAIGELAGLAVGATVAVNVLFAGPVTGASMNPARSLGPAMVAGRYGGVWVYVAAPVSGTVCGAWAYNLLRFTDKPLRDIANTASFLRRSSRRS

SEQ ID NO: 4595 - protein, 401 aa, Bacillus subtilis subsp. subtilis str. 168
MTALSKSKEIIDQTSHYGANNYHPLPIVISEALGAWVKDPEGNEYMDMLSAYSAVNQGHRHPKIIQALKDQADKITLTSRAFHNDQLGPFYEKTAKLTGKEMILPMNTGAEAVESAVKAARRWAYEVKGVADNQAEIIACVGNFHGRTMLAVSLSSEEEYKRGFGPMLPGIKLIPYGDVEALRQAITPNTAAFLFEPIQGEAGIVIPPEGFLQEAAAICKEENVLFIADEIQTGLGRTGKTFACDWDGIVPDMYILGKALGGGVFPISCIAADREILGVFNPGSHGSTFGGNPLACAVSIASLEVLEDEKLADRSLELGEYFKSELESIDSPVIKEVRGRGLFIGVELTEAARPYCERLKEEGLLCKETHDTVIRFAPPLIISKEDLDWAIEKIKHVLRNA

SEQ ID NO: 4596 - protein, 188 aa, Glycine max
MDFYFGNPHPYPNIHQYHAHNSVVSMTPSSPEIALSDYLMLDDYVDHQDSRSSQSTESSEKATFCDPTHGFSTGATSKNNNMKCKNGINENKRGVGPRIAFRTKSELEIMDDGYKWRKYGKKSVKSNPNLRNYYKCSSGGCSVKKRVERDRDDSSYVITTYEGVHNHESPFTTYYSPISFVHSDTTFK

SEQ ID NO: 4597 - protein, 400 aa, Bacillus subtilis subsp. subtilis str. 168
MVDYEREEEHTTPEQPKRSKKGYFLSSLIGVIVGAVLMAFIMPYLSNEGLDTGALDQQQNNNGRESIRTVNVSVNNAVTKIVSNMSPAVVGVVNIQKSDIWGESGEAGSGSGVIYKKNDHSAYVVTNHHVIEGASQIEISLKDGSRVSADLVGSDQLMDLAVLRVKSDKIKAVADFGNSDKVKSGEPVIAIGNPLGLEFAGSVTQGVISGTERAIPVDSNGDGQPDWNAEVLQTDAAINPGNSGGALLNMDGKVIGINSMKIAESAVEGIGLSIPSKLVIPVIEDLERYGKVKRPFLGIEMKSLSDIASYHWDETLKLPKNVTNGAVVMGVDAFSPAGKAGLKELDVITEFDGYKVNDIVDLRKRLYQKKVGDRVKVKFYRGGKEKSVDIKLSSADQLGS

SEQ ID NO: 4598 - protein, 160 aa, Glycine max
KKSVYCTCILYIICLTGVEIYCAPTADSRDVWQASMTHIALEGGCFVLSANQFCRRKDYPPPPEYVFAGTEEDLTPDSVVCAGGSVIISPSGAVLAGPNYDGEALISADLDLGEIARAKFDFDVVGHYSRPEVLSLIVKDHPTNPVTFTSTSTKIEDKTK

SEQ ID NO: 4599 - protein, 242 aa, Rhodococcus equi
MARWIGDSGGVSETPQVRVLIVDDEPSLVELLSVSLRFQGFEVETAANGAEGLDKARAFRPDALILDVMMPGMDGFGMLRRLRADGVDAPVLFLTARDAVEDKVTGLTIGADDYVTKPFSLEEVVTRLRVILRRAGHSDDKQSARVTFADLELDDDTREVWKAGEPVSLSPTEFTLLRYFMVNAGTVLSKPRILDHVWNYDFGGEVGVVESYVSYLRRKIDTTEPRLIHTLRGVGYVMREPR

SEQ ID NO: 4600 - protein, 96 aa, Psychrobacter arcticus 273-4
MNIRPLHDRIVVRRIEEETKTAGGILLPGSAQEKPSQGEVLATGNGQIRDNGETRALDVKTGDKVLFGQYAGQTVKVDGEELLIMKESDVLGVLEG

SEQ ID NO: 4601 - protein, 335 aa, Gossypium hirsutum
MKVLSPILACLALAVVVSHAVLSPEQYWSYKLPNIPMPKAVKEILHPELMEEKSTSVNVGGGGVNVNTGKGKPGGDTHVNVGGKGVGVNTGKPGGGTHVNDPDPFNYLYAASETQIHEDPNVALFFLEKDMHPGATMSLHFIENTEKSAFLPYQTAQKIPFSSDKLPEIFNKFSVKPGSVKAEMMKNTIKECEQPAIEGEEKYCATSLESMIDYSISKLGKVDQAVSTEVEKQTPMQKYTIAAGVQKMTDDKAVVCHKQNYAYAVFYCHKSETTRAYMVPLEGAGGTKAQALAVCHTDTSAWNPKHLAFQFLKVEPGTIPVCHFLPRDHIVWVPK

SEQ ID NO: 4602 - protein, 546 aa, Psychrobacter arcticus 273-4
MAKDVKFGIDARKQMMDGVNILANAVRVTLGPKGRNVVIDKSFGAPTITKDGVSVAKEIELENKFENMGAQLVREVASRTNDVAGDGTTTATVLAQSILQEGMKSVAAGMNPMDLKRGIDKAVRAAVEQIHLLSTPADDSKAIAQVGSISANSDTKIGELIAQAMEKVGKQGVITVEEGSSFEDTLEVVEGMQFDRGYISPYFANKQDSLTAEFENPYILLVDKKISNIREIVPLLEQVMQQSKPLLIIAEDVENEALATLVVNNMRGGLKTCAVKAPGFGDRRKAMLEDIATLTGGTVISEEIGLSLETATLEQLGTAKKVTVGKENTVIVDGAGHSADIENRVESIRRQVEESTSDYDKEKLQERMAKLAGGVAVIKVGAATETEMKEKKDRVDDALHATRAAVEEGVVPGGGVALVRAMNALSELRGDNDDQNAGINILRRAMEAPLRQIVTNSGEEASVVVNEVKSGSGNYGYNAASGEYGDMLEMGILDPAKVARSALENAASVAGLMLTTEVMITDLPQGDDGMAGMGAGGGMGGMGGMM

SEQ ID NO: 4603 - protein, 168 aa, Zea mays
MAAASSATSVHDFTVKDASGKDVDLSTYKGKVLLIVNVASQCGLTNSNYTELSQLYEKYKDQGFEILAFPCNQFGGQEPGTNEEIVQFACTRFKAEYPIFDKVDVNGDNTAPIYKFLKSSKGSLFGDNIKWNFSKFLVDKEGHVVERYAPTTSPLSIEKDIKKLLGSY

SEQ ID NO: 4604 - protein, 131 aa, Desulfovibrio desulfuricans G20
MPHKILIVDDDPYIVKYLVDILSDNGYATCSASDGADAMAVLEREKPDLVTLDLEMPNEWGPRFYRKMTKEPAFKDTPVIVISGLSGIHLAIRNAVASLKKPFDPNKLLEIIRQTLGEQERSQAAQASDDE

SEQ ID NO: 4605 - protein, 560 aa, Listeria monocytogenes str. 4b H7858
MQTELVNQIEVKLRKIYQAAYQPAYLEKMLACAENYSNNARGSIDTISEKNVYLIAYGDSIFEKNKHPLQTLNEFLQEYAQDVITDVHLLPIFPSTSDDGFSVTDYKQIDEQLGDWDDVQKMSENFRVMLDFVANHMSKSSDWFKRFSDNEAPYNQFFIEKNSQFDYKNVTRPRTSPLFHKYENGKELWTTFSEDQLDLNVRNIDCLVALTDVLLFYASKQATSIRLDAIGFLWKTSGTTCMHLPETHEIITLWRLLIDELYPNLQIITETNVPHEENISYFGDGENEANMVYQFPLPPLVLHTFTCHDTTKLSKWAKSISQVSSTATYFNFLASHDGIGMRPATGILSDEEINSLVQKAVQNGGQVSYKDNADGTQSVYELNINYGEALQNLGEDTTEELVTKKIIAAHSILLTLQGIPAIYYHSLLGSKNDLVGYEESGINRRINREKLEKNQLVHELETDTYRQTIFTSLKKLVPIRRNHTAFSPFATQEILDLGPDVFAIKRESEEECIYGIINVTSHNIRKTLAFSGTNLLTNQPVTSELELTAYEVVWIKKAVQ

SEQ ID NO: 4606 - protein, 653 aa, Desulfovibrio desulfuricans G20
MSHSILLVDDEEGIRTVLGLSLADAGYNVSVAATGEEALRLFDQSRPDIILTDIKMPGLSGLDLLKRVKNIAPDVEVIMITGHGDMQLAIQSLKQDATDFITKPINDDVLEIALNRAHERISMRNQLREYTENLENKVREQSARLVEAERQLAAQQMMDGFSVGLKALLNAMDSTLGGVFNELPCFVAVHSRYLEIIAANDLYREKLGNLVGHQSWEAYYGRDKDSNGCPVLTAIREGRGSRTEEMLVDKTGKGIPVLVHTAPILDNDGEVELVLEISVDTSEARRLHEELRLTRHRYGQLFDEAPCYITVQDKQFRVVEANRRFREDFGDAVGGFCHEVFVHRQTPCTGCPVQRTFNDGQPHQYETVVTSRSGEQYNVLVWTAPLRDAAGNITEVMEMSTNITELRKLQDRLSNLGLLLGSTAHGIKGLLTALDGGIYRLGSGLERNNTERVHDSYEDIRHLTDRLRKMVLDLLYYAKKRELNWEVVLASHFAPEVAALVRPKAEAQKVRFTIEVAPDAGTFEADAGALSSAFVNLLENAVEACTADRTPDKKHAVHMAVSGLPDRVEFCITDNGVGMDRETREKLFTLFFSSKGAAGTGIGLFVASQTVQQHGGSISVGSEPGKGTTFVITLPRTLPDSAKSEPRHPAPAT

SEQ ID NO: 4607 - protein, 678 aa, Ashbya gossypii ATCC 10895
MRRARANEGERRGPAAAEQFERPRTHARSGSSNRKHMICVQDRCVRVGSSAQVRLARGRCLCHLNSCAARTGAAAPRDRGAVLFRKVRGQLRAQPSSSPSHGAGAPCRAAVYRRVRAGLTGLRPPAVVMSRRASTLGGSVPTSRGTEAAMVDIVSWHLVADPASSLQLQGGDITRELYRWTAERPGRRRSHSYGGSRAPSVHSMGARDMRAPNGFRRSYMMERGGVLTGSFMEFLSLYGHFAGEDLSEDEDDALADAAVLFEEEETLLQGRRRSYGTDSGEAGGASVFRTVLLLLKSSVGTGVLFLPKGFHNGGWLFSTGALVFCGAASCVCFMLLIAAKEQEGVGGYGDLGRRVCGVAMQRTVLASIVLSQLGFAAVYAVFTATNLQVVCSTLFGWHASTGVYVAAQAAVYLPLALTRRITKLSATALLADLFILLGLVYVYYFSASQVVQHGAATDSMLAFNPSSWTVFLGTAIFTYEGVGLLIPIQESMRSPEKFRRCLLWVMVAVTAVFISFGMLCYAAFGAKVETVILLNFPQDSALGTGVQLLYAAAIMLSTPLQLFPAIRILENVVVTTSRSGKYSTKVKWIKNWFRALVVVLMLVLASLGSNDLDKFVSLIGSFACIPLIYVYPPLLHYVVFRGTGTVSQVALALDLAVMAFGLGIMGYTTVQTVVQWYG

SEQ ID NO: 4608 - protein, 162 aa, Triticum aestivum
FQKLKEMYNEWPFFRVTLDLLEMVFAKGDPGIAGLYDELLVAEELKPSGKQLRDKYVETQQLLLQIAGHKDILEGDPYLKQGLRLRNPYITTLNVFQAYTLKRIRDPSFKVTPQPPLSKEFADENKPAGLVKLNPASEYPPGLEDTLILTMKGIAAGMQNTG

SEQ ID NO: 4609 - protein, 633 aa, Ashbya gossypii ATCC 10895
MLSVTRTAPGVRTRALKLFSSGRAASLALVGAGAPHAKYHIVDHEYDCVVVGAGGPGCLQAFGLAEAGYKTACISKLFPTRSHTVAAQGGINAALGNMHGDDWKWHMYDTVKGSDWLGDQDSIHYMTREAPASIIELENFGMPFSRNDEGRIYQRAFGGQSKEYGKGGQAYRTCAVADRTGHAMLHTLYGQALSHNTHFFVEYFAMDLLTHNGEVVGVIAYNQEDGTVHRFRAHRTVMATGGYGRAYFSCTSAHTCTGDGNAMVSRAGFPLQDLEFVQFHPSGIYGSGCLITEGARGEGGFLLNSEGERFMERYAPTAKDLACRDVVSRAITMEIREGRGVGPEKDHIHLQLSHLPPSVLKERLPGISETAHIFAGVDVTKEPIPVLPTVHYNMGGIPTRWTGEALTIDEETGEDKVIPGLLACGEAACVSVHGANRLGANSLLDLVVFGRAVAHTVADSLQPGLPHKPLPADLGKESIANLERMRTASGPLTTSQIRLNMQKAMQKDVSVFRTQQTLDEGVHNVSAIDETLKDVGTSDRSMIWNSDLVETLELQNLLTCAVQTAKSAAERKESRGAHAREDFPERNDEEWMKHTLSWQHASGAPVEIKYRNVITTTLDETECPPVPPTVRAY

SEQ ID NO: 4610 - protein, 602 aa, Colwellia psychrerythraea 34H
MASSPKTNALSSSDSANATTWQNFKRLVSYAKPYKLGFVAAIIGMLGYAAIDVYFLSQLKPLVDEGLSGANANFMKWAPLFIIVAFTVRGIAHFIANYCLAWVGNNVVADLRQKLFEHIMSMPVAFHDQTSTGSLISKITFDTEQVLNSVSKSILTIVQQSAFIIGLLGLMFYYSWQLSLIFLLITPIIAVIVSVVSKRFRKVSKNIQGAMGEVTTAAEQTFNGHKVVLTFGGQQREFSRFAKINKHNRQQRMKMRATKSASVPIIQVIASFALAFVFYAITSDSLRDSISPGTFVSIITYMTMLLRPLKMLTNVNSEFQQGMAACTSIFSILDHEKEKDNGDKQLERASGTLSFKHVDFSYKNTNTMTTSDKEQDTKLALNDITFDLAPGETLALVGRSGSGKSTASSLLLRFYDATRGEILIDDTNIEQFQLKDLRKQFSYVSQQVVLFNDTLANNIAYGKPEATEAEIIEAAKSAHVMEFAEHMEQGLETNIGENGALLSGGQRQRVAIARALLCDTPFLILDEATSALDTESERHIQDALQTLQQNRTSIVIAHRLSTIENADKIIVMEQGKIVEQGNHQSLLAKQGAYAQLHSFQFE

SEQ ID NO: 4611 - protein, 667 aa, Escherichia coli K12
MSRKDLANAIRALSMDAVQKANSGHPGAPMGMADIAEVLWNDFLKHNPTDPTWYDRDRFILSNGHASMLLYSLLHLTGYDLPLEELKNFRQLHSKTPGHPEIGYTPGVETTTGPLGQGLANAVGLAIAERTLAAQFNQPDHEIVDHFTYVFMGDGCLMEGISHEVCSLAGTLGLGKLIGFYDHNGISIDGETEGWFTDDTAKRFEAYHWHVIHEIDGHDPQAVKEAILEAQSVKDKPSLIICRTVIGFGSPNKAGKEEAHGAPLGEEEVALARQKLGWHHPPFEIPKEIYHAWDAREKGEKAQQSWNEKFAAYKKAHPQLAEEFTRRMSGGLPKDWEKTTQKYINELQANPAKIATRKASQNTLNAYGPMLPELLGGSADLAPSNLTIWKGSVSLKEDPAGNYIHYGVREFGMTAIANGIAHHGGFVPYTATFLMFVEYARNAARMAALMKARQIMVYTHDSIGLGEDGPTHQAVEQLASLRLTPNFSTWRPCDQVEAAVGWKLAVERHNGPTALILSRQNLAQVERTPDQVKEIARGGYVLKDSGGKPDIILIATGSEMEITLQAAEKLAGEGRNVRVVSLPSTDIFDAQDEEYRESVLPSNVAARVAVEAGIADYWYKYVGLKGAIVGMTGYGESAPADKLFPFFGFTAENIVAKAHKVLGVKGA

SEQ ID NO: 4612 - protein, 358 aa, Ashbya gossypii ATCC 10895
MAWPRRAAEVARSTMASRLDKLPEAVSRLQSLSHRQLLRLAQGVCIPALSPSLHKGQSGRVCVVGGSLEYTGAPYFSAHAAALMGSDLVHVLCEWNAATPIKAYSPDLMVHPHLRDSSSLARGLEPATEAVRALVDRVHVLVLGPGLGRDPAMLRSVAGILEYVADKHEGGIPVVLDADALLLLSEQATAAAARAALRRFPPDRVILTPNAVEAKRLAGAFELDDPARLSEYLNCTVVLKGGPDRIYAPGGSSPLSCSHEGSLKRVAGQGDTLRGCLPAMLAYNRAIHDFGIAEPDYTGLEGGTLSASERTALCCYVACAVARGASHRAYEAQGRAMQTSDLNGHVGAIFRDFFPERQ

SEQ ID NO: 4613 - protein, 292 aa, Schizosaccharomyces pombe
MAQVGRPNILNATDEDIKQLLAANCHIGSKNLEVRMDNYVWKRRSDGVHILNLGKTWEKLVLAARVIATIENPADVCVVSTRTYGHRAVLKFAAHTGATAIAGRFTPGNFTNYITRTYREPRLIVVTDPRADAQAIKEASFVNIPVIALCDTDSILNHVDIAIPTNNKGRKSIGLIWYLLAREVLRVRGTLSRSAPWDVMPDLYFYRDPEEVEREEEAKKAAAAAAEEAQVEEAVAAAEFEITDSAAGSVDPNVLAAATAGQVGENTWEGAGDWNTTGAAQTSDWTAAAEAQ

SEQ ID NO: 4614 - protein, 362 aa, Triticum aestivum
  misc_feature (155)..(155): Xaa can be any naturally occurring amino acid
  unsure (1)..(362): unsure at all Xaa locations
MDRAALTVGPGMDMPIMHDGDRYELVKDIGSGNFGVARLMRNRADGQLVAVKYIERGEKIDENVQREIINHRSLRHPNIIRFKEVILTPTHLAIVMEYASGGELFERICNAGRFSEDEARFFFQQLLSGVSYCHSMQVCHRDLKLENTLLDGSTXAPRLKICDFGYSKSSVLHSQPKSTVGTPAYIAPEVLLKKEYDGKIADVWSCGVTLYVMLVGAYPFEDPDEPKNFRKTIQRILSVQYSIPDYVHISSECRHLIAKIFVGNPATRITIPEIRNHPWFLKNLPADLVDDSTMSSQYEEPEQPMQSMDEIMQILAEATIPAAGSRINQFLNDGLDLDDDMDDLDSDADLDVESSGEIVYAM

SEQ ID NO: 4615 - protein, 268 aa, Salmonella typhimurium
MERYENLFAQLNDRREGAFVPFVTLGDPGIEQSLKIIDTLIDAGADALELGVPFSDPLADGPTIQNANLRAFAAGVTPAQCFEMLAIIREKHPTIPIGLLMYANLVFNNGIDAFYARCEQVGVDSVLVADVPVEESAPFRQAALRHNIAPIFICPPNADDDLLRQVASYGRGYTYLLSRSGVVGAENRGALPLHHLIEKLKEYHAAPALQGFGISSPEQVSAAVRAGAAGAISGSAIVKIIEKNLASPKQMLAELRSFVSAMKAASRA

SEQ ID NO: 4616 - protein, 423 aa, Comamonas testosteroni
MADLDTAAKAAQGATKRKLGDKDMKDAVIVSTARTPIGKAYRGAFNDTEAPVLGGHVIRAALNKANVAGADVDDVILGIAAQQGTQGYNLGRLCGYTAGLPESVGGMVIDRMCASGLMSIATAAKGVMTGEMNIAVAGGLESISLVQNKYKNSYRAQSKAVLAAEPTAYIQMIETAELVSQRYGISREAQDEYSLRSQQRVAAAQARGLFDDEIVPLTTVKQLFDKEGNVTGSEEVTLTRDEGNRADTTLESLAKLKPVWKNGQWVEQGQFITAGNASQLSDGASACVVMSADEARSRGLAPLGIYRGVAVAGCRADEMGIGPVYAIPKLLKQHGLTVGDIGLWEINEAFACQVIYSRDKLGIPDERLNVNGGAISIGHPFGMSGARLVGHALLEGRRRGVRFVVVSMCIGGGMGAAGLFELN

SEQ ID NO: 4617 - protein, 421 aa, Zea mays
MARSGREAEPGEEERKLVLGKYELGRLLGQGTFAKVYYARDLSAGAGTGHSCSVAIKVIDKARLRRTEGMVEQLRREISIMRMVRHPNVVGIREVLASRSRVFVVMEYARGGELFAKVARGRLDEDHARRYFQQLPENLLLDEAGRLKVTDFGLAALPEQLRHDGLLHTQCGTPAYVAPEVLRKRGYDGARADLWSCGVVLYVLLCGFLPFQHDNYVKLYQKIFKADYQRASIAEIMCTPWFRKGFVPPVLSVSPPMTPKKRLDGDDDGGGALFDSSSNSGATSPRSCNAFQLISSMSSGLDLSGLFENEQKAATVFTARAPAATVVEKLESAARALGFETTRGKGWKVRMEAKAGGTNGRLAVTAEVLEVAVDVAVVEFAHDAGDALDFNKFCAVDVRPGLAEIVWAWQGDSPAAVVGTA

SEQ ID NO: 4618 - protein, 473 aa, Gloeobacter violaceus PCC 7421
MQPLDRRTKVVATIGPASSSPEVLRQLVKAGINVARLNFSHGSYEDHARMVKLLREVSEELDTPITLLQDLQGPKIRVGQMPEGGLALGEGDELTLLPVAEFAGEPGTVSIDYPYLVEEATPGTQVLLDDGLLEFAVVEVKGNAVRCRVVRGGVLKSRKGVNLPSLDLRLPSMTEKDKQDLEFGLEQGVDWVSLSFVRRGEDIRVLKGLLAEHGAADVPVIAKIEKPQAIANLEEILDEVQGIMVARGDLGVEMSPEKVPLLQKRIIRLCNRRGIPVITATQMLDSMIRNPRPTRAEASDVANAILDGSDAVMLSGESAVGDFPVQSVEMLVRIAKEVEREFTFDNNPPAKSDEIHALCESLGTIDKILALHCIATFTTTGFSASIAAAERPKAPVVAFTPDLKVYHRLNLVWGVKPLLLEHPAAELEKLIEQMESCLVERNLAAPGDRMLVLGGSPVQRAGGTNFLKIHTLH

SEQ ID NO: 4619 - protein, 338 aa, Nitrosomonas europaea ATCC 19718
MKVYYDKDADLSLIKKKKVAIIGYGSQGHAHANNLNDSGVKVTIGLRKGGASWDKAKKAGLTVKEVGAAVKDADVIMLLLPDEQMASVYQTEVEPVLKKNATLAFAHGFNVHYGQIIPREDLDVIMVAPKGPGHLVRSTYTQGGGVPSLIAVHQDKSGKARDLALSYAAANGGTRGGVIETTFKEETETDLFGEQVVLCGGLTSLIQAGFETLVEAGYAPEMAYFECLHEVKLIVDLIYEGGIANMRYSVSNNAEYGDVSRGPRIITDATRNEMRKILREIQTGEYAREFILENRAGAPVLKSSRRLASEHPIETVGAKLRDMMPWISKNKLVDQAKN

SEQ ID NO: 4620 - protein, 429 aa, Oryza sativa
MMASTTSRAARQLRFGRQLCPTARTSTASSSTMLSRTFASTALARKDGDEPQGHLPGHPSSVFLTSLNDSFFDRVKPKQLSGNSNAQRQGRISFMMTSYGEEGAVIGSAAGLDTKDEVFAQYRESGVLLWREFSMDHYMSQVFGAEDDLCGGRQMPIHFGSTQHHFHTISSPLATQIPQAAGAGYALKRTKGRENNVVVCYFGEGAASEGDFHAGMNLASTTKSPVIFFVRNNGYAISTPAAEQFRGDGIASRGPGYGMLTIRVDGNDALAVRSAVQAAKAKAITEQRPVLIEAMTYRVGHHSTSDDSSAYRSKQAVESWKQMDNPLHRMRNFLTDRGWWNDALEEQTKAEHRKTVIEAMGRAEKKKRPQLSSLFEGTYRGELPGNLREQRAELAELLQKYGALPGWSKELAKHANAGKDMEQYRENKL

SEQ ID NO: 4621 - protein, 128 aa, Polaromonas sp. JS666
MAYSEKVVDHYENPRNVGSFEKGDDSVGTGMVGAPACGDVMKLQIKVNPATGVIEDARFKTYGCGSAIASSSLVTEWVKGKTLDEAASIKNSAIAEELALPPVKIHCSILAEDAIKAAVNDYKQKHAH

SEQ ID NO: 4622 - protein, 343 aa, Gloeobacter violaceus PCC 7421
MSAVKIAINGFGRIGRLVLRAGLDNPDLEFVGINDLVPPDNLAYLLKHDSTHGRFKGTVEAHPDGMVVNGRFIPCTAIKNPVELPWGSLGVDYVVESTGLFTGYDGASHHLAAGARRVVITAPTKDPEKVPTLLMGVNHDQFDPDQDLIVSNASCTTNCLAPVAKVIHERFGLAEGLMTTVHAMTATQPTVDGPSKKDWRGGRGAAQNVIPSSTGAAKAVTLVLPELKGRLTGMAFRVPVPNVSVVDLTFKTEQPTSYKAICAAMKEASENELAGILGYTEEQVVSSDFIGDAHSSIFDAGAGIELNSQFFKVVSWYDNEWGYSCRVNDLIVAMAHKEKPADS

SEQ ID NO: 4623 - protein, 199 aa, Oryza sativa (japonica cultivar-group)
MVAKVYGVAASPYVATVLVCLEEAGASYELVAVDMAAGENRSRHHLARSPFGKIPAFEDGEVTLFESRAIQRYVLRNYNKPDLLREGNLEESAMVDMWMEVEAHHYDPAIFHIIRECVIKPMIGGGARDQAIVDENVEKLRKVLEVYERRLSESEYLAGDFVSVADLNHFPYTYYLMTTEYATLVESCTNVKAVEIMGI

SEQ ID NO: 4624 - protein, 287 aa, Nitrosomonas europaea ATCC 19718
MSTDVGIDQAARSKAGDNTRVRVAAVQMASGPSVAANLEEAFRLIEEAAAKQAKLVVLPEYFCIMGMKDTDKLAVRENPGEGEIQNFLSETAKRFGIWLAGGSVPLISPVSDKVYNSCLVYDEHGQQVARYDKIHLFGLSLGNENFAEERTIDAGNRVVALDSPFGRMGLSICYDLRFPELYRMMGKVDVILAPAAFTAITGKAHWETLIRARAIENQAYLIAPAQGGFHVNGRETNGDSMIVDPWGVIIDRLPRGPGVVVAEIDRAYQSSVRASLPALEHRCLLAC

SEQ ID NO: 4625 - protein, 398 aa, Polaromonas sp. JS666
MSLFTAVEMAPRDPILGLNEQFNADTNPAKVNLGVGVYFDDNGKLPLLQCVQAAEKTMMATPSPRGYLPIDGIAAYDAAVKGLVFGADSEPVTSGRIATVQGIGGTGGLKIGADFLKHLNPNAKVLISDPSWENHRALFTNAGFTVDSYAYYDAAKRGVNFDGMLASLNAAEPGTIVVLHACCHNPTGYDITAAQWDQVIAAVKAKDLVAFLDMAYQGFGHGIAEDGAVIGKFVAAGLDFFVSTSFSKSFSLYGERVGALSVLCESKEEAARVLSQLKIVIRTNYSNPPIHGGAVVAAVLNNPELHALWEQELGEMRVRIKAMRQKLVDGLKAAGVKQDMSFITTQIGMFSYSGLSKDQMVRLRNEFGVYGTDTGRMCVAALNSKNIDYVCASIAKVM

SEQ ID NO: 4626 - protein, 250 aa, Triticum aestivum
  misc_feature (167)..(167): Xaa can be any naturally occurring amino acid
  misc_feature (213)..(213): Xaa can be any naturally occurring amino acid
  unsure (1)..(250): unsure at all Xaa locations
MERYELLKDIGAGNFGVARLMRNKETKELVAMKYIPRGLKIDENVAREIINHRALRHPNIIRFKEVVVTPTHLAIVMEYAAGGELFDRICNAGRFSEDEARYFFQQLICGVSYCHFMQICHRDLKLENTLLDGSPAPRLKICDFGYSKSSLLHSKPKSTVGTPAYIXAPEVLSRREYDGKTADVCSCGVTLYVMLVGGYPFEDPDDPKNFRKXPIGRIMSIQYKIPEYVHVSQDCKQLLAQYFCRKPCKE

SEQ ID NO: 4627 - protein, 611 aa, Bacillus subtilis subsp. subtilis str. 168
MNKVGFFRSIQFKITLIYVLLIIIAMQIIGVYFVNQVEKSLISSYEQSLNQRIDNLSYYIEQEYKSDNDSTVIKDDVSRILNDFTKSDEVREISFVDKSYEVVGSSKPYGEEVAGKQTTDLIFKRIFSTKQSYLRKYYDPKSKIRVLISAKPVMTENQEVVGAIYVVASMEDVFNQMKTINTILASGTGLALVLTALLGIFLARTITHPLSDMRKQAMELAKGNFSRKVKKYGHDEIGQLATTFNHLTRELEDAQAMTEGERRKLASVIAYMTDGVIATNRNGAIILLNSPALELLNVSRETALEMPITSLLGLQENYTFEDLVEQQDSMLLEIERDDELTVLRVNFSVIQREHGKIDGLIAVIYDVTEQEKMDQERREFVANVSHELRTPLTTMRSYLEALAEGAWENKDIAPRFLMVTQNETERMIRLVNDLLQLSKFDSKDYQFNREWIQIVRFMSLIIDRFEMTKEQHVEFIRNLPDRDLYVEIDQDKITQVLDNIISNALKYSPEGGHVTFSIDVNEEEELLYISVKDEGIGIPKKDVEKVFDRFYRVDKARTRKLGGTGLGLAIAKEMVQAHGGDIWADSIEGKGTTITFTLPYKEEQEDDWDEA

SEQ ID NO: 4628 - protein, 324 aa, Bromelia fastuosa
EPSDPMMERFEEWMAEYGRVYNDNAEKMRRFQIFKNNVNHIETFNNRSGNSYTLGVNQFTDMTNNEFLARYTGASLPLNIERDPVVSFDDVDISAVPQSIDWRDYGAVTSVKNQGSCGSCWAFSAIATVEGIYKIKAGNLISLSEQEVLDCALSYGCDGGWVNKAYDFIISNNGVTSFANLPYKGYKGPCNHNDLPNKAYITGYTYVQSNNERSMMIAVANQPIAALIDAGGDFQYYKSGVFTGSCGTSLNHAITVIGYGQTSSGTKYWIVKNSWGTSWGERGYIRMARDVSSPYGLCGIAMAPLFPTLQSGANAEVIKMISES

SEQ ID NO: 4629 - protein, 518 aa, Oryza sativa
  misc_feature (496)..(496): Xaa can be any naturally occurring amino acid
  unsure (1)..(518): unsure at all Xaa locations
MILVQVVVLCTAMALVALLQPPLPLPMLQPLATPMDADKVVEEKGASADCWAPSPLAEMVARVKRLPPYSTMGKEKTHINIVVIGHVDSGKSTTTGHLIYKLGGIDKRVIERFEKEAAEMNKRSFKYAWVLDKLKAERERGITIDIALWKFETTKYYCTVIDAPGHRDFIKNMITGTSQADCAVLIIDSTTGGFEAGISKDGQTREHALLAFTLGVKQMICCCNKMDATTPKYSKARYDEIVKEVSSYLKKVGYNPDKIPFVPISGFEGDNMIERSTNLDWYKGPTLLEALDQINEPKRPSDKPLRLPLQDVYKIGGIGTVPVGRVETGVLKPGMVVTFGPSGLTTEVKSVEMHHEALQEALPGDNVGFNVKNVAVKDLKRGYVASNSKDDPAKEAASFTSQVIIMNHPGQIGNGYAPVLDCHTSHIAVKFAELVTKIDRRSGKELEKEPKFLKNGDAGMVKMIPTKPMVVETFSEYPPLGRFAVRDMRQTVAVGXIKNVEKKDPTGAKVTKAAAKRK

SEQ ID NO: 4630 - protein, 156 aa, Arabidopsis thaliana
MSLVPSFFGGRRTNVFDPFSLDVWDPFEGFLTPGLTNAPAKDVAAFTNAKVDWRETPEAHVFKADVPGLKKEEVKVEVEDGNILQISGERSSENEEKSDTWHRVERSSGKFMRRFRLPENAKVEEVKASMENGVLSVTVPKVQESKPEVKSIDISG

SEQ ID NO: 4631 - protein, 152 aa, Glycine max
  misc_feature (8)..(8): Xaa can be any naturally occurring amino acid
  misc_feature (12)..(12): Xaa can be any naturally occurring amino acid
  misc_feature (29)..(29): Xaa can be any naturally occurring amino acid
  unsure (1)..(152): unsure at all Xaa locations
ASSCIFLXTLSXRLIPSLCGFFFILFRSXTIAGAVSGCAAVGANRWYSAHMVATVLTAIFQGSVSVLVFTRTGDFLGQLKSYVREEDGAVILKLAGGLTILIFVLEWVVLTLAFFLKYYACVEGNSGAVVPVRSGKVQQDEDLKDWPWPFQV

SEQ ID NO: 4632 - protein, 336 aa, Triticum aestivum
  misc_feature (255)..(255): Xaa can be any naturally occurring amino acid
  misc_feature (278)..(278): Xaa can be any naturally occurring amino acid
  misc_feature (312)..(312): Xaa can be any naturally occurring amino acid
  unsure (1)..(336): unsure at all Xaa locations
MADASSRTDTSIVVDTDDKNQRMENGQNGAIVPSNSSEPSDRSDRPMDQKVLRRLAQNREAARKSRLRKKAYVQQLESSKLKLASLEQELQKARQQGIFISSSGDQTHAMSGNGAMTFDLEYTRWLEEQNKQINELRTAVNAHASDSDLRLIVDGIMAHYDEIFKLKGAAAKADVFHILSGMWKTPAERCFLWLGGFRSSELLKLLVNQLEPLTEQQLMGLSSLEQSSHQAEDALSQGMEALQQSLAETLAGSLXGPSGSSGNVANYMGQMAMAMGKXLGTLENFLRQADNLRQQTLHQMQRILTIRQAARXLLAIHDYFSRLRALSSLWLARPRE

SEQ ID NO: 4633 - protein, 605 aa, Legionella pneumophila str. Lens
MFGFISDLLTAAVSSLDELLQDTPAHQIILGTAALYFLYNQYHNPSISRWYLSRNNASMKQRIIDSAYALAKNLPGVNQIIEKELNKELSSTREKLRIQRSGMTLREEIPEEGLSPQDILSAFDVDVEKCHFDFLSVNNDSPEREFLVGGGDGKDSGALYAIHPKELTELLKEVYGATALTNPLHDKWPRINAMQAEVIRWCQNLFHGSKEGYGLLTHGGTTSIIEAMAAYVIRARAKGIDYPEIVVPETAHAAFKKAAELTGAILITVPVDKKTGAVNPRVMSSYITRNTAVIVGSAPSFMNGIHDPVSELGQLAKKKNVPFHVDACLGGFLTAFLDTSSEPMDFRVPGVTSISADLHKYGCCPKGTSVCLFSEDSPALSVYAALNWSGGLYATPGILDGSTSGARVAEVYATLSYYGKNKYQEIAKSIIKLRNAIQKELTALVEEGNGLTSEDIYVYGNPQWSILGFRSNTCNAHFIADELEKRGWKLNLLQNPDGFHLCLTHVHTLVRGFETQFIKDLREAVIDVKNYPPGKKASGNVKVYGAVGMMPIELQKEICKQYQKARLDFTAASHGSLGIFTTSPTEEDDGLRNRKVGEQKVQTSL

SEQ ID NO: 4634 - protein, 325 aa, Arabidopsis thaliana
MASNGDKGLIVSFGEMLIDFVPTESGVSLAEAPGFLKAPGGAPANVAIAVSRLGGRSAFVGKLGDDEFGHMLAGILRKNGVDDQGINFDTGARTALAFVTLRADGDREFMFYHNPSADMLLRPDELNLDLIRSAKVFHYGSISLIVEPCRSAHLKAMEVAKEAGALLSYDPNLREPLWPSKEEAKTQIMSIWDKAEIIKVSDVELEFLTGSNKIDDETALTLWHPNLKLLLVTLGEKGCRYYTKTFKGAVDPFHVNAVDTTGAGDSFVGALLNQIVDDRSVLEDEERLRKVLRFANACGAITTTKKGAIPALPSDAEVRSFLEKK

SEQ ID NO: 4635 - protein, 271 aa, Brassica napus
  misc_feature (142)..(142): Xaa can be any naturally occurring amino acid
  misc_feature (151)..(151): Xaa can be any naturally occurring amino acid
  misc_feature (221)..(222): Xaa can be any naturally occurring amino acid
  misc_feature (250)..(250): Xaa can be any naturally occurring amino acid
  misc_feature (254)..(254): Xaa can be any naturally occurring amino acid
  misc_feature (257)..(257): Xaa can be any naturally occurring amino acid
  misc_feature (262)..(263): Xaa can be any naturally occurring amino acid
  misc_feature (265)..(265): Xaa can be any naturally occurring amino acid
  misc_feature (267)..(267): Xaa can be any naturally occurring amino acid
  unsure (1)..(271): unsure at all Xaa locations
MGMWWIVAVAILAHTASAAVREYAWEVEYKFGWPDCKEGMVMAVNGQFPGPTIHALAGDTIVVHLTNKLATEGLVIHWHGIRQLGSPWADGAAGVTQCAISPGETFTYNFTVDKPGTHFYHGHYGMQRSAGLYGSLIIDVAXGKKEPLRYXGHYGMQRSAGLYGSLSLDAALASRPMRWIGEAQSILINGRGQFNCSLAAQFSSTSLPTCTFKEGDQCAPXXLHVEPNKTYRIRLAQQHCPCLPSTFAAXGHNXRCXFHADXXHXTXPYPP

SEQ ID NO: 4636 - protein, 415 aa, Bacillus thuringiensis serovar konkukian str. 97-27
MNEVLAKGKKAKEIARELVLKSTEQKNEALSAIADQLILETAYILEENKKDIEEGKAKGFSDSLLDRLMLNEQRIVDMTEGIKQLIELRDPVGECVSAWERPNGLSIQEMRVPLGVVGMIYEARPNVTVDAATICLKTGNAVILRGSSSAIHSNKAIVAVIHRALKQTSLPQESVQLIEDTTRDSAKQLFTMNDYLDVLIPRGGKQLIDTVVREASVPVLETGAGNCHVFIDETADKQMAFDIIINAKTQRPSVCNAIETIVLHEKWAEQYGSELFSSLKKRGVELRGDQKALAMDSSIVLASEEDWGTEFLSLTLAVKLVSSIEEAIHHINTYGSMHSEAIISENEENVSKFFVSVDAAALYHNASTRFTDGSEFGFGAEIGISTQKLHVRGPMGLPALTSTKYVIRGNGQIRK

SEQ ID NO: 4637 - protein, 416 aa, Bifidobacterium longum NCC2705
MKVDILTREYPPHVYGGAGVHAEELSKVLAERIDVTVRAFDGKRTEADIPAIPNAADAKGSLKVVGYDTPSELADANPALKTFGVDLQIANDVDADIIHAHTWYACLAGYMAKMLHGTPLVITAHSLEPFRPWKREQLGGGYNLSSWAEKDAYEHADRVIAVSGGMRKDILTAYPNLDPDKVVVVYNGITMADFATPAPDDPGWKVFDRYNIDRSKPTLLFVGRITRQKGLPYLLKALHLISKDIQVVLCAGAPDTPEIAEEVKTAFAKLDEERGNIVWIEEMLPKPELNALEHGCDAFICPSIYEPLGIVNLEAMACGLPVVASATGGIPEVVVDGETGYLVPIDQLHDGTGTPTDPDKFVHDMAAAIDKIMADPELAKKMGQAGYERARDVFSWETIADKTVEVYQSVLDEQKK

SEQ ID NO: 4638 - protein, 214 aa, Listeria monocytogenes str. 4b H7858
MRFFIDTANVEEIKKANRMGFIAGVTTNPSLVAKEGRDFNEVIQEITSIVDGPISGEVVSLEADEMIAEGRVIAKIHPNMVVKIPMTGEGLAAVKVLTEEGIKTNVTLVFSATQALLAARAGATYVSPFLGRLDDIGDDGLVLIRDIADIFEIHGIPTEIISASVRHPIHVIECAKAGADIATVPFKVFEQMLKHPLTDSGIDKFLADWEAAKK

SEQ ID NO: 4639 - protein, 488 aa, Oryza sativa
MEGPKRSQLRVRLRVTARRRGGDGGADGGGSGGGGGGAGGRKRLLDAPAFNSAAKLQRREIGGRQLAARGGGAASAVPERFRNMHLQEEFDTYDHNAHLFVKLQFLKKRSKIIEIVAAKDIIFALAHSGLCAAFSRVTNKRISFLNLSPDEVIRSLFYNKNNDSLITVSVYASDHFSTLKCRTTPIEYIRRNQLDAGFPLFETESLKWPGFVEFDDVNGKVLTYSAQDGIYKVFDLKNYSFLYSIPDTNVQEIKISPGIMLLIYERTPCHVPLKILSIEDGRPLKSFTHLLHRNKKIDFIEQFNEKLLVKQEDENLQILDVRSSELIEVSVTKFMTPSAFIFLYENNLFLTFRNRTVAVWNFRGELVTSFEDHLLWHQDCSTNNIYITSDQDLIISYCKSEAGVDDGTVPPIGSINMSDIMTGKCIAKIAANDPTLRIGPRKNGNSERSSIWSTIPEALEDVTALFYDEDRNEIYTGNRHGLVHVWSN

SEQ ID NO: 4640 - protein, 412 aa, Rickettsia hulinii
ELKIRGKIFKLPILKASIGEDVIDISRVSAEADCFTYDPGFMSTASCQSTITYIDGDKGILRHRGYDIKDLAEKSDFLEVAYLLIYGELPSGEQYNNFTKQVAHHSLVNERLHYLFQTFCSSSHPMAIMLAAVGSLSAFYPDLLNFKEADYELTAIRMIAKIPTIAAMSYKYSIGQPFIYPDNSLDFTENFLHMMFATPYTKYTVNPIIKNALNKIFILHADHEQNASTSTVRIAGSSGANPFACISTGIASLWGPAHGGANEAVINMLKEIGSSEYIPKYIAKAKDKNDPFRLMGFGHRVYKNYDPRAAVLKETCKEVLKELGQLDNNPLLQIAIELEAIALKDEYFIERKLYPNVDFYSGIIYKAMGIPSQMFTVLFAIARTVGWMAQWKEMHEDPEQKISRPRQLYTGG

SEQ ID NO: 4641 - protein, 220 aa, Escherichia coli O157:H7 EDL933
MKDIDTLISNNALWSKMLVEEDPGFFEKLAQAQKPRFLWIGCSDSRVPAERLTGLEPGELFVHRNVANLVIHTDLNCLSVVQYAVDVLEVEHIIICGHYGCGGVQAAVENPELGLINNWLLHIRDIWFKHSSLLDEMPQERRLDTLCELNVMEQVYNLGHSTIMQSAWKRGQKVTIHGWAYGIHDGLLRDLDVTATNRETLEQRYRHGISNLKLKHANHK

SEQ ID NO: 4642 - protein, 282 aa, Triticum aestivum
MGLKELESQGIGPLSPPPEVTHQTLTPITTTAARAPPLRSAPLPTPLLSPPLAPLPRPPGEGLGEARAAMASSASRFIKCVTVGDGAVGKTCMLICYTSNKFPTDYIPTVFDNFSSNVVADGTTVNLGLWDTAGQEDYNRLRPLSYRGADVFVLAFSLVSRASYENIMKKWIPELQHYAPGVPVVLVGTKLDLREDKHYLLDHPGMIPVTTAQGEELRKQVGALYYIECSSKTQQNVKAVFDAAIKVVIQPPTKQREKKKKKQRRGCSMMNFGGRKMLCFKS

SEQ ID NO: 4643 - protein, 176 aa, Gossypium barbadense
LFSFILILTHFLLKSSIRIQVLGWICVAISVSVFAAPLNIMARVIRTESVEFMPFTLSFFLTLSAVMWFAYGLFIKDLCVALPNVLGFILGMLQMLLYAIYRHSEKVNIEEKKLPAEQMKSINVVLTTLGASEVHPVVLDIHTDDTKEEDNKNNEPTGEPDKQTDVKMEDANESPV

SEQ ID NO: 4644 - protein, 509 aa, Triticum aestivum
MEGNTRGGGHSDALKNYNVGRTLGIGTFGKVRIAEHKHTGHKVAIKILNRRQMRTMEMEEKAKREIKILRLFIHPHIIRLYEVIYTPTDIFVVMEYCKYGELFDCIVEKGRLQEDEARRIFQQIISGVEYCHRNMVAHRDLKPENLLLDSKYNVKLADFGLSNVMHDGHFLKTSCGSPNYAAPEVISGKLYAGPEVDVWSCGVILYALLCGTLPFDDDNIPKLFKKIKGGIYILPSHLSALARDLIPRMLVVDPMKRITIREIREHPWFQNRLPRYLAVPPPDTAQQAKMIDEDTLKEIVNLGYDKDHVCESLCNRLQNEATVAYYLLLDNRFRATSGYLGADYLQSMGRSFNQFTSLESASPSTRQYLPASNDSQGSGLRPYYPVERKWALGLQSRAQPREIMIEVLKALQELNVCWKKNGHYNMKCRWCPGFPQVSDMLDANHSFVDDSTIMDNGDANGRLPAVIKFEIQLYKTKDDKYLLDMQRVTGPQLLFLDFCAAFLTNLRVL

SEQ ID NO: 4645 - protein, 140 aa, Bacillus sphaericus
DLGREPSPEEIGEEMDLTPEKVREILKIAQEPVSLETPIGEEDDSHLGDFIEDSEAQSPSDHAAYELLKEQLEDVLDTLTDREENVLRLRFGLDDGRTRTLEEVGKVFGVTRERIRQIEAKALRKLRHPSRSKRLKDFLE

SEQ ID NO: 4646 - protein, 695 aa, Psychrobacter arcticus 273-4
MNKNIDHTDPAKDMNMERGNGGETHQRAGDDTKILTTQQGVPISDNQNSLKAGPRGPTLLEDFVLREKIHHFDHERIPERIVHARGSAAHGYFELTESLEEYTTAKILTETGKQTPLFTRFSTVAGSKGSKDTPRDVRGFAVKIYTEEGNWDLVGNDMPIFFIQDAMKFPDLVHAVKPEPDRGFPQAASAHDTFWDFVSLSPETMHNVIWLMSDRGIPRSLRMIEGFGIHSYRLINKAGKSTFMRFHWKPVLGVQSTTWDEAVKISGADPDYHRRDLFESINNGDFPEWEFGVQLFTEEEASKFPFDHLDATKMIPEEMVPVKIVGKMVLNRYPDNFFAETEQVAFCPSHVPPGIDFSNDPLLQGRLFSYLDTQLSRLGSPNFAQIPINAPKCPFANNQQDGHMQMQVPKTRVLYEPQSLDPTRPRESVKRGFASFAETLDDGVKGRIRAESFADHYSQPRMFYRSQTTIEQAHIASAYAFELGKVDTAHVRSRTLGHLRNIDEDLASRVAKALGMELPEAADAAAPIQDMEISPAVRTIGLSPKSLKGRMIGILVAEGSKHSEIEKYEKAAQAQGASVKIIAPNKEVTLDDDTIIQADERVAGGPSVMFDAVVSIIMPDQAKKLAKDSATLDWFTDAYVHCKAISYCGATDEFILSKLPIEKDAFVTPLSDLDVFIENAKSRLWEREPKVRDLA

SEQ ID NO: 4647 - protein, 387 aa, GIBBERELLA ZEAE PH-1
MPRLPFPAFKSLVIQPLRITPTAINRSYYSTMMRAARYYGREDIRVEQVPQPSVKAGQVKVAPAFVGICGTDLHEYLGGPNFCPTTPHPITKESIPVTLGHEFSGIITEVGPDVEGFEVGQPCAIQPTLFCGHCAACHNHAENVCHSGGFIGLSGSGGGLSESVCVNATHVHPLPQDLPLEIGALVEPLSVSWHAMTAAPDINPDSRVVILGGGPIGLAMILCLKAKGVDEIIVSEVATSRQKFARELGATWVVNPIEENLNEIVLALTEGKGADVVFDCAGVPMSIKSACEVVRPKGTVVNLAIWEKEIPFNPNWITMKESSYKSVLGYTHKDFQAVIANLASGAIKPSQMITRKIKLENIVEDGIKALIHDKNNQVKVLVDMSDR

SEQ ID NO: 4648 - protein, 335 aa, Zea mays
MAHRVLLLLSLASAAAVAAAVDAEDPLIRQVVPGGYDNDLELNAESHFLSFVQRFGKSYKDADEHGVTKFSDLGLRKSRRALLRELGESAHEAPVLPTDGLPDDFDWRDHGAVGPVKNQGSCGSCWSFSASGALEGAHYLATGKLEVLSEQQFVDCDHECDSSEPDSCDSGCNGGLMTTAFSYLQKAGGLESEKDYPYTGSDGKCKFDKSKIVASVQNFSVVSVDEAQISANLIKHGPLAIGINAAYMQTYIGGVSCPYICGRHLDHGVLLVGYGASGFAPIRLKDKPYWIIKNSWGENWGENGYYKICRGSNVRNKCGVDSMVSTVSAVHASKE

SEQ ID NO: 4649 - protein, 499 aa, Secale cereale
PQIVNDGVTVAREVELEDPVENIGAKLVRQAAAKTNDLAGDGTTTSVVLAQGLIAEGVKVIAAGANPVQITRGIEKTAKALVLELKKMSKEVEDSELADVAAVSAGNNYEIGNMIAEAMSKVGRKGVVTLEEGRSSENNLYVVEGMQFERGYISPYFVTDSEKMTTEYENCKLLLVDKKITNARDLINVLEEAIRGQYPILIIAEDIEQEALATLVVNKLRGSLKICAIKAPGFGERKTQYLDDIAILTGGTVIRDEVGLTLDKADNTVLGTAAKVVLTKESTTIVGDGSTQEEVTKRVAQIKNLIEAAEQDYEKEKLNERIAKLAGGVAVIQVGAQTETELKEKKLRVEDALNATKAAVEEGIVVGGGCTLLRLAAKVDAIKDTLENDEQKVGAEIVRRALCYPLKLIAKNAGVNGSVVTEKVLSNDNFKFGYNAATGQYEDLMAAGIIDPTKVVRCCLEHAASVAKTFLTSDVVVVEIKEPEAAPLANPMDNSGFGY

SEQ ID NO: 4650 - protein, 83 aa, Zea mays
  misc_feature (52)..(52): Xaa can be any naturally occurring amino acid
  unsure (1)..(83): unsure at all Xaa locations
FVSSSFYQLLFLLRIDPRKAAGIASRWMGQDTMPRSIDHVEAVTHFDDDSDXLQQWHQHIGALCPTLTDIFDRMLSKGITITL

SEQ ID NO: 4651 - protein, 292 aa, Zea mays
MDQYEKVEKIGEGTYGVVYKGKDRHTNETIALKKIRLEQEDEGVPSTAIREISLLKEMQHRNIVRLQDVVHNDKCIYLVFEYLDLDLKKHMDSSTDFKNHRIVKSFLYQILRGIAYCHSHRVLHRDLKPQNLLIDRRNNLLKLADFGLARAFGIPVRTFTHEVVTLWYRAPEILLGARHYSTPVDVWSVGCIFAEMVNQKALFPGDSEIDELFKIFRILGTPTKETWPGVASLPDYKSTFPKWPPVDLATVVPTLEPSGIDLLSKMLRLDPSKRITARAALEHDYFRDLEHA

SEQ ID NO: 4652 - protein, 416 aa, Leptospira interrogans serovar lai str. 56601 [sequence omitted]

SEQ ID NO: 4653 - protein, 885 aa, GIBBERELLA ZEAE PH-1
MSRLSSSRSSSTLSLNLSFSSSIITPDSDSEIIGSVGNHISPLNSSDSFILVTGGLGFIGSHTSLELLKAGYNVIIVDDLRLKLPTLHFHKLDYRSKAMRFLLESYSTLIPTFSENSGEFIKIQSKISGVIHFAAFKSVSESIEKPVQYYRNNVCGLIDFIELLGKHNIHKFVFSSLATVYRSKAVKGKHLREEEVVYHETLYLDEFNNETLAELSVSELTSPYRCSKYFCEAVLADIAYTDPSWHIIALRYFNPIGCDPSGPLGEDPKGIPTNLFPVIAQVLTAIRDFIHVTDLARGHVAALSSDIESPFRTFNLGTGNGTTVAEAVKSLEGASLKNIAVNLVPRRIGDVGFCVAANDRAKKELGWTAKETIQQFAKDLWNYINQPETALSFSWRGDLSYGLCYKCKIIARPTDSAYASMSTGEESSITPLSHPILTSTQSSKNEVEDYLRDIPDGLYPQRAIMTDRERKSLVVRRLEQLFTGRDYIADTLKTPFVRPGGSFIMVGDVGDGQVTDQSPTHELPTDRHEPIREARILPLEQRVHTRGNDSHLRNSVSPSHPCKDSINTGGNDEDSVPATRPCDLDPDRAQVPCENMDYIRYLDLLPAELLSRQQSSQGVDLDAEGWVSLNLLYNLAQLHLINVTPDFVRSAVSENSTILQLSTDGHKVLWQGGSKDTSSSSYSSDYDTPETPFVGNIDKSEQRRDRQKTSCFTNNEPQLGGLGNDVPAFDPQVCARVESFRFFSVSSTNNIQILHQPHAANGSIPASASRISGKTGSNSNGVQDLMPDSNHPSSYIELDPVWTDDQQDIEQPLLEPCGLGVLPHDHFRVVVDTKRPKHDILQSSEPEFGRSKEGIKGSTHPKVATQISGSISGGSETKLQMILRH

SEQ ID NO: 4654 - protein, 163 aa, Brassica napus
  misc_feature (151)..(151): Xaa can be any naturally occurring amino acid
  unsure (1)..(163): unsure at all Xaa locations
MAAATRRLIQRVSTTRLSTAGARRSYGGLPESNSKAPSSSSSQRLMELESKFSAHNYHPVPVVFSRGNGSTIWDPEGKKYIDFLAAYSAVNQGHCHPKIIKALQEQVEKLTLSSRAFYNDKFPVFAERLTNMFGYEMVLPMNTGAEGVETXLKVARKWGHEKN

SEQ ID NO: 4655 - protein, 372 aa, Trichodesmium erythraeum IMS101
MLNAQTIISILLVFVPISIAANAMELGSSVIFITSAIAIIPLAGWMGTATEEIAVVLGPNLGGLLNATFGNATELIIGIIALNAGLVRVVKASITGSIIGNLLLVMGLSMFLGGLRFKEQKFQSVVARLNASAMNLAVIAILVPTAVNATSNGISSNTMQNLSVAVGIVLITVYILTLLFSMKTHSYLYEVGIVGSESQDLDSDSESEENAEHKPNLLLWILVLLIATLTVAFESELLVDSLEEATSALGLTALFTGVIVVPIIGNAAEHATAVTVAMKNKMDLSVSVAVGSSLQIALFVAPVLILTGSLLGQPMDLNFNPFELVAVVVAVLIANSVSSDGRSDWLEGVLLLAAYTILGLAFYFHPVIKGLS

SEQ ID NO: 4656 - protein, 420 aa, Pyrococcus endeavori
MVEQDPFEIAVKQLERAAQYMKISEEALEFLKRPQRIVEVTIPVEMDDGTVKVFTGFRVQYNWARGPTKGGIRWHPEETLSTVKALAAWMTWKTAVMDLPYGGGKGGIIVDPKKLSDREKERLARGYIRAIYDVISPYEDIPAPDVYTNPQIMAWMMDEYEAISRRKTPAFGIITGKPLSIGGSLGRNEATARGASYTIREARKVLGWGDLKGKTIAIQGYGNAGYYLAKIMSEDYGMKVVAVSDSKGGIYNPDGLNADEVLKWKQEHGSVKDFPGATNITNEELLELEVDVLAPAAIEEVITKKNADNIKAKIVAEVANGPVTPEADEILFEKGILQIPDFLCNAGGVTVSYFEWVQNITGYYWTLEEVREKLDKKMTKAFYDVYNTAKEKNIHMRDADYVVAVQRVYQAMLDRGWVKH

SEQ ID NO: 4657 - protein, 452 aa, Oryza sativa (japonica cultivar-group)
MAAAAGKAAMERHQSIDAQLRLLAPGKVSEDDKLVEYDALLVDRFLDILQDLHGPHLREFVQECYELSAEYENDRDEARLDELGRKLTSLPPGDSIVVSSSFSHMLNLANLAEEVQIAHRRRIKLKRGDFADEASAPTESDIEETLKRLVTQLGKSREEVFDALKNQTVDLVFTAHPTQSVRRSLLQKHGRIRNCLRQLYAKDITADDKQELDEALQREIQAAFRTDEIRRTPPTPQDEMRAGMSYFHETIWKGVPKFLRRIDTALKNIGINERLPYNAPLIQFSSWMGGDRDGNPRVTPEVTRDVCLLARMMAANLYFSQIEDLMFELSMWRCSDELRIRADDLHCSSRKAAKHYIEFWKQIPPNEPYRVILGGVRDKLYYTRERTRHLLTTGVSEIPEEATFTNVEEFLEPLELCYRSLCACGDKPIADGSLLDVNVKGGLIWLLQPDPK

SEQ ID NO: 4658 - protein, 322 aa, Oryza sativa (japonica cultivar-group)
MPAFKAPAPGFSVRFSPFHEQRLLAAASQHFGLVGNGHLLVLDLSAAAAPGGAPAPPPVFAFPTSDALFDCAWSESHESLCAAASGDGSVRLFDVALPPAQNPVRLLREHAREVHGLDWNPVRRDAFLSASWDDTLKLWSPDRPASVRTFRGHEYCVYAAAWSARHPDVFASASGDRTARVWDVREPAPTLVIPAHDHEVLSLDWDKYDPSILATGSVDKSIRVWDVRAPRAPLAQLAGHGYAVKRVKFSPHRQGMLMSCSYDMTVCMWDYRKEDALLARYGHHTEFVAGIDMSVLVEGLLASTGWDEMIYVWPFGSDPRAM

SEQ ID NO: 4659 - protein, 78 aa, Nicotiana tabacum
MANSMRFFATVLLIALLVTATEMGPMTIAEARTCESQSHRFKGPCSRDSNCATVCLTEGFSGGDCRGFRRRCFCTRPC

SEQ ID NO: 4660 - protein, 296 aa, Chromobacterium violaceum ATCC 12472
MPFQLNLFRQIVDHAQDAVMVTEVAPLQLPGPIIVYVNPAMCRLSGYEAGELLGRSPRVLQGPLTDPSALLQLSVALRDGRETTVELLNYHRSGTPYWTRLHLLPLFDESGELSHFAALQQDITARHIRSEALYRMVVSDEGSSLFNRQMFFDVGAKSMQLAFRQGKPLTAVLLAVDDPSRLRRSYGQLVGQMLTRIVAQAIIAAVRESDIAGRLSRHEFGLLLPESGEAEAQLVLARIRTMLDAGLGEAGLPDGAYIALRAGLCLAEAGDATPEHAFERARQRLRDAEQPSGAEG

SEQ ID NO: 4661 - protein, 250 aa, Brassica napus
  misc_feature (230)..(230): Xaa can be any naturally occurring amino acid
  misc_feature (240)..(240): Xaa can be any naturally occurring amino acid
  misc_feature (242)..(242): Xaa can be any naturally occurring amino acid
  unsure (1)..(250): unsure at all Xaa locations
MSGALFRNAAAQLIRRNAAASDPFVKTGTRLQSRPYLRSNQLLGRPKQSRISPPSSSGFCSSSSSSVGFVGWYLGMVKSRPVLTKGITSSLIYIAADLSSQTITKEKASSESYDLVRTARMGAYGLLILGPVQHQWFGFMSRLFPKQDFITTFKKMAMGQTVYGPTIMVIFLSFNALLQGEGGSDILARLKRDLLPVMLNCVMYWPVCDFITFKFFPVHLQPLVSNSFSXVWSIYMTYMXNXEKPAAISS

SEQ ID NO: 4662 - protein, 487 aa, Burkholderia sp. 383
MNSHSLDLGGNAGGPASARPPAAAAGVDADASALPARRVTLGDFMDDLPVGALHRFVVWVIGIGLFFDMYEIFLVSTIGSALQNEYGLSRQSTDFKLLLASAFIGMFVGAMCLGSLADRIGRRKAFLLTLTWYSAFSLVGAFSVNADMLVACRFLTGIGVGAIYPVADSFLSEILPKEKRGRLAAWAYTTSYVAVPLVGFLALWLNPLHVGGVAGWRIILAIGSLGAVYVMLVQHRLPESPRWLLAQGRTADAHAALRRFAEGTGVRVPEQFAEPVEPQRPLGLGERIALLRREPYGARYLMLAIFHLFQGFGYYGFGTLAGTVVKSRGFDVTDSTLFIALSFIGYPVGSLLSIPLLNRIERRTLVIVSILSIAVFGLCFAYSGNTVLIVGFGFLTTCASNVFSNAYHVYQAEIFPARVRSTAIGSTYALSRIVSGVLPFVLLPVLASYGAGAMFGVISVALGIVAVTLRVLGPLTTRRSQDEINPV

SEQ ID NO: 4663 - protein, 585 aa, Arabidopsis thaliana
MSPPSATAGDINHREVDPTIWRACAGASVQIPVLHSRVYYFPQGHVEHCCPLLSTLPSSTSPVPCIITSIQLLADPVTDEVFAHLILQPMTQQQFTPTNYSQFGRFDGDVDDNNKVTTFAKILTPSDANNGGGFSVPRFCADSVFPLLNFQIDPPVQKLYVTDIHGAVWDFRHIYRGTPRRHLLTTGWSKFVNSKKLIAGDSVVFMRKSADEMFIGVRRTPISSSDGGSSYYGGDEYNGYYSQSSVAKEDDGSPKKTFRRSGNGKLTAEAVTDAINRASQGLPFEVVFYPAAGWSEFVVRAEDVESSMSMYWTPGTRVKMAMETEDSSRITWFQGIVSSTYQETGPWRGSPWKQLQITWDEPEILQNVKRVNPWQVEIAAHATQLHTPFPPAKRLKYPQPGGGFLSGDDGEILYPQSGLSSAAAPDPSPSMFSYSTFPAGMQGARQYDFGSFNPTRFIGGNPPQLFTNNFLSPLPDLGKVSTEMMNFGSPPSDNLSPNSNTTNLSSGNDLVGNRGPLSKKVNSIQLFGKIITVEEHSESGPAESGLCEEDGSKESSDNETQLSLSHAPPSVPKHSNSNAGSSSQG

SEQ ID NO: 4664 - protein, 3780 aa, Legionella pneumophila str. Lens
MVNVTMKNKTKDLLNEPIAIIGMNCQFPGIDSDIEDVSAFYDMLMKGQTPIKDVPENRWNIEEYYSADRKKADKIISKKGGFLDNTHLFDAAYFKISSAEAKQIDPQQRLFLEVAIRALNDANIPLDSLKDSNSGVYCGISTHEYSQLNYKDHIKFNAYTPIGIANSAAAGRLCHFLNLKGPSMAVDTACSSSFTALYLAATALRNQQCDMAIVGGVHLSLCPESFVGLTKANMLSATGQCSSFDSKADGFVRSEGCGVVIVKRLSDAIRDNNKIYALIKSMVINQNGDGTGLAAPSTNAQIAMHQAALEHAHLTAGEIDYIETHGTGTTVGDPVEFNAIQSIHQGHHSHQKPLIVGALKSNIGHTISSSGIASLIKVLCSLQNEAVPPNLHYSNPNSLINPESIPALLPVEAIPFLKLKNKKRYVQVSNFSFTGTNVSVILEEAPELKSHESKQDDNEPKCFVASANSELSLKQLMSRYEHYLKNSSSTLGDICHTLINCRDHYKFRCAIIVNDKKELIKKIESKDYEIKKVVLQNNPRTVLNDAKAIYEAYLSGINISTDDKNTAYNKVDLPLYCFDRKPYWHEVRKHVKNDHWLDSLYQQSMEQQVETIKAELTSQIKDLLKKDNIDPHQDLETLGLTTPLLESLDQILQDILSPRYQVPSLLSLRYLTVDKLARHLQKIIMPPVVYRQPSINVLNVEPIAIVGMSCRFSKAANVDEFLSLLEKGESGMIDIPLERWDNEKFYDPDVDALGKLYIKQLGFIDHVNHFDAEFFNISPREAKLMSPQLRVFMETSYHALEDANLPLDAVKDTNTGVFVGVGTNEYPRVLAYQGVTLEDLNIYFATGNVLNALAGRVAYSFDFHGPIQAIDTACSSSMTAIHNACLSLQSGDCNMALAGGVNIILSPDSNITLSKARMLSPDSRCKTFSEDADGYGRSEGCGVVVLKRLSDAVKDNDNILAVIKGTSINSDGKSGGFTVPNGAAQEEVILSALAKANLSPGDIDFIEAHGTGTPLADPIEVNTLTKIFSEHHNKENPLYISSVKTNIGHSESASGVASVIKTVLSLKTKTIFKHLNFKKLNPAIQLINTVIPLDKTDWTKKQGLRCAGVSSFGFSGANAHAILQEAPEDKKEARTLPEESLLVLSAKSKTSLELLLASYQNYLSNTREEFADICYTTATCRSHFMYRVAIKAQNADQAANIIKGNGYTICHITKEKEWTQQPDTLAELQTAYLDGFPINWSEFYRSLGHHFAKVKLPLYEFERIEHWFGDKNKLKDAPLPKDWCFQIQWQNEPCDKSNRKLRGNRWLLIGPRHLADGFKAQGLEIVYEDEEYSRDKLEGIIFAESLHLAPPDIEANIDFQKKTLKKLLNLIKELDNQSIDLQLLILTSNGIAELANNKHPVNISNSPLIGFCKTLALELPQFKTILIDMDKIEEDKYPTQVIEEINYNHGSRYEHIVAYRGGERLASRLKKTPLEDRRRLLHGVKGRYLIAGGCGGLGLVTAQSLLSAGARELILTSRNIDKPRIKEAIYKIKSHYPGANIRVVSLDITDRESLKNLLSELNADGQLKGIIHAAGAAIKAPLLEHQDEDVDYLFSAKVKGGWYLHELSLDCNLDFFVVYSSVSSVFGSNKESVYSGTNSFLDALIAERQRMGLPGTAVQWGPWGEVGMAQKRSRDEGLKQALISNAQGHVIIKCLINDEFKHATIISPEYLKFMLDFVPKPLPGFYGQLDEELEKIPQQHHQSPAKNLSPWLNQYLEISEEERFKACKAMVSDICAGILELTENEDLNEDEGFFELGFDSLMITELASELKKKLEPFLKVTVTIGFNYPSISKLAKYIESELDKNLVKIQSPKSTPKPIDDGIAIIGMSCLLPNAPDIAAFEKLLEEGLSGIKDIPNDRWDNSQYYDPDMEAPGKSYVTKLGLIENIKYFDAAFFGISPREAKLMEPQQRVFLECCYKALENANYPSESLRGSLTGVFAGVGPNEYYAQLEKSGFSNEELSAYSITGNVLNLIPGRVAYTFDFKGPSISVDTACSSSLVAIHYACQSLKNKEIDYALAGGVNILLMPESNVTLCKAKALSPDGQCKTFDERADGYVRGEGCGVVLLKRLSDALRDNDHILAVIKGSAVNNDGKTAGLTVPNGKSQEEVMKKALGQTELSRTDISYIEAHGTGTPLGDPIEVDAINKIYGHQRNKENPLYLGTVKTNIGHLESASGVAGVIKTVISLQRKTIYKNLNFNKLNPNIKLDGTQLALEKTNWKTNTKLKYAAVNAFGFSGTNAHVILAEFPKEEKPKTSKPSQKHLLVISAYSKTALDNLTLRYQQYLETTQNHFGDICFTAATCREHYHYRLALTAENAIEASRMLGAGQFALSYHENITLDLQNDRALNSLLMDYLQGKPVDWKSYYQSLKGEFTKVLLPNYTFDRSEYWLDKKNNDSIATHKGEQHPLLGQMLTMPGNEYLFHQKLDLENLAYIKQHSVFEKVIFPATAYIESGLAAAKSIFQSSTFQIEKFNIERPLHPKQGQEFQLQVKPKMDGQYKINLFAKQENDWQTFCEMEIHARPTAARESIHIDVLKSSFGNKVELSDIYEQFQKSSLFYGDEFRVLQEGYVRANSVLAKVTLTKASQGQDYYYHPVLLDGAMQSILLLSVKNDENKNFNAENVTYIPYAFIRMTVFKEAPRSLWVHLTKQNTEDASDLCVNINLYEQSGLLIAQIAGLKLRKVTQSHFISYDFSLNHLYYTEWSPIPLKTLPQQKIPDLLVITKNPGKAKEILDGLNYKLVERIDGCTNIEHSNIVFLYEQGQFHDLFHCCQILFRLRPKRFILVTEHAYAIQNHDQVNPYHTMACSFWKSFRNEYEPNKNYAIDLDSKSRLATALMYLLNTDTLDTQIAVRESLFLPRLKKKQLVSNSAPEILIDGNATYLITGGTGGLAKPLMEYLMRRGARHIAITSRTHYPDDIKALIDKAKQNQIDIKHYMVDAGNYQKMEQVIGEIQQGPNPLKGVFHLAGLIRDGLIVNLNDEAMQKVISAKMDGALILHQLTQNIPLEWFVMFSSSASLLGARGQANYAAANGFLDGLAHLRRQQGLPAISINWGPFHTTGMAANLTHTLQHYGFLPLDKDNIDILDVLLPSQLPQISPCPMNWDVYCKHTPKQTELSVLVKAKPLPDQSFLNALRQHSKEESISILSQALREIAADVLALDDSEHISNHQDLFSMGLDSLMSMDIRNRIYDKLQCQTLSLPIEYFINTPTINKIARHISDELDHVFDSHSDYHPTENPSEREIALCDFQYVFWVLNKLDYYFNIGTQIQLHGRINKDYVQQAFEFVVNQNSVFWIHFNKDKPTQKLHKVGQFELIYQDISLNHETKALNHEFQNNILRAIPLTKQPLIRVYLYKINNELHELHIVIPHIIVDDASCEMVFCQFKNNYEKLTLGKELVSNPEKGSYFNYVKQNNNHYQKNLKNKIDFWQNYNKGFKMLSFGNRYHLSDTSKQTKHLFHYPIHPQHAEQFINWHKTQNINVSTGLIAACQIVFYKLSRQNKIPIILIHSGREGGEYKSTLGLFSEYKRINLTLNENSQFIDCIHSIEEQLLKTAPYQKCSHLIKDSGLKGSSLSFGQYLTLALNKMFMLKHFKESKLHSIIIDYYLKYLSRLLSFKKNISIKQRLNQLFKLDMSLQKPERLRILVSVTPSFFTKEHPDMSFANLDYSYPNHFGCMDRPIGNRTLWIYFSKNQDGEYQISINAPLTIECKNKIGSGLSQFITTFVENNNCNIAELIQAMEDSSIAS

SEQ ID NO: 4665 - protein, 130 aa, Pseudendoclonium akinetum
MAKQIRKTNKKVKMTKLPKGVVHIQSTFNNTIVTITNLKGEVISWSSAGAVGFKGARKSTPFAAKTAAQTAARQSMDQGLKQAKVLVKGAGPGRETAIRGLIDSGLQITLIRDITAIPHNGCRPPKKRRV

SEQ ID NO: 4666 - protein, 447 aa, Yersinia pseudotuberculosis IP 32953
MNGLVSLESFLESLQRRDANQPEYLQAVREVFTSLWPFLEQNPHYREQSLLERLVEPERVIQFRVAWTDDKGHVQVNRAWRVQFSSAIGPYKGGMRFHPSVNLSILKFLGFEQTFKNALTTLPMGGGKGGSDFNPKGKSQAEVMRFCQALMTELYRHLGPDTDVPAGDIGVGGREVAFMAGMMKKLSNNTACVFTGKGLSFGGSLIRPEATGYGLVYFTDAMLKRHGLGFEGRKVSVSGAGNVAQYTIEKAMELGAKVVTASDSGGTVVDEVGFTPEKLAHLAEIKNKRYGTIEDYARERNLVYLAGQQPWSVPVDIALPCATQNELDLPAALQLIANGVKAVAEGANMPTTIQATDAFLEAGVLFAPGKAANAGGVATSGLEMAQNAARMSWKSEKVDVRLHHIMLDIHQSCVEYGGEGKQTHYVHGANIAGFVKVADAMLAQGVL

SEQ ID NO: 4667 - protein, 397 aa, Streptomyces coelicolor A3(2)
MLGIVLAGGEGKRLMPLTAARAKPAVTFGGTYRLVDFVLSNLVNGDILRICVLTQYKSHSLDRHITTTWRMSSLLGNYVTPVPAQQRLGPRWFLGSADAILQSLNLVHDEQPEYVAVFGADHVYRMDPRQMLAQHIESGAGVTVAGIRVPRAESPSLVITPGSDGQTVTGFLEKPPNPPGLGHDPGCVFPSMGNYVFTTKALVEALHRDAEDPDSVHDMGGSILPQLTDRGEAALYDFSANHVPGETTRDQGYWRDVGTLDAYYDAYMDLIAERPAFNLYNRDWPVYTHSTQLSPARFNAGGIASESIISAGCLIRGQVTRSVLSPGVVVDPGAVVQGSVLHNVHIGRGAVVRGAVLDKNVQVPPGATIGVNPQRDGELYTVSKGGVIALGKGQRVP

SEQ ID NO: 4668 - protein, 428 aa, Arabidopsis thaliana
MTMTTTISHLPTELLDEIISRVPLKSTRAVRLTCKNWDSLFKNRSFMKEEAAAKEGESRMIVLMDKNLFAMSIFFNGIDIDPSAEQRGKLTCLYDDSEQVKISQVFHCEGLLLCVLEDDKCSLVVWNPYWGQTRWIEPRYFSRIQNCYGRYMYVYALGYNNKSRSHKILRFIDGAFDFPFWYEIYDFDSDLWTTLDVTPQWFINFPPRGCYNRGVTLKGNTYWCAIRRKSNTNWFVDLDHIICFDFTSERFGPLMPLPFVRYTSGSLVTLSCVREEKLAVLFCNNATVEVWITTKIETDKISWSKFLTVNMYVDLLEGSFFIDEVKKVAMIFDIPMNRETVYIVGEAGNVKELHLGQPVDVDKHFSPLFVCSYVPSLVQIKQPPGCQRKQESSLEKRRCDDENISRLIAHEETYVVYGRYVPSRKKPR

SEQ ID NO: 4669 - protein, 833 aa, Rubrobacter xylanophilus DSM 9941
MKAVIMAGGQGTRLRPLTSEQPKPMIRIANVPCMEHIVNLLKRHGFTDIAVTLQFMPDEIRDYFGDGSDWGVNIRYSVEDSPAGTAGSVKMAERQLGLEGERLLIISGDALTDVDLGELLAYHEQKGGEATMVLKSVENPLDFGIVITGEDGRISRFLEKPAWGQVFSDTVNTGIYLLEPSVLREIPDPEEGEYDFSKDLFPRLLEQGRPLYGMVTDAYWEDIGTLEQYASANRDVLEGRVRGVRPPGTRLRENIYVGRRVQVDDEELEGPVVIGDNVRIDEGARISPYSVIGNNVVVASGAHIERSIVADGTYVGEGAELRDTLVGRSCYIQERARILERSALGDDVIVGEGATIAPDVKVYPHKTVESGASVTQSLIYETMGLRTIFRGGRVSGKFNVDVTPEFVIRLASSFGTTLSPGSIVTLGRDSSAAAQVVKRAMTAALLATGVNVRDLRAAHAGVVRHDVLAGKSSAGCHTRAGEDSDEVEVLFFSSDATPMTEGEQRAIEKVFVREEYRRAHEGDIGQLIFPGRAVEQYVERLERAVDRSRVSGGSVVVDFCGGVAGLVASRVFSRLGISAVVMEGFANANVVGGAPRMDLEEGLERVGRIVPTVEAAFGCVVNPTGEQVHFVDDAGEYVPPDVMLACLIRGLEPREVVLPINLSSRYAELVESYGGTVHYARTGMGNVAIRAAERAADLGGLEDGQYIFPAFLPAPDCFMTLARALELFRDRPLSKVRREFGERFGNVVRERLECPWSAKGRVMRGLAERFGGDPDAILTEGVKLMVDGGWVLMLPDPDNPLFYVYAEADDGRRPEALMQDYVRLVRELIESGD

SEQ ID NO: 4670 - protein, 192 aa, Triticum aestivum
KRGRKPANGREEPLNHVEAERQRREKLNQRFYALRAVVPNVSKMDKASLLGDAISYINELRGKMTALESDKETLHSQIEALKKERDARPAAPSSGMHDNGARCHAVEIEAKILGLEAMIRVQCHKRNHPAAKLMTALRELDLDVYHASVSVVKDIMIQQVAVKMATRVYSQDQLNAALYGRLAEPGTAMQIR

SEQ ID NO: 4671 - protein, 455 aa, Yersinia pseudotuberculosis IP 32953
METTLMTKHYDYLAIGGGSGGIASINRAAMYGKKCALIEAKQLGGTCVNVGCVPKKVMWHAAQIAEAIHLYGPDYGFNTTVNHFDWKKLIANRTAYIDRIHQSYERGLGNNKVDVIQGFARFVDAHTVEVNGETITADHILIATGGRPSHPDIPGAEYGIDSDGFFELDEMPKRVAVVGAGYIAVEIAGVLNGLGTETHLFVRKHAPLRTFDPLIVETLLEVMNTEGPKLHTESVPKAVIKNADGSLTLQLENGTEVTVDHLIWAIGREPATDNLNLSVTGVKTNDKGYIEVDKFQNTNVKGIYAVGDNTGAVELTPVAVAAGRRLSERLFNNKPDEHLDYSNIPTVVFSHPPIGTIGLTEPQAREKFGDDQVKVYTSSFTAMYSAVTQHRQPCRMKLVCVGAEEKIVGIHGIGFGMDEILQGFAVAMKMGATKKDFDNTVAIHPTAAEEFVTMR

SEQ ID NO: 4672 - protein, 598 aa, Glycine max
MFRQNLSRGPLKILTRWLIFLTILQVSCAIKDPDVEGEALLDLLHFLNDSNKQITDWDSFLVSPCFSWSHVTCRNGHVISLALASVGFSGTLSPSIIKLKYLSSLELQNNNLSGPLPDYISNLTELQYLNLADNNFNGSIPAKWGEVPNLKHLDLSSNGLTGSIPKQLFSVPLFNFTDTQLQCGPGFEQPCASKSENPDIKTSAHKSKLAKIVRYASCGAFALLCLGAIFTYRQHQKHRRKIDVFVDVSGEDERKISFGQLRRFSWRELQLATKNFSEGNVIGQGGFGKVYKGVLSDNTKVAVKRLIDYHNPGGEAAFEREVQLISVAVHRNLLRLIGFCTTTTERILVYPFMENLSVAYRLRDLKPGEKGLDWPTRKRVAFGTAHGLEYLHEQCNPKIIHRDLKAANILLDDEFEAVLGDFGLAKLVDARMTHVTTQVRGTMGHIAPEYLSTGKSSEKTDVFGYGITLLELVTGERALDLSRLEEDEDVLLIDYVKKLLREKRLEDIVDRNLESYDPKEVETILQVALLCTQGYPEDRPTMSEVVKMLQGVGLADRWADWQQLEEARNQEFSLMTHQFVWNDESTLDQEAIQLSRAR

SEQ ID NO: 4673 - protein, 667 aa, Saccharomyces cerevisiae
MSVEDIKKARAAVPFNREQLESVLRGRFFYAPAFDLYGGVSGLYDYGPPGCAFQNNIIDAWRKHFILEEDMLEVDCTMLTPYEVLKTSGHVDKFSDWMCRDLKTGEIFRADHLVEEVLEARLKGDQEARGLVEDANAAAKDDAEKKKRKKKVKQIKAVKLDDDVVKEYEEILAKIDGYSGPELGELMEKYDIGNPVTGETLESPRAFNLMFETAIGPSGQLKGYLRPETAQGQFLNFNKLLEFNNSKTPFASASIGKSFRNEISPRAGLLRVREFLMAEIEHFVDPLDKSHPKFNEIKDIKLSFLPRDVQEAGSTEPIVKTVGEAVASRMVDNETLGYFIARIYQFLMKIGVDESKLRFRQHMANEMAHYAADCWDGELKTSYGWIECVGCADRSAYDLTVHSKKTKEKLVVRQKLDNPIEVTKWEIDLTKKLFGPKFRKDAPKVESHLLNMSQDDLASKAELLKANGKFTIKVDGVDGEVELDDKLVKIEQRTKVEHVREYVPSVIEPSFGIGRIIYSVFEHSFWNRPEDNARSVLSFPPLVAPTKVLLVPLSNHKDLVPVHHEVAKILRKSQIPFKIDDSGVSIGKRYARNDELGTPFGVTIDFESAKDHSVTLRERDSTKQVRGSVENVIKAIRDITYNGASWEEGTKDLTPFIAQAEAEAETD

SEQ ID NO: 4674 - protein, 310 aa, Aeropyrum pernix K1
MLEHLVQAVAVGHALVDLRLYVERIPGVDEEAVIKDETRSVGGSAANVAVVLRRLGVQSGIIGKIGLDDFGRIAVDNLMREGVDISGLRVSLRDRTGFSVVVRDKEGSITIYSFKGAAEKLEPGEIDADAIGRSKHVHVASLRPDTTLKTVEIAKKRSITVSWDPGRVLSKMGAERLANIISKVDIIFVNRNEAKNLTGYHDYRQAARHLKKLGPKIVVIKLGASGSYILYSDGEVFVPAIKPERVVDTTGAGDSYAAGFIAGLLRGYTIEKASLYATIVASIKVSRLGSNAAPSHEEVVEKARELGVEI

SEQ ID NO: 4675 - protein, 466 aa, Sinorhizobium meliloti
MDTRPEPFEPPAPVPRTGIPSRLEIIRTVLRNPLELWGEPSYTLPWIETKFINQRTLIVNDPGLIRYILVENAANYEMSNVRRLILRPILRDGLLTAEGEVWKRSRKAMAPVFTPRHAQGFAGQMLRVCEAFVDRYAGASSEPFVTNVAVDMTELTFEILAETLFSGEIAVEKQGFAANVEELLHRMGRVDPMDLLVAPSWVPRLTRIGGRKVLDRFRGVVSETMSLRRRRTTEAPGDVPNDFLTLLLQLEGPDGLSTSEIEDNILTFIGAGHETTARALAWCFYCVANTPAYRETMEQEIDSVLASGADPVDWLGRMPHVLAAFEEALRLYPPAPSINRAAIEEDAWTSPEGERVPIRKGISVLVMPWTLHRHALYWQKPRAFMPERFLPENRDKINRFQYLPFGAGPRVCIGATFALQEAVIALAVLMHRFRFDLTDETHPWPVQRLTTQPRGGLPMKVSARVK

SEQ ID NO: 4676 - protein, 362 aa, Triticum aestivum
  misc_feature (79)..(79): Xaa can be any naturally occurring amino acid
  misc_feature (107)..(107): Xaa can be any naturally occurring amino acid
  unsure (1)..(362): unsure at all Xaa locations
MGSTATDMAASAHEEACMFALQLGSSSILPMTLKNSIELGLLDTLVAADGKLLSPAELAAKLPSTANPAAPDMVDRMAXGLLASYKVVSCTLEEDKDGRLSRAVRAXEPVCKFLTPNEEGVSMAPLALMNQDKVLMESWYYLKDAVLDGGIPFNKAHGMSAFEYHGTDPRFNRVFNEGMKNHSIIITKKLLELYKGFNGLDTLVDVGGGIGATVGAITAHYPTVKGINFDLPHVISEAPPFSGVTHVGGDMFQKIPSGDTILMKWILHDWSDEHCATLLKNCYDALPAHGKVVLVECILPVNPEATPEAQGGFHLDMIMLAHNPGGRERYEREFEALAKGAGFGAIKTTYIYANIWVIEFTK

SEQ ID NO: 4677 - protein, 328 aa, Synechococcus sp.
MPKVNLQQAPNNGKSSADMVRTYLREIGRVPLLTHEEEIVYGKQVQRLMALQEKRQTLEESLDRERTREEWAEAAQLTPKQLQRDLQIGERAKRKMIEANLRLVVAIARNIKKRNLEFLDLIQEGSLGLERGVEKFDPTKGYKFSTYAYWWIRQAITRAIAQQGRTIRLPIHITEKLNKIKKTQRQLAQDLGRAATIAEIAEALELEPAQIREYFRVSRHPISLDVRVGDNQDTELMDLLEDSGESPDNNVTYELLKQDLRDLIADLTPQQQEVIILRFGLNDGKELSLAKIGKRMNLSRERVRQLERQALNHLRRRRSQIREYLVAS

SEQ ID NO: 4678 - protein, 386 aa, Digitalis lanata
MKNILFSTMRNFMVYVVVLMEVSVRSSESKCDFKAIFNFGDSNSDTGGFWAAFPAENPPNGMTYFKRPAGRVTDGRLIIDFLAQGIGIPFLSPYLLSIGSDFRHGANFATAASTVLLPRTSLFVTGVSPFSLGIQLNQMKQFKLQVDRLHHSPGKLNLPAPDIFRKSLYTLYIGQNDFTGNLGSLGISGVKKKIIPQVVSQISSTIKKLYELGGRTFLVLNLAPIGCYPLFLVDLPHNSSDIDSFGCMISYNKAVVEYNYMLKEALAQTRKDIQDADVIYTDIHSVMLQLFQHPTSNGLKYGTKACCGYGGGAFNFNQQVFCSYSKLINGKNVTANACKDPQNYVSWDGIHATEAANKHVAHAILEGSHFDPPFSLHKLCDIQPIG

SEQ ID NO: 4679 - protein, 393 aa, Saccharomyces cerevisiae
MGQLLSHPLTEKTIEYNEYKNNQASTGIVPRFYNCVGSMQGYRLTQEDAHLIRNENSVVYVRFFNPFIDKYETLSLNVFAVFDGHGGDDCSKFLSGGRHHRDGNGSSNGNGEPNAGLIKWIAYSFENHHYTSTTNNDSSKFKRSFNTLEGLVSQIFKDAFILQDEELYRHFANSSCGSTAVVACIINEESLYVANCGDSRCILSSKSNGIKTMSFDHKPQHIGELIRINDNGGTVSLGRVGGVLALSRAFSDFQFKRGVTYPHRRTKLTNITQNLTYGTPPQEAQVTVEPDVLMHKIDYSKDEFLVLACDGIWDIYNNKQLIHFIKYHLVSGTKLDTIITKLLDHGIAQANSNTGVGFDNMTAIIVVLNRKGETLQDWFNKMKTRLERERGLV

SEQ ID NO: 4680 - protein, 114 aa, Brassica napus
MGVVFISSSAARSPLGLSTDLLTHRSTLKKLPSVVAFKADESTNSSLIVPPEQEKQKEKRVVTRRKPPKDQNSAPSCSLGVDYNEAAARLESIYKLSPPATSLEEDVIDASKGK

SEQ ID NO: 4681 - protein, 373 aa, Triticum aestivum
PSKIILSAFHQPTAGGERKSPPRPRRPSRRRTEAEPSQRDTVSRSRKDVTPPQIPQQNRKPSLHLHRMAPPPRHLLLLPVLLLASLLRAAQMEPAHAAAAGDGDRDEGARALLALLQRVQSEALRALGPRDFDPKLYVDLPLAPGADRAAAEAALATVTTRGEMKAFLARYFATAGSDLVEADPPDFEAEPRGFLPRVASGEARAWALKVHALWKDLARRVAPSVAARPDRHTLLPLPGRVVVPGSRFREVYYWDSYWVVRGLLVSKMYDTAKDIVLNLVYLVEEYGFVLNGARSYYTNRSQPPLLSSMVLELYTATGDLGLVRRAFPSLLKEHSFWVSELHNVEIMDNHGRLHNLSRYQAMWNKPRPESATI

SEQ ID NO: 4682 - protein, 97 aa, Brassica napus
MEARPVQRSGSRELSNLTRTSSIPSTPNPSSSAAAAEVAFMRSENNNNNNTQFMSKPLGGQNYHLLASSNGGAVGHICSSSSSGFSTNLHYSSMEKH

SEQ ID NO: 4683 - protein, 453 aa, Oceanobacillus iheyensis HTE831
MKVIFSRTLLPSMIITILSLLLTGWLIVQAESNWIMVIAVLIVQFMIISILFIQFYNRYTRPIGKATKTVDRLIEGNYSARFYNGNSPEMEELSVKVNTLARNMSEIAIQEQMQSEQLTTIVDNMQSGLVLIDEKGYVHVVNRKFLEMFGEEESNYRGHLYYDVFENENVHETVQKTFLYEETVKKSFVHREGLNKIYVEVVGAPIFNERNMLKGAVLVLYDITELKKLEKMRKDFVANVSHELRTPITSIRGFAETLLDNNITDPATKEFMEIIYKESHRLQLLIEDLLALSRLEREDFRLLIDNYDVRQMVEEILPQLHQKAENKNLTFDLEVPDQLTMRADKDRMKQVLINLIDNSIHYTPSGGDICLAISEETDVIHFQVKDSGIGMDEKSQTRVFERFYRVDKARSRNTGGTGLGLAIVKHIVEVHKGKIDVESTLNQGTTIHIYIPK

SEQ ID NO: 4684 - protein, 273 aa, Prochlorococcus marinus str. MIT 9313
MTDFLAAALQLTSTSDPELNFAAAEEQIELAARRGAELVGLPENFAFMGDDERRLELAQDLAEQCSRFLVTMARRYQVVLLGGGFPVPSGDSNHTVNRAELVGRDGQLLARYDKIHLFDVDLPEGNTYQESATTTSGRELPPVVDVPGLCRVGLSICYDVRFPELYRHLVSAGAELLMIPAAFTAFTGKDHWQVLLQARAIENTSYVLAPAQTGRHYSRRQSHGHAMVIDPWGTVLADAGVSQGAAIAPVDNSHIGRIRAQMPSLQHRQSALF

SEQ ID NO: 4685 - protein, 194 aa, Oryza sativa
  misc_feature (22)..(22): Xaa can be any naturally occurring amino acid
  misc_feature (29)..(29): Xaa can be any naturally occurring amino acid
  misc_feature (53)..(53): Xaa can be any naturally occurring amino acid
  misc_feature (60)..(60): Xaa can be any naturally occurring amino acid
  misc_feature (85)..(85): Xaa can be any naturally occurring amino acid
  misc_feature (106)..(106): Xaa can be any naturally occurring amino acid
  unsure (1)..(194): unsure at all Xaa locations
MGNILPPPGDPQAHAARNMELXQGNLDFXALPQPRSVHTSVKVSNPAGGPSNXITFSEEXHVVKTSKKIHNQKFQELTGNNIFKXEDATPASAEKSLSSAKLKEMXGSDIFADWTAAPPRLILGPGCSRKAHHLGGRRNQHLHRDSNSPARPSPKFLELGLNFFNPSIRLEKVPVANCCLLSLGTLGFFGIPLA

SEQ ID NO: 4686 - protein, 632 aa, Nostoc sp. PCC 7120
MLNSIYSREVYDIFNQAKCNALNKATKSVQVGDEVKEIPSPFPSPADWRDLWIYFIMTDRFNNPSAPPTMSWNAFDGNDFLGKKALGFQGGTFEGIRQQLGYLEKLGVGAIWITPPFKNCQYEPTYHGYGIQDFLQIDPRFASNKDNPEAELQALIDEAHARGIYVIFDIVLNHTGNVFSYFIEGKNVKSTETDRDLPLLPYDIKWHNKTGEPQWINAPDDQDPDLHPNAAVWPRELCKNEYFRRRGTRKGDTGEGGDFTDLRELLTEKEEVRNILIRIHQYLIAKFDIDGFRIDTLRFIEPEFARIFGNSMHEFALSIGKKNFFSFGEVWADEDKTEKKISQFIGRKATEPGDLLGIDAALDFPLFFKLRYVLKGLQPIKELAEVYEKRKESLRGIISSHGEVSKFLVTFLDNHDWKRRFYYSNPANPQKFDDQLTLGITCLFALQGIPCIYYGTEQGLNGYLTENRDFGDLVVREALWGKPGGGFKQDHPFYKTIAKLSEYRNSHPALRYGRQYFRPISGDRINYAISPYPSGVLAFSRILNETEVVVVANTNTEFTQSVYVIVDDNLHSENPTFKILFSNKSRDNSIQPEKVEEHHGVNITEVNGHKNYGPVRVMKVTLQPMEVQILVK

SEQ ID NO: 4687 - protein, 312 aa, Medicago sativa
MGSVEIPTKVLTNTSSQLKMPVVGMGSAPDFTCKKDTKDAIIEAIKQGYRHFDTAAAYGSEQALGEALKEAIELGLVTRDDLFVTSKLWVTENHPHLVIPALQKSLKTLQLDYLDLYLIHWPLSSQPGKFSFPIDVADLLPFDVKGVWESMEESLKLGLTKAIGVSNFSVKKLENLLSVATVLPAVNQVEMNLAWQQKKLREFCNAHGIVLTAFSPVRKGASRGPNEVMENDMLKEIADAHGKSVAQISLRWLYEQGVTFVPKSYDKERMNQNLRIFDWSLTKEDHEKIAQIKQNRLIPGPTKPGLNDLYDD

SEQ ID NO: 4688 - protein, 426 aa, Oryza sativa (japonica cultivar-group)
MDEFARRVYQELNYVQEGQNARRFKKLYADKQDVLVPDIFWDYTSAKVLTMEWIEGVKLNQQAAIEKQGLKVLDLVNIGIQCSLRQLLEYGYFHADPHPGNILATPEGKLAFLDFGMMSETPEDARVAIIGHVVHMVNRDYEAMARDYYALDFLEPDVDVSPIVPALKSFFDDALNSTVSELNFKTIVDGLGAVLYQYPFNVPAYYALILRSLTVLEGLALYADPNFKVLAASYPYFAKRLLTDPNPYLRDALIELLFKDGKFRWNRLENLLVQGSQDREFAAKDALQPVLKLLLGPDGEELRVLVVKEAVRVTEAITFGTLIDSYNAAPEFLKPLISSGNPAGPFKISDTEREQMIELRDRVFRIWGLLRSSDGFDPTILQPIVQVLQEPEARVLGSRVAGGVTQRLAARLLQQLLRTPPAPGSP

SEQ ID NO: 4689 - protein, 389 aa, Mycoplasma genitalium G37
MAAGKRDYYEVLGISKNASSQDIKRAFRKLAMQYHPDRHKAENETTQKQNEEKFKEVNEAYEVLSDEEKRKLYDQFGHEGLNASGFHEAGFNPFDIFNSVFGEGFSFGMDGDSPFDFIFNRSKKRQQQIVVPYNLDIALVIEINFFEMTNGCNKTIKYERKVSCHSCNGFGAEGGESGLDLCKDCNGNGFVIKNQRSIFGTIQSQVLCSTCNGQGKQIKVKCKTCRSNKYTVTNQIKEINIPAGMYSGEALVDESGGNEFKGHYGKLIIQVNVLASKIFKRSDNNVIANVLVDPMVAIVGGVIELPTLEGIKEFNIRPGTKSGEQIVIPNGGIKFSKSFKRKAGDLIIIISYARPCEYTNLELKKLREFIKPNQEVKQYLNTLKNEYKT

SEQ ID NO: 4690 - protein, 299 aa, Triticum aestivum
  misc_feature (222)..(222): Xaa can be any naturally occurring amino acid
  misc_feature (295)..(295): Xaa can be any naturally occurring amino acid
  unsure (1)..(299): unsure at all Xaa locations
AYLGDTIEQVCTKKQAGTGPEFPGYRRPTRPVGSWGPAIIGHADDEVNAALIETLKKGTSFGAPCALENVLAQMVISAVPSIEMVRFVNSGTEACMGALRLVRAFTGREKILKFEGCYHGHADSFLVKAGSGVATLGLPDSPGVPKGATVGTLTAPYNDVEAVKKLFEDNKGEIAAVFLEPVVGNAGFIPPQPAFLNALREVTQPDGALLVFDEVMTGFRLXYGGAPEYFGITPDVTTLGEIIGGGPPVGAYGGPKDIMEMVAPAGPMSQAGTPNGNPLTLTAGIPPLKRPMEPXPMIL

SEQ ID NO: 4691 - protein, 462 aa, Oryza sativa
MQAHAHTLGLRISPPPPAPPRRRARPRRRAVRVAAAASAPRRETDPRKRVVITGMGLVSVFGNEVDAFYERLLAGESGVGAIDRFDAGGFPTRFAGQIRGFSSEGYIDGKNDRRLDDCLRYCIVSGKKALENAGLGKGSDGHTKLDKVRAGVLVGTGMGGLTVFSDGVQNLIEKGYKKISPFFIPYAITNMGSALLAMDAGFMGPNYSISTACATSNYCFYAAANHIRRGEADVIVAGGTEAAIIPIGLGGFVACRALSQRNDDPETASRPWDKERDGFVMGEGAGVLVMESLEHAMKRDAPIIAEYLGGAVNCDAYHMTDPRSDGLGVSSCITQSLEDAGVAPEEVNYINAHATSTLAGDLAEVRAIKQVFKNPSDIKINSTKSMIGHCLGAAGGLEAIAVVKAITTGWVHPTINQFNPEPEVDFDTVANEKQQHEVNVAISNSFGFGGHNSVVVFAPFKP

SEQ ID NO: 4692 - protein, 312 aa, Pseudomonas sp. KNK003A
MTRIVNAAAAQMGPISRSETRKDTVRRLIALMREAKARGSDLVVFTELALTTFFPRWVIEDEAELDSFYEKEMPGPETQPLFDEAKRLEIGFYLGYAELAEEGGRKRRFNTSILVDRSGRIVGKYRKVHLPGHKEPQPGRKHQHLEKRYFEPGDLGFGVWRAFDGVMGMCICNDRRWPETYRVMGLQGVEMVMLGYNTPYDHTGHDDIDSLTQFHNHLSMQAGAYQNSTWVIGTAKCGTEEGSKMVGQSVIVAPSGEIVAMACTIEDEIITARCDLDMGKRYRETIFDFARHREPDAYRLIVERKGAVPPPQ

SEQ ID NO: 4693 - protein, 938 aa, GIBBERELLA ZEAE PH-1
MSTHQHSAFASAQYISPDPIFEVTKRFNADQDPQKVNLGQGTYRDESAKPWVLPSVREAEKLIANSGHEYLPIEGLQSFRDAAKDRIATCQSISGTGSLLLAGLVLKKANSGIENIIITDPTWSNHDLLFHEIGFNVIKAPYYKDRSFDFKGYLDTIKAADKRSAVVLHACAHNPTGCDPTRDQWKQIAEVIKENGIFPIIDSAYLGFNSGNYDEDAWAVKYIIEELGLEAAICLSFAKNMGLYGERVGLTAIVTKSEETKKAVFSLLQQSQRQTVSNPPVHGARIAAAVLSNPDTLKQWHQDLVTMSSRIKSMRSKLFDELVRLETPGDWSHIVNQTGMFGYTGISKPQIECLEEKYHIYMADTSRISLAGLNEHNVDVTQRAERHATPVVALTSRCTIPRRRHPTTANSLDNPASDLKIGVEQKNGAIPDARRNQAPYNVRVTSSDTTPLPQTPRVINGGNRSIGWGTDGVMVAFGQHHSQVPGSPELDSHTQGRWAKTSGNAAAALEATRTNTPVVNGAETPLSELPPLILYRSLFINAVSSRPWLLIPSLHLLQKLSHAGNPYLFNVSRNPLLRTILKHTFYKQFCAGETGAEAQATMKELQDMGFKGTILTFAKETVFDSKTGKEQGHGIETSTTNECQWCDNIEAWRDGTLKTVELLREGDQLATKLTGAGPGVCEALHNDAQLPKQFVDACYEISQKVKDRGAYILIDAESQHYQWGIFRLGMELQQKFNTDGNVVLYNTYQAYLKSTQESLEKHLQIASDKGFTLGVKVVRGAYMSSDPRSLIHDTKQDTDDNYNQIAQGVLRQDFRGFGGSNAKPFPSAQLLLASHNKESLVKAHEMHQERTKANLPTVPVKFAQLHGMSDEVSFGLLKLKDDNGVAPEVYKCTTWGTLGECMAYLTRRAIENRDAASRTLDEYTALKNEAWRRLAFWR

SEQ ID NO: 4694 - protein, 256 aa, Solanum tuberosum
MDHHGNGQPPGIGVVTSSAPIYGAPYQANQMAGPPAVSAGAIQSPQAAGLSASSAQMAQHQLAYQHIHQQQQQQLQQQLQTFWANQYQEIEHVTDFKNHSLPLARIKKIMKADEDVRMISAEAPVVFARACEMFILELTLRAWNHTEENKRRTLQKNDIAAAITRTDIFDFLVDIVPREDLKDEVLATIPRGTLPVGGPTEGLPFYYGMPPQSAQPIGAPGMYMGKPVDQALYAQQPRPYMAQPIWPQQQQPPSDS

SEQ ID NO: 4695 - protein, 484 aa, Zea mays
  misc_feature (377)..(377): Xaa can be any naturally occurring amino acid
  misc_feature (439)..(439): Xaa can be any naturally occurring amino acid
  misc_feature (460)..(460): Xaa can be any naturally occurring amino acid
  misc_feature (463)..(463): Xaa can be any naturally occurring amino acid
  misc_feature (470)..(470): Xaa can be any naturally occurring amino acid
  unsure (1)..(484): unsure at all Xaa locations
MAATVAVDNLNPKVLKCEYAVRGEIVIHAQRLQQQLQTQPGSLPFDEILYCNIGNPQSLGQQPVTFFREVLALCDHPDLLKKEEIKTLFSADSISRAKQILALIPGRATGAYSHSQGIKGLRDAIASGIASRDGFPANADDIFLTDGASPGVHLMMQLLIRNEKDGILVPIPQYPLYSASIALHGGSLVPYYLNESTGWGLEISDVKKQLEDARSRGIDVRALVVINPGNPTGQVLAEENQYDIVKFCKNEGLVLLADEVYQENIYADNKKFHSFKKIVRSLGYGEEDLPLVSYQSVSKGYYGECGKRGGYMEITGFSAPVREQIYKIASVNLCSNITGQILASLVMNPPKASDESYASYKAEKDGILASLARRAKXALEAAFSKLEGITCNKAEGAMYLFPQICLPQKAIEAAKAANKAPDAFYALRLLESTGIVVVXPGSGFGQVPGTWHFRCTILPXEEXIPAIISXFTVFHEAFMAEYRD

SEQ ID NO: 4696 - protein, 482 aa, Ralstonia metallidurans CH34
MRNATADSGRRAVQSDKTIEQDQPTGVPGVNRAAAEKGENNMANGQGNAGGEGFFPKWRLKTEGVIGPDERLPAGQTLLAGIQHVVAMFGSTAIAPILMGFHPNIAILFSGIGTLLFFLFVRGRVPSYLGSSFAFIAVVIAATGYAGSGPNPNIPLALGGIIAAGALYTVIGLIVQAVGYGWVEKLMPPVVTGAIVAAIGLNLAPVAVKAVSAAPLDTWVGLLTVLAVGLIAVRAPGMLGRLPVLLGGLAGYLAYYIATNLMGLGKAIDFSGVAAANWFGMPEFTAPVFQANAMLLIAPVAIVLVAENLGHIKAIGVMTGRNLDPYIGRAFIGDGVATMLSAAGGGTGVTTYAENMGVMAVTKIYSTLIFVVAAAVAILLGFSPKFGALILTIPGPVIGGLTIVVFGLISATAGRIWVQNHVDFSSSRNLITVGATLTVAAGDLTLKLGGLTLGGIGTATFGAILLYHLLGKGRTQEQGLTH

SEQ ID NO: 4697 - protein, 651 aa, GIBBERELLA ZEAE PH-1
MSLPTTSPFNPDGTQRGRRHSIFADFIPDDLAFPPPFIDPAPNVDEILNRDIDECSSGDEHRDEEAVEDPRYVDESDLQLAFHPNGIAYGSGFSTVPPTSIDIPAPNPHDFEQSYRAEVSLLRDNDVIPSKNPPTKWHSTYWGRVYRHLFSTRVRDHDKPLFAAEDSGETTPLLRDRIVRFDGIPPTPGPDEVHKRWEEALAAKKLETTWQRETKTLIQYAAPLIVTFLLHYSVTVASVLTVGRLGMEELAAVNLATMTASITYYVPVQGLATCLDTLCAQAYGSGHKHLVGLQAQRMTWLLWILMLPIAVLWWFSEPILAAAVGPGRTTALAAMYMRILIIGMPGVSAFESAKRFVQSQGLFHATTYTLLVGAPLSFLQNWLFVFKFGWGFNGAAIAMAVTHNLLPLLLILYVRLFEGSECWKGFNRKAFSNWGPMIKLALPGMIMIEAQFSVLEILTIAAGRFGTAQLAAQGVLVTITSTSFNIPFPLAIATSTRVANLIGANLSGAARVTAKVAIFAGLFVGLFNLTMFITLRKQLPNIFTDDEQIFDALAAVSHGLLRGIGRQAIGGYANLFSYYVVALPIALGTSFGLGWNLAGLWVGLTAGLAVVSGLEAIYLYFTDWEAAVAQAEARMRTETHRRRSSISARSQ

SEQ ID NO: 4698 - protein, 473 aa, Aeropyrum pernix K1
MAADDIKSRLDRVLRELFLLSSRDINPWTGRVFTHVYDPGMDEVRKAASKALELYRDKTMLDFTVYPSIIELEKQLLGFAGHLFHAPEGYSGTFTYGGTESIILAVLAARERWRRAGKSGAGKIVMPITAHPAFAKAAYLLGLKVERVPVDSVTLQADPAIIEEKIDRDTVMIVASAVDYPYGSLDPVEDLGDIAAARDVWLHVDACIGGMVLAFASDAGEEVGKFDFGVEGVRSFSVDMHKYGYAPKGSSILLFRRARDKKPTIFVDSSWPGYPLVNQAILSTRSAGTLAAAWAVARTLGVEGYRELAGMVLEARRRIQKGLESLGLEVLGRPKAGILSFTDSDIDVVEVATRLGRAGWVVQLQPGNKHLGFPTSIHLTISPIHARVVDSFLAAVEESIRGAPEPESRFEPALIEEGFKAVEDLLRRIENAGFDDKAVRVVNEMIYLLKPDVVAELIKEAMLEIFKPSWPGW

SEQ ID NO: 4699 - protein, 462 aa, Solanum tuberosum
MASTMFSLASVTPSASISLQDNLKPKLKLGTSSQRAFPRKDFMKAKSNGQTTMAVAVNVSRFEGITMAPPDPILGVSEAFKADTNELKLNLGVGAYRTEDLQPYVLNVVKKAENLILERGENKEYLPIEGLAAFNKVTAELLFGKDNPVLQQQRVATIQGLSGTGSLRIAAALIERYFPGSKILISSPTWGNHKNIFNDARVPWSEYRYYDPKTVGLDFAGMIEDIKAAPEGSFILLHGCAHNPTGIDPTPEQWEKIADVIQEKNHIPFFDVAYQGFASGSLDEDASSVRMFAARGMELLVAQSYSKNLGLYGERIGAINVLCSSAYAATRVKSQLKRLARPMYSNPPIHGAKIVANVVGTPELFSEWKEEMEMMAGRIKSVRQKLYDSLSAKDKSGKDWSFILKQIGMFSFTGLNKAQSENMADKWHVYMTKDGRISLAGLSAAKCEYLADAIIDSYYNVS

SEQ ID NO: 4700 - protein, 124 aa, Arabidopsis thaliana
KGENLVGAIDHALKVFDKMAQAIGPRLYSCCNCRNHVGLHDDIISKAFQGRTGRAFLFSHAMNIVVGPKEDRNLLTGLHTVADISCVDCNEPLGWKYERAYETSQKYKEGKFIFEKAKIVKEDW

SEQ ID NO: 4701 - protein, 182 aa, Psychrobacter arcticus 273-4
MFTTIKKTVIGLFTIVRSMWMVNSHAIRPRDTILYPEVPVPVPPRFRGRIILSRDPDGDERCVACNLCAVACPVGCISLQKAEREDGRWYPEFFRINFSRCIFCGLCEEACPTTAIQMTPDFEMSEYVRQDLVYEKEHLLISGPGKYPDYNYYRVTGMAVADKPKGAAQNEAAPIDLRSLLP

SEQ ID NO: 4702 - protein, 365 aa, Synechococcus sp.
MFDTTTTNSLDPVYAQDSHQATELESSNSMVEAEFSETELTNLRGVRSRNEDTVGAFFKEMARYPLLKPDEEIQLAHSVKFLNDAEERRLELQEQLGRSPTNEEWASVLGLETVKQLNSALYKGRVAKRKMIRSNLRLVVSIAKRYLNRGVPFLDLIQEGAIGLNRAAEKFDPNKGYKFSTYAYWWIRQAITRTIANDARTIRLPIHIVEKLNKLKKAQRTLKQTLQRNPTEAELAQELDITADQLHQLLQLRRQSLSLNHRVGKGEDTELVDLLEDDGLQLPEERMSEAMMRQELWDVLGDVLTDREKEVIALRYGLSSEQPHTLEEVGGMFNLSRERVRQIQSKAMRKLRRPQVARRLKSWLY

SEQ ID NO: 4703 - protein, 430 aa, Schizosaccharomyces pombe
NTSSTEQIEVLENEYAAHNYHPLPVCFSKAKGAKVWDPEGREYLDFLAAYSAVNQGHCHPKIIEALVEQAQRVTLSSRAFYNDKFGPFAKYITEYFDYEMVIPMNTGAETVETACKLARLWGNKAKKIPTDEAIILSCVDNFHGRTMGIISMSTDPDARDNYGPYLPNVGPKISGADRVLRYNNIEDLKYYLDTFGPKVAAFLVEPIQGEAGVMVPDDGYLEEAYKLCKAHNVLFIADEVQTGVARTGKMLCIEHSNVKPDVVILGKAISGGVYPVSAVLSSREIMLNFEPGTHGSTYGGNPLGAAVSIAALEVVKEEKLTERAAVLGEKFRTALIECKSPIVQKVRGRGLLNAVVIDESKTNGRTAWDLCLIMRSRGVLAKPTHGNIIRFSPPLVITEEDLMKGIEVIKKSLNDLPTIDMTPYAEKPIH

SEQ ID NO: 4704 - protein, 426 aa, Escherichia coli O157:H7 EDL933
MSKSENLYSAARELIPGGVNSPVRAFTGVGGTPLFIEKADGAYLYDVDGKAYIDYVGSWGPMVLGHNHPAIRNAVIEAAERGLSFGAPTEMEVKMAQLVTELVPTMDMVRMVNSGTEATMSAIRLARGFTGRDKIIKFEGCYHGHADCLLVKAGSGALTLGQPNSPGVPADFAKHTLTCTYNDLASVRAAFEQYPQEIACIIVEPVAGNMNCVPPLPDFLPGLRALCDEFGALLIIDEVMTGFRVALAGAQDYYGVEPDLTCLGKIIGGGMPVGAFGGRRDVMDALAPTGPVYQAGTLSGNPIAMAAGFACLNEVAQPGVHETLDELTTRLAEGLLEAAEEAGIPLVVNHVGGMFGIFFTDAESVTCYQDVMACDVERFKRFFHMMLDEGVYLAPSAFEAGFMSVAHSMEDINNTIDAARRVFAKL

SEQ ID NO: 4705 - protein, 401 aa, Xanthomonas campestris pv. campestris str. ATCC 33913
MSKQIQEAYIVAATRTPVGKAPKGVFRNTRPDDMLAHVLRAVVAQAPGIDLSRIDDAIIGCAMPEGEQGMNVARIGVLLAGLPNTVAGQTINRFCSSGIQAVAMAADQIRLGNADLMLAGGTESMSMVPMMGNKVAMSPSVFADDHVAIAYGMGITAEKVAEEWKVSREDQDAFALASHQKAIAAIAAGEFRDEITPYEIHSHQPDLAGNVIALRKRLVDTDEGPRPDSSLEGLAKLRPVFRNGQFGGSVTAGNSSQMSDGAGAVLLASEQAIKDYGLTPLARFVSFSVAGVRPEVMGIGPIAAIPKALKQAGLTKDQLDWIELNEAFAAQALAVIRDSELDPSKVNPLGGAIALGHPLGATGAIRAATLVHGLRRRQQKYGMVTMCIGTGMGAAGIIEAL

SEQ ID NO: 4706 - protein, 317 aa, Synechococcus sp.
MKTAKYSADPVRTYLKEIGRVPLLTHEEEVLYSRRVQKMVNLEKLKAELAEKQDQEPSLKEWAQAANLSQRQLKKQLLLGKQAKQKMVEANLRLVVSVAKKYIKRNMDLLDLIQEGTIGMQRGVEKFDPTKGYRFSTYAYWWIRQAITRAIAEQSRTIRLPIHITEKLNKIKKAQRQLAQANGRSASIPELADELGLTTKQVRDYLEKSRQPLSLDLRVGDNNDTELIELEDDGELPDDYATHAALKRDLARMLNDLTAQQQEVLTLRFGLRDGTPHTLAKIGEHLNISRERVRQIEHGSLAKLRKQKRKLGEYLAS

SEQ ID NO: 4707 - protein, 479 aa, Candida albicans SC5314
MSGFRVLDLVKPFSPFLPEVIAPERKVQFQQRVMWTIITLLIFLVMSEIPLYGIASSDSSDPLFWLRMMLASNRGTLMELGISPIVSSGMLFQLLQGTKIIHVDMQNKNDRETFQTAQKLLAILLAVGQATVYVLTGMYGPPSSLGVGVCSLLILQLVFASTIVILLDELLQKGYGLGSGVSLFTATNTCEQVFWKAFAPTTSTSAKGTEFDGAVVAMFHLLGSRKDKKRALIESFYRPNLPNMFQLLATLLVFFAVVYLQGFRIELPMKSTRQRGPYGSYPIRLFYTSNIPIMLESALASNIFIISQLLFMRWPNNLFVKLLGTWDARAGSSQLYANGGLAYYIQPPFNFTDALLDPIKTTIYIAFVLGSCAVFSTTWIEISGTSPRDVAKQFKEQGLVIAGHRDTSAYKELKKIIPIAAAFGGATIGALSVVCDLMGTLGSGTSILLAVTTIYGYYELAVKEGGFNKSIVSGFSDGI

SEQ ID NO: 4708 - protein, 357 aa, Zea mays
MASLTDLVNLDLSDCTDRIIAEYIWIGGTGIDLRSKARTVKGPITDPSQLPKWNYDGSSTGQAPGEDSEVILYPQAIFKDPFRKGNHILVMCDCYTPQGEPIPTNKRYSAAKVFSHPDVAAEVPWYGIEQEYTLLQKDVSWPLGWPVGGYPGPQGPYYCAAGADKAFGRDVVDAHYKACLYAGINISGINGEVMPGQWEFQVGPSVGISAGDEIWVARYILERITEMAGIVLSLDPKPIKGDWNGAGAHTNYSTKSMREAGGYEVIKAAIDKLGKRHKEHIAAYGEGNERRLTGRHETADINTFKWGVANRGASIRVGRDTEREGKGYFEDRRPASNMDPYVVTGMIAETTILWNGN

SEQ ID NO: 4709 - protein, 398 aa, Synechococcus sp.
MTTAKQSKSQGSFDSLTETASNDELAVFDPDETTLRNGQTTDLVRLYLQDIGRVPLLERDEELTEARKVQNYIQLLEKRQEGAEAGDEILAEFLSCINVHDRLAIELGCRPSLNRWAQEMNLERAVLRDIIRQGKQRWAEQVGLSVKELDSILKAGAKAKEHMIQANLRLVVSVAKKYQNRGLELLDLIQEGTLGLERAVDKFDPTKGYRFSTYAYWWIRQGITRGDRTQSRTIRLPVHVTEKLNKIKKAQRQISQTQGCTPSLDDVAQALEMTPEQVREVLQKVPRSVSLEIRVGKDRDTELGDLLETQDASPEENLVRESLQRDLHNLLTELTDREREVIQLRYGLGDGKTYSLAEIGRMLDVSRERVRQIEAKALQKLRQPKRRNIMRDYLDTLS

SEQ ID NO: 4710 - protein, 373 aa, Oceanobacillus iheyensis HTE831
MTASTKGLEGIVATQSSISSIIDDQLSYVGYRIDDLAENSSFEEIIYLLWNQKLPNKSELDELKSQLAENMDIPDAIINHLRSYDLNTVHPMAALRTAISLLGLYDNEADVMDEQANKRKAVRIQAQIATIVTTFSRIRKGQEPVKPKKDLSYAENFIYMLNGKEPEDIEVEAINKALVLHADHELNASTFTARVCVATLSDIYSGITAAIGALKGPLHGGANENVMKMLTEIGEEENAIPYIKEKLANKDKIMGMGHRVYRTGDPRAKFLREMSKELTKLTGQEKWYNMSVKIEDYIKENKGLPANVDFYSASVYHSLGLDHDIFTPLFAVSRTSGWIAHILEQYENNRLIRPRAEYTGPELRDYVSIEQRG

SEQ ID NO: 4711 - protein, 586 aa, Oceanobacillus iheyensis HTE831
MRNTKIVCTIGPASESIEKLEQLIEAGMNVARLNFSHGDYAEHGARIENIRKAAKNKNKTVAILLDTKGPEIRTGSFKEGRADLMQGNPVTIAMDEVEGTAEKFSVTYQGLINDVHEGSKILLDDGLIELEVKSIDKSKGEIETIALNSGEIKNKKGVNVPNVSVNLPGITEKDTNDIIFGIEQGVDFIAASFVRRASDILEIKEVLDQHQAQYIKIIPKIENQEGVDNIDSILEVSDGLMVARGDLGVEIPAEDVPLVQKKLIKQCNNAGKPVITATQMLDSMQRNPRPTRAEASDVANAIFDGTDAIMLSGETAAGTYPVESVQTMSNIALKAESALDHKQMLEERSQYVDMTITEAISQSVTHTASNLNVDTIITPTESGHTARMISKYRPKASILAVTFNEVVNRQLSLVWGVHAVLGKPATSTDEMLEIAVDKGLNTGICSRGSRVIITAGVPVGESGTTNLLKVHVIGDVIAKGQGIGRRSAYGHAVFAKTNKEALEKVQDGDILVTYATEKEMMPAIEKASAIITEEGGLTSHAAVVGLSLGIPVIVGVDNVFEILQDGQDITVDGNRGDIYAGHAGVL

SEQ ID NO: 4712 - protein, 203 aa, Arabidopsis thaliana
MRKKVSSSGDEGNNEYKKGLWTVEEDKILMDYVKAHGKGHWNRIAKKTGLKRCGKSCRLRWMNYLSPNVKRGNFTEQEEDLIIRLHKLLGNRWSLIAKRVPGRTDNQVKNYWNTHLSKKLGIKDQKTKQSNGDIVYQINLPNPTETSEETKISNIVDNNNILGDEIQEDHQGSNYLSSLWVHEDEFELSTLTNMMDFIDGHCF

SEQ ID NO: 4713 - protein, 464 aa, Bradyrhizobium sp. BTAi1
MTLIRSTVVLLLSLLAATPLAAQERRVPQSPAELRLSYAPIVQRVQPAVVNVYAAKVVQNRNPFLDDPIFRRFFGLQGGPQEQMQRSLGSGVMVDASGLVVTNVHVIEGADEVKVSLSDKREFEAEIVLKDSRTDLAVLRLKGTRETFPTLDLANSDDLLVGDVVLAIGNPFGVGQTVTHGIVSALARTQVGITDYQFFIQTDAAINPGNSGGALVDMTGRLVGINTAIYSKSGGSQGIGFAIPANMVRVVVASAKSGGKAVKRPWLGARLQAVTPEIAESLGLRSPTGALVASVVPNSPAAKAGIKSSDLIVSIDGQTVDDPNAFDYRFATRPLGGNAQIEVQRSGKPVKVAVALETAPDTGRNEMVINGRSPFQGAKVANISPAVADELHLDADTEGVVVLEPGDGTTAANVGFQKGDVIMAVNNQKIAKTADLDKASRESARIWRITVLRGGQQINVTLGG

SEQ ID NO: 4714 - protein, 358 aa, Cryptococcus neoformans var. neoformans JEC21
MSQLIATKRVDLLAPYLALDQGSRVQAEYIWIDAEGGIRSKTMTLDKAPSSVADLKEWNFDGSSTNQAPADNSDVFLRPVAIFKDPFRGGANILVLCECYDNDGTPNKSNYRAHCKKVMDAAKDTEPWFGLEQEYTLFDADGQVFGWPKNGFPGPQGPYYCGVGAGKVFARDFIEAHYRACLYAGIKISGINAEVMPSQWEFQVGPCTGIEMGDHLWMARFLLLRIGEEWGITPSLHPKPLKGDWNGAGCHSNYSTKDMRTPGKGMAAIEDAIKKLEKKHLEHIAVYGEDNDLRLTGKHETASMTTFSAGVANRGASIRIPRHVGAQGYGYLEDRRPASNVDPYRVTAILVETTVLNN

SEQ ID NO: 4715 - protein, 438 aa, Solanum tuberosum
  misc_feature (297)..(297): Xaa can be any naturally occurring amino acid
  unsure (1)..(438): unsure at all Xaa locations
MASICKLSNPCFNSTSYGSRSSSTPKFVVHLRTSTFNHRLSAGSKLSLVINPSIRASLCVKCSQADGNGSSVKRTTLHHLYETQGQSPWYDNLCRPVTDLIPLIDSGVRGVTSNPAIFQKAISTSNAYNDQFRELVQAGKDIDSVYWELVVKDIQDACKLFETIYDKTDGGDGYVSVEVSPRLADDTEGTVEAAKWLHKKVERSNVYIKIPATAPCIPSIKEVISLGISVNVTLIFSLSRYEAVIDAYLDGLEASGLSDLSRVTSVASFFVSRVDTLVDKLLEKIGTPEALDLRGKXANAQAALAYDLYQKKFSGPRWEALVKKGAKKQRLLWASTSVKNPAYPDTLYVDPLIGPDTVSTMPDQALQAFIDHGSVARTIDANLSEAEGIYSALEKLGIDWVFVGSQLELEGVDSFKKSFDSLLDSLQEKANTLKLVNL

SEQ ID NO: 4716 - protein, 220 aa, Solanum tuberosum
MGRRPARCYRQIKNKPYPKSRFCRGVPDPKIRIYDVGMKRKGVDEFPFCVHLVSWEKENVSSEALEAARIACNKYMTKSAGKDAFHLRVRVHPFHVLRINKMLSCAGADRLQTGMRGAFGKPQGVCARVAIGQVLLSVRCKDGNANHAQEALRRAKFKFPGRQKIIVSRKWGFTKFSRTDYLKYKSENRIVPDGVNAKLLGCHGRLAARQPGRAFLEAAN

SEQ ID NO: 4717 - protein, 478 aa, Vigna angularis
MKTLTPSVEIFFFPYVGGGHQIPMIDAARMFASHGASSTILATPSTTPLFQKCITRDQKFGLPISIHTLSADVPQSDISVGPFLDTSALLEPLRQLLLQRRPHCIVVDMFHRWSGDVVYELGIPRTLFNGIGCFALCVQENLRHVAFKSVSTDSEPFLVPNIPDRIEMTMSQLPPFLRNPSGIPERWRGMKQLEEKSFGTLINSFYDLEPAYADLIKSKWGNKAWIVGPVSFCNRSKEDKTERGKPPTIDEQNCLNWLNSKKPSSVLYASFGSLARLPPEQLKEIAYGLEASEQSFIWVVGNILHNPSENKENGSGNWLPEGFEQRMKETGKGLVLRGWAPQLLILEHAAIKGFMTHCGWNSTLEGVSAGVPMITWPLTAEQFSNEKLITEVLKTGVQVGNREWWPWNAEWKGLVGREKVEVAVRKLMVESVEADEMRRRAKDIAGKAARAVEEGGTSYADVEALIQELQARTCANQG

SEQ ID NO: 4718 - protein, 314 aa, Yersinia pseudotuberculosis IP 32953
MTSKNIAVIGECMIELSQKGTDLSRGFGGDTLNTAVYIARQVSAPDLNVHYVTALGTDSFSEEMLTAWQQENIQTDLIQRMDNKLPGLYFIETDESGERTFYYWRNDAAARFWLTSPAADDICQRLETFDYLYLSGISLAILDSASRQRLLKLLRACRAKGGKVIFDNNYRPRLWQSKEEAQEAYRDMLACTDIAFLTLDDEDMLWGEKPLEQVIDRTQALGVSEIIIKRGADSCIVWVKEGSEAQQYDVPAVKLPKEDVVDTTAAGDSFSAGYLAVRLTGGNAHDAAVRGHLTASTVIQYRGAIIPLAAMPTA

SEQ ID NO: 4719 - protein, 338 aa, Clostridium perfringens str. 13
MNILLTGGIGYIGSHTIVELLRDDNNSVVVIDNLVNSRKEVKDIVEKITGKSIKFYEGDLVNFEDIDKVFKNEKIDAVIHFASLKAVGESVEKPLEYYNNNIIGTLNLLTSMRNHNVKKFIFSSSATVYGESEIVPVHEGLQAGFATNPYGRCKAMIEDILRDLYISDNSWNIVLLRYFNPVGAHESGLIGELPNGIPNNLMPYVSKVADGELDYVRVFGDDYNTPDGTGVRDYIHVVDLARGHVAAMKKLKDGSGISTYNLGTGQGYSVLDIIKAFSKASGKEIPYKIVDRRAGDIAISFADPSKAEKELGWKAEKNLEDMCKDFWKWQCVGMKNFK

SEQ ID NO: 4720 - protein, 483 aa, Pseudomonas fluorescens Pf-5
MSVRRTKIVATLGPASNSPEVLEQLILAGLDVARLNFSHGTPDEHKARAKLVRDLAAKHGRFVAILGDLQGPKIRIAKFANKRIELKIGDKFTFSTSHPLTEGTQDIVGIDYPDLVKDCGVGDELLLDDGRVVMRVETATATELHCVVTIGGPLSDHKGINRRGGGLTAPALTEKDKADIKLAAEMEVDYLAVSFPRDAADMEYARKLRDEAGGTAWLVAKIERAEAVADDETLDGLIKASDAVMVARGDLGVEIGDAELVGIQKKIILHARRHNKAVIVATQMMESMIQNPMPTRAEVSDVANAVLDYTDAVMLSAESAAGAYPLEAVQAMARICVGAEKHPTSKTSSHRMGKVFESCDQSIALAAMYTANHFPGVKAIIALTESGYTPLIMSRIRSSVPIYAYSPHRETQARAAMFRGVYTIPFDPASLPPEQVSQAAIDELLKRGVVEKGDWVILTKGDSYHTTGGTNGMKILHVGDPMV

SEQ ID NO: 4721 - protein, 392 aa, Bacillus subtilis
MEKASGAYFWDVDGNKYIDYLAAYGPIITGHAHPHITEAIKKAAENGVLYGTPTKHEVTFAKMLKEAIPAMDKVRFVNSGTEAVMTTIRVARAYTGRTKIIKFAGCYHGHSDLVLVAAGSGPSTLGTPDSAGVPKSIANEVITVPFNDIDSYKAALEKWGSEIAAVLVEPIVGNFGIVEPKEGFLEQVNELTHNAGALVIYDEVITAFRFMYGGAQDLLQVKPDLTALGKIIGGGLPIGAYGGKQEIMEQVAPLGPAYQAGTMAGNPASILSGIACLEVLKEKGVYEKLDHLGAMLEEGIMKHAETHGITITVNRLKGALTVYFSDEKVENYEQAERSDGETFSTFFKLMLERGINLAPSKYEAWFITTAHTEQDIKDTLTAVEDAFKHLKN

SEQ ID NO: 4722 - protein, 703 aa, Bifidobacterium longum NCC2705
MGDYNLNFEKRSPHGWTTLKGLQEQDLSVINSFTQHTINLTRKALRLGSDFVHPVHDDTPDEPDYLSNADVPVEANIALPHSDDWDDGHLTVTDIDPVTGLLTTSTEGNPPLDEGTSIYDLYADRAERMGDEPLYTYKSGNDWVTVTANEFLADVRAVAKGLIHYGLKKGDAVAFMCRTSYDWDLTDAAIMACGGVLATVYDTDSAEQIRNIVNNSDARLLIVQDTDMRKKADGAVEECPSLEHIITIETGGLDEIKAYGTTVSDEELDERIDSVKKTDLCSIVYTSGSTAAPKGVEMTHEHYCQTALNLPAYMPDLLHDKRNTILLFLPQAHSFARAINYIVVSSNVRIYIATGIKTLISDLQVAKPTLMIVVPRVLEKVYNAASQKAGHGPKGVVFASAVVAAQNYMKEVSANGKAGALTRTRRAAFDPIVYSSLREVLGGRAKWIVAGGAPLDPELLAFFRGAGVPVYEGYGLTETTAPCAFSPLGTPFHAGSVGIAFPGFSLRIAEDGEIQVKGRAVFPRYHKNDEATELSFTEDGWYVTGDLGRIDNDGFLYITGRKKDLIITAGGKNVSPGPIEEVIQRCEFVSQALVLGDKRPFISALVTLDEESLRPWLAAKGLDENMPLEDAAKNAAVRAEVQKWVDQANEGVSRAESVRKFIILPEEFTQENGLMTASMKVIRPKVIKRYSTLLNTQMYTKRK

SEQ ID NO: 4723 - protein, 492 aa, Mesembryanthemum crystallinum
MDPYKYRPSSAFNSPYFTTNSGAPVYNNNSSLTVGTRGPILLEDYHLVEKLANFDRERIPERVVHARGASAKGFFEVTHDVSHLTCADFLRAPGVQTPVIVRFSTVIHERGSPETIRDPRGFAVKFYTREGNFDMVGNNFPVFFIRDGMKFPDMVHALKPNPKSHIQENWRVLDFFSHHPESLHMFTFLFDDVGVPTDYRHMEGSGVNTYTLISKSGKVHYVKFHWKPTCGVKCLLEEEAVKIGGANHSHATQDLYDSIAAGNYPEWKLYIQTIDPADEDKFDFDPLDVTKTWPEDILPLQPVGRLVLNKNIDNFFAENEQLAFCPGIVVPGVYYSDDKLLQTRIFSYADTQRHRLGPNYLQLPVNAPKCAHHNNHYDGQMNFMHRDDEVDYFPSRYDPVRHAERYPIPPNVLNGNRDRQIIQKENNFKQPGERYRSWDPARQERFICRWVDALSDPRITHEIRNIWISYWSQADKSVGMKLASRLNVRPTM

SEQ ID NO: 4724 - protein, 493 aa, Mesembryanthemum crystallinum
MDPYKYRPSSSYNTSFMTTKTGQPVWNDDSSLTVGARGPILLEDYHLLEKIASWDRERIPERVVHARGASAKGFFEVTNDITHLTCADFLRAPGVQTPVIVRFSTVIHERGSPETMRDPRGFALKFYTREGNFDLVGNNFPVFFNRDAMKFPDVVRAFKPNPKSHIQEMWRILDFCSHLPESLHTFAWFFDDVGIPINYRHMEGFGVHTFTMLNRAGKETYVKFHWKPTCGVKSIVTEEEAIQVGGANHSHATQDLYDSIAAGNYPEWRLFIQTMDPADEDKFDFDPLDITKTWPEDILPLQPVGRLVLNKNIDNFFTENEMLAFNPASIVPGIHFSHDKMLQARTFAYADTQRHRLGVNFLLLPVNAPKCAHHNDHHDGFMNFMHRDEEVNYFPSRSNVCHHAERFPIPSHTLTGRRERRIIPKENNFKQPGDRYRSWDPARQERYLARWVKALSDPKVTPEIRGVWVSWLSQSDRSLGMKLANKLNVRPTM

SEQ ID NO: 4725 - protein, 374 aa, Glycine max
  misc_feature (140)..(140): Xaa can be any naturally occurring amino acid
  misc_feature (227)..(227): Xaa can be any naturally occurring amino acid
  unsure (1)..(374): unsure at all Xaa locations
LVPREREREREREREREREREREREREREREREREREREREREREREREREREREREREREREREQRETGKNWFQGTADAVRLFTWVFEDAKHTHIENVLILAGDHLYRMDYMDLVQSHVDRNADITVSCAAVGESRASXYGLVKADGRGRIIQFSEKPKGADLKAMQADTSLLGLPPHDALGSPYIASMGVYVFNTDVLLNLLKWRYPTSNDFGSEIIPAASYFFXDYWEDIGTIKSFYDANLALTEENPMFKFYDPKTPIYTSPRFLPPTKIDKCRIVDAIISHGCFLRECTVQHSIVGERSRLDYGVELQDTVMMGADYYQTESEIASLLAEGKVPIGIGRNTKIRNCIIDKNAKIGKDVIIMNKDVSMIA

SEQ ID NO: 4726 - protein, 111 aa, Allium cepa
ELQGVVMEIVITFALVYTVYATAADPKKGSLGTIAPIAIGFIVGANILAAGPFSGGSMNPARSFGPAVAAANFAGHWVYWVGPLVGGALAGLVYGDIFIGTSYEPVAQDYP

SEQ ID NO: 4727 - protein, 477 aa, GIBBERELLA ZEAE PH-1
MSDITDEPDRNEAAPLLADSEGGNTGEWPTNNWWTELSLIARYTVPLVATYLLQYSFSVITTTAAGHLSPDDLAAAAIGVTTMTIGGLALYEGMATALDTLCAQAYGSGNKTGVGLHVQRMLLLMTIVTVPVAIFWISSPAFLTLILRQDDLAAKAGSFLRVSIIGIPGYASFEALKRFLQAQGDFNTAMLVLVVCAPVNALLSWLFAFRLNMGLEGAALGAAVANTLRPILLLLCIFFKKSTHQCWPGFTTRAFQDWGPMIRLSVAGSAVTLAEWAAFEIITVSTSYMGTIHLAAQTILTTTSIVMWHIPFSLGVAVSTRIGHLIGGGHVLLARRITILYGILFVGLGTLNGTILLSLRNYIGPFYTDDDAVRRVVADTMFAVAAFQVVDSIICGCNGVLRGLAKQSVAAWVVFIVNYLAAVPIAVWLELGPLQFGLKGVWSGIIGGCATIATIEIVYMIRVDWRKSAEIVKSRED

SEQ ID NO: 4728 - protein, 731 aa, Leptospira interrogans serovar Copenhageni str. Fiocruz L1-130
MEPNRTNFEHSQEIYEILVNQISDSMLVTDTQLEPPGPKILFVNPAFCKMTGYTKEDLIGKTPRMLQGPLTNRKIMRDLKRSLTQGKDFSGETINYKKDGSPYHVEWRISAIRDLSGNILCFISIQRDITEKVKKGESVTRHLRLEMGITSATQILLSTSVELKILKYAMEQFLVFLDSERLYLFKNSENAESAELYLEVKDPSLETSEIPVLQSIVYNQDYSRWKKIFSSGGYLQGNLSEFSENEKKFFDQREICSVTLIPLFVSDEWFGFAGFENFKTTNIVKEEIFTIRTFVDLISVFLERKNILEELKVHREKLEVLVSQRTEELNLQKEMAEKANKAKSEFLANMSHELRTPLNSIIGFSRLMQFPEGMERENRYLDLIFHSGVHLLNIINDILDLSRIEADKLVLNESDFDLKELISTSVEMILGEAITKKLEMTFEFFPKNANFEIRADPKRIRQVILNLLGNAIKFTDSTGKILITLNKLENNFQLAVQDSGIGIPTEEISKIFETFYQVKGEDRAAYEGSGLGLPIVKKIVEAHHGSIQVESALGKGSKFVVIFPSFTRLEHLNVSNSFSQEAEESPYPFHLKSVPILLSIQDRIYDRAIEKYFIHNSQEFISFRTVKDSSKIPQKSLDLHKILLYDTRLLLEETEVVKFLRSLLNEDSNFKHLILLETADIPLPFQEDLLPFFPNYTIQNPFSLDKLKSILIEIEKEIYLGNRTEKEEYSS

SEQ ID NO: 4729 - protein, 528 aa, Mesembryanthemum crystallinum
MAALKGGEDFGPFPVKEQLPGVDFCLNSNPPWHEAIALGFQHFLVMLGTTIMIPTILVPQMGGGPEEKALVIQTLLFVSGLNTLLQTMIGCRSSVVIGGSHAFIIPAISIIFSDQYGRIVDPYERFRVTMRAIQGAIMFASMLPVLVGVLGLWRIVVRFLSPLAAIPLVILTGLGLFQFGFPQLAKCVEVGLPALIVLVFISQYFSQLLKPFQVIGRRYAVILIVGLLWAFAAILTAAGAFNHSAPKTQFYCRTDRSGLISAAAWIRVPYPFQWGRPTLNVGNGFAMMAAAFVALVESTGTFITAARYGSATPLPPSVVSRGVSWLGVANFINGLFGAITGATASVENAGLLGLNQVGSRRVAQLSAVFMLFFSVLGKFGALLASIPLPIFAALYCVLFAYAASAGLSFLQFCNLNSFRSKFILGFSLFMGLSIPQYFNEFLLVTGRTPVFTRSVAFNSMLQVIFSSPATVAGIIALFLDLTLHRRHTATRRDSGRHWWKKFRTFDADTRSEEFYSLPWGLNKYFPSL

SEQ ID NO: 4730 - protein, 401 aa, Rhizobium leguminosarum
MDRRVVITGIGGLCGLGTNAASIWKEMREGPSAISPIITTDLYDLEGTVGLEIKAIPEHDIPRKQLVSMDRFSLLAVIAATEAMKQAGLSCDEQNAHRFGAAMGLGGPGWDTIEETYRSILLDGVTRARIFTAPKGMPSAAAGHVSIFLGLRGPVFGVTSACAAGNHAIASAVDQIRLGRADVMLAGGSDAPLTWGVLKSWEALRVLAPDTCRPFSADRKGVVLGEGAGMAVLESYEHAAARGATMLAEVAGIGLSGDAYDIVMPSIEGPEAAMRSCLADAELNPDDVDYLNAHGTGTVANDEMETAAIKRVFGDHAFQMSVSSTKSMHAHCLGAASALEMIACVMAIQEGVIPPTANYREPDPQCDLDVTPNVPREQRCGSMSNAFAMGGTNAVLAFRQV

SEQ ID NO: 4731 - protein, 557 aa, Schizosaccharomyces pombe
MCGILAVHHVAEDIEAFKPKALHLSKQLRHRGPDWSGKAIRNQTILCHERLAIVGVESGAQPLVSDDGKLVLTVNGEIYNHLKLRENLKGNYKFKTYSDCEVILYLYREHGPACANMLDGMFSWVLYDQDKDKVVAARDPIGITTLYQGFSSDSPDTAYFASELKALHPVCDKIIAFPPGHYYDSETKQTVRYFKPSWWDENKIPSNPVDYKLLRETLEASVRKRLMAEVPYGVLLSGGLDSSLIASIAARETEKLANSTSQSEEARTITAWPKLHSFAIGLPGSPDLLAARKVADFLHTFHHEHTFTIDEGLDALRDVIYHLETYDVTTIRASTPMYLLSRKIKAQGVKMVLSGEGSDEIFGGYLYFGNAPSREAFHSECVRRVKNLHLSDCLRANKSTMAWGLEARVPFLDKDFLEVALNIDPEEKMYINGRKEKYILRKAFDTTHDSSLQPYLPQDILWRQKEQFSDGVGYSWIDALKDTAELCISDDEFALPRREWGDDIPTTKEAFWYRKLFDEIFPRQCADTVMRWVPKAEWGCPEDPSGRYQAGHVAALK

SEQ ID NO: 4732 - protein, 613 aa, Escherichia coli
MEQNPQSQLKLLVTRGKEQGYLTYAEVNDHLPEDIVDSDQIEDIIQMINDMGIQVMEEAPDADDLMLAENTADEDAAEAAAQVLSSVESEIGRTTDPVRMYMREMGTVELLTREGEIDIAKRIEDGINQVQCSVAEYPEAITYLLEQYNRVEAEEARLSDLITGFVDPNAEEDLAPTATHVGSELSQEDLDDDEDEDEEDGDDDSADDDNSIDPELAREKFAELRAQYVVTRDTIKAKGRSHATAQEEILKLSEVFKQFRLVPKQFDYLVNSMRVMMDRVRTQERLIMKLCVEQCKMPKKNFITLFTGNETSDTWFNAAIAMNKPWSEKLHDVSEEVHRALQKLQQIEEETGLTIEQVKDINRRMSIGEAKARRAKKEMVEANLRLVISIAKKYTNRGLQFLDLIQEGNIGLMKAVDKFEYRRGYKFSTYATWWIRQAITRSIADQARTIRIPVHMIETINKLNRISRQMLQEMGREPTPEELAERMLMPEDKIRKVLKIAKEPISMETPIGDDEDSHLGDFIEDTTLELPLDSATTESLRAATHDVLAGLTAREAKVLRMRFGIDMNTDYTLEEVGKQFDVTRERIRQIEAKALRKLRHPSRSEVLRSFLDD

SEQ ID NO: 4733 - protein, 589 aa, Thiomicrospira crunogena XCL-2
MKEQALSRIKERLHYCYGADDAEVAYQEICDLLQSFSSEQTLPESRWSHEDVMLITYGDTFQKEGEVPLETLSRFLKTHIKDAINNVHILPFFPYSSDDGFSVIDYTLVNPDLGDWSQVEAIGESYQLMFDLVVNHISRESLWFTDFKANIPPFNEFFIAMEGTEDVSQVTRPRNTPLLVPAYTHRGRKMVWATFSADQIDLNFKNPKVLIKMLEVLLLYLEKGAKTIRLDAIAFLWKELGSKCIHLPETHQMVKLFRDVMSIVKPESILLTETNVPHLENLSYFGQQDEAHMVYQFALAPLVLHALHRGDGSYLTEWASTLDAPPKGCTFLNFTASHDGIGVRPVEGILPEREVEDLITSMHRLGGFVTTKSNPDGTESPYEINIALFSAFRETYHSNGPDQWQVDRFICSQNIMMTLQGIPAFYIHSLVAAPNDREGVEKTGRTRSINRRRWDYDYLQALIESGRTSNAEVLKRLTNILQRRKKHKAFHPDVPQHVIDLGQSFFALWRDEEGLRFPLLAIHNLTSEIKLIDLSKIAGIERFSYWVNLLDNRGVSSAENNFVLQPYQSVWLMPETVDDVSALWAPFTD

SEQ ID NO: 4734 - protein, 544 aa, Triticum aestivum
MSLHRFFCRSLVVLPRSSYGFCMICWRCNNILLDHLFTVNRHSILLNHLFTVYRHGLAKIFDLSVYVTCPHDDSLCPLVLIIFFLCRSWVVYLYPPAMGKEKTHINIVVIGHVDSGKSTTTGHLIYKLGGIDKRVIERFEKEAAEMNKRSFKYAWVLDKLKAERERGITIDIALWKFETTKYYCTVIDAPGHRDFIKNMITGTSQADCAVLIIDSTTGGFEAGISKDGQTREHALLAFTLGVKQMICCCNKMDATTPKYSKARYEEIVKEVSSYLKKVGYNPDKVPFVPISGFEGDNMIERSTNLDWYKGPTLLEALDQINEPKRPSDKPLRLPLQDVYKIGGIGTVPVGRVETGVIKPGMVVTFGPTGLTTEVKSVEMHHESLLEALPGDNVGFNVKNVAVKDLKRGFVASNSKDDPAKEAANFTSQVIIMNHPGQIGNGYAPVLDCHTSHIAVKFAELVTKIDRRSGKELEALPKFLKNGDAGIVKMIPTKPMVVETFATYPPLGRFAVRDMRQTVAVGVIKGVEKKDPTGAKVTKAAIKKK

SEQ ID NO: 4735 - protein, 426 aa, Brucella melitensis 16M
MVKADMTKDIAQVMAEVGRKAKAAAAPLSIATNEQKNKALNAAADAILEARADILEANRLDLANAEKNGMAASFVDRLTLNEARIDAIAEGIRAIATLPDPVGEVIAEWDRPNGLHIERVRTPLGVIGVIYESRPNVTADAGALCLKAGNAVILRGGSDSAHSSAAIYKALVKGLEAANLPADAIQIVPVTDRAAVGEMLKGLGGAIDVIVPRGGKSLVARVQSEARVPVFAHLEGICHLYIDKSADLDMARRIALDAKMRRTGICGAAETLLVDRAVASTHLAPILGDLAAGGCEIRGSAEVLALYPAAKPATEEDWSTEYLDAIISVALVDGISGAIDHINRYSSHHTEAIVAEDAQTVARFFNEIDSAILLHNASTQFADGGEFGMGAEIGIATGKMHARGPVGVEQLTSFKYRVRGSGQVRG

SEQ ID NO: 4736 - protein, 240 aa, Bradyrhizobium japonicum USDA 110
MDMKKYAAEAIGTFWLTFAGCGSAVIAAGFPQVGIGLVGVSLAFGLSVVTMAYAIGHISGCHLNPAVTVGLAAGGRFPAGQILPYVIAQVCGAIVAAELLYIIASGAPGFDVTKGFASNGYDAHSPGQYSMMACFLTEVVMTMMFLFIIMGATHGRAPAGFAPLAIGLALVMIHLVSIPVTNTSVNPARSTGPALFVGGWAMAQLWLFWVAPLIGGALGGVIYRWLSEEPTGVVAGAKAA

SEQ ID NO: 4737 - protein, 200 aa, Haemophilus influenzae 86-028NP
MLDYEIFNPYEGLIFDMDGTLIDTMPVHAQAWTMVGKKFGYEFDFQIMYNFGGATVRTIAGEMMKAANMPLDRIEDVLAAKRELSYQLIPTQSKLLPTFEIVKSFHQKKPIALGSGSHRKIIDMLMDKLAIAPYFNAIVSADDVKEHKPHPETFLRCAELIQANPSRCIVFEDADLGVQAGLSAGMDVFDVRTREIISPR

SEQ ID NO: 4738 - protein, 267 aa, Salmonella enterica subsp. enterica serovar Paratyphi A str.
MTIPAFGLGTFRLKDDVVIASVKTALELGYCAVDTAQIYDNEAAVGQAIAESGVPRNELYITTKIWIENLSKDKLIPSLKESLKKLRTDYVDLTLIHWPSPGDAVPVEEFMQALLEAKKQGLTREIGISNFTIPLMEKAIAAVGADHIATNQIELSPYLQSRKVVDWAKAHGIHITSYMTLAYGKALKDEVIARIAAKHNATPAQVILAWAMGEGYSVIPSSTRRENLASNLLALELHLDAEDRAAIAALDCNDRLVSPEGLAPEWD

SEQ ID NO: 4739 - protein, 547 aa, Klebsiella pneumoniae
MAAKDVKFGNDARVKMLRGVNVLADAVKVTLGPKGRNVVLDKSFGAPTITKDGVSVAREIELEDKFENMGAQMVKEVASKANDAAGDGTTTATVLAQAIVNEGLKAVAAGMNPMDLKRGIDKAVLAAVEELKALSVPCSDSKAIAQVGTISANSDETVGKLIAEVDKVGKEGVITVEDGTGLEDELDVVEGMQFDRGYLSPYFINKPDTGAVELESPFILLADKKISNIREMLPVLEAVAKAGKPLVIIAEDVEGEALATLVVNTMRGIVKVAAVKAPGFGDRRKAMLQDIATLTGGTVISEEIGMELEKATLEDLGQAKRVVINKDTTTIIDGVGEESAIQGRVAQIRKQIEEATSDYDREKLQERVAKVAGGVAVIKVGAATEVEMKEKKARVDDALHATRAAVEEGVVAGGGVALVRVAAKLAGLTGQNEDQNVGIKVALRAMEAPLRQIVSNAGEEPSVVANNVKAGDGNYGYNAATEEYGNMIDFGILDPTKVTRSALQYAASVAGLMITTECMVTDLPKSDAPDLGAAGGMGGMGGMGGMM

SEQ ID NO: 4740 - protein, 298 aa, Arabidopsis thaliana
MATNGSASSAHVSQKEADVRMMCAAEVHLGTKNCNYQMERYVFKRRNDGIYIFNLGKTWEKLQMAARVIVAIENPQDIIVQSARPYGQRAVLKFAQYTGANAIAGRHTPGTFTNQMQTSFSEPRLLILTDPRTDHQPIKEGALGNIPIIAFCDTDSPMRFVDIGIPANNKGKHSIGCLFWLLARMVLQMRGTIAAGQKWDVMVDLFFYRELEETKPEDEDEAGPQAEYGALPAPEYGMVGGDQWTTAQIPDAAWPGEGQAPISAAPAAASWSDSAAAPADGGWEAAAPPSGAPAAGWE

SEQ ID NO: 4741 - protein, 96 aa, Actinobacillus pleuropneumoniae
MTLRPLHDKVILKREEVETRSAGGIVLTGSAATKSTRGKVIAVGTGRLLENGSVQALAVKVGDVVIFNEGYGVKSEKIDGEEVLILSENDILAIVE

SEQ ID NO: 4742 - protein, 547 aa, Actinobacillus pleuropneumoniae
MAAKDVKFGNDARVKMLKGVNVLADAVKVTLGPKGRNVVLDKAYGAPTITKDGVSVAREIELEDKFENMGAQMVKEVASKANDAAGDGTTTATVLAQAIVNEGLKAVAAGMNPMDLKRGIDKAVVAVVEELKAISKPCETSKEIEQVGTISANSDETVGKLIAQAMEKVGKEGVITVEDGTGLDDALDVVEGMQFDRGYLSPYFINKPEAGTVELENPYIILVDKKISNIREILPVLEAVAKAGKPLLIVAEDIEGEALATLVVNTMRGIVKVAAVKAPGFGDRRKAMLQDIAILTAGTVISEEIGMELEKATLEELGQAKRVVITKDNTTIIDGIGDEAQIKARVAQIRQQIEDSTSDYDKEKLQERVAKLAGGVAVIKVGAATEVAMKEKKDRVDDALHATRAAVEEGIVPGGGVALVRAASKVATTLTGDNEEQNVGIKLALRAMEAPLRQIVTNAGEEASVVARNVKDGNGNYGYNAGTEQYGDMLEMGILDPPKVTRSALQFAASIAGLMITTECMITDLPKEEKLDPAAAMGGMGGMGGMM

SEQ ID NO: 4743 - protein, 407 aa, Oryza sativa (japonica cultivar-group)
MEAPPGPEPMELDAPPPPAAVAAAAATAGISEKVLQKKEEGGGDAVTGHIISTTIGGKNGEPKRTISYMAERVVGTGSFGIVFQAKCLETGETVAIKKVLQDRRYKNRELQLMRAMEHPNVICLKHCFFSTTSRDELFLNLVMEYVPETLYRVLKHYSNANQRMPLIYVKLYIYQLFRGLAYIHTVPGVCHRDVKPQNVLVDPLTHQVKLCDFGSAKVLVPGEPNISYICSRYYRAPELIFGATEYTTSIDIWSAGCVLAELLLGQPLFPGESAVDQLVEIIKVLGTPTREEIRCMNPNYTEFKFPQIKAHPWHKIFHKRMPPEAIDLASRLLQYSPSLRCTALDACAHSFFDELREPNARLPNGRPFPPLFNFKHELASASPELIHRLIPDHIRRQHGLNFAHAGS

SEQ ID NO: 4744 - protein, 261 aa, Oryza sativa
ARGSNPPPPPPFALFNSLFFFLRLPPKLLVRLATRGRRRRRQGREEIESRSPSSMSTSRRRTLLKVIVLGDSGVGKTSLMNQYVHKKFSQQYKATIGADFVTKEVLIEDRLVTLQIWDTAGQERFQSLGVAFYRGADCCVLVYDVNSNRSFDTLNTWHDEFLNQASPSDPKTFPFILLGNKIDVDGGKSRVVSEKKAMEWCSSKGNIPYFETSAKEDRNVDSAFLSVAKLALEHERDQDIYFQTVVPDPVPEAEQRSGCAC

SEQ ID NO: 4745 - protein, 146 aa, Triticum aestivum
  misc_feature (124)..(124): Xaa can be any naturally occurring amino acid
  unsure (1)..(146): unsure at all Xaa locations
MDPYKYRPSSSFNAPMWSTNSGAPVWNNDNSLTVGSRGPILLEDYHLVEKIADFDRERIPERVVHARGASAKGFFEVTHDVSHLTCADFLRAPGVQTPVIVRFSNVITKRGSPETLRDPRGFAXKFYTREGNGTGGNNSRLSIRDG

SEQ ID NO: 4746 - protein, 456 aa, Bacillus cereus ATCC 14579
MYKYLHILNDIENMIKNGEIREGKKLPSIRSLVTQYECNKATVIRALHELEKRHIIYSVPQSGYYVVKKSESTIENNEIIDFASSAPDPDVFPYLDFQHCINKAIDTYKNDLFVYGTPKGLPSLIPVIQKQLANYQVFTKEENIFITSGVQQALAILTSIPFPNGNETVLIEQPTYHLYIDYLEINKVPVIGIKRTNEGIDLNELEQIFQTGKIKFFYTIPRYHHPLGTSYSKDEKEKITLLAKRYNVFIVEDDYLADLETDSKADPLYSLDNCSHVIYLKSYSKIIFPGLRVGVAVIPPSIANAFYTYKKILDIDSPMISQAALEIYIKSGMFERHKSKINSSYYNRSIKLAETLEKVQNEDPSLFTYNRQNTFGIHTCLEMQKNTVTETLIQKLGGRQISVDTIDKNYMRNFPKEKLLKLNVSNVKEDKIEEGIRKVIEEIKQSGRLDFQFKKE

SEQ ID NO: 4747 - protein, 414 aa, Bifidobacterium longum NCC2705
MTKNPKILSIVLAGGEGTRLMPLTRDRAKPAVPFGGVYRLIDFPLSNLVNSGYRQVVVLTQYKSHSLDRHISQVWRFSPLLGSYVSPVPAQQRLGKHWYLGSADAIYQTINIIEDVQPDIVVIVGADHVYRMDFEQMVQQHIESGAEFTVAGIRQPIEESNQFGVIEVDPDHPNMIKNFQEKPPTTTGLPDNPNQILASMGNYVANTKALFEALALDEKAADTKHDMGGDIAPYFASRNEAGVYDFNSNEIPGSTATDHAYWRDVGTIKQFYDAHMDLIAYVPEFNLYNQDWPIYTMSGNLPPAKFVHAGRDRLGHATDSIVSPGVIVSGGEVHHSVLSPNVRIHSWAQIVDSVLFDGVVINRRARVYKAILDKNVVLTENSTVGIDTEHDLARGFTVTPDGITVVPKNTIVDD

SEQ ID NO: 4748 - protein, 526 aa, Mesembryanthemum crystallinum
MAALKGGEDFGPFPVKEQLPGVDFCLNSNPPWHEAIALGFQHFLVMLGTTIMIPTILVPQMGGGPEEKALVIQTLLFVSGLNTLLQTMIGCRSSVVIGGSHAFIIPAISIIFSDQYGRIVDPYERFRVTMRAIQGAIMFASMLPVLVGVLGLWRIVVRFLSPLAAIPLVILTGLGLFQFGFPQLAKCVEVGLPALIVLVFISQYFSQLLKPFQVIGRRYAVILIVGLLWAFAAILTAAGAFNHSAPKTQFYCRTDRSGLISAAAWIRVPYPFQWGRPTLNVGNGFAMMAAAFVALVESTGTFITAARYGSATPLPPSVVSRGVSWLGVANFINGLFGAITGATASNAGLLGLNQVGSRRVAQLSAVFMLFFSVLGKFGALLASIPLPIFAALYCVLFAYAASAGLSFLQFCNLNSFRSKFILGFSLFMGLSIPQYFNEFLLVTGRTPVFTRSVAFNSMLQVIFSSPATVAGIIALFLDLTLHRRHTATRRDSGRHWWKKFRTFDADTRSEEFYSLPWGLNKYFPSL

SEQ ID NO: 4749 - protein, 465 aa, Glycine max
MTISSLAPKAERKKSRKSKAVVNENAPLLPKSHVQESDAGFDDFNGASFSGAVFNLSTTIIGAGIMALPATLKQLGMIPGLLAIIIMALLTEKSIELLIRFTRAGKSASYAGLMGDSFGNYGKALVQICVIINNIGVLIVYMIIIGDVLSGTSSSGDHHYGILEGWFGVHWWTGRTFVVLFTTLAIFAPLASFKRIDSLRFTSALSVALAVVFLVIAVGIAVVKIFSGGIAMPRLFPVTTDVASFFRLFTVVPVFVTAYICHYNVHSIDNELEDSSQMRGVVQTALVLCSSVYVMISFFGFLLFGEGTLDDVLANFDTNLGIPFGSVLNDAVRISYAAHLMLVFPVVFFPLRLNIDGLLFSKSRPLVLDNFRFASLTIALIGVIFLGANFIPSIWDAFQFTGATAAVCIGFIFPAAITLRDRYNIATKSDKILSVIMIVLAVFSNVVAIYSDAYALIKQNKTSRE

SEQ ID NO: 4750 - protein, 475 aa, Hordeum vulgare
MAGGFRVLHLVRPFLGFLPEVQSADRRIPFREKLIYTVISLFIFLVCSQLPLYGIHSTTGADPFYWLRAILASNRGSVMELGITPIVTSGMVMQLLVGSKIIEVDNSVREDRALLNGAQKLLGILIAIGEAVAYVLSGMYGSVSQLGTGNAILIILQLFFAGIIVICLDELLQKGYGLGSGISLFIATNICENIIWKAFSPTTINSGRGAEFEGAVIGLFHLLITRTDKVRALREAFYRQNLPNVTNLLATVLVFLIVIYFQGFRVVLPVRSRNARGQQGSYPIKLFYTSNMPIILHSALITNLYFISQLLYKKFSGNFLVNLLGIWKESEYSGHSIPVGGLAYYVTAPSSLADVVANPFHALFYVVFMLSACALFSKTWIEVSGSSARDVARQLKEQQMVMPGHRESNLERELNRYIPTAAAIGGVCIGALTVLADFMGAIGSGTGILLAVTIIYQYFETFEKERATELGFFGF

SEQ ID NO: 4751 - protein, 661 aa, Candida albicans SC5314
MARDIDNHLLFEVATEVAHKVGGIYSVLKSKAPVTVAEYRERYTLLGPLHYDSAQIEVEELPVTDPHIKQTLDSMSSKGIRWLYGRWLIEGAPRVLLFDIWSAGHYLNEWKADLWNVAGIPTPDHDSETNDAILLGYLVAWFLGELVYNDRDRAVICQCHEWLAGIALPLCRKRRIDVTTIFTTHATLLGRYLCAGSTDFYNNLDKFDVDAEAGKRGIYHRYCIERSATHSADVFTTVSDITAYEAEHLLKRKPDGVLPNGLNVVKFQAVHEFQNLHAIKKAKINEFVKGHFYGNYDFDLDNTLYFFIAGRYEFRNKGCDFFIESLARLNHKLKEAGSKTTVVAFIIMPGKTQSYTVETLKGQAVVKQLESTIGEVQKKVGERLFEYCARYPNTDHHGNDEVPTIDELIKPADRVLLKRRIFALKRDGLPPIVTHNMVDDSTDPVLNHIRRVQLFNKPEDRVKIIFHPEFLNANNPILSLDYDEFVRGCHLGVFPSYYEPWGYTPAECTVMGIPSITTNLSGFGCYMNDLVENPTDYGIYIVDRRMKSVDESINQLTDYMFDFCAKSRRQRINQRNRTERLSVLLDWRSVHSEYSKARLLALKRAYPDYVGEKVVESKMKITRPMSVPGSPRSLLLTPGDLGSLQDANQDISYFELGEEET

SEQ ID NO: 4752 - protein, 232 aa, Sinorhizobium meliloti 1021
MFKKLCAEFLGTCWLVLGGCGSAVLASAFPQVGIGLLGVSFAFGLTVLTMAYTVGGISGGHFNPAVSLGLAVAGRVPAASLVSYVIAQVAGAIIAAAVLYVIATGKADFQLGSFAANGYGEHSPGGYSLTAALVTEVVMTFFFLIIILGSTHRRVPAGFAPIAIGLALTLIHLVSIPVTNTSVNPARSTGQALFVGGWALSQLWLFWIAPLFGAAIAGIVWKSVGEEFRPVD

SEQ ID NO: 4753 - protein, 553 aa, Bifidobacterium longum NCC2705
MVRRTHGNSQEHVTKHIFVTGGVVSSLGKGLTASSLGRLLRSRGIHVLQQKLDPYINVDPGTMNPFQHGEVYVTEDGAETDLDIGHYERFLDVFLSQKANVTTGQIYQEVLRKERAGEYLGQCVQVIPHITNEIKSRMRAQASDDVDVIITEIGGTVGDIESQPFLEAAREVRRDLGPDNCMFVHVSLVPYISAAHELKTKPTQHSVMMLRQLGISPDALVLRSDRPLNQSIKDKISLMCDVDAEGVVNCVDAPSIYDVPKILFEEGLDAYVVRELGLPFHDVDWDEWADLLERVHHPKHEVNIAIVGKYIDLPDAYLSVTEAIKAGGFANWAKVNVKWVAADRCETTEGAAAALDNVDGIVIPGGFGIRGIDGKIGALKFARETKLPALGLCLGLQSMVIEYSRHVLGIEDANSSEFEPDCANPVIATMEEQKDIVAGKGDMGHTMRLGSYPAELEEGSLVAELYGTTHVTERHRHRYEVNVAYKDRLREGGLRISGQSPDGELTEFVELPQDVHPFYVATQAHPEFKSRPTKPHPLFAGLVKAALDHQAAR

SEQ ID NO: 4754 - protein, 552 aa, Anabaena variabilis
MAKPIEFTLFAPYNKGAALIASFSDWQEIPMKKGDDGYFRTTVELEDGTYQYKFRVQTRSWFFEEDQWVDVTDPYATDIDESSGKDNSIARIKDGEKIVDTYVWQHDDKPLPADHELVIYELHVGDFSGGEDDPYARGKYKHVIEKLDYLCELGINAIELLPVKEYPGDYSWGYNPRYFFATESSYGSTADLKKLVDECHQRGIRIIMDGIYNHSEASSPLTQIDHDYWYHHEPRDPDNNWGPEFNYEHYDENLETYPARKFIGDTVRYWVGEYHLDGIRYDAARQIANYDFMHWIAQEAKKTAGAKPFYNVAEHIPETTSITNLDGPMDGCWHDSFYHTIKAHICGDTFDLENLKDVIDPKRQGFLGATNVVNYLTNHDHDHIMVELGNREIFHDEAFRRAKLGTAILMTAVGVPLIWMGEEFGEYKPKQQDQSKIDWTLLGNDLNRSLFDYHKGLIGLRKNNHALYTENIDFIHENPEAKVLAYSRWNDEGSRVVVVTNFSEDFLAGYHVPNFPSGGTWHEWTGDYDVEAGDDGIITDIGPYEAKVFVWQ

SEQ ID NO: 4755 - protein, 280 aa, Triticum aestivum
  misc_feature (53)..(53): Xaa can be any naturally occurring amino acid
  unsure (1)..(280): unsure at all Xaa locations
IAKGHGIKVGPQLGKRGFPPKATLKIPRAPKNGENLFLTPSKEGLGFPFKRGXKKWFLEPLEAMGETKVLGMKTALESKGDVEFKVVPLGKDVTIKRIMVSINMEEKKGHQKKFTPSVIEPSFGIGRIIYCLFEHCFYQRTGKTDDEQLNVFRFPPLVAPIKCTVFPLVKVEKFDVVAKKISKALTTAGISHIIDITGTSIGKRYARTDEIGVPLAITVDSTTSVTVRDRDSKDQIRVEVDEVALVVKEVTDGQSTWADIMWRYPAHTALATDEEEASET

SEQ ID NO: 4756 - protein, 542 aa, Leptospira interrogans serovar Copenhageni str. Fiocruz L1-130
MEYTLSRTKFIFVTGGVSSSLGKGVTVAALGCLLESRGYTVSLQKMDPYINIDPGTMSPYQHGEVYVTADGAETDLDLGYYERFTHSKLTRKNSVSTGQIYNTVIQRERKGDYLGRTVQVVPHITNEIRNRMYIVAREENPDFIIVEIGGTVGDIESIPFLEAIRQMRYEHGSSNVLFVHLTLVPTITAAGEAKTKPTQHSVKELLGLGIQPDILVCRVSQPMTKEMKNKLSLFCNVKEENVISASDISTSIYEIPKMYKEEKLDEVVLKTMGMELRESNFSEWDKMVKGLLTTKQTVQIAVVGKYISLQDAYRSIYESLSHGGIAHDTKVEFIKVDPENLNKDSYVEILKKVHGILVPGGFGDRGIEGKILAIQYARTNGIPFLGICLGMQCAVVEYGRNVLGLKDANSTEIRPDTEHPVISLLEEQNDIEQMGGTMRLGSYPCKVKENTLSYSEYKSILIHERHRHRFEFTNRYRKQYEENGMIIAGTSPDDNLVEIVEIPKHNWFIGVQFHPEFQSKPTLPHPLFAGFIRASVKYSKKG

SEQ ID NO: 4757 - protein, 656 aa, Thermococcus kodakarensis KOD1
MYKVFGFEENFIHGRVARVEFSLPDAGRWDYAYLLGNFNAFNEGSFRMKHEDKRWIIEIKLPEGLWRYAFSAGGEFLLDPENPEKELYRRPSYKFEREVSLAKIAGNDMVFHRPALLYLYSFGDRTHVLLRSKKGKVDAAYLVTDDTHVKMRKKADGEVFEYYEAVLQETEKLRYSFEVFLKEGKSLTLGPFEAAPFRLDAPSWILDRVFYQIMPDRFAKGRDHEPPFLSWEYYGGDLWGIVEKIDHLEELGVNALYLTPIFESMTYHGYDITDYLRVAERLGGEEAFRELVKALKSRDIKLVLDGVFHHTSFFHPFFRDVVERGEESEYADFYRVKGFPVVSEEFIRVLKSDLPPMEKYQTLKKMGWNYESFFSVWVMPRLNHDSPKVREFVARVMNYWLEKGADGWRLDVAHGVPPGFWREVREGLPDDAYLFGEVMDDPRLYLFGVFHGVMNYPLYDLLLRFFAFGEIGATEFINGIELLSAHLGPAEYFTYNFLDNHDTERFIDLAGKERYLCALTFLMTYKGIPAIFYGDEIGLRGSGEGMSAGRTPMSWDEEKWDFQILRQTMKLIELRRSLKSLQVGSFRVIGAGEKWFVYERKAGSERVLVGINCSWNDVETPVPSNGSNEQIKIPAFSSIIRVKDSMNVHIGSDLQE

SEQ ID NO: 4758 - protein, 478 aa, Rubrobacter xylanophilus DSM 9941
MLRKTFVLAAASALLTLALPALGLAQEEAPPGNRELSLALDTVWVLVAAVLVLFMQAGFAMLEVGFSRMKNVGSVVAKILANLAIAAVLFWAVGFAVAFGTGNALFGTQGWFLAVPEGAVDEVYAGLAWTQVPLSAKFLFQVAFCAVSLAIVWGTMLERTKFAVYLVFAVVFAGIIYPMVGHWVWGGGWLTELGMQDFAGSTVVHLSGAMAALAGTLLLGPRLGKYDDEGRPVTIPGHNMPLAVLGVLILWIGWYGFNPGSTMAATPQIADIALTTTLAAACGVLGAMAMSYLYRRHVDVGMAGNGAIAALVAITAPCAFVAPWASAIIGFVAGVIMYATLLFVDRIGVDDPLGAIAAHGMGGVWGTLSAGLFTTPELAAVGRPGLLYGGGLYQLGVQALGILAAGGFVFLASLLVFAALKATIGLRVKPEQELNGLDVSEHGVYGYAGFPEHLIATDHPVNGNGGGAPRNAPAEGAA

SEQ ID NO: 4759 - protein, 588 aa, Bacillus thermoalkalophilus
MLKEAIYHRPKDNFAYAYNEKTLHIRLRTKKNDIETVYLLYADPYEWVNGVWQLNRAPMVKSGSDDLFDYWFIEVVPPYRRLRYGFELTAGSETIVYTEKGFYNEAPTDDTAYYFCFPFLNKIDVFHAPEWAKDTIWYQIFPERFANGNPSLNPEGTLPWGSEEPTPTSFFGGDFEGIIQHLDYLVELGINGIYFTPIFYAPSNHKYDTIDYFEIDPHFGDKQTFKKLVDLCHQKGIRVMLDAVFNHCGYYFAPFQDVLKNGNNSKYKDWFHIHEFPLRTVPRPNYDTFAFVEQMPKLNTENPEVKQYLLDVATYWIREFDIDGWRLDVANEVDHQFWREFRQAVKAIKPDVYILGEIWHDAMPWLRGDQFDAVMNYPFTNGVIRFFAKDEIRAEQFANIIMNVLHSYPANVNEVAFNLLGSHDTPRILTTCNNDVRKVKLLFLFQLSFTGSPCIYYGDEIGMTGGQDPGCRKCMIWDESKQDRDILEHVKKLISLRKTHPALGSQGNITFIDANNETNHLIYTKTYKHETILVMINNNNKNIEVTVPLSLKGKRLTNLWTNEQFAVEAKTLRANIPPYGFLLNQVEN

SEQ ID NO: 4760 - protein, 444 aa, Thiomicrospira crunogena XCL-2
MLSKLLTIFILSTSLILTACAKEPAMNPSPSSSDKTDYIVLGMGCFWGAEKRMGEVPGVITVESGYAGGDQKNAGYYDVLGLEKEIRYGKSDLRNHAEVVKVTFDPQKTDLKTVLIKFWESHDPTQGDRQGNDIGTNYRSAIYTHSEAQTAIAKKTETVYQKALDKAGFGKITTEIAPLRNYITAEEYHQDYLKKNPNGYCGLGGTGVKYPAASPDDASAMPEEAPVAKRLLGRDLSAERQLVVFEAEDCAFCKKFKAEVLSTWQSEVPIVTTLNPNVPEGWHLEKALFATPTIVLFEQGKEVSRYTGYNGDKERFWKWLGFRLLTPEQRRIAFEQGTEYAFTGSHLDEKRSGTFVDPITGAALFRSDTKFESGSGWPSFFNPVEGAITEHKDTSHGMTRIEVRSASSGIHLGHVFNDGPPPTHKRYCINGNVLKFVPDEKAEQ

SEQ ID NO: 4761 - protein, 537 aa, Oryza sativa (japonica cultivar-group)
MARGSGAGGGGGGGGGGLELSVGVGGGGARGGGGGEAAAAVETAAPISLGRLILSGMVAGGVQYGWALQLSLLTPYVQTLGLSHALTSFMWLCGPIAGMVVQPCVGLYSDRCTSKWGRRRPYILTGCVLICLAVVVIGFSADIGYAMGDTKEDCSVYHGSRWHAAIVYVLGFWLLDFSNNTVQGPARALMADLSGRHGPGTANSIFCSWMAMGNILGYSSGSTNNWHKWFPFLKTRACCEACANLKGAFLVAVIFLSLCLVITLIFAKEVPFKGNAALPTKSNEPAEPEGTGPLAVLKGFRNLPTGMPSVLIVTGLTWLSWFPFILYDTDWMGREIYHGDPKGTDPQIEAFNQGVRAGAFGLLLNSIVLGFSSFLIEPMCRKVGPRVVWVTSNFLVCIAMAATALISFWSLKDFHGTVQKAITADKSIKAVCLVLFAFLGVPLAVLYSVPFAVTAQLAATRGGGQGLCTGVLNISIVIPQVVIALGAGPWDELFGKGNIPAFGLASGFALIGGVAGIFLLPKISKRQFWSVSMGGGH

SEQ ID NO: 4762 - protein, 316 aa, Lavatera thuringiaca
MATLTVPSTLPSVSEDCEQLRKAFSGWGTNEDLIINILGHRNADERNSIRKAYTETHGEDLLKALDKELSNDFERLVLLWTLDPPERDALLANEATKRWTSSNQVIMEIACRSSSDQLLRARQAYHVRYKKSLEEDVAHHTTGDFRKLLLPLVSSYRYEGDEVNMTLAKTEAKLLHEKISNKAYSDDDVIRVLATRSKSQINERLNHYKNEYATDINKDLKADPKDEFLALLRSTVKCLVYPEKYFEKVLRLAINKRGTDEGALTRVVSTRAEVDLKIIADEYQRRNSVPLTRAIVKDTNGDYEKLLLVLAGEVEA

SEQ ID NO: 4763 - protein, 491 aa, Arabidopsis thaliana
MSDLQANKDETTVDRQSSSSVDLDGPSPLRKMISVASIAAGIQFGWALQLSLLTPYVQLLGVPHKWPSFIWLCGPVSGLLVQPSVGYFSDRCTSRFGRRRPFIATGALLVAVSVVLIGYAADFGHSMGDKIDKPVKMRAVVIFALGFWILDVANNTLQGPCRAFLGDLAAGDAQKTRTANAFFSFFMAVGNVLGYAAGSYTNLYKIFPFTMTKACDIYCANLKSCFFLSITLLLVVTIIALWYVEDKQWSPKADSDNEKTPFFGEIFGAFKVMKRPMWVLLIVTALNWIAWFPFLLYDTDWMGREVYGGDSKGDDKMKKLYNQGIHVGALGLMLNSIVLGVMSLGIEGISRKMGGAKRLWGAVNIILAVCLAMTVLVTKKAEEHRRIAGPMALPTDGIRAGALTLFALLGIPLAITFSIPFALASIISSSSGAGQRLSLGVLNMAIVIPQMIVSFGVGPIDALFGDGNLPGFVVGAIAAAVSSIVAFTVLP

SEQ ID NO: 4764 - protein, 334 aa, Zea mays
  misc_feature (96)..(96): Xaa can be any naturally occurring amino acid
  unsure (1)..(334): unsure at all Xaa locations
MADASPRTETSTDDTDDNNGLEPGRGGLVASDSSDRSKDKHGDQKTLRRLAQNREAARKSRLRKKAYVQQLENSRLKLTQLEQELQRARQQIFSLXGIFISSSVDQSHSMSGNGALAFDMEYARWLEEHNRQISELRAGVSAHASDTDLRSVVDKIMSHYDEIFRLKGNAAKADVFHVLSGMWKTPAERCFLWLGGFRPSEVLKLLSTQLEPLTEQQLSGISNLQQSSQQAEDALSQGMEALQQSLAETLAGSLSSSGSTGNVANYMGQMAMAMGKLGTLENFLRQADNLRLQTLQQMQRILTTRQSARALLVISDYSSRLRALSSLWLARPKE

SEQ ID NO: 4765 - protein, 268 aa, Brassica napus
MAASIGIMDSAYFVGRNEILTWINDRLHLNLSRVEEAASGAVQCQMLDMTFPGVVPMHKVNFDAKNEYDMIQNYKVLQDVFNKLQITKPLEINRLVKGRPLDNLEFLQWLKRFCDSTNGGIMNENYNPVERRSKGGREKSVKGSNKMPKSLQTNNTPPNSSSVGLTKASGPKPANTAQVQALSKELTDLKLSYDHLGKERDFYFSKLRDVELLCQTPELEDLPIVVAVKKILYATDANESALEDAQEYLNQSLGVKAEDEENGEQEDY

SEQ ID NO: 4766 - protein, 509 aa, Legionella pneumophila str. Lens
MNWKRFLIAAMTKKKYQVFLNDTKHPKEARERLWNSEIAPLLEKSSYWQKLLKDQSPVVLNDFGITEYEDYQEGLLEAQHSTIQPFNGEELIFWSETSGTSGVRKFFPITDSFQKQFQRTMAPYIYSLTQRFPGFFKEKMLYLVAVDTHKTTPAGIPTGWISNFNYRHLPSFIKRFYAMPDEVFDSHEAYNQWAPIYGLASDLSAVFAVTPMVIDAFYQRCIDGFKEYLPYLLGNKPLPSHLPPLKMTRKRQRHLQALAKVDHLSFKQLWPSLEMAGCWTSGLCEYPAQQLQKLLGSEIKLVDGTYSATEGWLTVPVETNSVGGILHPGAHIVEFIPEGAAIEKENLLQCWELEVGKKYEVFLTTAMGFIRYRLKDIVKCTGYLNSSPKLEFCYKTQLLKLETCSITGRELQGAVLATSLNIEPYWYFARNSVGNRIVLVTDDEAEISELSLKKLHEQLIHISPTYAHSVETEEVLPVTLLQLPKEKLLAGMHGQTKPKFISQEVIAER

SEQ ID NO: 4767 - protein, 296 aa, Helicobacter hepaticus ATCC 51449
MKMPSMIRVALVQQAYKGNKEAMIESSAAMIAKAAHSNAQLVALQELHTHEYFCQSENPQFFDYAMDFDKDVAYFSALAKKHKIVLITSLFEKRAAGLYHNTAVVFDIDGSIAGKYRKMHIPDDPQFYEKFYFTPGDLGFEPISTSLGKLGVLICWDQWYPEAARIMALKGAQMLIYPTAIGWFDEDTLEEKTRQKEAWIAVQRGHSVANGLPTMAINRVGFESDSSKVGNGIRFWGSSFVFGAQGELLAQGSENKEEIILVEIDLQRSEEVRRMWPFLRDRRIESYSEILKRFCD

SEQ ID NO: 4768 - protein, 467 aa, Yersinia pseudotuberculosis IP 32953
MKNDSSTLKRGLSARHIRFMALGSAIGTGLFYGSAEAIRLAGPAVLLAYLIGGAAVFMVMRALGEMAVHDPVAGSFGHYASRYLGPLAGFLTGWTYTFEMVVVALADVTAFGIYMGLWFPDAPQWVWVLSIIFFIGALNLCSVKVFGEMEFWLSLLKVAAIIAMIAAGLGIMMFGFGAGHDSTGVSNLWAHQGFMPNGITGVIASFAVVMFAFGGIEIIGVTASEAKDPGKVLPRAINTVPIRILLFYVLTLFVLMAIYPWKSIGQNGSPFVEIFSSLGINSAANILNLVVITAAISAINSDIYGAGRMMYGLAQEGLAPKSFSRLTRNGVPYMTILVMAITLLCGVVLNYLIPKNVFLVIASIATFATVWVWLMILVSQVAMRRSMSKAQVARLAFPVPFWPLAPILTILFMAFIIAVLGYFPATRIAMYVGLAWVALMTLAWWIWLRKAPSCVIQERVKSSEIPS

SEQ ID NO: 4769 - protein, 486 aa, Rhizobium etli
MFPLTRINALCLRYTKASSSRRPPTTGGASARRSEMSRSLLALAALFIAGESLLSAPAVADSLSLAPMLQRVVPSVVSISVQGRELDDADATLADPFYRKFFGLPDDAAPAEHSFQSAGSGVVIDEVHGYIVTNQHVIASASKIEVALSDGRRFQAKLVGADPETDVAVVQIPPDHLVQAEFGSASSLHVGDVVVAIGNPFGLGQTATMGIVSALGRRAVGSEGYEGFIQTDASTNPGNSGGALVSEDGVVVGINSAIIGPAGGSIGIGFAVPAETVGIVMRQLILTGKLVRGEVGILTQDLTPGLAKAFGIDEGAGALVSEVLPGSPAANAGIQPGDVIRMVDGRTVRGASDVRRLVGSLPLQSKPSFQIDRASRRIEAFPVVSDAPVAEPAAPRTIHIGRGPLADAEMANSPDGPGARVVVVAEGSVAAQAGLQPDDVIVALDQQPVTDVGQLLSILVKEHARALITVVRNGHRLFVAADVQTQ

SEQ ID NO: 4770 - protein, 492 aa, Brassica napus
MDPYKYRPSSAYNAPFYTTNGGAPVSNNISSLTIGERGPVLLEDYHLIEKVANFTRERIPERVVHARGISAKGFFEVTHDISNLTCADFLRAPGVQTPVIVRFSTVVHERASPETMRDIRGFAVKFYTREGNFDLVGNNTPVFFIRDGIQFPDVVHALKPNPKTNIQEYWRILDYMSHLPESLLTWCWMFDDVGIPQDYRHMEGFGVHTYTLVSKSGKVLFVKFHWKPTCGIKNLTDEEAKVVGGANHSHATKDLHDAIASGNYPEWKLFIQTMDPADEDKFDFDPLDVTKIWPEDILPLQPVGRLVLNRTIDNFFNETEQLAFNPGLVVPGIYYSDDKLLQCRIFAYGDTQRHRLGPNYLQLPVNAPKCAHHNNHHEGFMNFMHRDEEINYYPSKFDPVRCAEKVPIPNKSYTGIRTKCIIKKENNFKQPGDRYRSWAPDRQDRFVKRWVEILSEPRLTHEIRSIWISYWSQADRSLGQKLASRLNVRPSI

SEQ ID NO: 4771 - protein, 534 aa, Zea mays
  misc_feature (263)..(263): Xaa can be any naturally occurring amino acid
  unsure (1)..(534): unsure at all Xaa locations
TNFLAESTVLAMDVALSTIVFVIAIFIPALLTLVQRSRSRHAGHNPPPPPEPRAIPLVGHLHHLLRKKPLHRCLAHLAERHGDVLGLRFGSSRVAVVSSASVAQQCLVALDTSFGNRPRLPSARILSYEWSTMGHSNCGPYWRQARRTTSTEFSSVERVQHFADVHEQEARAMARRLCRVAHASGGRALVDVKSRLLEMLMNGLLDMLFRRTTSRSRSSDEKDEAVEVSEEARCFMAMAEETMELTLTVWDFLPPLARWLDVXRWARRLQRLQANRTEFLQRLIEEHKEMEKSGQVTRRTLVGVMLELQDKDPEAYTDQLIRSLCVSALEAGTLSTGYTIEWVMSLLLNNPHIMKKARDEIDACVGEPKRLLDATDLPKLPYLRCIILETLRLYPVVPLLVPRESSTNCTVNGFNIAKGTMLLVNTFAIHRDPRTWDDPETFLPERFEDGSNQSGKTTMDLSFGMGRRRCPAENLGMQLAGIALGTMIQCFNWERVGTELVDMAEGSGLTMAKKVPLEAFCQPRASMVDLLANI

SEQ ID NO: 4772 - protein, 731 aa, GIBBERELLA ZEAE PH-1
MQKTHLNLVDDDDDMDSCPPPIPIRSHTPRRQLAMKQSFETQDLGDGKADFDPRLLQQPSKSPSTHGHHRSSHYQNQTYTHNHTQNNNQNHDQNYTHVHATSQSPTTATAPAPVQISVPALPTSPVRPSSAATSRSAMSYRSHETEVWSQRERDASSISSVYVPTHLPALQAKGAGADGDGLEPLTEEEYDPSSFDLVVPAHAMGKQYTLESQSELLFSAKHLTIIFEDPILLQRFTNFISASRPASVPLLTYYLDTLKAIKAINYANSLTASLEGIDGHDFTLDPVTNTVNAALQKRATDAFQAMANHDLPAYITHTYIQTVSITIKRRITDTLAPQLRELSEGLAEVFCLTDPSRPDNPIVFASEEFHRTTQYGMDYVLGRNCRFLQGPKTNSYSVQRIRDKLKAGQDHCETFLNYRRDGSPFMNLLMVSPLYDSRGIVRYHLGAQVDVSGLVTDCAGLDSLSKLLNRENPENERYPGENAHKEKEQKTDEFRDLAEMFDLTELRTVRESGGAFHRTRQQDLRQTDAAPANWSKPRFVFEDDATISRRLSDPILQDTAAMSFGGRLSGVYKHYLLVRPYPSLRILFASPSLRVPGMLQSSFLSRIGGSDRVRETLTQAFAGGNGLTAKIRWLSKTDMNHKNHGEGGQAPPANPGRNRWIHCTPLLGSNGAVGVWMVVLIDDESDEAFIRGMRRDAPIVQPAPRPKSRVDQLTGDDDAMSLSSFAAQHRG

SEQ ID NO: 4773 - protein, 391 aa, Arabidopsis thaliana
MPEQPKKVADRYLKQEVLGQGTYGVVFKATDTKTEQTVAIKKIRLGKQREGVNITALREIKMLKELKHPHIILLIDAFPHKENLHLVFEFMETDLEAVIRDSNIFLSPADIKSYLLMTFKGLAYCHDKWVLHRDMKPNNLLIGVDGQLKLADFGLARIFGSPNRKFTHQVFARWYRAPELLFGAKQYGAAVDVWAVACIFAELLLRRPFLQGNSDIDQLSKIFAAFGTPKADQWPDLTKLPDYVEYQFVPAPSLRSLFPAVSDDALDLLSKMFTYDPKARISIKQALEHRYFTSAPAPTDPAKLPKPVPKQDGKSSYGKHEAITVQSPPRKLRRVMPERGRVDSLKSHVDKDQQAPMSLDFTILAERPPNRPTITSADRSHLKRKLDLEFQ

SEQ ID NO: 4774 - protein, 452 aa, Leifsonia xyli subsp. xyli str. CTCB07
MALGSAIGTGLFYGLSSAIQKAGPAVLIAYIVGGAAVFMVMRALGEMAVRHPVSGSFGQYASKYLGPRAGFVTGWTYAFEMIVVALADVTAFGIYMSFWFPDVPRWIWVLAIVFFIGALNLLSVKVFGELEFWFSVIKVGAIVAMIVGGVVIIAFGFAGANAAGPGNLADPATGGFAPNGIGGVIASFAVVMFAFGGIEVIGITAGEAAEPKKVLPRAINSVPARILLFYVLTLAVIMMLVPWNAIDGSQSPFVMIFEGARPPGCPVHPERRRHHRSALGDQLGHLRCGPDDVRPRHAGPRSARVRPCHPQRRPVADGRGDGLRAAPGRGAERGHPRNVFLVIASVATFATVWVWLMILLAHLRMKQRIRREGMLPSEFPVPLWPGASVATLVFLVFVIGVLGWFEDTRIALVVGVVWIALLLAAYQLCVRGPGRLPADLVDETGPIRVVRR

SEQ ID NO: 4775 - protein, 664 aa, Zea mays
MALWALPVGFRFHPTDEELVSHYLKGKITGQINSEAEVIPEIDICKCEPWDLPGKSLIRSDDPEWFFLAPKDRKYPNGSRSNRATVAGYWKATGPDRNIKSKGDKSKQFTIGKKKTLVFHRGRAPKGERTGWIMHEYRTTEPQFESGKQGGYVLYRLFWKPEEKTERSSPKEMDRSGNSPTTIRSSRDNQEANEEANTPLNKKSLESALHDPIELPNSAETPAGPRKMCLADRNDNLVATAPVVSHIPFQGHAAGVAKVDPSAAASAHFVNPQNGNDDCNNFMSDFTPILPHENAFFTGTQQGAFGFDGNGIMNHPDALDAFLNQTLVDTDEHSSTTSKVQYDSDIPTEFANHWNMQDEHQDWWEKLDFEPYEPTLLPYDTTDLDVLSVDSGADSFNDLFNVTGITLRPQQLDSTVQPDCVFPDQGTALRRLKLQVVECGESITKDESEDEVSCVESPNYFDESVEFAAEKGVASYGDGADSTGIVIRSRYPAPSSSSESSFTQQGTAMRRLRLQLGLNEGTCPSSGDSSSCIVDESESQQKAEIEEDASTNLAGSVDNLPGNSHDDEQKDIPEHDAEMSVSGVKSVLRLRKTSAESLKDVKQEDCLEPDGRAPMQRVGFQSSIIWLVLSVAVLLLLYCGVWMSMICILVRCFAHMGSWHQPDV

SEQ ID NO: 4776 - protein, 130 aa, Campylobacter jejuni RM1221
MAKRKIVKKKVVKKNIAKGIVYISATFNNTMVTVTDEMGNAIAWSSAGGLGFKGSKKSTPYAAQQAVEDALNKAKEHGIKEVGIKVQGPGSGRETAVKSVGAMEGIKVTFLKDITPLAHNGCRPPKRRRV

SEQ ID NO: 4777 - protein, 195 aa, Oryza sativa
MAGGFRVLHLVRPFLAFLPEVQSADRKIPFREKVIYTVISLFIFLVCSQLPLYGIHSTTGADPFYWMRVILASNRGTVMELGITPIVTSGMVMQLLVGSKIIEVDNSVREDRALLNGAQKLLGILIAIGEAVAYVLSGMYGSVSQLGTGNAILIILQLFFAGIIVICLDELPKRTGGVEIPVLHKVPKPRKGMPP

SEQ ID NO: 4778 - protein, 276 aa, Brassica napus
  misc_feature (103)..(103): Xaa can be any naturally occurring amino acid
  misc_feature (110)..(110): Xaa can be any naturally occurring amino acid
  misc_feature (223)..(223): Xaa can be any naturally occurring amino acid
  unsure (1)..(276): unsure at all Xaa locations
MSGKKDIKTVLMATTPGFLDITNLQSDKPGTEDMATAPKATTPGPCDFPSTIVRATIVQASTVYNDTPKTIEKAGEFIAQAAADGAQLVVFPEAYIGGYPRGXYRFGIGXGVHNEAGRDCFRKYHASAHSLFLPEVDKLAEMARKNKVYLVMGAMEKDGYTLYCTALFFSSEGRFLGKHRKVMPTSLERCIWGYGDGSTIPVYDTPLGKLGAAICWENRMPLXRTSLYGKGIELYCAPTADGSKEWQSSMMHIAIEGGCFVMSRSKRRLLISCELS

SEQ ID NO: 4779 - protein, 239 aa, Arabidopsis thaliana
MGRGKIAIKRINNSTSRQVTFSKRRNGLLKKAKELAILCDAEVGVIIFSSTGRLYDFSSSSMKSVIERYSDAKGETSSENDPASEIQEMYIVTLEKYAYSEELVLDRQMMGEELSGLSVEALQNLENQLELSLRGVRMKKDQMLIEEIQVLNREGNLVHQENLDLHKKVNLMHQQNMELHEKVSEVEGVKIANKNSLLTNGLDMRDTSNEHVHLQLSQPQHDHETHSKAIQLNYFSFIA

SEQ ID NO: 4780 - protein, 383 aa, Oryza sativa
  misc_feature (94)..(94): Xaa can be any naturally occurring amino acid
  unsure (1)..(383): unsure at all Xaa locations
MAPSSSSCHDAAASMLLCAEDNSSILWLEDEEGEVGERRSGGCRSMVGVGDLAGGGGGGGGGVEEEEEMFPPQSEECVASLVEREQAHMPRADXGERLRGGGGDVDLRVRSEAIGWIWEVYTYYNFSSVTAYLAVNYLDRFLSQYELPEGRDWMTQLLSVACLSIAAKMEETVVPQCLDLQIGEPRFLFEVETIHRMELLVLTNLNWRMQAVTPFSYIDYFLRKLNGGNAAPRSWLLRSSELILRIAAGTGFLEFRPSEIAAAVAATVAGEATGVVEEDIAEAFTHVDKGRVLQCQEAIQDHHYSMATINTVQPKPASTRRGSASASSSSVPESPVAVLDAGCLSYKSDDTDAATIASHGGGRRKSCFDSSPVTSKKRRKLSR

SEQ ID NO: 4781 - protein, 478 aa, Bradyrhizobium japonicum USDA 110
MRRLRRIKILATLGPASSDLAMIRRLFEAGADLFRINMSHTPHDKMRELVATIRNVESSYGRPIGILVDLQGPKLRLGAFAEGSVQLQNGQTFTLDSDKAPGDATRVNLPHPEILAALRPGHALLLDDGKVRLIAEETSKEHAVTRVVVGGRMSDRKGVSLPDTDLPVSAMTPKDRADLEAALVTGVDWIALSFVQRADDVIEAKKMIRGRAAVMAKIEKPQAIDRLADIIEASDALMVARGDLGVELPLERVPSLQKQMTRMARRAGKPVVIATQMLESMIQSPVPTRAEVSDVATAVYEGADAIMLSAESAAGKFPVEAVSTMNRIGEEVERDPIYRSVLTAQRPAPESTAGDAIADAARQIAETLDLPALICWTSSGSTAVRVARERPKPPIVAITPNIAAGRRLAVVWGVHCVVAEDARDQDDMVSRAGQIAFRDGFVRAGQRVIIVAGVPLGIPGTTNMVRIASVGPEGGADI

SEQ ID NO: 4782 - protein, 231 aa, Bacillus anthracis str. Sterne
MMGYKAMLFDLDDTLLNRDKAVDNLFLLLFEKCYEDVSDTIKNNMLQKFKEFDKREYGMSDKTIVLESLFDEFAPRYRLPRNYIQDFWNENFPKCFSIDQNTIHFLNHIKKHFEVGIITNGSTQRQKAKIINTHLNNYFDTIIISEEVGFSKPDKRIFELALNKLNVQPENTLFVGDDIEKDIAGPQNANIKGVWFNPQKIKNTTKIQPYAEINTLDSLLSYVTPQYFFNK

SEQ ID NO: 4783 - protein, 570 aa, Pseudomonas aeruginosa UCBPP-PA14
MRAALQLAQGGHKTAVVTKVFPTRSHTVSAQGGITCAIASADPNDDWRWHMYDTVKGSDYIGDQDAIEYMCSVGPEAVFELEHMGLPFSRTETGRIYQRPFGGQSKDFGKGGQAARTCAAADRTGHALLHTLYQANLKNGTSFLNEWYAVDLVKNQDGAVVGIIAICIETGETVYIRSKAVVLATGGAGRIYASTTNALINTGDGVGMALRAGVPVQDIEMWQFHPTGIAGAGVLVTEGCRGEGGYLINAHGERFMERYAPNAKDLAGRDVVARSMVKEVLAGNGVGPNKDHVLLKLDHLGEEVLHSRLPGICELSKTFAHVDPVVAPIPVIPTCHYMMGGVATNIHGQAITQDANGNDQIVEGLFAVGEVACVSVHGANRLGGNSLLDLVVFGRAAGLHLEKALKEGIDARGASESDLEASFKRLNGVNERTSGEEVAPLKRELQSCMQNYFGVFRTGEYMQKGIAQLADLRERIANVKINDKSQAFNTARIEALELQNLLEVAEATAIAAEHRKESRGAHAREDFEERDDENWLCHTLYFPGEKRVSKRSVNFAPKTVPAFEPKVRTY

SEQ ID NO: 4784 - protein, 453 aa, Debaryomyces hansenii CBS767
MAKVEDLSNSHLMHRSLREEPDVVNNAKGSYIFLQNGQKVFDGCGGAAVIAVGHGNSEVIEAVSKQLSVVSYVHTFEYTTPVAEELANILLKNYSGKIAKVYFVNSGSEANEAAVKVAVQYFYEQGKTSKTQFISRKQSYHGNCLAGMSLSGHVLRRKPFENLVSDKFHKVSEANEYRWKKNDETTGEYVERLANELEAKILEVGPDNIAGFFAETIVGATTGCLTAPKGYFKAIQKICEKYDVLLITDEIMCGSGRTGTFFAWEQEDFVPDITTSGKALGGGYSPLSAVFMNQKVVDVLLNGSASFNNGHTFQCYPLSCAAGIAVQKIIQRDNLLQNVKVMGEYLGQALVKELKDIKIVGNIRGRGLFWGVEFVKDKLTKEAIDPRIRIGQKIQHNALVNGLAIYPGFGTIDGLSGDHILIAPSYDITQDQVNVMVQQVAASIIEMEQKYAT

SEQ ID NO: 4785 - protein, 461 aa, Oryza sativa (japonica cultivar-group)
MEKKASILMNRYELGRMLGQGTFAKVYHARNLASNQSVAIKVIDKEKVLRVGMIDQIKREISIMRLVRHPNIVQLHEVMASKSKIYFAMEYVRGGELFSRVARGRLKEDAARKYFQQLIGAVDFCHSRGVYHRDLKPENLLVDENGNLKVSDFGLSAFKECQKQDGLLHTTCGTPAYVAPEIINKRGYDGAKADIWSCGVILFVLLAGYLPFHDSNLMEMYRKISKGDVKFPQWFTTDVRRLLSRLLDPNPNIRITVEKLVEHPWFKKGYKPAVMLSQPNESNNLKDVHTAFSADHKDNEGKAKEPASSLKPVSLNAFDIISLSKGFDLSGLFENDKEQKADSRFMTQKPASAIVSKLEQIAETESFKVKKQDGLVKLQGSKEGRKGQLAIDAEIFEVTPSFFVVEVKKSAGDTLEYEKFCNKGLRPSLRDICWDGQSEHPSLAQSSTLTQSSKSISRHAI

SEQ ID NO: 4786 - protein, 212 aa, Zea mays
MRSPVPLPSQEQEPASSPPPSHVQRRELAMAGAATPPPSSSSSASCGTDAAYLLFRGETLLPDGVHASLYAVALAYCFVGLSAVTARFFKSMEQIMRHSREVVVGVDPRTGAPVVRRDKVWNYTVADIALLAFGTSFPQISLATIDAIRNLGQLTAGGLGPGTLVGSAAFDLFPIHAVCVLMPRAGSKKKISDLGVWLVELFWSFWAYIWLY

SEQ ID NO: 4787 - protein, 60 aa, Actinobacillus pleuropneumoniae serovar 1 str. 4074
MRLAWTREEVDQRLFNIMTAIHQNCVENGTETDGYVNYVNGANIAGFKKVATAMLEQGIV

SEQ ID NO: 4788 - protein, 218 aa, Actinobacillus pleuropneumoniae serovar 1 str. 4074
MYGQYKKLRNEFTSVLTGKSLTWGGSLIRPEATGYGAVYFADAMLATHGQGFDGKRVVISGSGNVAQYAAEKAIQKGAKVLTVSDSNGYVLFPDSGMTEKQLADLLVLKNERRERLSVYAKEQGVQYFEGQKPWGVKCDIALPCATQNELDGEAAKELVKNGCFCVAKGANMPTTLEGVEVFIAAKILYAPGKAANAGGVAHFRFRNEPKRNALSLDS

SEQ ID NO: 4789 - protein, 127 aa, Triticum aestivum
AMIQQLFPDKSRDQVRQKFKTEEKKHPMQVHDAILHRSRDNLYLKQVIKQLNIEDLQRDINSTHKQVVASIEGDTGNEHALQDFMEEENDSNWSAKELSARQSEVREVEHVAGNADDGLDLDVFDWY

SEQ ID NO: 4790 - protein, 258 aa, Desulfotalea psychrophila LSv54
MKISAIQLAVVEDDKAASIARARTEIELCRESDLIILPEIWNTGFMNFAAYRSLAEERKGPTLSMVREMAVKTSSFIHSGSFVEKIEDKYYNSSYLISPDGDILGNYRKIHLFGFASLETEILSAGQEISVINTKLGIIGMATCFDLRFPELFRKMVDQGTEIFLICAAWPLARLADWALLNRVRALENQALLISANARGMSKGVQLAGNSMIVGPNGQILAQADDMDNSISAEINLNAVKEARCSFPALSSRKTFLN

SEQ ID NO: 4791 - protein, 264 aa, Oryza sativa
MVSGVAHRPDDDGGRAASTFQRPPQPAGARPSLATPPPSGGAQSASTSGGSAGSPSSRSEQHVPAAAGMAAGAAAASTPISENTFLRLNDLDIHGDDAPSSQAPTSKKKKRGARAVGPDKGGRGLRQFSMKVCEKVESKGRTTYNEQQYDEKNIRRRVYDALNVLMAMEIISKDKKEIQWKGLPRTSINDIEDLQRRRRGAVPLSACVSSFGGRVGFEGRGLWVASLAENARPLGTSRLDSACVVLWIVSGSGDTGSQLWLLPH

SEQ ID NO: 4792 - protein, 285 aa, Glycine max
  misc_feature (80)..(80): Xaa can be any naturally occurring amino acid
  misc_feature (263)..(263): Xaa can be any naturally occurring amino acid
  unsure (1)..(285): unsure at all Xaa locations
MEFDEHEDQEEEEEEEMGFSVAAASYDSLGNAAVRSKMSGGEGVAVTGNSGRKGTLRYRECQKNHAVSIGGQAVDGCCEXLAAREEGTLEAGICAACNCHRNFHRKEIDGETSPYRQRSQPQPQPLHPQYHHQFSPYYHRAPPPSAAGYLHHHLVTPPVSQHRPLALPPLASGGVFSREEEDMSNPSSSGGGGGFSGGGGGSGSGTKKRFRTKFTQEQKDKMLAFAEELGWRIQKHDEVAVEQFCAETCVKRHVLKVWMHNNXHTLWEWIEPLEQHNIIENSQLS

SEQ ID NO: 4793 - protein, 588 aa, Geobacillus stearothermophilus
MRKEAIHHRSTDHFAYAYDSETLHLRLQTKKHDVDHVELLFGDPYEWHDGAWQFQTMPMRKTGSDGLFDYWLAEVKPPYRRLRYGFVLRAGDEKLVYTEKGFYHEAPSDDTAYYFCFPFLHRVDLFQAPDWVKDTVWYQIFPERFANGNPAISPKGARPWGSEDPTPTSFFGGDLQGIIDHLDYLADLGITGIYLTPIFRAPSNHKYDTADYFEIDPHFGDKETLKTLVKRCHEKGIRVMLDAVFNHCGYEFAPFQDVLKNGAASRYKDWFHIREFPLQTEPRPNYDTFAFVPQMPKLNTAHPEVKRYLLDVATYWIREFDIDGWRLDVANEIDHQFWREFRQAVKALKPDVYILGEIWHDAMPWLRGDQFDAVMNYPFTDGALRFFAKEEISARQFADIMVRLLHSYPKHVNEAAFNLLGSHDTPRLLTVCGGDVRKAKLLFLFQLTFTGSPCIYYGDEIGMTGGNDPECRKCMVWDTEKQNKELYEHVKQLIALRRQYRALRRGDVAFLAADDEANHLVYEKTDGNETVMIIINRSNEAAEIPMPIDARGKWLVNLLTGERFAAEAETLCVSLPPYGFVLYAVESW

SEQ ID NO: 4794 - protein, 454 aa, Bifidobacterium longum NCC2705
MSEKKTNHSVSFEALSSLDAPVSFWKGIPFGLQHVMAMFVANLAPIFIVASAAKMTPAQSATIIQSGLLVAGLGTCLQLYGAWLIGSRLPMVTGISFTYVAAAVAICADKGYGAVVGAVMVGGLLELVLGLTAKYWRRFVPPIVSAIVVTSIGFSLLNVGATSFGGGSGAKDFGSWQNLTLGLISLVACLAFQLLMKGTAKQLSVLFGLVVGYVAAICMGKVDFSGFQNLAIVSVPQFMPFKPEFDWGSIISIGLLYVVSSVEVLGDTAALTKVGLNRTPTERETAGAIAGDGLISTVSGLFGCLPLTSFAQNIGLVAMTKVVNRKVILSGGLILVLASFVPAIAEVFNSLPQAVLGGCTIMMFGNIILSGFQMIAEAGFTQRNITIAALSLTIGIGFTQVSDIFTQFPALFQQIFASNCIAVAFVVAVILNTVLPSEEHFLSAPKEAPAADAE

SEQ ID NO: 4795 - protein, 172 aa, Methanococcoides burtonii DSM 6242
MVRKPASMYRNVKSRSFTRRKYMGGVPGSQVIHFDMGNKTADFPVKITLLADERCQIRHTALEAARITANRAMTTAAGRSGFHMKLRVYPHEVLRENKQATGAGADRVSSGMRAAYGKNVSTAARVSARQKIFTISVNKEHFIIAKDALRRAGQKLPTPVTIVVDQGQELVR

SEQ ID NO: 4796 - protein, 338 aa, Thiobacillus denitrificans ATCC 25259
MKVYYDKDADLSLIKQRKVAIVGYGSQGHAHANNLKDSGVDVTVALRPGSASAKKAENAGLTVKSVPEAVAGADLVMILTPDEFQSRLYRDEIEPNIKQGATLAFAHGFSIHYNQVVPRADLDVIMIAPKAPGHTVRSEFVKGGGIPDLIAIYQDASGKAKETALSYASAIGGGRTGIIETTFKDETETDLFGEQAVLCGGAVELVKAGFDTLVEAGYAPEMAYFECLHELKLIVDLMYEGGIANMNYSISNNAEYGEYVTGVKVINEQSRAAMKECLANIQNGAYAKRFILEGQANYPEMTAWRRNNAAHQIEVVGAKLRSMMPWIAANKLVDHSKN

SEQ ID NO: 4797 - protein, 466 aa, Rubrobacter xylanophilus DSM 9941
MSQTVSMEKIVSFCKRRGFVYQSSEIYGGIRSSYDYGPLGVEMKRNIREEWWRSMVYMRDDVVGIDAAVIMHPKVWEASGHVETFNDMLVESRTSGRRYRADHLIEEATGIDAEGMSPEEMTRLIQEDERIKDPVDGGRDFAPVRPFNLMFETYTGPVKSPENLAYLRPETAQGIFVNFKNVLQTSRVKVPFGIAQIGKSFRNEITPGNFIFRTREFEQMEMEFFVEPGTDEEWHEYWIEERREWYTRLGIRPENLRLYEHPKEKLSHYSKRTVDIEYNFPFAGWSELEGIANRTDYDLRRHSEYSGEKLEYFDQAKNRSYIPYVIEPAAGVDRILLALLVDAYHEEEAPNAKGELERRTVLKLHPRVAPTKAAVFPLTKKEPVSAVARRLYDDLKGDYRLFYDDSGSIGRRYRRQDEAGTPFCVTVDFDTLEDKKVTIRDRDTMEQERIPIEAVRDRLAKLISAS

SEQ ID NO: 4798 - protein, 492 aa, Oryza sativa
MDPYKHRPSSGSNSTFWTTNSGAPVWNNNSALTVGERGPILLEDYHLIEKLAQFDRERIPERVVHARGASAKGFFEVTHDISHLTCADFLRAPGVQTPVIVRFSTVVHERGSPETLRDPRGFAVKFYTREGNFDLVGNNMPVFFIRDGMKFPDMVHAFKPSPKTNMQENWRIVDFFSHHPESLHMFSFLFDDVGIPLNYRHMEGFGVNTYTLINKDGKPHLVKFHWKPTCGVKCLLDDEAVTVGGTCHSHATKDLTDSIAAGNYPEWKLYIQTIDPDHEDRFDFDPLDVTKTWPEDIIPLQPVGRMVLNKNIDNFFAENEQLAFCPAIIVPGIHYSDDKLLQTRIFSYADTQRHRLGPNYLMLPVNAPKCAYHNNHHDGSMNFMHRDEEVNYFPSRFDAARHAEKVPIPPRVLTGCREKCVIDKENNFQQAGERYRSFDPARQDRFLQRWVDALSDPRITHELRGIWISYWSQCDASLGQKLASRLNLKPNM

SEQ ID NO: 4799 - protein, 478 aa, Pseudomonas aeruginosa UCBPP-PA14
MSQKFDVVVIGAGPGGYVAAIRAAQLGLKTACIEKYIGKEGKVALGGTCLNVGCIPSKALLDSSYKYHEAKEAFKVHGIEAKGVTIDVPAMVARKANIVKNLTGGIATLFKANGVTSFEGHGKLLANKQVEVTGLDGKTQVLEAENVIIASGSRPVEIPPAPLTDDIIVDSTGALEFQAVPKKLGVIGAGVIGLELGSVWARLGAEVTVLEALDKFLPAADEQIAKEALKVLTKQGLNIRLGARVTASEVKKKQVTVTFTDANGEQKETFDKLIVAVGRRPVTTDLLAADSGVTLDERGFIYVDDHCKTSVPGVFAIGDVVRGAMLAHKASEEGVMVAERIAGHKAQMNYDLIPSVIYTHPEIAWVGKTEQTLKAEGVEVNVGTFPFAASGRAMAANDTTGLVKVIADAKTDRVLGVHVIGPSAAELVQQGAIGMEFGTSAEDLGMMVFSHPTLSEALHEAALAVNGHAIHIANRKKR

SEQ ID NO: 4800 - protein, 1004 aa, Arabidopsis thaliana
MAFEKTRQFLPPLHFVLFPFMAQGHMIPMVDIARILAQRGVTITIVTTPHNAARFKDVLNRAIQSGLHIRVEHVKFPFQEAGLQEGQENVDFLDSMELMVHFFKAVNMLENPVMKLMEEMKPKPSCLISDFCLPYTSKIAKRFNIPKIVFHGVSCFCLLSMHILHRNHNILHALKSDKEYFLVPSFPDRVEFTKLQVTVKTNFSGDWKEIMDEQVDADDTSYGVIVNTFQDLESAYVKNYTEARAGKVWSIGPVSLCNKVGEDKAERGNKAAIDQDECIKWLDSKDVESVLYVCLGSICNLPLAQLRELGLGLEATKRPFIWVIRGGGKYHELAEWILESGFEERTKERSLLIKGWSPQMLILSHPAVGGFLTHCGWNSTLEGITSGVPLITWPLFGDQFCNQKLIVQVLKAGVSVGVEEVMKWGEEESIGVLVDKEGVKKAVDEIMGESDEAKERRKRVRELGELAHKAVEEGGSSHSNIIFLLQDIMQQAQRNTHIIGTKAKKINLRREFLMASEFRPPLHFVLFPFMAQGHMIPMVDIARLLAQRGVTITIVTTPQNAGRFKNVLSRAIQSGLPINLVQVKFPSQESGSPEGQENLDLLDSLGASLTFFKAFSLLEEPVEKLLKEIQPRPNCIIADMCLPYTNRIAKNLGIPKIIFHGMCCFNLLCTHIMHQNHEFLETIESDKEYFPIPNFPDRVEFTKSQLPMVLVAGDWKDFLDGMTEGDNTSYGVIVNTFEELEPAYVRDYKKVKAGKIWSIGPVSLCNKLGEDQAERGNKADIDQDECIKWLDSKEEGSVLYVCLGSICNLPLSQLKELGLGLEKSQRPFIWVIRGWEKYNELLEWISESGYKERIKERGLLITGWSPQMLILTHPAVGGFFTHCGWNSTLEEITSGVPSLTWPLFGDQFCNEKLAVQILKAGVRAGVEESMRWGEEEKIGVLVDKEGVKKAVEELMGDSNDAKERRKRVKELGEFAHKAVEEGGSSHSNITFLLQDIMQLEQPKK

SEQ ID NO: 4801 - protein, 272 aa, Thiomicrospira crunogena XCL-2
MSRIDATLSALKSEKKTALIPYITAGDPHPDMTVNLMHSLVEQGADMIELGVPFSDPMADGPVIQKAVERALEHNVSLKNVLAYVTEFRKKDAQTPVILMGYLNPIEAMGSDVFAKAAAEAGVDAVLTVDMPPEESEGYFQDLSLAQLDRIFLVSPTTPDGRLNAVSEKGSGFVYYVSLKGVTGSKALDVDDVAQHVGHLREKMSMPVAIGFGIRDGNTAYEMAKLGDAIIVGSALVSLIEQNASEDSAVIQQVLSDKMREFRQAIDKADNE

SEQ ID NO: 4802 - protein, 628 aa, Saccharomyces cerevisiae
MDPGIANHTLPEEFEEVVVPEMLEKEVGAKVDVKPTLTTSSPAPSYIELIDPGVHNIEIYAEMYNRPIYRVALFFSLFLIAYAYGLDGNIRYTFQAYATSSYSQHSLLSTVNCIKTVIAAVGQIFFARLSDIFGRFSIMIVSIIFYSMGTIIESQAVNITRFAVGGCFYQLGLTGIILILEVIASDFSNLNWRLLALFIPALPFIINTWISGNVTSAIDANWKWGIGMWAFILPLACIPLGICMLHMRYLARKHAKDRLKPEFEALNKLKWKSFCIDIAFWKLDIIGMLLITVFFGCVLVPFTLAGGLKEEWKTAHIIVPEVIGWVVVLPLYMLWEIKYSRHPLTPWDLIQDRGIFFALLIAFFINFNWYMQGDYMYTVLVVAVHGSIKSATRITSLYSFVSVIVGTILGFILIKVRRTKPFIIFGISCWIVSFGLLVHYRGDSGAHSGIIGSLCLLGFGAGSFTYVTQASIQASAKTHARMAVVTSLYLATYNIGSAFGSSVSGAVWTNILPKEISKRISDPTLAAQAYGSPFTFITTYTWGTPERIALVMSYRYVQKILCIIGLVFCFPLLGCAFMLRNHKLTDSIALEGNDHLESKNTFEIEEKEESFLKNKFFTHFTSSKDRKD

SEQ ID NO: 4803 - protein, 144 aa, Capsicum eximium
  misc_feature (70)..(70): Xaa can be any naturally occurring amino acid
  unsure (1)..(144): unsure at all Xaa locations
DTQEWNPATDKYTDVKYDITTVMDAKPLLKEALQAAVGLPVDRNIPLIGFIGRLEEQKGSDILVAAIHEXIGLDVQIVVLGTGKKKFEQEIEQLEVLYPNKAKGVAKFNVPLAHMITAGADFMLVPSRFEPCGLIQLHAMRYGT

SEQ ID NO: 4804 - protein, 320 aa, Oceanobacillus iheyensis HTE831
MKRMDVIGIGETMVSLTPDKYGLIRQTSSFEPRVAGTETNTLIGLSRLGHNTGFISRLGEDELGAMVLKELRGENVDTKLIDLDPYHQTGLFLKEIINESDVHVYYYRQHSAASQMTRELLDESYISSASYLFITGITPAISESCKQTIFTAINMAKNNGVKIVFDPNIRKKLWSESEARQTLIEILKLSDIILPGISEGQFLLDSNDPEEIGKKCVDLGAELVVVKLGENGAYYCTSDHGDYVPSFPVKQVRDPVGAGDAFAAGLLSGLIDELSIEKAVERACITGGYATTYVGDYEGFPDKSRLERLTNLSTSEDVSR

SEQ ID NO: 4805 - protein, 144 aa, Witheringia solanacea
DTQEWNPATDKYTDVKYDITTVMDAKHLLKEVLQAAVGLPVDRNIPLIGFIGRLEEQKGSDILVAAIHEFIGLDVQIVVLGTGKKKFEQEIEQLEVLYPDKAKGVAKFNVPLAHMITAGADFMLIPSRFEPCGLIQLHAMRYGT

SEQ ID NO: 4806 - protein, 544 aa, Mesorhizobium sp. BNC1
MAAKDVKFSRDARERMLRGVNILADAVKVTLGPKGRNVVLDKSFGAPRITKDGVTVAKEIELEDKFENMGAQMVREVASKTNDIAGDGTTTATVLAQAIVQEGAKAVAAGMNPMDLKRGVDLAVAEVVDYLAKAAKKIKTSEEVAQVGTISANGEKEIGQMIAEAMQKVGNEGVITVEEAKTAETELEVVEGMQFDRGYLSPYFITNPEKMVAELEDVYILLHEKKLSNLQAMLPVLEAVVQSGRPLLIIAEDVEGEALATLVVNKLRGGLKIAAVKAPGFGDRRKAMLEDIAVLTGGQVISEDLGIKLENVTLDMLGRAKRVSIAKETTTIVDGAGQKSEIEGRVAQIKSQIEETTSDYDREKLQERLAKLAGGVAVIRVGGATEVEVKEKKDRVDDALNATRAAVEEGIVPGGGTALLRASSEIKAKGENADQEAGVNIVRRAIQAPARQIASNAGAEASIVVGKILDNNAVTFGYNAQTGEYGDMIGMGIVDPMKVVRTALQDAASVAGLLITTEAMIAELPKKDSPAPAMPGGGMGGMDF

SEQ ID NO: 4807 - protein, 98 aa, Mesorhizobium sp. BNC1
MASTNFRPLHDRVVVRRVESEEKTAGGIIIPDTAKEKPQEGEVIAVGPGARDESGKLVPLDVKAGDRVLFGKWSGTEVKLNGQDLLIMKESDIMGIIG

SEQ ID NO: 4808 - protein, 325 aa, Rhodopseudomonas palustris CGA009
MNPETSRRLLFDMLRIRSVEETIAARYGEQKMRCPTHLSVGQEAVSAAAGAVLRPTDLAVSGHRAHAHYLAKGGSLKAMIAEICGKVTGCARGKGGSMHLVDESVGFMGSTAIVGGTVPVGVGLSYPMKLNQTGQISCVFLGDAVPETGVFFESVNFAVVKQLPVLFLCENNGYSVYSPLSVRQPPGRKLYELVAGFGLKTHHGDGNDARAVYAALSEGVAAIRAGEGPRFYEFETYRWREHCGPMYDNDLGYRTVAEFEAWKLRDPVPALQRALITEAIVTAADVADMQAEIDAEIEEAFAFAESSPFPPPEDAFTDVYASAAG

SEQ ID NO: 4809 - protein, 364 aa, Glycine max
MDRSAMTVGPGMDMPIMHDSDRYELVRDIGSGNFGVARLMRDKHTEELVAVKYIERGDKIDENVRREIINHRSLRHPNIVRFKEVILTPTHLAIVMEYASGGELFERICNAGRFSEDEARFFFQQLISGVSYCHAMQVCHRDLKLENTLLDGSPAPRLKICDFGYSKSSVLHSQPKSTVGTPAYIAPEVLLKKEYDGKIADVWSCGVTLYVMLVGAYPFEDPEEPKNFRKTIHRILKVQYSIPDYVHISPECRHLISRIFVADPAQRISIPEIRNHEWFLRNLPADLMVENTMNNQFEEPDQPMQSIEEIMQIISEATIPAAGTQSLNQYLTGSLDIDDDDMDEDLETDPDLDIDSSGEIVYAM

SEQ ID NO: 4810 - protein, 334 aa, Arabidopsis thaliana
MATATSHQSVVSFASLRSSPSSTISQCGFKIDSSLSFTSKKTNFCKIKAMASSVSYDNTLLSPSKTIPDNSQKKSNEAALILIRRGESLWNEKNLFTGCVDVPLTEKGVEEAIEAGKRISNIPVDVIFTSSLIRAQMTAMLAMIQHRRKKVPIILHDESEQAKTWSQVFSDETKNQSIPVIPAWQLNERMYGELQGLNKQETAERYGKEQVHEWRRSYDIPPPKGESLEMCAERAVAYFQDNIEPKLAAGKNVMIAAHGNSLRSIIMYLDKLTCQEVISLELSTGIPLLYIFKEGKFMKRGSPVGPTEAGVYAYTKRLAQYRQKLEDDSEVLCA

SEQ ID NO: 4811 - protein, 431 aa, Moorella thermoacetica ATCC 39073
MLPTGQLFLYGLQHVLAMYAGAVAVPLIIAGAAHLTKAETAFLINADMFTCGIATLIQTLGFWKLGIRLPVIQGVSFAAVAPMVIIARSMGMEAVYGAVIVAGLIAFFLAPYFSKLLHFFPPVVTGSVITIIGISLLPVGVEWAAGGTGNANYGALTNLFIAGIVLLAILLIQKYFKGFIANISVLLGLFIGMLIAIPLGLVNFSGVTTAPWLGIDRPFYFGFPKFDWGAIGAMILVMLVTMVESTGDFLALGEIVGKQIDEEDLARGLRGDGFATMLGGVLNAFPYTAFAQNVGLVGLSGVKSRFVVATSGIILAALGLFPKLATIIASIPYAVLGGAGIAMFGVVAANGIKTLSRVDFENNPHNIFIVAISIGVGLIPMVAPDFFKMFPAWSQIILHSGITLGSLTAIILNIFFNYPNSLTLYKKSFTN

SEQ ID NO: 4812 - protein, 300 aa, Arabidopsis thaliana
  misc_feature (127)..(127): Xaa can be any naturally occurring amino acid
  unsure (1)..(300): unsure at all Xaa locations
MLKVPEHQVAGHIASDGKLGPLVDDQGRFFKPLQGDSRGEHEAKFYESFTSNKKVPDHIHRYFPVYHGTQLVEASDGSGKLPHLVLDDVVSGYANPSVMDVKIGSRTWYPDVSEEYFKKCIKKDRQXTTVSLGFRVSGFKIFDHQESSFWRAEKKLVLGYNADGARLALRKFVSSNSPADSNLTPNCAFASEVYGGCNGILAQLLELKDWFETQTLYHFNSCSILMIYENESILMKGGDDAPAPRAQVKLVNFAHVLDGNGVIDHNFLGGLCSFIKFIKDILQSVEKHDETDTSLLENGR

SEQ ID NO: 4813 - protein, 547 aa, Pseudomonas fluorescens Pf-5
MAAKEVKFGDSARKKMLTGVNVLADAVKATLGPKGRNVIIEKSFGAPTITKDGVSVAKEIELKDRFENMGAQLVKDVASRANDDAGDGTTTATVLAQSIVNEGLKAVAAGMNPMDLKRGIDKATIAIVKELKGLSKPCADSKAIAQVGTISANSDNSIGDIIAEAMEKVGKEGVITVEEGSGLENELSVVEGMQFDRGYLSPYFINKPDTMVAELDGPLILLVDKKISNIREMLPVLEAVAKAGRPLLIVAEDVEGEALATLVVNNMRGIVKVAAVKAPGFGDRRKAMLQDIAVLTGGTVISEEIGLSLESTTLEHLGNAKRVILSKENTTIIDGAGVEADIQARVTQIRQQVADTSSDYDREKLQERLAKLSGGVAVIKVGAGSEVEMKEKKARVEDALHATRAAVEEGVVPGGGVALIRALQGINDLKGDNADQDVGIAVLRRAIEAPLRQIVANSGDEPSVVVDKVKQGAGNFGYNAATSEYGDMIEMGILDPTKVTRSALQAASSIGGLILTTEAAVAEIVEDKPAAGGMPDMGGMGGMGGMM

SEQ ID NO: 4814 - protein, 509 aa, Brassica carinata
MASNGFAMLSILVLALFASSIRSEETETKEFVLTLDHSNFTDTINKHDFIVVEFYAPWCGHCKSLAPEYEKAAAELSSQSPPIFLAKIDASEESNKGIANEYKIQGFPTIKILRKGGKSIQDYNGPREAAGIVTYVKKQSGPASAEIKSADGAAEVIGEKSVVAVGVFPKLSGEEFDSFMAVAEKLRADYDFAHTLDAKLLPRGDSSVAGPVVRLFKPFDELFVDSKDFNGEALEKFVKESSIPLVTVFDKDPSNHPYVSKFFDSPATKVMMFVNFTGETAESLKSKFREVATSSKGQDLAFLVGDAESSQGALQYFGLEESQVPLIIIQTSDSKKYLKANVVVDQIESWMKDFKDGKVAAHKKSQPIPAENNEPVKVVVAESLDDMVFNSGKNVLIEFYAPWCGHCQKLAPILDEVALAFQNDPSVIVAKLDATANDIPSDTFDVKGFPTIYFRSADGKVVVYEGSRTKEDFISFIEKNKPASHGEESSTTIRSGEHKTEESAAKDEL

SEQ ID NO: 4815 - protein, 637 aa, Corynebacterium diphtheriae NCTC 13129
MSAAPVHPVDAVPAAPKLVALGLQHVLAFYAGAVIVPLLIAASLNLDTATTIHLINADLLTCGIATLIQSVGIGKHVGVRLPIVQGVTTTAVAPIIAIGLGVTDGQGGVESLPTVYGAVIVAGLFTFFATPIFAKFLRFFPPVVTGSVLLVMGTSLLAVSANDFINYAEAQPETRDLFYAFGTLAVIILAQRFFRGFLGTLAVLIGLVSGTVVALLLGHANLDEVGNAAAFGITTPFYFGMPQFNITACFSMIIVMIITMVETTGDVFATGEIVKKRIRKSDVQRALRADGLSTFLGGVMNSFPYTCFAQNVGLVRITGVKSRWVAASAAGFMIILGLLPKAGAVVASIPSPVLGAASLALFANVAWVGLQTIAKTDLADSRNAAIVTTALGLAMLVTFKPSVAEAFPEWARIFVSSGMSIGAITAILLNLLFFHVGKQSGSAVARNVSGDGITLDEINALDRDEFVATLRPLFNKETWPLEQAWESRPFTDVHELREAIQVAVLTAPSEQREALIHDYPDTSAVLLATDAESRAISADRGSLGINELDDVETQQVLELSKEYRERFGMPFVYFLDTNDTVASIVNAGLRRLANSDVQEHRVALTEIVEIANDRFDILLADANPVRSAWDRKFTEVE

SEQ ID NO: 4816 - protein, 118 aa, Methanopyrus kandleri AV19
MTGEYRMAKDIGLGVKPPRRECDDPNCPFHGNLRVRGMILEGVVVSDRMDKTVIVEREYYRYDRKYERWERRRSRIPAHNPPCIDAQEGDKVRIAECRPLSKTKSFVVIEVLERAQER

SEQ ID NO: 4817 - protein, 97 aa, Pseudomonas fluorescens Pf-5
MKLRPLHDRVVIRRSEEESKTAGGIVLPGSAAEKPNRGEIVAVGTGRVLDNGEVRALAVKVGDKVVFGPYSGSNTVKVDGEDLLVMAENEILAVIEG

SEQ ID NO: 4818 - protein, 267 aa, Escherichia coli O157:H7 EDL933
MAIPAFGLGTFRLKDDVVISSVKTALELGYRAIDTAQIYDNEAAVGLAIAESGVPRHELYITTKIWIENLSKDKLIPSLKESLQKLRTDYVDLTLIHWPSPNDEVSVEEFMQALLEAKKEGLTREIGISNFTIPLMEKAIAAVGAENIATNQIELSPYLQNRKVVAWAKQHGIHITSYMTLAYGKALKDEVIARIAAKHNATPAQVILAWAMGEGYSVIPSSTKRENLESNLKAQNLQLDAEDKKAIAALDCNDRLVSPEGLAPEWD

SEQ ID NO: 4819 - protein, 595 aa, Zea mays
MAMGKLEERTRAFWTNRWLVFVGAMWMQSMAGTTYIFGAISPVVKARLGYDQPQVAALGVAKNVGGCLGLLAGALSATWPPWALLAIGAAQNFLGYGWLWLVVSGNAPALPLWLMCVVIFIGTNGQTYFITASLVTSIQNFPKSRGPTVGILKGFMGLTSAILTQVYTVMHTPDHAALIFMVAVGPSLVAIGLMFVIRPVGGHRQIRPSDKNSFMFIYTVCLLLASYLVGAMLVQDFLQPSYDVVVFLTVILFVLLISPIAIPVIVSFMPEKAQHLMEDALLSEPLTGEASSSRQKEDQPEVILSEVEEEKSKETDSLPPSERRKRIAELQAKLVEAAARGGVRIKRRPHRGDNFTLMQALVKADFWLIWLSLLLGSGSGLTVIDNLGQMSQAIGYKNAHIFVSLVSIWNFLGRVGGGYFSEIIVRERTYPRHIALAVAQIVMAAGHFLFAMAWPGTMYIASLLVGLGYGAHWAIVPAAVSELFGVKHFGAMYNFLILANPAGSLIFSELIVSNLYEHEAEKQASQHQMSALLSPRLLRDTGFLADDALKCEGPACFFFSSLIMSVFCAVAAGLSLLVVQRTRQVYPRLYSSVRT

SEQ ID NO: 4820 - protein, 400 aa, Chlamydia muridarum Nigg
MSLFEQLPSFSPDSILGLAQAFQEDPREDKINLLLGTYEREKSRYGGFSSVRKAQTVFFGDEKDKNYLPIRGSSVFLDQMAALCFGEIDANRWTGVQAVGGTGALHLGALVYAKSSLAGKVYIPAQTWGNHSRIFSRLGLSLEHYPYYDQEKKDLDLQGLKASLRDAPEASLILLHCCCHNPTGKDIPLSEWPEIIAIIKDRGLIPFFDMAYLGFANGIVEDRRPVRLCIEAGVATFVAGSCSKNFSLYGSRVGFFGVVHQDKTDLSRILSFLEEQIRGEYSSPAREGVAIVTSILENPYLRQEWGLELNGIRQSLEEIRANFVIAMREVAGHSFDFIASQKGFFGYPGFSKEQVVFLREELGIYTTAGGRFNLNGITDKNINRVIHGFAKAYEYSRSVS

SEQ ID NO: 4821 - protein, 567 aa, Rubrobacter xylanophilus DSM 9941
MCRYLTEDPLPKLPCYGGILQQRAGSRPGHCWYASPMDDVSRGLPEGPARRAARIARVGARYGFGFVFGRRLGPFRRGEPGRVGPRLRRSLEELGPVFAELGRFLSARRDLLPEEVAAELGRAEAPPKPASPAEVRGILERELGNAAERLFVAFEELPVRVGVFTQAHRATLPGDRPALVVVSRPGVRRELLAMRPAADVVRRRVGDRLPLDPVEAVSEFAAHAGHRRDMHLAAQNARRMRDLGDRLPLRVPGVYRDYSAARCLTLEAPAETGAPGAEGYRACADALVGLAVREGIFLADHAPERFAAGPGGELWLLDPTEAFSLDPERMRALAEVLAAAGREDVDGIIRSLPLAGASVPKNAAALRRELREALGALGGPLWREHSLARVRDSSLEALRRGGARLPDELCRLFGALVAAEELGRTMSGEGYLGTVPAAEAAREMISHRRNPRYVLERTARRLNRPEVYADYPRQIHALLEELKDGEVEVRFRHGGLDELISKLDILANRLVFAFLIAALIVGSSMLGVFVRGGPQVLGLSIFGFAGFVAAALLGLLLLVGIIRSGRL

SEQ ID NO: 4822 - protein, 162 aa, Rhodomonas salina
MSYFNFNVRILFLSELFRGLWMVLQYFFRRKVTLNYPFEKAVLSPRFRGEHALRRYFSGEERCIACKLCEAVCPAQAITIETESRADNSRKTSRYDIDMTKCIFCGLCQEACPVDAIVEGPNYEYSVFKRQNLIYNKEKLLKNGDQWELEIRENRLSESMYR

SEQ ID NO: 4823 - protein, 783 aa, Oryza sativa
MITFADLAEPAPGAERCVDRQLWLACAGGMCTVPPVGAAVYYFPQGHAEHALGLAAPELSAARVPALVPCRVASVRYMADPDTDEVFARIRLVPLRAAEDGDVEEDGAAAGEEHEKPASFAKTLTQSDANNGGGFSVPRYCAETIFPRLDYAADPPVQTVVAKDVHGVAWNFRHIYRGTPRRHLLTTGWSTFVNQKKLVAGDSIVFLRGDGGDLHVGIRRAKRGFCGGGGGAEEASLPGWDQYGGLMRGNASPCAAAKGRGKVRAEDLVEAARLANGGQPFEVVYYPRASTPEFCVRAAAVRAAMRVQWCPGMRFKMAFETEDSSRISWFMGTVASVQVADPIRWPQSPWRLLQVTWDEPDLLQNVKRVSPWLVELVSSMPAINLSSFSPPRKKPRILAYPEFPFEGQLLNPAFPPNPLAHGHHHYHHNHPSFFPFPDVSAPAGIQGARHAQFGPSLSDLHLTHLQSSLMYPGLRRPDHVGPTSIPPPRISTDLTMGSSPPARALSMGAKKPDDAKPPGLMLFGQRILTERQMSLSGTTSPAATGNSSLNWNTEKGASEGSGSGVIQNSPTDNTSSERLQWFRENSTVSELGLEPGQCKVFIESDTVGRNLDLSSLASFEQLYGRLSEMFCIDSAELRSRVLYRGATGEVRHAGDEPFSRDFNKKAQSAQVSYCSPVSFFIIINNDQLRVLVDSRVLRCKNPVTTHQRLECRGPLAQGTSACSMQTQTQRCAISDLSGGLTSRLQPPGEAIPLGSLALAASSLTHDDEICDLHRAAYPWLVES

SEQ ID NO: 4824 - protein, 216 aa, Solibacter usitatus Ellin6076
MIALLFDMDGVIVDSNPMHRQAWEIFNRRYGVETTMAMHERMYGKRNDEIVRDFFGDALSDEEVAGRGFAKETLYREMVAGRVEEMLVPGLRDFLERHRDLPMGLASNAEPQNVALFLDGAGLRPYFGAVVDGHQVARPKPFPDIYLRAANILNTEPEDCIVFEDSHSGVAAGLAAGMRVIGLRTTFVNLPGTVLTVDNFLSGNLETWLQTLVRSA

SEQ ID NO: 4825 - protein, 539 aa, Oryza sativa (japonica cultivar-group)
MLEVSTLRSPKADQRAGVGGHHVVGFVPAPPSPADVADEVDAFIVDDSCLLEYIDFSCCDVPFFHADDGDILPDLEVDPTELLAEFASSPDDEPPPTTSAPGPGEPAAAAGAKEDVKEDGAAAAAAAAAADYDGSPPPPRGKKKKDDEERSSSLPEEKDAKNGGGDEVLSAVTTEDSSAGAAKSCSPSAEGHSKRKPSSSSSSAAAGKNSHGKRKVKVDWTPELHRRFVQAVEQLGIDKAVPSRILELMGIECLTRHNIASHLQKYRSHRKHLMAREAEAASWTQKRQMYTAAAAAAAVAAGGGPRKDAAAATAAVAPWVMPTIGFPPPHAAAMVPPPPHPPPFCRPPLHVWGHPTAGVEPTTAAAPPPPSPHAQPPLLPVWPRHLAPPPPPLPAAWAHGHQPAPVDPAAYWQQQYNAARKWGPQAVTPGTPCMPPPLPPAAMLQRFPVPPVPGMVPHPMYRPIPPPSPPQGNKLAALQLQLDAHPSKESIDAAIGDVLVKPWLPLPLGLKPPSLDSVMSELHKQGIPKVPPAASGAAG

SEQ ID NO: 4826 - protein, 634 aa, Arabidopsis thaliana
MGCAPMSHILYDEVMKYNPKNPYWFNRDRFVLSAGHGCMLQYALLHLAGYDSVREEDLKSFRQWGSKTPGHPENFETPGVEATTGPLGQGIANAVGLALAEKHLAARFNKPDNEIVDHYTYSILGDGCQMEGISNEVCSLAGHWGLGKLIAFYDDNHISIDGDTDIAFTESVDKRFEALGWHVIWVKNGNNGYDEIRAAIREAKAVTDKPTLIKVTTTIGYGSPNKANSYSVHGAALGEKEVEATRNNLGWPYEPFHVPEDVKSHWSRHTPEGAALEADWNAKFAAYEKKYPEEAAELKSIISGELPVGWEKALPTYTPDSPGDATRNLSQQCLNALAKAVPGFLGGSADLASSNMTMLKAFGNFQKATPEERNLRFGVREHGMGAICNGIALHSPGFIPYCATFFVFTDYMRAAMRISALSEAGVIYVMTHDSIGLGEDGPTHQPIEHLSSFRAMPNIMMFRPADGNETAGAYKIAVTKRKTPSVLALSRQKLPQLPGTSIESVEKGGYTISDNSTGNKPDVILIGTGSELEIAAQAAEKLREQGKSVRVVSFVCWELFDEQSDAYKESVLPSDVSARVSIEAGSTFGWGKIVGGKGKSIGIDTFGASAPAGKLYKEFGITIEAMVEAAKSLI

SEQ ID NO: 4827 - protein, 395 aa, Oceanobacillus iheyensis HTE831
MTGTSGFVYSADYLKYHFHENHPFNQKRVLLTKELLEAHQVLSNHDLISPRLATEEELLLFHHPNYMETVKRAGSGEITEESALEYGIGTEDTPAFFQMHEAASYLVGGTLAAVDAVLNNNYTHALNLGGGLHHGFRSRASGFCIYNDSAVAIKYIRKHTNFKVLYVDTDAHHGDGVQSAFYDDPNVCTFSIHETGRYLFPGTGNINERGIKEGHGYTFNLPIDAFTQDESFLALYETAFKEIAAFFKPDIIVTQNGVDAHCLDPLTHLCGTMRIFEEIPRIAHELAHEYCDGKWIAIGGGGYDMWRVIPRAWGQIWNVMKNNKVSYGELPTTWLEKWQEQSSVELPHLWQDLEDIQPYIPRKDEITEKNYQLLQSLLKYTKPINYSNNLSAKQK

SEQ ID NO: 4828 - protein, 398 aa, Vibrio vulnificus YJ016
MTFMFSQLPTPALDPILSLTVAFRNDPRDQKVDLGIGVYKNNKGETPIMRAVSQAQKIVADTQTTKSYVGLAGCEEFNQSMVNLLLAGTSVLDRVSAIQTPGASGALRMLGDLMKVAQPDTTVWISNPSYVNHKPVMEAAGLKVRYYRYFSPETKQVDIGQMLDDLATAGPKDVVLLHGCCHNPTGADIDFAAWQAITDLAVKNGFTPFVDIAYQGFGDGLEEDAKGLQFMADRVEEMLITTSCSKNFGLYRERTGAAIVIGKNAKESSNAKGKLLTLARSTYTMPPDHGAALVKTILQNVELTTTWKQELCEMQQRLLNLRQTLCNELRNQHNTSQFDFIESHKGMFTVLGFTPEQMGTLRDEYGIYGVGDGRINIAGLTEAHIPYVADAIVKVSQR

SEQ ID NO: 4829 - protein, 135 aa, Geobacillus kaustophilus HTA426
MKGLAYTLKELTREKVTYDYPHEPLPLPDRFRGIQKFYPEKCIVCNQCVNICPTECIQLTGKKHPDPTKKGKVIETYNINFEICILCDLCTEVCPTEAIVMTNNFELAEYSRDALYKDLAWLDENDTNIRRENKP

SEQ ID NO: 4830 - protein, 1083 aa, ASPERGILLUS NIDULANS FGSC A4
MAEIPEPKGLPLIGNIGTIDQEFPLGSMVALAEEHGEIYRLRFPGRTVVVVSTHALVNETCDEKRFRKSVNSALAHVREGVHDGLFTAKMGEVNWEIAHRVLMPAFGPLSIRGMFDEMHDIASQLALKWARYGPDCPIMVTDDFTRLTLDTLALCSMGYRFNSYYSPVLHPFIEAMGDFLTEAGEKPRRPPLPAVFFRNRDQKFQDDIAVLRDTAQGVLQARKEGKSDRNDLLSAMLRGVDSQTGQKMTDESIMDNLITFLIAGHETTSGLLSFVFYQLLKHPETYRTAQQEVDNVVGQGVIEVSHLSKLPYINSVLRETLRLNATIPLFTVEAFEDTLLAGKYPVKAGETIVNLLAKSHLDPEVYGEDALEFKPERMSDELFNARLKQFPSAWKPFGNGMRACIGRPFAWQEALLVMAMLLQNFDFSLADPNYDLKFKQTLTIKPKDMFMKARLRHGLTPTTLERRLAGLAVESATQDKIVTNPADNSVTGTRLTILYGSNSGTCETLARRIAADAPSKGFHVMRFDGLDSGRSALPTDHPVVIVTSSYEGQPPENAKQFVSWLEELEQQNESLQLKGVDFAVFGCFKEWAQTFHRIPKLVDSLLEKLGGSRLTDLGLADVSTDELFSTFETWADDVLWPRLVAQYGADGKTQAHGSSAGHEAASNAAVEVTVSNSRTQALRQDVGQAMVVETRLLTAESEKERRKKHLEIRLPDGVSYTAGDYLAVLPINPPETVRRAMRQFKLSWDAQITIAPSGPTTALPTDGPIAANDIFSTYVELSQPATRKDLRIMADATTDPDVQKILRTYANETYTAEILTKSISVLDILEQHPAIDLPLGTFLLMLPSMRMRQYSISSSPLLTPTTATITISVLDAPSRSRSNGSRHLGVATSYLDSLSVGDHLQVTVRKNPSSGFRLPSEPETTPMICIAAGSGIAPFRAFLQERAVMMEQDKDRKLAPALLFFGCRAPGIDDLYREQLEEWQARGVVDARWAFSRQSDDTKGCRHVDDRILADREDVVKLWRDGARVYVCGSGALAQSVRSAMVTVLRDEMETTGDGSDNGKAEKWFDEQRNVRYVMDVFD

SEQ ID NO: 4831 - protein, 613 aa, Shigella flexneri 2a str. 301
MEQNPQSQLKLLVTRGKEQGYLTYAEVNDHLPEDIVDSDQIEDIIQMINDMGIQVMEEAPDADDLMLAENTADEDAAEAAAQVLSSVESEIGRTTDPVRMYMREMGTVELLTREGEIDIAKRIEDGINQVQCSVAEYPEAITYLLEQYDRVEAEEARLSDLITGFVDPNAEEDLAPTATHVGSELSQEDLDDDEDEDEEDGDDDSADDDNSIDPELAREKFAELRAQYVVTRDTIKAKGRSHAAAQEEILKLSEVFKQFRLVPKQFDYLVNSMRVMMDRVRTQERLIMKLCVEQCKMPKKNFITLFTGNETSDTWFNAAIAMNKPWSEKLHDVSEEVHRALQKLQQIEEETGLTIEQVKDINRRMSIGEAKARRAKKEMVEANLRLVISIAKKYTNRGLQFLDLIQEGNIGLMKAVDKFEYRRGYKFSTYATWWIRQAITRSIADQARTIRIPVHMIETINKLNRISRQMLQEMGREPTPEELAERMLMPEDKIRKVLKIAKEPISMETPIGDDEDSHLGDFIEDTTLELPLDSATTESLRAATHDVLAGLTAREAKVLRMRFGIDMNTDHTLEEVGKQFDVTRERIRQIEAKALRKLRHPSRSEVLRSFLDD

SEQ ID NO: 4832 - protein, 165 aa, Rhodopseudomonas palustris CGA009
MIDRRMLLASAALAAVFGFRWLRPDAARAAEKFEIEKTPEEWRKQLTPMQYHILREEDTERPFSSPLLKEHRKGTFACAGCDLPLFSSDTKFDSGTGWPSFWQPLSNAVGERTDSTLGMTRTEVHCRRCGGHLGHVFDDGPKPTGLRYCMDGYALTFHPATPNAS

SEQ ID NO: 4833 - protein, 538 aa, Burkholderia vietnamiensis G4
MIARDRRPARGDAMRMRMKAGRATLLRALTGGLVLACAGIAATTVARAATVATAPTTSTTSTTSAISAAPTAPTAPTAPTAPTAPTAATAATTPAPTERSPIATNNRASATVALPNFAALVRRVGPAVVNISVTREVAQMGIQLPPGIAPDHPLAPFLARRVIGNREEVSLGSGFIVDADGVILTNRHVVGDATSVDVKLTDKREFTGRVLGSDPLSDVAVIRIDAHNLPVVATGDPARTEVGDWVMAIGSPYGFANTVTQGIVSAKSRSLPGERAIPFIQTDVPINPGNSGGPLFDLDGRVIAINSMIFSKTGGYQGLAFAIPIDIALDVKDQLLRTGKVVRGRLGVAVQEVSRALARSFGLPGPDGALITMVEPDGPAAQAGLQAGDVVLAVDGNAVAESADLLGTIAGMRAGRQVDLLLWRAGRATHVGATVGAFDSGAEPAGVARGPARFGLVLRAATDRERRRLGVGQALVVERASGQAARAGLQPGDVVLSVNGATVASIDTLMAAMDAAHGNVALLVQRGGTRLYVPIGAG

SEQ ID NO: 4834 - protein, 449 aa, ASPERGILLUS NIDULANS FGSC A4
MREIVHLQTGQCGNQVGSAFWQTISGEHGLDASGIYTGDSDLQLERMNVYFNEAGGNKYVPRAVLIDLEPGTMDALRSGPNGALYRPDNFIYGQSSAGNNWAKGHYTEGAELVDQVIDVVRREAESCDCLQGFQVTHSLGGGTGSGMGTLLISKIREEFPDRMMATFSVMPSPKVSDTVVEPYNATLSVHQLVEHSDETFCLDNDALYDICIRTLKLSSPSYGDLNHLVSAVMSGITVSLRFPGQLNSDLRKLAVNMVPFPRLHFFMVGFAPLTSRSSSSFRTISVPELTQQMFDSRNMMTAANYQNGRFLTCSTLFRGKVAMKEVEDQMRNMQNKYSSYFVEWIPNNVQTALCSMPPKGLKMAATFVGNSTSVQELFNRVSNQFTAMFRRKAFLHWYTGEGMDEMEFTEAESNMNDLMSEYQQYQEATVSDGEGAYDAEEGEAYEQEE

SEQ ID NO: 4835 - protein, 477 aa, Zea mays
MSAGSAAAVPGTNSAAHFVLVPMMAAGHTGPMLDMARTLSGRGALVTFVTTPLNLPRLGRAPSDGALPIRFLPLRFPCAEAGLPEGCESLDALPGLGLLRNFNDACAMLRGPLVALLRDREGDAPPASCVVSDACHPWTGGVARELGVPRFSFDGFCAFSSLCMRQMNLHRIFEGVDDDTRPVHEFGEEIMAESARADGLVVNSFAEMEPMFVDAYEAALGKKVWTIGPLFLAPTMPLAATAEDANAVRCVSWLESKKPRTVVFVSFGSLVRSSLPQLVEIGHGLEATKRPFIWVVKPRNLAEFERWLSEDGFESRVGETGLVIRDWAPQKAILSHPATGAFVTHCGWNSVLECVAAGLPMVSCPHFAEQFMNEKLVVDVLRVGVPVGVKGAAQWGVEAEGVLATRQDVERAVAAVMDCGEEGSARRARAAELGRKAREAVVHGGSSFRNVALLIQHVQHRASTRNPWIEKKPNDRR

SEQ ID NO: 4836 - protein, 429 aa, Bifidobacterium longum NCC2705
MSNIFQWQLHGDGKTLAPGEVVEPDERLTWVRTAGIGAQHVIAMFGATFLVPILTGFDPSTTLFFTAMSTALFLLINRNVLPSYLGSSFGFIAPITAVSTANKGIAVASFGIMVTGILLALVGVLVHYAGSKWIDIIMPPVVNGAIVAIIGFNLAPSVWTNFQAAPDTALVTLLAVLLVAVLFKGLLGRLNILVGVIIGYVYACIRGQVDFSAIGDAAWIGFPKFHLPQADFSILPMFIPVVLVLVAENVGHVKSVAQMTGRDYDNQIGTALMADGLGTTLAGFGGGSGTTTYGENIGVMAATKVYSTAAYWCAAAFALILSLCPKFGAVINTIPAGVLGGVTTLLYGMIGMIGIRIWVENKVNFDKPLNIMVAAITMIIAIGQFAFTVGGISFNGIAIGTIVILVAYHGLKAIGKATGTIAKDDPDIL

SEQ ID NO: 4837 - protein, 80 aa, Ipomoea batatas
MASSLRSSAAALLFVMLFMATELGTNRIMVAEARMCESASSKFKGPCSRDSNCATVCHTEGFTGGDCKGFRRRCFCTKPC

SEQ ID NO: 4838 - protein, 484 aa, Yersinia pseudotuberculosis IP 32953
MYVGIDLGTSGVKAILLAENGRVIASQNAALVVSRPHPLWSEQNPADWWQATDQVMQALAAEHDMQQVKALGLTGQMHGATLLDKQHQVLRPAILWNDGRSFSQCQTLEQAVPASRQITGNLMMPGFTAPKLQWLAEHEPDMFQCIDKVLLPKDYLRFLMSGDFATDMSDAAGTMWLNIAQRDWSDEMLAACGLGRQHMPTLFEGNQITGHVSADIAKRWGINRIPIVAGGGDNAAGAVGVGLYQPGQAMLSLGTSGVYFAVSEGFLSNPASAVHSFCHALPNTWHLMSVMLSAASCLDWACQLTGAESVPALIAEVEKTPMAATPVWFLPYLSGERTPHNNPKAKGAFWGFTHEHRRPDLARAVLEGVGFALADGMDALHASGLQPKSVTLIGGGARSAYWRQMLADISGQTLEYRTGGDVGPALGAARLAQIAMNPDVSLADLLPALALEQTHLPDPQKHHYYTDRRVTFKKLYQQLLPLCE

SEQ ID NO: 4839 - protein, 456 aa, Lycopersicon esculentum
MATWFLRRLNNHGVMQKLSMAFSGKSTTAIGRRYFVSMEVGQKLDPYSCDDDYRENIDHQNQDLDFPGGKIPLTSQMKFISEASEKRLPCYRVLNDDGSLISNSIHDQLGEEVAVNMYSAMVTLKTMDTYLYEAQRQGRISFYMTTFGEEAINIASAAALSPHDFVLPQYREAGVLLWRGFTVQECTNQCFGNKDDKGKGRQMPVHYGSNKHNVITISSPLATQISQAAGVAYSLKMDKTGACAVAYTGEGATSEGDFHAGLNFAAVLEAPVIFLCRNNGWAISTPVHEQFRSDGIVSKGLGYGIRSIRVDGNDVIAVYNAVRAARTMAISEERPILVEAMTYRVGHHSTSDDSTKYRPTNEIEYWKTARCPINLFRKHIQRNGWWSDVQESELYTHVKNQVLEAIKTAEGMEKPALTELFSDVYEKMTPNLQEQERCIRDAIHKYPKDYPTDFQA

SEQ ID NO: 4840 - protein, 440 aa, Xanthomonas oryzae pv. oryzae KACC10331
MPMRPSCLLTSALLLALPTFAAAQSAQRPEVQAAAAPLQAKVVQWRRDFHQHPELSNREERTAATVAAQLRKLGLKPRTGIAHHGVVAIIKGGKPGPRIALRADMDALPVKEQTGLPFASKATAEYRGELVGVMHACGHDAHTAILLGVAEALVGMRDQLPGEVMLIFQPAEEGAPGNEEGGASLMLKEGLFAGFTPQAVFGLHVFSSVQAGKIAVRSGPLMAASDRFAIKMIGRQTHGSAPWNGIDPIVASADMIGAAQTVISRRANLSKQPAVLSFGAIKGGIRYNIIPDDVDMVGTIRTFDEGMRQQIFADLKNVAEHTAAAHGAKVEVQVPDQPGNPATVNDPALTAKMLPSLQAVVGADNVYEPPLQMGAEDFSFYAQHVPSMFFFVGSTAKGIDPATAPSNHSPQFLLDESSLDVGLRALLQVSLDYLQQGGAG

SEQ ID NO: 4841 - protein, 106 aa, Glycine max
TRFSAEVREQIYKVASVNLCSNISGQILASLVMSPPKVGDESYESFNAEKENILESLARRAKTLEDAFNKLEGVTCNKAEGAMDLFPQIRLSQKAIKAARDANTAP

SEQ ID NO: 4842 - protein, 110 aa, Zea mays
MASGQESREELARMAEEGQTVVARGGKTLEAQEHLAEGRSHGGQTRSEQLGHEGYSEMGSKGGQTRKEQLGHEGYSEMGRKGGLSTMQESGERAAREGIEIDESKFRTKS

SEQ ID NO: 4843 - protein, 481 aa, Chlamydomonas reinhardtii
MSSTPSATAIDHGATYSDLLIIQGAIVFFLQVGFVSLEVGYGRSKNVKNILLKNTVNILLCAICWWAVGYAFSYGSSTDGFIGTSGFFHDGGLGAAKLWFYSWTFCLSTVTIVSGCLAERTSLVAYPVFTVLMASWVHPVVVHWAWSRDSWLLGISSECRFLDFAGGTVVHICGGMMGLVGAALVGPRIGRFEEGRAKELPGHDVSSVAIGTLFLWFGWFGFNCGSAYVYMGNMAAAAAEAAASAVASGDTSADVYASAAAAVSAAVTSGANATLHPGSTPADRVALNMTLCASVSGLTALLLSSLRSGTVDLCVCCNSLLAGLVMSTPACGFITSWAAVIYGLVAAALYMGGTRMLVRFHVDDPLESSAIHFGCGGVGTLLLALLARPTYVQELTGYDCGGLVYGGRKGAILLGLQLLGIAAITAWTAFFSVLVFYLLRRLGRLRVDQVTELAGLDNMEHGGPAYPEFNLVPYNTGSAER

SEQ ID NO: 4844 - protein, 521 aa, Triticum aestivum
MGNQNGTPGNDYYNRFPREHPASRPTAAGILRQGLDPTSISVLGRKTADLREHYILGRKLGQGQFGTTYLCTEISTGCDFACKTILKRKLITKVDVEDVRREIQIMHHLSGHKNVVSIKDVYEDAQAVHIVMELLPGGELFDRIQGNGRYSEMKAAEITRIVVSIVAMCHSLGVMHRDLKPENFLLLDKDDDLSIKAIDFGLSIYFKPGQVFSELVGSPFYVAPEVLHKRYGPESDVWSAGVILYVLVSGVPPFWADTQKGIFDAVLKGHLDLESDPWPKISDSAKDLIRKMLCNCPSERLKAHEVLRHPWICQNGMATDGVLDPSVISRLKRFSAMNNLQKLALRVIAERLSEEEIAGLRELFKTVDIKNRGVITFGELRKGLTRYGNELVDTEICDIMEAADTDTDVTINYEEFIAATMPLNKIEREEHLKAAFTYFDKDGSGYITVDKLQRACAEYNMEGTLLEEIILEADQNNDGQIDYAEFVAMMQGNANGGNIGLGRPTMETSLNVTLRDAAQVH

SEQ ID NO: 4845 - protein, 435 aa, Nitrosomonas europaea ATCC 19718
MTITNQQLFERSRQYIPGGVNSPVRAFKSVGGTPVFFQRGQGAYFWDVEGKSYIDYVGSWGPLILGHAHPDVVRAVQIAAGHGTSFGAPTAAELEIAELLCRLLPSLEMVRLVSSGTEAGMSAIRLARGYTGRNRIIKFEGCYHGHDDALLVKAGSGALTFGHPSSAGVPAETAGHTLVLNYNDVAGVEETFSKMGTEIAAVIVEPVAGNMNLIKATSQFLETLRTLCTKHGSLLILDEVMTGFRVGLECAQGLYGIKPDLTILGKVIGGGLPMAAFGGRRDVMECLAPLGSVYQAGTLSGNPVAVAAGLETLHQIQVPGFFDKLSTMTRKLTEGLTAVAAKHSVAFCAQAVGGMFGLYFRKSPPESFAEVMESDREAFNHFFHAMLKEGVYFAPSAFEAGFVSAAHSNEEIDKTLAVADRIFGQGMRRTEKATL

SEQ ID NO: 4846 - protein, 384 aa, Thermococcus kodakarensis KOD1
MFPERGASEEEVLRELEEKTREDLTFDSGKILGSMCTYPHPFAVKVVMKYIDRNLGDPGLHIGSQKIEKEAVDMLANLLGLEKGYGHIVSGGTEANILAVRAMRNLAGIEKPELILPESAHFSFIKAAEMLGVKLVWAELNDDYTVNVKDVEKKITDRTIGIVGIAGTTGLGVVDDIPALSDLALDYGLPLHVDAAFGGFVIPFAKALGYEIPDFDFRLKGVKSITIDPHKMGMVPIPAGGIIFREKKFLDSISVLAPYLAGGKIWQATITGTRPGANALAVWAMIKHLGFDGYKEVVKEKMELARWFASELKKIPGIYLIREPVLNIVSFGSEKLEELEKELKARGWGVSAHRGYIRIVVMPHVKREHLEEFLRDLREIAKRL

SEQ ID NO: 4847 - protein, 225 aa, Nostoc sp. PCC 7120
MLTAILFDLDGTIVNTDPIHYQAWRQMLWKCNIEIDETFYKSRISGRLNPEIVKDILPELSSAAGREFADEKEALFRELASHLQPLNGFAELIAWTEVHQLKRALVTNAPRLNAEFMLEVLGITDSFHQIVLADDCVAGKPDPAPYQVALSKLGIPAEKAIALEDSPSGIRAAVGAGIRTIGIASTHDPDILLEVGSFMAIPDFTDLHLWTLLNSLIEPDLIRST

SEQ ID NO: 4848 - protein, 1645 aa, Nostoc sp. PCC 7120
MLIDYQRTKVLLIDNSLENWHCLSGFLAETKYLLQRVGTAKISISSVSELMPDIILIDSSIDKIDGHYFCQNLKAEETLQNISILLLTYIDQLSEYSSYFQIGVSDFISKPLCQEELFLRMRNQLKISSQQKNQLEEYHEPFPIGNGLISLNNAVNHNVISNKKECCFQLSDLNNEESINQSLNSQSLVSSNNKITRSKNNTQEYQINAVKLYKHNLVLTKLAKNQVLYQGNLKTALAEITNVAAHNLGIERASIWLYDETLTKIQCADLFEYSRNQHSAGLSLSAKEYPTYFQALHQDEAIAVDDAYTDPRTKEFAQSYLTPLNITAMLDTPIRLAGKTVGVLCLEAVKLPHHWTPEDQNFARSLTNLVSLALEARERQRAEAAHRISEQKLASAFRASPDPIALCTYPETRYIEVNDSFCRLFGYSRSQVIGNTDKELNIWVNLEECHFLSQILEKAKAIRNHEVDFRTSNGEIKTTLFSAEMIEIDGQKYILGTAKDITERKQAEAESRLLLLTTQAIARAVDVKSALTLVLRVICQTIGWDFGEAWTPNRESHVLEHSLVCYCEEASLEEFCHQSQNLRIAPGEGLPGRVWQTKQSEWIEDVSLVKQGQFLRSPQAAKVGLKAGFGIPIIAGKEVLAVLIFFKRSSIPVDKRLLMLLGAVATQLGSLIERKLIESAHRNSEERLQLALEASDLGLWDWNITTGKIYRDWQWQKMLGYTQEDIEDDERVIEQLLHPEDLATVKSAITAHLQGVTPVYEMEFRMRCAAGGWKWVQSRGQIVERNEQGQPLRMTGTTKDITERKILEKELELREARLNAFFSGAPVGMSILDNQLRFVQINELIAHIHGKPAQEHIGKTLEEIAPRIAPLVTPLCQKVLLTGQPILNVELSLPAVNQADSLRHFLVSYFPIPGEGNQLSGVGKVIVEISDVYDELRLRKRAEEALKESIERERAIAQVIQRMRQTLDLDTIFAATTEELRQVLNCDRAVVYRFDSQGSGEFVAESWGKGWISLIEKQKNVPHLTENTAKDQSCLAKLLEYTPQATPDKNFLCVADIYQAGFGSCYIEFLERLQAKAYIIVPILSGDQVWGLLATYQNSGPRQWKTGEINIVIQIGNQLEVALQQAQLLTQTQRQSQALEAAAIAADAANRAKSEFLANMSHELRTPLNAILGFTQIMSHDKTLSKDNQQNLTIINRAGEHLLDLINDVLEMSKIEAGRTTLNINSFDLIHLLDNLQEMMQGRATAKGLHLKFEYAPNIAQHIQADESKLRQVLLNILGNAIKFTETGSIILRVKMGTGDWGLGTEEDTKTHLSIPNTQSPITNPQSLIFEIQDTGIGICDDEVCVLFEAFGQTEAGRKSQQGTGLGLAISRKYVQLMGGDISVSSAVGVGSTFSFQIQVGLVSAHEIPYQPTTRSVIGLAPQQRECRILVVDDVADSRLLLVKLLSSVGFVVQEAANGQEALAIWQQWHPQLILMDMRMPIMDGYEATHFIRSAEIENHTTIPNPHTIIIALTAHAFEEQRQAMLQVGCDDLINKPFSEKEILEKLNKYLGIKYLYQEDSSQTLKARTKIFTHDNLLPLLSTLPRDWLINLYNAAAQCSDDLILKLVGEISAENTALKEYFVDLAHNFQFEKIMEIVSTIKDIS

SEQ ID NO: 4849 - protein, 354 aa, Triticum aestivum
HASGTSKSDIWSLGCCMFEILAHRSAFKATDMATLVNKINRSSISPMPPIYSSSLKQIVKSMLRKNPEHRPTAGELLRHPYFQPYLAESVNCSPIYLPVKPNKSNLGDKQSRKPSGGRKKVGKASGSSEALQAAAEQTAETRDRSTNYSDLSTVGTQDACILQMSVDPEARNKQELTAHVLSPQHVEENLAATTDGQIDETIRLKTIRTRSPVEAAPVNSASQKVNEAPIPNDEMTIGVVQEHRKGVKTESCQGVKQGMGDVDVVTEESSPVSTLKLGNAGSAPAEFDHLNIVQQRADALESLLEICAKLLEQERLDELAGVLRPFGEGAVSSRETAIWLTKSLMTPPKFGGSP

SEQ ID NO: 4850 - protein, 166 aa, Brassica napus
  misc_feature (23)..(23): Xaa can be any naturally occurring amino acid
  misc_feature (37)..(37): Xaa can be any naturally occurring amino acid
  unsure (1)..(166): unsure at all Xaa locations
GKIDKFIAGESTLPLHELESGGXRYFLGMFLGGAYEXALGGVHNLFGGPSVVRVLQSDGPHSFAVTRAVPGQSSADVLRGMQHEPEMMFETLKHRAEEVLHRKGGEGEDDDEGEFCNVAACLDRSFHNMPYLATEEVLSMSNSLSDAVSNLGFYYCDEDGFDYLSA

SEQ ID NO: 4851 - protein, 169 aa, Mesorhizobium sp. BNC1
MRRRNFLLGSAGAIVALGGGAFVLRGRPGADASAEEFEITKTEEEWRRILTPQQYAVLREEDTEPAFSSPLNEEKRAGMFHCAGCDLPVYSSAAKYESGTGWPSFWESLPNAIGTKEDNSFFMTRTECHCRRCGGHLGHIFEDGPPPTGKRHCLNGLALAFRPAETQSG

SEQ ID NO: 4852 - protein, 294 aa, Triticum aestivum
MRGWREEVVALSLEAHGPGDDRPEKPRRYGVTEMRSPCYSFRPAHHALQEILDNIGPFVDGLKFSGGSHSLMGKELIREITDLAHKHDMYVSTGDWAEHLLRQGPSSFKQYVEECKELGFDTIELNAGSLKLPEEAILRLVRLIKNTGLRAKPLFSVKFDSSDIPAAGDRAFGAYIAPVKQSSERVEDIDLLIRRAERCLEAGADMIMIDADDVCQRADSLRADIIAKIVGRLGLERTMFETSGANTSEWFVKRYGPRVNLFVDHSEVMNLERLRGLDVRRSVRPLLPSPFFLM

SEQ ID NO: 4853 - protein, 370 aa, Clarkia breweri
MGSTGNAETQLTPTHVSDEEANLFAMQLASASVLPMVLKAAIELDVLEIMAKSIPHGSGAYISPAEIAAQLPTTNPDAPVMLDRVLRLLASYSVVTCSLRELPDGKVERLYGLAPVCKFLTKNEDGVSLAPLCLMNQDKVLMESWYYLKDAILDGGIPFNKAYGMTAFEYHGTDPRFNKVFNRGMSDHSTITMKKIFEMYTGFEALNTIVDVGGGTGAVLSMIVAKYPSIKGINFDLPHVIEDAPIYPGVEHVGGDMFVSVPKGDAIFMKWICHDWSDEHCLKFLKNCYAALPEHGKVIVAECILPLSPDPSLATKGVIHIDAIMLAHNPGGKERTEKEFEALAIGAGFKGFKVACCAFNTYVMEFLKTA

SEQ ID NO: 4854 - protein, 479 aa, Corynebacterium diphtheriae NCTC 13129
MSAIESNEGEQLFDFVVVANRLPVDLSTSADGSPRWVASPGGLVTALTPVLAGNRGCWVGWHGGTGPAPDPFRTDTNIWVHPVALSDHDFEGFYEGFSNATLWPLYHDLIVSPVYNRDWWTAYREVNLKFASAVAEVAAEGAVVWIQDYQLQLVPGILRQIRPDLTIGFFLHIPFPHSDLFRQLPWREEIVRGLLGADLVGFHLTSSANNFLDLAAALGLEAQGRAKVREVSATVTAGDGHVVSVAAYPISIDVEPLIASHSNRDEIRAEFGYPETLILGVDRLDYTKGILQRLLAFEELLESGAIDPNTTVFAQVATPSRERIEHYKQARSEVEEAVGRINGRFGSIGRSVVHYHHRHMDRSELNKLYRAADVMLVTPFKDGMNLVAKEYVSCHSDGSGAMVLSEFAGAAVELEQAFLCNPFDLESIKRQIAGAVTTLKNHPEAARDRMLAMHQQVVDHDVNVWASAFLRDLSSAHTS

SEQ ID NO: 4855 - protein, 407 aa, Rheum australe
MDGVAQISDTDMAEAAPPPSDPSQPQPAAPDPSQHQPLPQQPQQINIPATLSHGGRFIQYNIFGNIFEVTAKYKPPIMPIGKGAYGIVCSALNSETSEHVAIKKIANAFDNKVDAKRTLREIKLLRHMDHENVVAIRDIIPPPLRDSFNDVYIAYELMDTDLHQIIRSNQGLSEEHCQYFLYQILRGLKYIHSANVLHRDLKPSNLLLNANCDLKICDFGLARVTSETDFMTEYVVTRWYRAPELLLNSSDYTTAIDVWSVGCIFMELMDRKPLFPGRDHVHQLRLLMELIGTPSEAELGFLNENAKRYIRQLPQYTRQSIPGKFPHVHPLAIDLVEKMLTFDPRQRITVEDALAHPYLNSLHDISDEPVCMTPFSFDFEQHALSEEQMRELIYREALAFNPEYQQG

SEQ ID NO: 4856 - protein, 765 aa, Arabidopsis thaliana
MASHIVGYPRMGPKRELKFALESFWDGKSTAEDLQKVSADLRSSIWKQMSAAGTKFIPSNTFAHYDQVLDTTAMLGAVPPRYGYTGGEIGLDVYFSMARGNASVPAMEMTKWFDTNYHYIVPELGPEVNFSYASHKAVNEYKEAKALGVDTVPVLVGPVSYLLLSKAAKGVDKSFELLSLLPKILPIYKEVITELKAAGATWIQLDEPVLVMDLEGQKLQAFTGAYAELESTLSGLNVLVETYFADIPAEAYKTLTSLKGVTAFGFDLVLGTKTLDLVKAGFPEGKYLFAGVVDGRNIWANDFAASLSTLQALEGIVGKDKLVVSTSCSLLHTAVDLINETKLDDEIKSWLAFAAQKVVEVNALAKALAGQKDEALFSANAAALASRRSSPRVTNEGVQKAAAALKGSDHRRATNVSARLDAQQKKLNLPILPTTTIGSFPQTVELRRVRREYKAKKVSEEDYVKAIKEEIKKVVDLQEELDIDVLVHGEPERNDMVEYFGEQLSGFAFTANGWVQSYGSRCVKPPVIYGDVSRPKAMTVFWSAMAQSMTSRPMKGMLTGPVTILNWSFVRNDQPRHETCYQIALAIKDEVEDLEKGGIGVIQIDEAALREGLPLRKSEHAFYLDWAVHSFRITNCGVQDSTQIHTHMCYSHFNDIIHSIIDMDADVITIENSRSDEKLLSVFREGVKYGAGIGPGVYDIHSPRIPSSEEIADRVNKMLAVLEQNILWVNPDCGLKTRKYTEVKPALKNMVDAAKLIRSQLASAK

SEQ ID NO: 4857 - protein, 720 aa, Rheum australe
MMNLWSSDDNVAFADAFMSLDSSSAAAWPPAPSSHQYNHQYNLQHQQQLQHQPQQQQQQQQMANSAGGGWQQAMAGGAQMNPAQMMNQDSLQQRLQALIDDARESWTYAIFWQCNVEPTGQSLLGWGDGYYKGDDSANKNASSAAPAAGSRPPKNPAEQEHRRRVLRELNSLISGSSSPQNDAVDDDVTDTEWFFLISMTQAFPFGVDLPGQAILGSNPIWAYGSDRLAGSPWDRARQGAAFGLQTIVCIPSGTGVLELGSTELVFNSSVLMNKVRVLFNFGSGDASLLTAAASSSAPAAAPPPPISTATTDEAENDPAALWISDPSSSAAEVKEALNPRITVRESSIPIGSNSIPVHQPAKPPQLDVQSSIGLTENSIGIHSQKSHNQPLQHQGFFTKELNFSEFAMKPESGEILNFGESKRNSLGNGNGLNSQFLVEESNKNIISKKRSPTSRGSAEEGMLSFTSSVVLPSSMAVKSSATGAGDSDHSDLEASVVKEADSSRVVDPEKRPRKRGRKPANGREEPLNHVEAERQRREKLNQRFYALRAVVPNVSKMDKASLLGDAISFINELKSKLQNVESEKETLLSQVECLKTEVLASRDHQSRSSNGGGGVQNHHHPSLEQDMNMLNGSCKQSDLDVDVKIIGRDAMVRVNCSKSNHPAARLMVALKELDLEVTHASVSVVNDLMIQQATVRMGSRYYSPDHLRMVLEAKVSDIRG

SEQ ID NO: 4858 - protein, 252 aa, Corynebacterium diphtheriae NCTC 13129
MWTSKQQQALDHLAATPSLLVVSDFDGTLAGFSHDAMQVPVNHVAMAALQQLTSLPSTRVALLSGRDVQGLIQVSGAAAPMIVAGSHGAESTEGGLVLNEDQQAALSAVTAALEEIATSVPGAFVEHKPYHRVLHVIRVADQQRARAALDRALALEIPGAKIAEGKWIAEASVVDFTKGTWIKAAQEQYRPSVTLFLGDDTTDENGFAVLGCNDVGIKVGAGDTCATVRLESIDRVGQFLSSLADARSAAQQ

SEQ ID NO: 4859 - protein, 566 aa, Arabidopsis thaliana
MGTSSGSNLPHQMLPPRQQLQTSLSLVSSDPHLSRSNSGIVRESPAESASSQETWPTSKSIMGRKTDSGKTGPDSHDQHVIRHVSIADKVSLRDIARERLDIVAERMHRLPEEYLEELKNGLKAILEGNGAQPIDEFMFLQKFVQTRSDLTSKTLVRAHRVQLEVLVVINTGIQAFLHPNINLSQSSLIEIFVYKRCRNIACQNELPADGCPCEICANRKGFCNLCMCVICNKFDFAVNTCRWIGCDVCSHWTHTDCAIRDGEISMGVSPKSVSGMGEMLFKCRACNHTSELLGWVKDVFQHCAPNWDRESLMKELDFVSRIFRGSEDTRGRKLFWKCEELMEKIKGGLAEATAAKLILMFFQEIELDSPKSLESGEGGGTIAPQDACNRIAEVVKETLRKMEIVGEEKTRMYKKARMGLEECEREVEEKAKQVAELQMERQKKKQQIEEVERIVRLKQAEAEMFQLKANEAKVEAERLERIVKAKKEKTEEEYASNYLKLRLSEAEAEKEYLFEKIKEQESGGNGGEASQAVMYSKIREMLHGYNASSPRVDPRSNQRNPFRSNP

SEQ ID NO: 4860 - protein, 125 aa, Oryza sativa (japonica cultivar-group)
MHGKHQHQQQQQQQGGMVVVAPKGCVTVRVGAEGEEQRRFAVPLAHLKHPLFGALLEEAEREYGFAQRGAIAIPCRVDRFVHVEHLIVQDLHGAAASHLLDLDSSSHHHTQIHLHLPRFAGCFRA

SEQ ID NO: 4861 - protein, 163 aa, Thiomicrospira crunogena XCL-2
MIAFIKHQVKTFGLIELFKGLAVTGKYLFKKKITVRYPEEKTPLSPRFRGHHALRRYENGEERCIACKLCEAVCPANAITIESEERDDGTRRTTQYDIDMFKCIYCGFCEEACPVDAVVETRVFEYEFHERGTHIMTKEQLLAFGDKHESQIAADRAADAKYR

SEQ ID NO: 4862 - protein, 798 aa, Chlamydomonas reinhardtii
MSSSRYAKLVEFAAHAGDVRCVRIGRKTAGVLVTGGDDKKVNVWALGKTTASFSLTGHQSSVESVSFDNDEMVVAAGGSNGSIKVFELQTGKVTKSLSGHKSNVMCLAWHPYDSTIISGSMDTNVKLWNLRDKEAVMTFKGHNAGVTHVRYSPDGNWVASASGDGAVKIWDVRQGRLLQDLCPPTKYEITGVEFSPTEYLMATSSRDKLVRFWDLETFACIDQTTPEATPVRNICFYNDGRTIFSAVQDGCRVWNVDPTQQQDYVDVPWYRVADLAISTIRGTQRLIGCSFNSTMVGLFYIVLKNVRPFCEDPDFMAREPAASVDGNPYAAAGGSRSNLAGAAAAAQLPPESAVRRLSLNDRAADPPRAGSAGNLGDAAAAAAAAAGYGNGRGAGVAAGVGPSVGVGRSQERSSSMGSRPPQAPSSSAVAAGGDRLPPVALYGAPDRDRERDRSSNRYAGAAGASADFGGGPGDSVASDAQLGRAASGHAAGARPGMVSIGVGVGDSLMRGQLQPDDLSRMAGGGGGGLARQRSQPREPTIEVHAPAAPPASRSAGSGPGYRGAGSGPDRGVGVGVGVGVGEDRDMDQRYPWQGQAAQLAGPSGMDRLGGGGGGAGGGGYASVVPSDLEAASALSSRHGMFLSAMKKRANTLMIMRNFVQKGDWRNAIAAARRGDDTAALADLLSAMHDRRDVFTLDLVGEVMTVVETVLSLPSDRQQQTGLEVLALHIRAFGPVIRDLCGPGARGVGIDLSFEERRERAAKAKLVLQNMVPRLNSLARSSETLGVRAGELAAQLAQL

SEQ ID NO: 4863 - protein, 419 aa, Mannheimia succiniciproducens MBEL55E
MTDLIQMGKQAKQAAFALSQLSQQEKNHALALIAERLEAQQERILAENAKDIQAARENGLSESIIDRLLLTKERLTGIADDVRHVISLADPVGKIIDGGVLDSGLKLERIRTPLGVIGTIYEARPNVTIDVASLCLKTGNAVILRGGKETQHSNKILVEVIQNALQQAGLPEMAVQAITDPDRALVMELLHLDKYVDMIIPRGGAGLQALCRDNSSIPVIVGGIGVCHIFVEQSADQDRSLAVIENAKTQRPSTCNTVETLLVQESIAEEFLPKLARRLKTKEVKFHADSTALSILQGVSADVKPVTEQQLRNEWLTYDLNVVIVKGIEEAVEHIREYGSEHSESILTESQKLANQFVAQVDAAAVYVNASTRFTDGGQFGLGAEVAVSTQKLHARGPMGLEALTTYKWVCVGDYTSRA

SEQ ID NO: 4864 - protein, 530 aa, Triticum aestivum
MRLLMSRKRHRLRCRRRIRDRGPVALVAKRKSLRCQQDDNYHVDRGISCPDLPEDILRHIHAKMTLRDAARATCASHAFRHNWICRPNLTFSLGTLGLNRNASRDVITRDLISKIDLIMQNHSGIGVKTLDIDLYSCDNIDFAYLDSWLRIAVTPGIEELILTLPLPSIVFENALPIISVYNFPCSLLSNGSGNSIQYLNLCYCTLRPTAGLGCLRSLTRLHMSCTRITGDELWCLLSNSPALVCLKLLHCEEIISLKIPSLLQRLRFLEVAYCDRLQVVESNAPNLTTFYFAGFLGQISLGGSLQLKTLRMICFRQTNIVCYARQNLLSIAPNVETLTISSLNEMVNTPMLSSKFLHLKLLQISLVGMAFSGAYDYLSLVSFVDASPCLENFVLAISQHRMGHASILGEPSHDLRQIPQQRHAKLKSVTITGFCSAKSLVELTCHILENTTSLDCLTLDTTCHPSCAVTKFDKCHPLMDGDSLVEAQKALLAIRRYVLGKVPSMVKLNILEPCSRCHAVESLVSTAKLS

SEQ ID NO: 4865 - protein, 831 aa, Oryza sativa
MAGPTSRRLLLLVARRAGHLCRHHHHHHHRDGLVLARSLQAAAAAAASSPPPLPASPPARSFSSAFSSVHGERPSSEYAKIRKESLESQFGRILGSSSRTLFADRGFGPFLAMYRAAIISFHVMKLTIWHLLLSDVHKRAEKFQETLIRLGPFYIKLGQALSTRPDILPNAYCQELSKLQVYVDKSQLSHQDQIPPFPTRIAIRTIESQLGSRISDLFADISPEPVAAASLGQVYKAHLHSGELVAVKVQRPGMTPLLTLDALLFHMIGGQLKRFAKARKDLLVAVNEIVRHMFDEIDYVLEGRNAERFARLYSHDLGGNSSGDGTSIKVPKVYWNFTRKSILTLEWIDGIKLTDAERIGKANLNRKRMIDEGLYCSLRQLLEEGFFHADPHPVQSGAFLHSFASSNFELKIRNDWRFKHHLRLPWVTLVHYVNRDSLGLANDFHSLGFVPEGTDLHGVADALRVSFGDGRRQSNDFQGVMSHLYDVMYEFNFSLPPDYALVIRALGSLEGTAKALDPDFKVIESAYPFVIGRLLEDPSPDMRKILRQLLICDDGSIRWNRLERLIAAISEQSESSNKSEDRSGENAANKPGWRSFDMHSVVAATEDLFHFILSRKGWRVRVFLVQDIVKASDAFLQEATFPGIFDEEGTTGELHPERSKMIRRVVHGVQSFRQAISLAPDAWTAMLFRTLLKPESQKFILDVFLALAMHSCYKIPETSWICMSRFLNYLDRQEANMLIFVRAATDLLMPLPTSFISVRVRTAGEVVNQNLRLLVLVCLQPQLHASKTIDSAEVITDLPHDKSHKSDMGEPRTKLARDPIIYFLRYNSQIV

SEQ ID NO: 4866 - protein, 452 aa, Neurospora crassa
MSCNSDCHTCPKSSHQEAAEALAAAQSRYVANNPLSKKQHELAVESLPGGNTRTLLHTSPFPLCMKHGKGTFVWDEDGHKYTDFVGELSAGLYGHSHPVIRAAILSTFDEIGLSLGSTTTYEARYASLLCQRFKLERVRMTNTGTEANLHALAAARHYTRKKKVVVFNGGYHGACFSFGGGKAAPNTADKGDFVVVQNYGDDEAAAEARRVIEETAREGDLAAVLVEGMQGAGGCLPGSKEFLLAAQEAAKNTGAIFILDEVMTSRLAPNGLGQELGLSPDLVTLGKYLGGGFSFGAFGGKKEIMDSVYDPRVKGSLAHSGTFNNNTMTMCAGFAGLNQVFTEEVCVELNRVGDVLRGRLNGVAKRTRLRFTGRGSLIGLHFRENGTFESQERADLRDLFWFEMLEEGFWTTRRGFIAMMLDTPKDELDRNMVDVDRDSNADLADLPMEVWN

SEQ ID NO: 4867 - protein, 270 aa, Mesorhizobium sp. BNC1
MVEDPLHHGIRMTFGNRISCCSLIEGLEPRRETCHKEAMTNRPDPARFAHVTDWVFDLDNTLYPRHSNLFSQIDLKMTAYVSKLLHMPSDEARKLQKELYREYGTTLRGLMERYSVDPDDFLEQVHDIDYSWIKPDPLLGEAIRSLPGRKFIFTNGNRGHAERAARQLGVLEHFEDIFDIVAAGLRPKPAKESYDLFLALYTVMGPNSVMFEDLARNLTVPKERGMTTVLIVPSNLEPTYSEIWEQDLGHADHVDYVTDDLTGFLTAIRS

SEQ ID NO: 4868 - protein, 555 aa, Pseudomonas aeruginosa UCBPP-PA14
MVTANRLPLEVFFEREKRHPQRRYLVQPIGGGRVEELSWGEVGDQARRAAAWLRSLDLPAGSRIAIISKNCAHWIVTDLAIWMAGHVSVPLYPNLTAESARQVLEHSESAVVFVGKLDDWPAMAPGVPEGIPTVAMPLHPEGRFDRQWSDLQACAPLEGDTPTAAEQLATLIYTSGTTGVPKGVMHNFSSFAFAASRGVELFGTREDDRMLSYLPLCHVAERMFVEMGSLYGGTTVFFAESLDTFLEDMKRARPTLLFGVPRIWTKFQMGVYSKMPAQKLDRLLKLPILGRIVGRKVLAGLGLDAVRYALCGAAPVPEALLLWYRRLGLDVLEVYGMTENSGYSHVCRPGRQKTGWIGQNSPGVEVRISDEGEVQVRSGATMVGYYKEPEKTAEVLTSDGFLRTGDKGEQDADGNLRLTGRMKEIFKTSKGKYVAPAPIENRLAVHDRIEQVCVVGEGLSAPLGLCVLSEVGRREALNGTRGALESSLRAHLEQVNGALDKHERLVGLVLVQETWAVDNGFLTPTLKIKRNMVEGAYGSRFHEWVERREAVLWHE

SEQ ID NO: 4869 - protein, 355 aa, Oryza sativa (japonica cultivar-group)
MEQPKPPSVAASAAEAQNPNAFTCELPHSIYALAFSPSAPVLAAGSFLEDLHNRVSLLSFDPVHPTAASFRALPALSFDHPYPPTKLQFHPRAASAPHLLASSSDALRLWLAPLDDLAATATAAAPELRSVLDNRKTSASEFCAPLTSFDWNEAEPRRIGTASIDTTCTIWDIERGVVETQLIAHDKAVHDIAWGENGIFASVSADGSVRVFDLRDKEHSTIFYESPRPDTPLLRLAWNRYDFHYMATLLMDSSAVVVLDMRAPGVPVAELHRHRACANAVAWAPQATRHLCSAGDDGQALIWELPATPGAVPAEGIDPVMVYDAGAEINQLQWAAAYPEWISIAFENKVQLLRV

SEQ ID NO: 4870 - protein, 324 aa, Glycine max
MHETHSIGGGRFYGGGDRRLRPHHQQQQPPPLKCPRCDSLNTKFCYYNNYNLSQPRHFCKNCRRYWTKGGVLRNVPVGGGCRKSKRSNKPKTTTTTTTSNTNNNRSSFSATAPATAPTPPAPELEHHSHSHSSSESSTLTVTATEEMSAPPPTTSNAPSKNSLLLDNDHREAKMFANPNPNPSLDSGGIFSEIGNFTSLINLNNNEAFGFGNNKNNNSILDATSFRFGISVTNQVQAAAGGGHGQWQQQNHQEFGTASFLDHTVPLEFSSLQHKTGHQGGFGSLDWQPGADQGLFDLPNTVDQPYWTHAHWSDQDNTSSLFHLP

SEQ ID NO: 4871 - protein, 877 aa, Arabidopsis thaliana
MKSSYGSSSNDLHAFVNEIKGEIQLSNINLDPYSFVSPSAYDTAWLSMIEEDINVDDNELKPMFQGCLDWIMCNQNAREGFWMNSTSYTTVADGRDEDGEKDMCILTSTLACVVALQKWNIGCFHLHKGCSHDLHAFFIMKMQQYFKLYISGTRYIERNTEMIIGKYINEEGSYPRWFAIKFTGILELAQKLGLHFVFSSRCIEMIKGMFYQRQEIIQREKLVHDCNYKPLLAYLEVLPSKLYVTNQEDIIVKSLDSMDGSLFQSPSATASAFMLTRNTKCLAYLQNLVQKCPNGVPQKYPLNEDLIKLSMVNLIESTGLGEFFGIEIEHVLEQVYSRYEEKDFERMPMSYLADQLHKDSLAFRMLRMHGRDVSPRSFCWFLNDQETRNHLERNIDSFLLVILSVYRATDLMFPGEHDLQEAREYTRNLLEKRRSIKEKMIMHELSTPWIARLKHLDHRMWIEDKNSNVLSMEKASFLRLHSSYSDKLTHLAARNFEFQQAKYCRELEELTMWVKKWGLSDIGFGREKTTYCYFATVTSLPYEYAIKFGKLAAKTAILITIADDFFDEKGSFNDLEGLTKAVLRWEGEELKSYGNIIFRALDDIWGETFESWLREAEWSKKGHTSSMDEYIRNGMISIAAHTIALSISCLMEPCFPHNKLKPGNYDSITTLLMIIPRLLNDLQSYQKEQEQGKMNSVLLHMKNHPGLEIEDSIAHIEKIIDSKRKEFLEHVLVDGLSDLPKPCKEIHMSCCKVFEMFFNKKNRYDSNTEMLHDIKKALYDPINVYELSEMEPMPLMAHGDEYMILPLLLNSLPNILEFKRKDGYGAMKTSMCFGRSYRVNKRVMASQLDDQHKPLKIVASQRKPVPMMQSIFAPCFY

SEQ ID NO: 4872 - protein, 267 aa, Oryza sativa (japonica cultivar-group)
MDVAADATAWPPGWSLVRGYFSPATLFLLLNVVIGTIALTSRASHRRRQHHHDEHYKAQHHHDHHDEPQRCHDQYAPPPPAPLERTSSVMERLRSFGLYRFRSGDFPPEYNLSAAGANAICDESEKQQAQYTRSRSEPAARPAPPPVEKRGKAENAAAAGAARAKVAVKKSSSSEVRKLERAPAQAQRQVLQVQRAQPPPPRAPAPAPARAVKSAAREEVETAQVGLATASSVDARADDFINKFREQLQLQRLNSLLNYNEMLNRGT

SEQ ID NO: 4873 - protein, 392 aa, Streptococcus suis 89/1591
MKKYLKFAILFVIGFFGGLIGALSASFFQPRVQQANSAITSVSNVQYNNETSTTKAVEKVQNAVVSVINYQKSANNSLGAIFGNIESSDELAVAGEGSGVIYKKDGQYAYIVTNTHVINNAEKIDILLASGEKISGELVGSDTYSDIAVIKISADKVTAVAEFADSDTIKVGETAIAIGSPLGSVYANTVTQGIISSLSRTVTSQSKDGQTISTNAIQTDTAINPGNSGGPLINTQGQVIGITSSKITSSSANSSGVAVEGLGFAIPANDAVAIINQLEKTGQVSRPALGVHMVNLTTLSTSQLEKAGLSNTELTSGVVIVSTQSGLPADGKLETFDVITEIDGEAIQNKSDLQSALYKHQIGDTITVTYYRNNQKQTVDIKLTHSTEELSE

SEQ ID NO: 4874 - protein, 144 aa, Physalis crassifolia
DTQEWNPATDKYTDVKYDITTVMDAKPLLKEALQAAVGLPVDRNIPLIGFIGRLEEQKGSDILVAAIHKFIGLDVQIVVLGTGKKKFEQEIEQLEVLYPDKAKGVAKFNVPLAHMITAGADFMLVPSRFEPCGLIQLHAMRYGT

SEQ ID NO: 4875 - protein, 461 aa, Vibrio vulnificus YJ016
MNALHSETNNPKTLPEGLLKTITKLGFPVAIQSALVAILALADVLMVSDFGKEATAAVGIASKWHFIAIMIMAGLASANGTLVAQYWGKDDVRSAKAVSLIALSFGLKVLIPVTLLITLGSQFIMMLQTNDQTVIGLGSVYLWYAFPVLLLTHIVIVIESSMRSSGDTVTPLIIGSLTIVINIALNYWLIKGGFGIPAMGVAGAALATSISRAIQVLLMLALMKLKQHWLLTTEASSERPSLWLSYRRLALPVTLGAVLWGIGTMAYQIIFGHMGTTELAVFSMLGPFESLCYAIFFGLSVACSVLIGQSLGRNEFERAQAMAAYFIKVVFIVGLSVGAFMLLNREWILAGLNLNTEELRPLAAPAVIILCCGIWIRMLNMTIINGIIRAGGDNVFCLRMDFIAMWMTGIPLCAFAAFIAGMEFKVVYSLMLAEEVVKLALCYRRYTQKFWIKNLTVVTTC

SEQ ID NO: 4876 - protein, 366 aa, Solibacter usitatus Ellin6076
MKATQLIHDLGQSIWLDNITRDLLKSGTLQRYIDELSVSGLTSNPTIFDQAIKNSPAYDASIREGMERGQSGEALFFDLALADLTAAADLFRPLHERTNSIDGWVSLEVSPLLAHDTESTLREAKELAARAKRPNLYIKIPGTKEGLPAIEQAIFAGIPINVTLLFSREQYLAAAEAYTRGIERRLEAGLNPGVGSVASLFISRWDVAVMNSVPDALRDQLGISIAGRTYKAYRELLGSSRWQRLYNSGARPQRLLWASTGTKDPKASDILYVKALAAPFTVNTMPEGTLTALAAHTSLGPALPADGGDCEEMLGKFAKAGVDIDALAAQLQDEGAKSFVKSWTDLTSVIRSKCADINKSTLKAGG

SEQ ID NO: 4877 - protein, 252 aa, Novosphingobium aromaticivorans DSM 12444
MNALFDLSGKAAIVTGSTRGIGRAIAEALVAAGARVVISSEDAADTARVAAELGMPGCACDVADDLQLAALVEFSLASLGRLDVLVCNAGITGKAGPFAEIDMDDYARVMAINLRSQVVMCNLALPHIAAGGGGAAILVASLSALRGNGRINAYALAKAGVAQLARNLAVEWGPRAVRVNAVSPGFIATELSGPLLADEGFMARRMSMTPLRRPGTPAEVAGAAVFLASPAGGFVTGHNLVVDGGTLVTDGS

SEQ ID NO: 4878 - protein, 590 aa, Pseudomonas syringae pv. phaseolicola 1448A
MANINSLSFDAIIIGGGGAGMRAALQLAQGGHKTAVVTKVFPTRSHTVSAQGGITCAIASADPNDDWRWHMYDTVKGSDYIGDQDAIEYMCSVGPEAVFELEHMGLPFSRTEQGRIYQRPFGGQSKDFGKGGQAARTCAAADRTGHALLHTLYQANLKAGTVFLNEYYGVDLVKNQDGAFVGIIAICIETGETSYIRANATVLATGGAGRIYSSTTNALINTGDGIGMALRAGVPVQDIEMWQFHPTGIAGAGVLVTEGCRGEGGYLINKHGERFMERYAPNAKDLAGRDVVARSMVKEIIAGNGCGPDGDHVMLKLDHLGEEVLHSRLPGIMELSKTFAHVDPATAPIPVVPTCHYMMGGVATNIHGQAITQDAAGVDQIIPGLFAVGEVACVSVHGANRLGGNSLLDLVVFGRAAGIHLEKALSEGIDYARASESDIDAALARVAGLNERTTGEDVATLRKELQSCMQNYFGVFRTGEYMQKGIAQLADLRVRIANVKINDKSQAFNTARIEALELQNLLEVAEATAIAAEHRKESRGAHAREDFEDRDDENWLCHTLYFPGDKRVTKRAVNFSPKTVPTFEPKIRTY

SEQ ID NO: 4879 - protein, 252 aa, Zea mays
  misc_feature (214)..(214): Xaa can be any naturally occurring amino acid
  misc_feature (245)..(245): Xaa can be any naturally occurring amino acid
  unsure (1)..(252): unsure at all Xaa locations
MAPSAVDSTHHSADGNRPGDIHRDYLDDRNAKAQDTLYTTSNGVPMPHPYETQRVGENGPLLLQDHHLIDLLSHFDRERIPERVVHAKGGGAHGIYRTTDALDDLCLADIFQQGHECPITVRFSTVGGESGTPDLARDPRGFSVKFRTAEGNWDMVANNTPVFFLRDPAKFPHFIHTQKRHPQTHLTHSDDSTVFWDYLSQNPESVHQVMILMXDRGIPHSWRKMHGYAGHTLKLVNKNGDWVYXQMHMKSK

SEQ ID NO: 4880 - protein, 278 aa, Nicotiana tabacum
MVRAPCCEKMGLKKGPWIPEEDQILISFIQTNGHGNWRALPKQAGLLRCGKSCRLRWTNYLRPDIKRGNFTKEEEETIIQLHEMLGNRWSAIAAKLPGRTDNEIKNVWHTHLKKKLKDYKPPQNSKRHSKSKNHDSKGPTTSESSNNSDLTIINTQKHIDSPVLAPNSPQISSSTEMSTVTLVDDHQMVVIKQEVMESSEYFPEIDESFWTDELTTDNNWSSTDHVMVAANQELQVQLPFSSFKEENVDILATKMEDDMDFWYNVFIKTDDLPELPEF

SEQ ID NO: 4881 - protein, 286 aa, Rheum australe
MAAAPVVDADYLKEIDKARRDLRALISSRNCAPIMLRLAWHDAGTYDAKTKTGGPNGSIRNDEEFSHGCNNGLKKAIDWCEEVKTKHQKITYADLYQLAGVVAVEVTGGPTIDFVPGRKDSKVSTKEGRLPDAKQGPPHLRDIFYRMGLTDKDIVALSGAHTLGRAHPERSGFDGPWTKEPLKFDNSYFQLLLEEESEGLLKLPTDKALVEDPAFRPYVELYAKDEDAFLGDYAASHKKLSELGFNPVGPKPVTQSSILAQSAVGVVVAAAVVVFSFLYEARKQLK

SEQ ID NO: 4882 - protein, 282 aa, Pseudomonas fluorescens Pf-5
MTTALQQPSLSGQCIAEFLGTALLIFFGTGCVAALKVAGASFGLWEISIIWGIGVSMAIYLTAGVSGAHLNPAVSIALCLFADFEKRKLPFYILAQIAGAFCAALLVYTLYSNLFFDFEQTHQMVRGSQASLELASVFSTFPNPALSTAQAFLVELVITAILMGVIMSLTDDNNGLPRGPIAPLLIGLLIAVIGSAMGPLTGFAMNPARDFGPKLMTFVTGWGEISFTGGRDIPYFLVPIFAPILGACLGAAAYRGLIARHLPSAAVAPEAEQVTEGKVKAS

SEQ ID NO: 4883 - protein, 410 aa, Gluconobacter oxydans 621H
MTHPATFAQLDPPSRLLMGAGPTNVHPRILRAMSYDVIGQMDPEMTAYMDEVMALYREVFRTKNHWTLLVNGSARSAIEAALVSLVSPGMKVVIPRFGRFGLLLTEIVHRCGGIPCTVDVEWGQVVDPAAIEAAIIEHKPGLVACVHGDTSTTTAQPLEEIGRICRKHDVLFYVDATATLGGMTFETDAWNIDVATAGLQKCLNGPPGSAPITLSERAVAAILKRRHDEAGIATGQAQGDGPVIQSNYFDLAMLMNYWSPARMNHHTEATSMLYAARETARLVVEEGVEARVARHVRAGRAMVAGLRAMGLKVYGDDATRMSNVTGVWVPEGVDNARIRQLMRDDFGIEIVSSFGPLTGKIWRIGAMGINARKDKVLLTLAAFDSVLAGEGVKLNRGAGVDAARAAWDAV

SEQ ID NO: 4884 - protein, 326 aa, Yersinia pseudotuberculosis IP 32953
MKPSIVLYKSIPTDLHQRLAQHFTVNSFDGLTPDNQPELLAALQQAEGLIGSGGKIDQDFLQLAPNLRAASTISVGYDNFDVEALSQRGIALMHTPTVLTETVADTMMALMLSTARRVVELAERVKAGEWQESIGDDWFGVDVHHKTIGILGMGRIGMALAQRAHFGFSMPVLYTSRRPHEAAEQRFGARHCSLDTLLAEADFLCITLPMTEQTYHMIGREQLAKMKSSAILINAGRGPVVDEQALIAALQDGTIHAAGLDVFEQEPLPVDSPLLTLRNVVAVPHIGSATHETRYNMAACAVDNLINALTGTVKENCVNPQVLITH

SEQ ID NO: 4885 - protein, 369 aa, Arabidopsis thaliana
MMHEMAYKVCVEKVKSLGIEFTTPIEETLRDTIVSLMEDCLLRSKEIMNGGGKLVCVTGASGYIASWIVKLLLLRGYTVKATVRDLTDRKKTEHLLALDGAKERLKLFKADLLEESSFEQAIEGCDAVFHTASPVFFTVKDPQTELIDPALKGTMNVLNTCKETPSVRRVILTSSTAAVLFRQPPVEASDVVDETFFSDPSLCRETKNWYPLSKILAENAAWEFAKDNGIDMVVLNPGFIFGPLLQPTLNFSVELIVDFINGKNPFNSRFYRFVDVRDVALAHIKALETPSANGRYIIDGPIMSVSDIIDILRELLPDLCIADTNEESVMNEMLCKVCVEKVKNLGVEFTPMKSSLRDTIVSLKEKCLL

SEQ ID NO: 4886 - protein, 144 aa, Nicotiana tabacum
RFNKVFNRGMSDHSTMSMKKILEDYKGFEGLNSIVDVGGGTGATVNMIVSKYPSIKGINFDLPHVIGDAPTYPGVEHVGGDMFASVPKADAIFMKWICHDWSDEHCLKFLKNCYEALPANGKVIIAECILPEAPDTSLATKNTV

SEQ ID NO: 4887 - protein, 307 aa, Thiobacillus denitrificans ATCC 25259
MHTAYLTHADCLMHDMGSWHPESPARLRAIDDRLHAAHLFDHLAHHEAPRVQRAQLLRVHDAAYVDFIEASSPEHGVRALDADTSMNPHTLSAALRAAGGAAMAVDLVMGDDTANAFVACRPPGHHATRRRAMGFCIFNNVAVAAAQALDVHGLERVAIVDFDVHHGNGTEDIFRDDPRVMLCSTFQHPFYPFAGADTASAHIVNVPLPAGTDGARYRDAFRAQIVPRLDAFAPQMLFCSAGFDGHREDDMAQFGLLEADYVWITEQVMAVAARHACGRIVSVLEGGYDLSSLGRSAAAHIKTLAAL

SEQ ID NO: 4888 - protein, 632 aa, Campylobacter jejuni RM1221
MDIQILQEQANTLRFLSADMVQKANSGHPGAPLGLADILSVLSYHLKHNPKNPTWLNRDRLVFSGGHASALLYSFLHLSGYDLSLEDLKNFRQLHSKTPGHPEISTLGVEIATGPLGQGVANAVGFAMAAKKAQNLLGSDLIDHKIYCLCGDGDLQEGISYEACSLAGLHKLDNFILIYDSNNISIEGDVGLAFNENVKMRFEAQGFEVLSINGHDYEEINKALEQAKKSTKPCLIIAKTTIAKGAGELEGSHKSHGAPLGEEVIKKAKEQAGFDPNISFHIPQASKIRFESAVELGDLEEAKWKDKLEKSAKKELLERLLNPDFNKIAYPDFKGKDLATRDSNGEILNVLAKNLEGFLGGSADLGPSNKTELHGMGDFVEGKNIHFGIREHAMAAINNAFARYGIFLPFSATFFIFSEYLKPAARIAALMKIKHFFIFTHDSIGVGEDGPTHQPIEQLSTFRAMPNFLTFRPADGVENVKAWQIALNADIPSAFVLSRQKLKALNEPVFGDVKNGAYLLKESKEAKFTLLASGSEVWLCLESANELEKQGFACNVVSMPCFELFEKQDKAYQERLLKGEVIGVEAAHSNELYKFCHKVYGIESFGESGKDKDVFEHFGFSVSKLVNFILSK

SEQ ID NO: 4889 - protein, 298 aa, Saccharomyces cerevisiae
MSGELANYKRLEKVGEGTYGVVYKALDLRPGQGQRVVALKKIRLESEDEGVPSTAIREISLLKELKDDNIVRLYDIVHSDAHKLYLVFEFLDLDLKRYMEGIPKDQPLGADIVKKFMMQLCKGIAYCHSHRILHRDLKPQNLLINKDGNLKLGDFGLARAFGVPLRAYTHEIVTLWYRAPEVLLGGKQYSTGVDTWSIGCIFAEMCNRKPIFSGDSEIDQIFKIFRVLGTPNEAIWPDIVYLPDFKPSFPQWRRKDLSQVVPSLDPRGIDLLDKLLAYDPINRISARRAAIHPYFQES

SEQ ID NO: 4890 - protein, 466 aa, Actinobacillus pleuropneumoniae serovar 1 str. 4074
MGPATDRGNNLEKVIAAGANMVRMNFSHGVPEDHIERANKVREIAARLGKTVAILGDLQGPKIRVSTFKDGKIFLNIGDKFTLDADLPRGEGHQDAVGLDYKNLPNDVVPGDILLLDDGNVQLKVLSVEGVKVHTEVTVGGPLSNNKGINKLGGGLSAPALTEKDKEDIKLAAKIGVDYLAVSFPQSSADLDYARQLAREAGLEAKIVAKVERAETVATEEAMDDIILGSDVVMVARGDLGVEIGDAALVGVQKRLIRRARKLNRVVITATQMMESMIKKPMPTRAEVMDVANAVLDGTDAVMLSGETANGDYPVETVKSMAEVCLGAETMPSINISRHRMEGTFATIDEAVAMSAMYTANHLEGVSALIALTHSGETAKLMSRISSGLPIYALSRNQQALNRTALYRGVTPVFYDEESRTFEGAKKAIALLKEKGYLMSGDLVLLTQGDELKEGGTNTSRLLKVE

SEQ ID NO: 4891 - protein, 875 aa, Listeria innocua Clip11262
MAKTKVHVIPHSHWDREWYFTSSRSTIYLVKHLKEVIETLEAKDNYHFYLMDAQSSLIEDYLRYCPEDKTRLEKLIAEKRLITGPWYTQTDQLVISQESIVRNLLYGTRIAREMGHSMAVGYVPDAFGQGGNMPQIYKEFGISKFLFWRGVADNRLKQTEFIWRGDDGTEMLAEQIPFGYYYGANIPENEAELKTYLDEQIGALEEKASTPNVYFPNGLDQAPVRKNLPELVAKFNELDHSREYQIASPETFFADLEKDVTDLPVIAGELTEGKHSRLHKSIFSTRADLKQANNEIENFLSNVLEPVLSISYSLGNRYPHNELAEIWKLMFENAAHDSIGGCNSDTTNRDVKHRYKLASDLATNLLDLNMRLISEKIAQKQPFQFTVFNPLPYEKSGVIKMTAYIPEDNFTIEDTRGNTLEYTILEKKDLTEYVLNQHIYLNPSKPVYLPEKVFLATMLVDVNSIPALGYDTIYFNLEKEVAEQQPKQSAETKIENEFYKIQLADNNSLTIHDKKSGRTYTDQMIFVENGDDGDSYNYSPPRKDLLISSKEAIIDSVEASVSGINQTLTISFKLNVPYNLEERANGEKTKEMTIKTLISLRKNEELIRFDVQVINQVLSHRLCVTFATEIASKFSTADQLFAPINRPVRLPEMDVWEAEEWQEAPISIEAMQSFVSLHDESHGVAVMTEGVREYEIIGENYDTISLTLFRTFSHMGKTDLLYRPGRASGESIVETPDAQLLGEINATFALTLFESSFDEANIAKKAKEYLSNPPVYQMSDFLNGRLIYVYRDEEKTLDSTYSLGLPVIDGAIISAVKKAEDSDAFITRFFNPYLQKEIAIPEIFQGKERHLDESNEAETKTTLTHAKVQTYLFEK

SEQ ID NO: 4892 - protein, 220 aa, Pseudomonas aeruginosa UCBPP-PA14
MIDLYTAATPNGHKVSIALEEMGLPYRVHALSFDKKEQKAPEFLRINPNGRIPAIVDRDNDDFAVFESGAILIYLAEKTGQLMPADVKGRSRVIQWLMFQMGGVGPMQGQANVFFRYFPEKLQGAIDRYQHETRRLYEVLDGRLGEAEYLAGDYSIADIATYPWVRIHDWSGVAVDGLDNLQRWIAAIEARPAVQRGLLVPRREKEGDDAIRTAQSMLTR

SEQ ID NO: 4893 - protein, 398 aa, Zea mays
MRSVEWSQLEMESPRSPEAEIGHRVEDLWEVAEPQLSPSEKLNSCFEDIPVASFPRTHPSQVIEIPSDASLAETVEILSKNKILSAPIRNVEAPEDASWMDKYIGIVEFAGIAMWLLSQSDAAVNGTVGSGPGSPVSSLVSRLGSFTFRRTSSGRLETATDSESDEAASVGGSFFETLTSSEFYKNTKVGDISGSFRWAPFLALQTSDTFLTMLLLLSKYRMKSLPVVEVGGDKIENIITQSSVVHMLAECVGLSWFENWGKGVGGLPVMDTSGANAIGNISIRDVQYLLTAPKIYKEHRSITTKDFLSAVRHHLQEQREASPLLHDVITCKKDDTIKDIILKLDSEKIHRIYVVDDKGNTEGVITLRDIISKLVHEPRHYFGDFFDGVVPLPANSTV

SEQ ID NO: 4894 - protein, 439 aa, Bradyrhizobium japonicum USDA 110
MTTTTGSDEQTQGYFPRWKLKTSGVIMPEERLSWGQTIVSGLQHCVAMSGSTIIAPLLMGFDPNVAVLFSGVGTLIFFVIVAGRVPSYLGSSFAFIAVVLAATGYAGQGPNPNISVALGGIVGAGVLYGAIALIVMWSGVGWVERLMPPAVTGAVVAAIGLNLAPVAVKAVSANAFDTWIGLATVLIIGVVAVAAPGLWRRLPIILGAIGGYLLYFLFANGLGFGKPIDFALLSAASWLGLPKFTTPTFQADAIFLIAPVAVILVAENLGHIKAVGAMTGRSLDAYLGRALFADSLATIVAACGGGTGVTTYAENIGVMAATKVYSTLLFALAATVSILLGFSPKFGALILSIPGPVIGGLSIVLFGLIAAMAGRIWVENKVDFANPANLITVAVALTAGAGDLTLKFGAFTIGGIGTATFGAIILYQILTSSLAQHAE

SEQ ID NO: 4895 - protein, 338 aa, Streptomyces avermitilis MA-4680
MSEGNGNSAYGRKAFKRSRSHFTDRITADGRDGRPVEAGRYRLIASRACPWASRALVSRRLLGLEDALSLGVVDPVQDDRSWRFTLDPDGRDPVLGIRYLSEAYDARQPEYPGGVSVPAIVDVPSGKLVTNDYQQLTLDLATEWKALHRQGAPDLYPAGLRDEIDEVMADIYEDVNNGVYRAGFATGQKEYEAACAGVFHRLELLGQRLADRRHLVGDSITEADIRLFTTLVRFDAVYHGHFKCNRWKLTEHPVLWAYARDLYQTPGFGDTVDFDHIKRHYYQVHTGINPTGIVPLGPDLAGWLTPHHRERLGGRPFGDGTPPGPVREDEEIPAQGRP

SEQ ID NO: 4896 - protein, 609 aa, Debaryomyces hansenii CBS767
MSYEKSKDLFLGFDLSTQQLKIIATDENLEHLETFHVEFDDLYKEKYGIKKGVISNDDSGEIVSPVAMWLDALDHIFGHMKEKGFPFDKVRGISGSGQQHGSVYWSNNAPTLLQGLKADSPLSEQLKGAFTFENSPNWQDHSTGEEIKTFEETVGGSDHLAEITGSRAHYRFTGLQIRKLAVRTNPSKYRETYRISLVSSFMASVLLGKITNIEQAEACGMNLYDIKKDDYDEELLSLAAGVHSAKDGATKEQTEAGVSELKKKLGEIKPITYENAGDISQYFVNKYGFNSDVKIYSFTGDNLATIISLPLAPNDILTSLGTSTTVLLITKNYIPSSQYHLFMHPTMPNHYMGMICYCNGSLAREKIRDSVNEKTGVKDSKSWDKFNELLDSSDTFNNELGIYFPLGEIVPNASAQYKRCKLDDQNKLINVDSWDVEEDVSSIVESQTLSCRLRAGPMISSSGSADSTPTPESSDSRKLYQDLHQKFGDLYTDGKKQTYESLTSRPHKVFFVGGASNNISIIKKMGSILGPTDGNYKVEIPNACALGGAYKASWSYFCESETKWINYDAYINKYFNFKELDTIKVKDHWEDYFTGMGMLAKMEQELKHD

SEQ ID NO: 4897 - protein, 139 aa, Zea mays
MPLPPPAYYLAIDGDAACFDELDTIVREAAAHLGGNSNNESPSLSGSGSDSAAAADQERRRRRMVSNRESARRSRVRKQRQLSELWAQVSHLRGANRRLLDDLNRALRSCADARRENARLRDEKAQLANRLHQLLIIAG

SEQ ID NO: 4898 - protein, 224 aa, Oryza sativa (japonica cultivar-group)
MAGADVDVGTELRLGLPGGGGGAAEAAAKAAKRGFEETIDLKLKLPTAGMEEAAAGKAEAPAAEKAKRPAEAAAADAEKPPAPKAQAVGWPPVRSFRRNIMTVQSVKSKKEEEADKQQQQPAANASGSNSSAFVKVSMDGAPYLRKVDLKMYNSYKDLSLALQKMFGTFTATGNNMNEVNGSDAVTTYEDKDGDWMLVGDVPWQYVTTSFLCPLNCFPYFPPHD

SEQ ID NO: 4899 - protein, 351 aa, Trifolium repens
MAFFSSKTLVLTCSLCLFLSLAFGRDFSIVGYSSEDLKSMDKLIELFESWMSRHGKIYETIEEKLLRFEVFKDNLKHIDDRNKIVSNYWLGLNEFADLSHQEFKNKYLGLKVDLSQRRESSNEEEFTYRDVDLPKSVDWRKKGAVTPVKNQGQCGSCWAFSTVAAVEGINQIVTGNLTSLSEQELIDCDTTYNNGCNGGLMDYAFSFIGQNGGLHKEEDYPYIMEESTCEMKKEETQVVTINGYHDVPQNNEQSLLKALANQPLSVAIEASSRDFQFYSGGVFDGHCGSDLDHGVSAVGYGTSKNLDYIIVKNSWGAKWGEKGFIRMKRDIGKPEGICGLYKMASYPTKKK

SEQ ID NO: 4900 - protein, 210 aa, Zea mays
  misc_feature (177)..(178): Xaa can be any naturally occurring amino acid
  unsure (1)..(210): unsure at all Xaa locations
MATAAAFSVSSPAASAVAARSKVFGGGVNQARTRTGCRVGITRKNFGRVMMALAVDVSRFEGVPMAPPDPILGVSEAFKADKSELKLNLGVGAYRTEELQPYVLNVVKKAENLMLEKGENKEYLPIEGLAAFNKATAELLLGADNPVINQGLVATLQSLSGTGSLRLAAAFIQRYFXXEAKVLISSPTWGNHKNIFHDARVPWSEYRYYD

SEQ ID NO: 4901 - protein, 477 aa, Oryza sativa
MSYNHSPSITAETINQKVRIFTYEPCGEIVRHARIIYCNLGNPQALGQRPINFFREVLSLCDNPSLIDRDEARALFSPCALKRARKIIESLPGRDSGSYTSSQGVRGLREAVADGIAARDGFPSKPDNIFLTDGASSAINMMMQILIRSHEDGILCPLPEYPLYSASIILHGGTMVPYNLTEDSIWGLEIFEVKRCLEDARASGLTIRAMVVINPGNPTGQVLSITNQEEIVEFCRKEGLVILADEVYQENVYTENKRFNSFKKVARSLGYDHHDLSIVSFHSVSMGYYGECGRRGGYMEICGFGDDVIDEMYKLASLTICPNIAGQILISLVMDPPKLGDEAFEIFMVEKEETYSSLLKRAKALQKAFNGLEGVSCNKFEGAMYLFPRLRLPQAAIKAAQLEGVSPDVFYAHRLLDATGIAVVPGSGFHPDLVSSCKKVSGTSHIRCTILPGEETITAMVPSLQAFHEAFMDEFRG

SEQ ID NO: 4902 - protein, 456 aa, Actinobacillus pleuropneumoniae serovar 1 str. 4074
MTKHYDYLAIGGGSGGIASINRAASYGKKCAIVEAKHLGGTCVNVGCVPKKVMFYGAHIAEAINSYAPDYGFDVTVNNFDFVKLIESREAYISRIHTSYNNVLAKNNVDVLNGFAKFVAAKTVEVTYADGSSEQVTADHILIATGGRPSIPAIKGAEYGIDSDGFFALREVPKRVAVVGAGYIAVEIAGVLNSLGSEMHLFVRQHAPLRMQDPLIVDTLLEVLAQDGITLHTQAIPQEVRKNADGSLVLTLADGREATVDCLIWAIGREPACDKINLDAVGVKTNAKGQIIVDKFQNTNVPNVYAVGDIIEGGIELTPVAVAAGRRLSERLFNNKPNEHLDYNLVPTVIFSHPPIGTVGLTEPQAIEQYGAENVKVYKSSFTAMYTAVTQHRQPCRMKLVCVGKDEKVVGLHGIGFGVDEMIQGFAVAIKMGATKADFDNTVAIHPTGSEEFVTMR

SEQ ID NO: 4903 - protein, 585 aa, ASPERGILLUS NIDULANS FGSC A4
MASLRFQYTKANGTLRSVIWKPRLYPMCEDQGMAIVPWAALGGSLLLSCQQRQEREKKQAGQKSFYELGPHELTVSGALEKVAVAKKTTVQAIDGKGFRTRLTPVDHAQYRMGAWIDAPAKQPLPGGDWEWETMHVVGVTRRTQPAACVSAVQPPWLKTCFGVELCSRLGVGSAPIPIPISLEASFGSCPPFRWLKMASTSEGNLHRQQHQHQHRGRIPTGRISGSGSGLPPPANDTTTTTTTATTASATLPSATDLPSSTFRTVSTIPSAPVPVPPFSVCGHEGGFVQPSSYLRSRPLSYPMPPSQPERAIDREERQGLRAIRNFLKVRTSYDVLPLSFRLIVFDTALTVKESLNILTQNGIVSAPLWDSKSSTFAGLLTTSDYINVIQYYFQNPAALDKIDQLRLDSLREVERALDVAPPETISIDPERPLYEACRRMLESRARRIPLVTNDSQTDRHLVLSVITQYRILKFVAVNVSDTQKLRKPLGEIRLGSYHDIATASMDTPVIDVIHILVQRSISSVPIVNSEGVQYFYEDTGRPTNCGLGVVYNVFESVDVVTLIKGGVYDDLSLTVGEALKKRSPV

SEQ ID NO: 4904 - protein, 770 aa, Arabidopsis thaliana
MVAPALLPELWTEILVPICAVIGIAFSLFQWYVVSRVKLTSDLGASSSGGANNGKNGYGDYLIEEEEGVNDQSVVAKCAEIQTAISEGATSFLFTEYKYVGVFMIFFAAVIFVFLGSVEGFSTDNKPCTYDTTRTCKPALATAAFSTIAFVLGAVTSVLSGFLGMKIATYANARTTLEARKGVGKAFIVAFRSGAVMGFLLAASGLLVLYITINVFKIYYGDDWEGLFEAITGYGLGGSSMALFGRVGGGIYTKAADVGADLVGKIERNIPEDDPRNPAVIADNVGDNVGDIAGMGSDLFGSYAEASCAALVVASISSFGINHDFTAMCYPLLISSMGILVCLITTLFATDFFEIKLVKEIEPALKNQLIISTVIMTVGIAIVSWVGLPTSFTIFNFGTQKVVKNWQLFLCVCVGLWAGLIIGFVTEYYTSNAYSPVQDVADSCRTGAATNVIFGLALGYKSVIIPIFAIAISIFVSFSFAAMYGVAVAALGMLSTIATGLAIDAYGPISDNAGGIAEMAGMSHRIRERTDALDAAGNTTAAIGKGFAIGSAALVSLALFGAFVSRAGIHTVDVLTPKVIIGLLVGAMLPYWFSAMTMKSVGSAALKMVEEVRRQFNTIPGLMKGTAKPDYATCVKISTDASIKEMIPPGCLVMLTPLIVGFFFGVETLSGVLAGSLVSGVQIAISASNTGGAWDNAKKYIEAGVSEHAKSLGPKGSEPHKAAVIGDTIGDPLKDTSGPSLNILIKLMAVESLVFAPFFATHGGILFKYF

SEQ ID NO: 4905 - protein, 319 aa, Solanum tuberosum
MAVNGSALSSGLIVSFGEMLIDFVPTVSGVSLAEAPGFLKAPGGAPANVAIAVTRLGGKSAFVGKLGDDEFGHMLAGILKTNGVQADGINFDKGARTALAFVTLRADGEREFMFYRNPSADMLLTPDELNLDLIRSAKVFHYGSISLIVEPCRSAHLKAMEVAKEAGALLSYDPNLRLPLWSSEAEARKAIKVSDVELEFLTGSDKIDDESAMSLWHPNLKLLLVTLGEKGCNYYTKKFHGSVGGFHVKTVDTTGAGDSFVGALLTKIVDDQAILEDEARLKEVLRFSCACGAITTTKKGAIPALPTESEALTLLKGGA

SEQ ID NO: 4906 - protein, 300 aa, Xanthomonas oryzae pv. oryzae KACC10331
MNYPGYPFTPKRFEVRPGVAMSYLDEGPRDGEVVVMLHGNPSWSYLWRHLVRGLCDRYRCIVPDHIGMGLSDKPDDAPDAQPRYDYTLQSRVDDLDTLLRHLGITGPVTLAVHDWGGMIGFGWALSHHAQVKRLVITNTAAFPLPAEKPMPWQIAMGRHWRLGEWFIRTFNAFSSGASWFGVSRRMPAAVRRAYVAPYNTWRNRISTIRFMQDIPLSPADKGWSLLERSAQALPTFAERPAFIAWGLRDICFDKHFLAGFRKALPHAEVTAFDDANHYVLEDKHEVLVPAIRAFLERHPL

SEQ ID NO: 4907 - protein, 468 aa, Zea mays
MESRRGGSSAAAAEDAGGAMPSFGPTQHAIRADVNSMQPSRVTDFGALAQSAGFRIEDLANLNANALFNLKPNSHTIDNSPLQFGNYGKSISSHINTTEATTAATRIDPQLSAQQTGAQPILVALPTGNMENWGESAMADSPMTDTSTDPDTDERNQMFEQGLVAVPTASDSSDKSRDKLDQKTLRRLAQNREAARKSRLRKKAYIQNLESSRLKLTQLEQELQRARQQGIFISTSGDQPQSTSGNGALAFDMEYARWLEEHNKHVNELRAAVNAHAGDNDLRCIVDSIMVHYDEIFKLKGVAAKADVFHVLSGMWKTPAERCFMWLGGFRSSELLKLLAGHLEPLTDQQLVGISNLQQSSQQAEDALSQGMEALQQSLAETLASGSLGPAGPSGNVANYMGQMAMAMGKLGTLENFLRQADNLRLQTLQQMQRILTTRQSARALLAISDYFSRLRALSSLWLARPRE

SEQ ID NO: 4908 - protein, 429 aa, Rhizobium tropici
MTEQSAKLTWGEKTVDLPVKTGTIGPSVIDIGALYKNTSTFTYDPGFTSTASCESSITFIDGDEGVLLHRGYPIEQLAEHGDFLEVCYLLLYGELPTAAQKKDFDYRVVHHTMVHEQMSRFFTGFRRDAHPMAVMCGCVGALSAFYHDSTDITDPHQRMVASLRMIAKMPTLAAMAYKYHIGQPFVYPKNDLDYASNFLRMCFAVPCEEYVVNPVLARAMDRIFILHADHEQNASTSTVRLAGSSGANPFACIAAGIACLWGPAHGGANEAALNMLTEIGTVDRIPEYIARAKDKNDPFRLMGFGHRVYKNYDPRAKIMQKTAHEVLGELGIKDDPLLDIAIELERIALTDDYFIEKKLYPNVDFYSGITLKALGFPTTMFTVLFALARTVGWIAQWNEMIEDPDQRIGRPRHVYTGAPLREYVPVSKR

SEQ ID NO: 4909 - protein, 117 aa, Thermococcus kodakarensis KOD1
MARWKMGLQEEYLRAIAEGKKKIEGRLYDEKRQKIKPGDEIVFENKLVCVVKDVRVYSSFREMLEKEGLENVLPGVKSIEEGVKVYRKFYSEEKEKKYGVAAIEVEPVAWISEENNP

SEQ ID NO: 4910 - protein, 545 aa, Oryza sativa (japonica cultivar-group)
MAPTAAVAGGGVEAEALLGLLQRVQSEALRAFGPNDFDPKLYVDLPLAADASAAAALASLPRAAPSRGEMEAYISRYFALAGSDLVAAADPPDFERDPPGFLPRVERAEARAWALEVHALWKDLTRRVAPAVAARPDRHTLLPLPGRVVVPGSRFREVYYWDSYWVVRGLLVSKMYETAKDIVLNLVYLVEKYGFVLNGARSYYTNRSQPPLLSSMVLDIYMATGDMAFVRRVFPSLLKEHSFWMSEVHNVAVMDNHGRVHNLSRYQAMWNKPRPESATIDEEFASKLSTAAKEKFYHQVASTAETGWDFSSRWMRDSTDMTTLTTSCIIPVDLNTFILKMEQDIAFFAKLIGESTTSEIFSEASKARHNAIDSVLWNADMEQWLDYWLPTDGNCQGVYQWKSISQNRAIFASNFVPLWLNAQHSGLEQFVDEAKSVRVMRSLQKSGLLQPAGIATSLSNTGQQWDFPNGWAPLQHLIVEGLLRSGSGEARELAEDIATRWVRTNYDAYKATGAMHEKYDVVTCGKSGGGGEYKPQVWLFSSKFK

SEQ ID NO: 4911 - protein, 675 aa, Oryza sativa
MARALPCSPPASAASSASALSSLSTPTSSGREVSGLARARVRRLVRRQQHRLPVLEAHPGPFAFVSLSCSFIDDDAQRGVAARWFDLLVAKGIEFLVFVNLPTYFPACPSPPRSSTTLHSAASTSAHGGSPTLPPSLSLRHCLPQPIGARPRVHVDFHCGGSGPDWGTSQPNSFLGLFSSEFFLQTRLYKADAVNMETYTTDEALEFMGFGKFQLLVLAYAGMGWVVESMEIMLLSFVGPLVREEWNISAENESLLSSVVFAGMLIGASGWGFVSDKYGRRICLLFSTLFASGMGFLSAFSPNYSCLLALRFLVGIGVGGAHVFTSWFLEFVPAQNRGTWMVIFSCFWTIGTILEASLAWVVISVLSWRWLLALTALPCSLLIPFFGTTPESPRYLCGQNRTSDAMLVLERIAITNQAALPPGVLIYHQEAKVDHSDLTSEKEDLLPVSEKECTFDNAMSFKYGGGIAALLRLLSRKLLRSTLLLWFAFFANSFAYYGLVLLTAQLSDANRSCTSGQTNVVPQKDVNLYKDTFITSLAEVPGLILSAVLVDWFGRKASMWFMLFTCCAFIGPLVLQQNELLTTVLLFGARAVAMGSFTVLCLYAPEVYPTSARSTGVGIATAIGRIGGVVCPLVAVGMLRSCHQMEAILVFELVLFLAGVACFLFPIETKGRGMD

SEQ ID NO: 4912 - protein, 424 aa, Bacillus subtilis
MSAKQVSKDEEKEALNLFLSTQTIIKEALRKLGYPGDMYELMKEPQRMLTVRIPVKMDNGSVKVFTGYRSQHNDAVGPTKGGVRFHPEVNEEEVKALSIWMTLKCGIANLPYGGGKGGIICDPRTMSFGELERLSRGYVRAISQIVGPTKDIPAPDVYTNSQIMAWMMDEYSRLREFDSPGFITGKPLVLGGSQGRETATAQGVTICIEEAVKKKGIKLQNARIIIQGFGNAGSFLAKFMHDAGAKVIGISDANGGLYNPDGLDIPYLLDKRDSFGMVTNLFTDVITNEELLEKDCDILVPAAISNQITAKNAHNIQASIVVEAANGPTTIDATKILNERGVLLVPDILASAGGVTVSYFEWVQNNQGYYWSEEEVAEKLRSVMVSSFETIYQTAATHKVDMRLAAYMTGIRKSAEASRFRGWV

SEQ ID NO: 4913 - protein, 351 aa, Trifolium repens
MAFFSSKTLVLTCSLCLFLSLAFGRDFSIVGYSSEDLKSMDKLIELFESWMSRHGKIYETIEEKLLRFEVFKDNLKHIDERNKIVSNYWLGLNEFADLSHQEFKNKYLGLKVNLSQRRESSNEEEFTYRDVDLPKSVDWRKKGAVTPVKNQGQCGSCWAFSTVAAVEGINQIVTGNLTSLSEQELIDCDTTYNNGCNGGLMDYAFSFIVQNGGLHKEDDYPYIMEESTCEMKKEETQVVTINGYHDVPQNNEQSLLKALANQPLSVAIEASSRDFQFYSGGVFDGHCGSDLDHGVSAVGYGTSKNLDYIIVKNSWGAKWGEKGFIRMKRNIGKPEGICGLYKMASYPTKKK

SEQ ID NO: 4914 - protein, 277 aa, Triticum aestivum
  misc_feature (114)..(114): Xaa can be any naturally occurring amino acid
  misc_feature (130)..(130): Xaa can be any naturally occurring amino acid
  misc_feature (177)..(177): Xaa can be any naturally occurring amino acid
  unsure (1)..(277): unsure at all Xaa locations
MAIASRITKRALSTFAAAAKLPEAAVAAAGAEAVPVPSSAQQQQHQVLEFEDTGRLFTGEPSTALVRTLAALQLMSAGPLVDVGLAALRSPAVAASPVVQAAARATAYKHFCAXGETADEAAARVQRLWXRGGMGGILDYGIEDAEDGAACDRNVAGFLAAVDVAAALPPGSASVCXKITALCPIALLEKTSDLLRWQHKNPSVHLPWKQHAFPILSDSSPLYLTPSEPAALTAEEERELQLAHTGCCRGPPCAEQTPAAVDASTVVNRHEYLGRGA

SEQ ID NO: 4915 - protein, 268 aa, Triticum aestivum
MGRSPCCEKAHTNKGAWTKEEDDRLTAYIKAHGEGCWRSLPKAAGLLRCGKSCRLRWINYLRPDLKRGNFSDEEDELIIKLHSLLGNKWSLIAGRLPGRTDNEIKNYWNTHIRRKLTSRGIDPVTHRAINSDHAASNITISFETAQRDDKGAVFRRDAEPTKVAAAAAAITHVDHHHHHRSNPQMDWGQGKPLKCPDLNLDLCISPPSHEDPMVDTKPVVKREAGVGVGVVGLCFSCSMGLPRSVECKCSSFMGLRTAMLDFRSIEMK

SEQ ID NO: 4916 - protein, 338 aa, Xylella fastidiosa Temecula1
MSVALSIDLSKKKTILCFGEALIDMLAQPLVKKGMPRAFLQCAGGAPANVAVAVARLGGAVQFVGMLGSDMFGDFLFDSFAEAGVVTDGIVRTSTAKTALAFVALDAHGERSFSFYRPPAADLLFRVEHFQDASFSDALIFHACSNSMTDADIAEVTFEGMRRAQAAGAIVSFDLNFRPMLWPNGENPASRLWKGLSLADVVKLSSEELDYLANTLAADANAVIQQLWQGRAQLLLVTDAAGPVHWYTRTAGGEVPTFRVQVQDSNAAGDAFVGGMLYTFAQQFDDAAALIDFCHDPESIVSTLRFAAAVGALAVTRQGAFTAMPMLSEVLSLIQEQS

SEQ ID NO: 4917 - protein, 331 aa, Zea mays
MAGSPMTDTSTDPDTDERNQMFEQGLVAVPTASDSSDKSRDKLDQKTLRRLAQNREAARKSRLRKKAYIQNLESSRLKLTQLEQELHQTRQQGIFISTSGDQPQSTSGNGALAFDMEYARWLEEHNKHVNELRLAVNAHAGDNDLRGIVGSVMAHYDEFFRLKGVAARSDVFHVLSGMWKTPAERCFMWLGGFRSSEVLKLLAGHLEPLTDQQLVGISNLQQSSQQAEDALSQGMEALQQSLAETLASGSLGPAGPSGNVANYMGQMAMAMGKLGTLENFLRQADNLRLQTLQQMQRILTTRQSARALLAISDYFSRLRALSSLWLARPRE

SEQ ID NO: 4918 - protein, 503 aa, Actinobacillus pleuropneumoniae serovar 1 str. 4074
MTNQPNYHLIDQVRRRAEQFASKTALRYKSQQIWQDISWQSFQQSVDLFSLALLAHGIEVQQKIAIFAHNMPQWTITDFGALQIRAVTVPIYATNTAKQAEFILNHADIRILFVGDHEQLEAALEVADNCPLLEKIVCMKSQEISLIRPLAHTKVENWNDFIAYASQDKQTELNQRLADKNLSDLFTLIYTSGTTGEPKGVMLDYANIAHQLHAHDLALPKIDENDVSLSFLPFSHIFERAWVAYVLYRGATVCYLEDTNEVRNALNEVKPTLMCAVPRLYEKMYSAIWDKVNKAPIHRRALFKWAISVGKKKRKNTLSYKLADKLVLNKLRALLGGRIRMMPCGGAKLEPTIGQFFQAIGVNIKLGYGMTETTATVSCWADDQFEPNSIGRLMPNAEVKIGENNEILVRGGMVMRGYYKRPEETALAFTEDGFLKTGDAGEFDAQSNLYITDRIKELMKTSNGKYIAPQYIEGKIGKDKFIEQIAIIADAKKYVSALIVPWL

SEQ ID NO: 4919 - protein, 192 aa, Xylella fastidiosa Temecula1
MNMLNVLRFPVLALALAFVSSGVLADVGSLLDLDYRPLAGKETVNLQRLYGGKVLLVVNTASKCGFTPQYEGLEALHQKLSPLGFAVLGFPSNDFKGQEPGDEQQIQEFCTLTYGVKFPMFQKVHVKGNEVTPLYQRLTQTTGVAPGWNFHKYLIARDGHVVAQFDSRTRPDDPILLEAIKRELAKSVQVVH

SEQ ID NO: 4920 - protein, 184 aa, Triticum aestivum
  misc_feature (49)..(49): Xaa can be any naturally occurring amino acid
  misc_feature (152)..(152): Xaa can be any naturally occurring amino acid
  misc_feature (172)..(172): Xaa can be any naturally occurring amino acid
  unsure (1)..(184): unsure at all Xaa locations
PGIYPHSTPNGPPLSGLVGTLRRSFPGVKSTLGLPVSRRFNGASLGSVXNGGRIRCMQVWPIEGIKKFETLSYLPPLSTEALLKQVDYLIRSKWVPCLEFSKVGFIFREHNASPGYYDGRYWTMWKLPMFGCTDATQVINEVEEVKKEYPDXYVRIIGFDNMRQVQCVSFIXFKPPGCEESGKA

SEQ ID NO: 4921 - protein, 363 aa, Bacillus clausii KSM-K16
MLYAKGLENVVVAETTISAIDGEQGTLLYRGYQAEELAKSADFEDVAYLLLNGQRPTEAEKDDFSTALKTMRPLPDDLKKLLAALPKDLSMMDALRTLISSYTGKEGWPPQQQEAMRLVAIVPTIVAAWANRSCGKDAIEPDPSLNHVANYLYMLTGEKPHAAHIRALSAYLILTAEHGMNASTFAARVIASTEADLRSAICGALGALKGRLHGGAPTGVLELFSDIQTADTSSETLLREKLERGERLMGFGHRVYKTTDPRANALREVLKSLNNQETFLSEAVAIEQLATQLLAEYKPGRQLHANVEYYAAAIMEALRLKPDWFTPTFCVSRVVGWCSHVIEQSQDNRIMRPQQQYCGPKPD

SEQ ID NO: 4922 - protein, 218 aa, Triticum aestivum
WIPRAAGIRHQPVRSKNARGQQGSYPIKLFYTSNMPIILHSALITNLYFISQLLYRKYSGNFLVNLLGIWKESEYSGHSIPVGGLAYYVTAPSSMADILANPFHALFYVVFMLSACALFSKTWIEVSGSSAKDVAKQLKEQQMVMPGHRESNLQKELNRYIPTAAAFGGVCIGALTVLADFMGAIGSGTGILLAVTIIYQYFETFEKERATELGFFGF

SEQ ID NO: 4923 - protein, 455 aa, Pseudomonas syringae pv. phaseolicola 1448A
MSAHNNPQTLEWQALSSEHHLAPFSDYKQLKEKGPRIITRAEGVYLWDSEGNKILDGMSGLWCVAIGYGREELADAASKQMRELPYYNLFFQTAHPPVLELAKAISEIAPQGMNHVFFTGSGSEGNDTMLRMVRHYWALKGQPDKKTIISRVNGYHGSTVAGASLGGMTYMHEQGDLPIPGVVHIPQPYWFGEGGDMTPDEFGVWAAEQLEKKIIELGVENVGAFIAEPIQGAGGVIVPPDSYWPKIKEILSRYDILFAADEVICGFGRTSEWFGSDFYGLKPDMMTIAKGLTSGYVPMGGLIVRDEIVAVLNEGGDFNHGFTYSGHPVAAAVALENIRILREERIVERVKSETAPYLQKRLRELSNHPLVGEVRGVGLLGAIELVKDKVTRERYTDKGAGMICRTFCFDNGLIMRAVGDTMIIAPPLVISFAEIDELVEKARKCLDLTLAVLLG

SEQ ID NO: 4924 - protein, 221 aa, Candida albicans SC5314
MMKLLSIITTVLYFFTFLVSSYTTSNIIQANDNNLQSLIKTRGKFSFVDFYADWCRHCKKISPIIDELSELFIDYPEIQIIKINGDKDGKKMSKKYVDIGYPTLLFFYDDGRKIEFDGIRDLTSLSNFIQQLSGIRLNESKSTDNNEEEEEEKKEKKESSSSGSSSNVNDADEETNKLIELTPENFDEKVSQSPISIVSFGASWCKYCQELDTALDKLANE

SEQ ID NO: 4925 - protein, 592 aa, Medicago sativa
MNHLPRIFGYRNKSTTEMNSKKKKQPKLQRRNAVKNFNYDAQPSSSSPESSESASSSASILCTRSMDFHDRKSFRVEGVDGEFDIICRSLGLNGPEDFSIPAAAWEAMKFRSSSDVLPRLNVSEFDETKTSGEIDQVGVVDCDDRVLVRDSPAESSGGEVNVSIRDSPAKSSGCCTGGEIRVPVRGFDETSNCSTGSGGIKGIRPPMLKPPPGVRVSVVDDTCSTWDILRDFAPEGEGKEREEQEEEEEKVDEVEEKEEVGELELKVEEEENGDIIGEFSRSCSFTTSQEDDSSSTTTDTRSNSISPNVRLKPVITPGSWQKGELLGRGSFGTVYEGISEDGFFFAVKQVSLLDQGSQGKQSVVQLEHEIALLSQFEHENIVRYIGTEMDESNLYIFIEFVTKGSLLSLYRRYKLRDSQVSAYTRQILHGLKYLHDRNIVHRDIKCANILVDANGSVKVADFGLAKAIKLNDVKSCQGTAFWMAPEVVRGKVKGYGLPADIWSLGCTVLEMLTGKIPYSPMECISAMFRIGKGELPPVPDTLSRDARDFILQCLKVNPDDRPTAAQLLDHKFVQRSFSQSSGSASPHIPRRG

SEQ ID NO: 4926 - protein, 322 aa, Ralstonia eutropha JMP134
MRVAVTGAAGQIGYSLLFRIANGDMLGKDQPVILQLLDLPQAQAAVKGVVMELEDCAFPLLAGVVITDDPKVAFKDADVALLVGARPRSKGMERKDLLEANAQIFTVQGKALDEVASRNVKVLVVGNPANTNAYIAMKSAPSLPRENFTAMLRLDHNRALSQIAAKTGKPVASIEKMFVWGNHSPTMYADYRYATVDGKSVKDMINDPVWNNDVFLPTVGKRGAAIIEARGLSSAASAANAAIDHVHDWVLGTNGKVVTMGIPSNGEYGIPADTMFGYPVTCANGKYEIVKGLEIDAYSQEKINITLNELEEEKAGVQHLLG

SEQ ID NO: 4927 - protein, 386 aa, Triticum aestivum
  misc_feature (170)..(170): Xaa can be any naturally occurring amino acid
  misc_feature (215)..(216): Xaa can be any naturally occurring amino acid
  misc_feature (226)..(226): Xaa can be any naturally occurring amino acid
  misc_feature (269)..(269): Xaa can be any naturally occurring amino acid
  unsure (1)..(386): unsure at all Xaa locations
MFIIEDKGGAIAIMCASLFFLGTWPAVLTLLERRGRLPQHTYLDYSITNLLAAILIALTFGQLGDAKHNMPNFFTQLSQDNWPSVMFAMAGGVVLSVGNLSTQYAWAYVGLSVTEVISSSMVVVIGTTLNYFLDNRINKAEILFTGVACFLVAVILGSAVHASNAADNEXKLNAPKDMENGASAECDTKAEAGTAEYLIELEERRSIKVFGSSTXXGLGIFFFSGXCFSLFSPAINLATNDQWHTPKDGVPHLVVYTAFFYFSISCFVXVGIGLNILFLYRPMAGVPKSSFKAYLHDWEGRQWALLAGFLCGFGNGFQFMGGQAAGYAAADAVQALPLVSTFWGILLFGEYRKSSKKTYTLLVFMLLMFIAAVATLMASAGHRSTK

SEQ ID NO: 4928 - protein, 333 aa, Xanthomonas campestris pv. campestris str. 8004
MSNTPPLPHCAQPQAFGCGNPLVERSTRKAVVLTALMMVVEIVGGWVLNSMALLADGWHMSSHALALGLALFAYAFARRHARDGRFAFGTWKVEVLGGYTSAILLLGVAGLMAFQSVERLVSPKPVHYPEATAIAVVGLLVNLICAWWLRDSHGHAHHHDHAHGHGHGHGHTHGHGSHGHAHTHGHGDLNLRAAYLHVVADAATSVLAIVALVVGMRWGVTWMDPLMGIVGAVLVTVWAWGLLRSTGRVLLDAEMDAPVVEEIREVIAALPYAARIADLHVWRIGTDRHACLISLVTEATVAAEAIRAALQIHEELVHITVEVQRPEGASAAV

SEQ ID NO: 4929 - protein, 334 aa, Glycine max
MATAPLSGFFLTSLSPSQPSLQKQTLRSSPTVACLPSSSSSSSSSSSSRSVPTLIRNEPVFAAPAPIITPYWSEEMGSEAYEEAIEALKKLIIEKEELKTVAAAKVEQATAALQTGTSSDKKAFDPVENIKQGFITFKKEKYETNPALYGELAKGQSPKYMVFACSDSRVCPSHVLNFQPGEAFVVRNIANMVPPFDKVKYGGVGAAIEYAVLHLKVENIVVIGHSACGGIKGLMSFPLDGNNSTDFIEDWVKICLPAKSKVISELGDSAFEDQCGRCEREAVNVSLANLLTYPFVREGLVKGTLALKGGYYDFIKGAFELWGLEFGLSETSSV

SEQ ID NO: 4930 - protein, 311 aa, Oryza sativa
MAKHFVLNTGAKIPSVGLGTWQSDPGVVGNAVYAAVKAGYRHIDCASAYNNEKEVGLALKKLFEEGVVKREDLFITSKLWCDHHAPEDVPEALDATLNDLQLEYLDLYLIHWPFRTKKGSSIGKPESYLPPDIPSTWAAMEKLYDSGKSRAIGVSNFSSKKLGDLLAAARVPPAVDQVECHPGWQQMKLHNFCQSTGIHLSAYSPLGSPGSTFMNGNVLKEPIIISIAEKLGKTPAQVALRWNIQMGHSVLPKSVSEERIKQNLDVYDWSIPEDLLAKFSEIKQVRLLRGNFIVNPQSVYKTHEELWDREI

SEQ ID NO: 4931 - protein, 481 aa, Bacillus subtilis
MSSNKLTTSWGAPVGDNQNSMTAGDRGPALIQDVHLLEKLAHFNRERVPERVVHAKGAGAHGYFEVTNDVTKYTKAAFLSEVGKRTPLFIRFSTVAGELGSSDTVRDPRGFAVKFYTEEGNYDIVGNNTPVFFIRDAIKFPDFIHTQKRDPRTHLKNPTAVWDFWSLSPESLHQVTILMSDRGIPATLRHMHGFGSHTFKWTNDKGEGVWIKYHFKTEQGVKNLDVNTAAKIAGENPDYHTEDLFNAIENGDFPAWKLYVQIMPLEDANTYRFDPFDVTKVWSQKDYPLIEVGRMVLNRNPENYFAEVEQATFSPGTLVPGVDVSPDKMLQGRLFAYHDAHRYRVGANHQALPINRSRNEVKNYQRDGQMRFDDNGGRSVYYEPNSFGGPKESPEDKQAAYPVSGFADSVSYNHHDHYTQAGDLYRLMSEEERARLVANIVSAMKPVEKEEIKLRQIGHFYKADPEYGRRVAEGLGLPSPK

SEQ ID NO: 4932 - protein, 641 aa, Solibacter usitatus Ellin6076
MRSICGTDAMKACQCASIRPGINTRPPPSTTVTVRPVPVSMGVVDTRSIELPLTSTLEEGESALPLPSKTRTLRKRVAFSAAWGCCVWPSMQIPPSMQIPKIVVTSAAVFTFRTSSSGTAPESGRFIFWGSPSRIQIIRSLRGRRHLLSMSTRTMLIAPAVVLVALAACGRQTSSSSKNSANREETSSSAIVSRPGPPLSYADVVDHASPAVVTIRSERRVRAPEQFPFAEDPSFRQFFGNPLPGRGGQSAPSQVEHALGSGVIVRADGHILTNHHVVDGAEDIKVDLNDHRTLSAKVVGVDPPSDLAVLKIDAQDLPVLALADSDRVRVGDICLAVGNPLGVGQTVTAGIISARSRSTDLSTGSFEDFLQTDAPINQGNSGGALINTNAALIGINSQILSPTGGNIGIGFAIPSNLAKNVMDQLITTGKVHRGQLGVGVQPLTSDLASGLGLKEVRGVLVNLVKPGSPADRAGIRNGDVITAIDGHPVDEPNALRNRVATTAPDSQAKLSFIRDGKEQQVTVKLGELTAESAAMERPNGMPGNAPTDRRLGVSVEPLSPALAQELGVRRDMQGLAVRDVQPDGPAARAGVQPGDVIIALNRQAVRSAADVAAALRSASSRPSLLLINRAGQNVFLTVSPQ

SEQ ID NO: 4933 - protein, 762 aa, Streptococcus thermophilus CNRZ1066
MVRLNQQQRGGHKMSTTIIGFPRLGEFRELKFTTEKYFRNEITADELLAAAKDLRAKHWNIVKEKGITEIPSNDFSHYDNFLDAAFLFNVVPESVKNLDLTELEQYFALARGYQGEKGDVRALPMKKWFNTNYHYIVPKFEKTTAVKLAGHKIFDEYQEAKDLGLDTRPVVVGPFTFLQLSDFEDGVKAEDFVDSFIAAYQDVFAKLAELGATRIQLDEPALVKDLTADEKALFLNLYNKILADKKGLEVLIQTYFGDVRDVYNDLVNLPVDAIGLDFVEGKKTLELVKGGFPADKTLYAGIVNGKNIWRNNYEKSLAVLEQIPAEKIVLTSSCSLLHVPFTTANEEFEPAILNHFAFAVEKLDELRDLDAIRNGQGAESLAANKELFAIERVGANAELRARIAGLTEADYTRLPAFAEREAIQKDAFKLPLLPTTTIGSFPQTKEVRAKRLAFRKNELSQEEYDAFLAEIIDEWIKWQEEVGFDVLVHGEFERNDMVEYFGQNLSGYLFSKNGWVQSYGMRGVKPPIIWGDVTRLNPITVKWSSYAQSRTDKPVKGMLTGPVTILNWSFPREDISIKDSTLQIALAIKDEVLDLEAAGIKIIQIDEAALREKLPLRRSDWYEDYLDWAIPAFRLVHSTVAPDTQIHTHMCYSEFTDIIPAIDNLDADVISFEASRSNLEILDELKAQNFQTEVGPGVYDIHSPRVPQDGEIDHTIEAILAKVPSSKVWINPDCGLKTRGIKETKESLTKLLEAAKAARKNL

SEQ ID NO: 4934 - protein, 133 aa, Rhodococcus erythropolis
MVDTRLPVTVLSGFLGAGKTTLLNEILRNREGRRVAVIVNDMSEINIDSAEVEREISLSASEEKLVEMTNGCICCTLREDLLSEISALAADRRFDYLLIESSGISEPLPVAETFTFIDTHAIPSPTSPDSTPW

SEQ ID NO: 4935 - protein, 342 aa, Nocardioides sp. JS614
MAEMFYDDDADLSLIQGKNVAVIGYGSQGHAHALSLRDSGVDVRVGLQPGSKSRAKAEAEGLRVVTPAEAAEEADVIVILAPDQHQRKLYAEEIEPALTPGDTLVFGHGFNIRFGYITPPDGVDVFMVAPKGPGHLVRREYVDGRGVPVLVAVEKDESGKAWNLALSYAKAIGGLRAGGIRTTFTEETETDLFGEQAVLCGGASQLVMYGFEVLTEAGYQPEVAYFECLHELKLIVDLMYEGGIAKQRWSCSDTAEFGDYLSGPRVITPDVKKNMEAVLADIKNGSFAERFIGDMDNGSPEFTEFRKKGESHPIEQTGSEMRKLMSWVKSHDSDYTEGTATR

SEQ ID NO: 4936 - protein, 437 aa, Glycine max
KAPQWGCIPPQYSETGVPGPPSSQLRRPPPPVNEVIALADSGFTRDEICSEPQQKGMVASLDTEEKSSETMGRKFSEPRQQQESPILKGNLDCVRECSTSVEGNLSSPGTSKTGERRRVKAEKTITLQVLRQYFAGSLKDAAKNIGVCTTTLKRICRQHGIKRWPSRKIKKVGHSLQKLQLVIDSVQGASGAFQINSFYSNFPDLASPNLSGTGFFSTLNQSDNPNSTSTQPEHGSLSPEGASKSPSSSSSQSSISSHSCSSMSELQQQHTTNIASDKDPATVGEYSADVVLKLIRNEAKLKSLSQDRAKLLPRSLSQETLGEHPKTQYQLPLLKTSSSKVDSHRVKVTYGDEKTRFRMLKNWVYEDLLQEIGRKFNVSDMSKFDVKYLDDDCEWILLTCDADLEECIDVCQSSESGTIKLSLQPSSHSVRSFLEFR

SEQ ID NO: 4937 - protein, 450 aa, Nocardioides sp. JS614
MAGSAGARPAAAEDENTNSLHPSALRERIPEMGLKEYWYPAIEAKKVKSGKPTTVKMLGQDLSFFRGKDGNVVATSSTCPHRGASLAHGKCHFAGTITCPYHGWTFDETGACVAVLGEGPESRIPGMPDARVRSYPTQTHKGIVFAWMGESDPAPIEEDVPPQFFNDEFLIQVSVTSWNCNWRPAFENLLDSHVFYVHRNSVHLMMMDAANLLIASKMGPRRPRPRVVNGRALMYPPGALGFADAFVGTGAKHAAEKATATEVKTWPPAPEAGLQDSYPGLGGAQWPKSDRRVAWHKVYGATKKVMPTPFKRDPLEIDPEWKDAHLPCTFQVSYSDHIYSRITVPIDAETSRVFYFHATMPLTRTKRIWDHVYFEVFQNWMMNYNFSGQDEKVVRHQAYDTPETFSATDVFPLTLRKLILENARDFHLKDGHDTEWPDAAGATSAKEDSK

SEQ ID NO: 4938 - protein, 270 aa, Glycine max
MAGSSINRGERWSLNGMTALVTGGTRGIGHSIVSDLAAFGAAVHTCSRTQTELNKCLQEWQSQGFQVTGSLCDVSSPPQREKLIQEVASTFNGKLNIYVNNVGINIRKPTIEYTAEEYSQIMTVNLDSSFHLCQLAYPLLKASEKGSIVFISSVAGVVSLGTGAVFAASKAAINQLTKNLACDWAKDNIRSNCVVPWATRTPVVEHLFKDQKFVDDIMSRTPIKRIAEPEEVSSLVTFLCLPAASFITGQVICVDGGLTVNGFQPSMRIT

SEQ ID NO: 4939 - protein, 966 aa, Vicia faba
MANKMEKMASIDAQLRQLAPAKVSEDDKLIEYDALLLDRFLDILQDLHGEDLKDSVQEVYELSAEYERKHDPKKLEELGKLITGLDAGDSIVVAKSFSHMLNLANLAEEVQIAHRRRNKLKKGDFRDESNATTESNIEETLKRLVFNMKKSPQEVFDALKNQTVDLVLTAHPTQSVRRSLLQKHARIRNCLSHLYAKDITPDDKQELDESLQREIQAAFRTDEIKRTPPTPQDEMRAGMSYFHETIWKGVPKFLRRVDTALKNVGINERVPYNAPLIQFSSWMGGDRDGNPRVTPEVTRDVCLLARMMAANLYYSQIEDLMFELSMWRCNDELRDRAEELHRNSKKDEVAKHYIEFWKKVPLNEPYRVVLGDIRDKLYRTRERSRYLLAHGYSDIPEEATFTNVDEFLEPLELCYRSLCACGDRAIADGSLLDFLRQVSTFGLSLVRLDIRQESDRHTDVMDAITKHLEIGSYQEWSEEKRQEWLLSELIGKRPLFGPDLPKTDEIRDVLDTFHVIAELPSDNFGAYIISMATAPSDVLAVELLQRECKIKNPLRVVPLFEKLDDLEAAPAALARLFSIDWYRNRIDGKQEVMIGYSDSGKDAGRFSAAWQLYKAQEELINVAQKFSVKLTMFHGRGGTVGRGGGPTHLAILSQPPETIHGILRVTVQGEVIEQSFGEEHLCFRTLQRFTAATLEHGMRPPSSPKPEWRILMDQLAIIATEEYRSIVFKEPRFVEYFRLATPEMEYGRMNIGSRPAKRRPSGGIETLRAIPWIFAWTQTRFHLPVWLGFGAAFKQVIEKDVKNLHMLQDMYNQWPFFRVTIDLVEMVFAKGDPGIAALNDRLLVSEDLWPFGEQLRNKYEETKELLLQVATHKEVLEGDPYLKQRLRLRDSYITTLNVFQAYTLKRIRDPKSSANGRPPLSKDSPEATKPADELVTLNPTSEYAPGLEDTLILTMKGIAAGMQNTG

SEQ ID NO: 4940 - protein, 704 aa, Vicia faba
NIGIDERVPYNAPLIQFSSWMGGDRDGNPRVTPEVTRDVCLLARMMAANLYYSQIEDLMFELSMWRCNDELRVRAEELNRSSKKDAVAKHYIEFWKNIPPNEPYRVLLGEVRDRLYQTREASRHLLAHGYSDIPEEHTFTNVDEFLEPLELCYRSLCACGDRAIADGSLLDFLRQVSTFGLSLVRLDIRQESDRHTDVLDAITKHLEIGSYQEWSEEKRQQWLLSELSGKRPLFGTDLPQTEEIKDVLDTFHVIAELPSDNFGAYIISMATAASDVLAVELLQRECHVKQPLRVVPLFEKLADLEAAPAALARLFSIDWYRNRINGKQEVMIGYSDSGKDAGRFSAAWQLYKAQEELIKVAKEYGVKLTMFHGRGGTVGRGGGPTHLAILSQPPDTIHGSLRVTVQGEVIEQSFGEQHLCFRTLQRFTAATLEHGMHPPISPKPEWRALMDQMAVIATEEYRSMVFQEPRFVEYFRLATPELEYGRMNIGSRPAKRKPSGGIETLRAIPWIFAWTQTRFHLPVWLGFGAAFKHVIDKDIRNLQMLQEMYNQWPFFRVTIDLVEMVFAKGDPGIAALYDRLLVSDDLWSFGELLRTKFEETKQLLLQVAAHKDLLEGDPYLKQRLRLRDSYITTLNVCQAYTLKRIRDPNYNVKLRPHISKEFIEISKAADELVTLNPTSEYAPGLEDTLILTMKGIAAGLQNTG

SEQ ID NO: 4941 - protein, 122 aa, Brassica napus
  misc_feature (69)..(69): Xaa can be any naturally occurring amino acid
  unsure (1)..(122): unsure at all Xaa locations
MAANIGIMDSAYFVGRTEILAWINSTLHLNLSKVEEACSGAVHCQLMDSVHPGTVPMHKVNFDAKSEYXMIQNYKVLQDVFNKLKLTKHIEVSKLVKGRPLDNLEFMQWMKKYCDSINGGQL

SEQ ID NO: 4942 - protein, 404 aa, Yersinia pseudotuberculosis IP 32953
MSPIEKSSKLDNVCYDIRGPVLKEAKRLEEEGNKVLKLNIGNPAPFGFDAPDEILVDVIRNLPTAQGYCDSKGLFSARKAIMQHYQARDIRDLTVEDIYIGNGVSELIVQSMQALLNLGDEMLVPAPDYPLWTAAVSLSSGKAVHYMCDEESGWFPDLDDIRSKITPRTRGIVIINPNNPTGAVYSKELLLEIVEIARQNDLIIFADEIYDKILYDDAQHHSIAALAPDLLTVTFNGLSKTYRVAGFRQGWMVLNGPKKHAKGYIEGLEMLASMRLCANVPMQHAIQTALGGYQSISEFIQPGGRLYEQRDRAWELINQIPGVSCVKPQGALYMFPRIDQKRFNLKDDQKLVLDLLLQEKVLLVQGSAFNWPYPDHVRIVTLPRVDELEMAVRKLGRFLETYHQ

SEQ ID NO: 4943 - protein, 366 aa, Chara fragilis
SDSGKDAGRLSAAWGLFQAQAKIVKMAEKYGIKVTLFHGRGGTIGRGGGPTHLAILSQPPGTVNGSLRVTIQGEIIEHSFGEEQLCFRTLRAFTAATLEVGLHPTASKPELCDLMDEMCTVSTKEFRRVLQDKRFIRYFQAGTPVLEYGRMNIGSRPSKRRCDMGIQSLRAIPWVFAWTQTRVHLPVWLGVGTALKVVIDKDPATLDVLRHMHSEWPFFRVTLDLIEMVFAKGDVRIAAMYDSLLVSDDLRILGDELRTKYQNTRHLLLKGARHSHTLDNNPGLKQRIILREPLTTPLNVQQAITLKKMRLVSPIPSAGSAEDLTGSGVKLSPLVQLNPDRSYAPGLEDTLIITMKGIAAGMQNTG

SEQ ID NO: 4944 - protein, 365 aa, Conocephalum conicum
SDSGKDAGRLAAAWSMFKCQEDLVKIAKQHGIKLTIFHGRGGTIGRGGGPTHLAILSQPPGTVNGSLRVTIQGEIIEHSFGEEQLCFRTLRAFTAATLEVGPHPPRPPSPEWCDLMDEMCTVSTKEFRRVLQDKRFIRYFQAGTPVLEYGRMNIGSRPSKRSCDMGIQSLRAIPWIFAWTQTRVHLPVWLGGWNGSESCHRQGSATLDVLRHMHSEWPFFRVTLDLIEMVFAKGDVRIAAMYDSLLVSEDLRILGDELRTSTDTRHLLLKCTHSHTLDNNPALKQRIILREPLTTPLNVQQAITLKKMRLASPIPSAGSAEDLTGSDVKLSPLVQLNPDRSYAPGLEDTLIITMKGIAAGIENTG

SEQ ID NO: 4945 - protein, 385 aa, Arabidopsis thaliana
MDMKSGHSSPVMTDSPPISNSRLTIRQNRLPYSSAAATAISQNNNLLLTVPRKKTGILDDVKSNGWLDAMKSSSPPPTILNKDNLSNDATDMTYREWMQLKYPSALTSFEKIMSFAKGKRIALFLDYDGTLSPIVEEPDCAYMSSAMRSAVQNVAKYFPTAIISGRSRDKVYEFVNLSELYYAGSHGMDIMSPAGESLNHEHSRTVSVYEQGKDVNLFQPASEFLPMIDKVLCSLIESTKDIKGVKVEDNKFCISVHYRNVEEKNWTLVAQCVDDVIRTYPKLRLTHGRKVLEIRPVIDWDKGKAVTFLLESLGLNNCEDVLPIYVGDDRTDEDAFKVLRDGPNHGYGILVSAVPKDSNAFYSLRDPSEVMEFLKSLVTWKRSMG

SEQ ID NO: 4946 - protein, 483 aa, Pseudomonas aeruginosa PAO1
MQLKDAKLFRQQAYVDGAWVDADNGQTIKVNNPATGEIIGSVPKMGAAETRRAIEAADKALPAWRALTAKERANKLRRWFDLMIENQDDLARLMTIEQGKPLAEAKGEIAYAASFLEWFGEEAKRIYGDTIPGHQPDKRIIVIKQPIGVTAAITPWNFPSAMITRKAGPALAAGCTMVLKPASQTPYSALALAELAERAGIPKGVFSVVTGSAGEVGGELTSNPIVRKLTFTGSTEIGRQLMAECAQDIKKVSLELGGNAPFIVFDDADLDAAVEGALISKYRNNGQTCVCANRLYVQDGVYDAFVDKLKAAVAKLNIGNGLEAGVTTGPLIDAKAVAKVEEHIADAVSKGAKVVSGGKPHALGGTFFEPTILVDVPKNALVSKDETFGPLAPVFRFKDEAEVIAMSNDTEFGLASYFYARDLARVFRVAEQLEYGMVGINTGLISNEVAPFGGIKASGLGREGSKYGIEDYLEIKYLCLGGI

SEQ ID NO: 4947 - protein, 371 aa, Isoetes histrix
SDSGKDAGRFSAAWQLYKAQEELVKVAHHYGIKLTMFHGRGGTVGRGGGPTHLAILSQPPDTVHGSLAVTIQGEVIEQSFGEEHLCFRTLQRFTAATLEHGMHPPTPPKEVRRRLMDKMGVICTTEAFRSFVFQNPRFVEYFRTATPEMEYGRMNIGSRPAKRKPSGGIESLRAIPWIFRWTQTRFHLPVWLGFGEAFKTVIDEDPKNFCVLREMYENWPFFRVTIDLVEMVFKKGDPRIAELYDHLLVAEDLQDLGNTLRQKYKETENLLLQVAGHKELLAGNPTLKQKLRLREPYLTTLNVQQAYTLRKMRHLDTSFSSSPRTVDGGTPRANKAAELVSLNPTTEYAPGLEDTLILTMKGIAAGMQNTG

SEQ ID NO: 4948 - protein, 381 aa, Arabidopsis thaliana
MQIFVKTLTGKTITLEVESSDTIDNVKAKIQDKEGIPPDQQRLIFAGKQLEDGRTLADYNIQKESTLHLVLRLRGGMQIFVKTLTGKTITLEVESSDTIDNVKAKIQDKEGIPPDQQRLIFAGKQLEDGRTLADYNIQKESTLHLVLSLRGGMQIFVKTLTGKTITLEVESSDTIDNVKAKIQDKEGIPPDQQRLIFAGKQLEDGRTLADYNIQKESTLHLVLRLRGGMQIFVKTLTGKTITLEVESSDTIDNVKAKIQDKEGIPPDQQRLIFAGKQLEDGRTLADYNIQKESTLHLVLRLRGGMQIFVKTLTGKTITLEVESSDTIDNVKAKIQDKEGIPPDQQRLIFAGKQLEDGRTLADYNIQKESTLHLVLRLRGGF

SEQ ID NO: 4949 - protein, 130 aa, Avena sativa
TIGLPCIEKAGVAHKIDFREGPALPVLDALLEDEANHGTFDFVFVDADKDNYLNYHQRLMKLVRVGGLLGYDNTLWNGSVVLPADAPMRKYIRYYRDFVLELNKALAADDRVEICQLPVGDGITLCRRAK

SEQ ID NO: 4950 - protein, 479 aa, Oryza sativa
MLRAAARALTVSSLNPKVLALADHHLGGLVARRAQLVTVTVNILIVERKKILQADTSMQQELDANPASHPFSEVLALCNHPHLLDRSEASFMFSSDAITRAREIVGFIPGKTTGGYSHCQANSIVSEFRANADKYGNELSSNLTIFDRVHMMMHLLIRGKKDGILCPIPSHSLYTDSMVLRGATLVPYYLDESRGWSVNISDLKKQLDGARAKGIDVRGLVVVNPGNPTGQVLVEENQCEIVELCKNECLVLLADEVYQENIYTDQKKFNSFKKVARSIGYGEGDISLVSFHSVSNGYYGECGRRGGYMEVTGFSSEVRGEVYKVASLSACSNISGQILMSLVMNPPKVGDESYPSYRAERDSILSSLSCCAEAMVSTFNSMEGMTCNKAEGGISVFPSVRLPPRAIEAAEAMNTEPDVFYALRLLESTGIVVVPGSVFGQVPGTWHFRCTILPQEEKTRQIISRFNVFHEAFMEEFRS

SEQ ID NO: 4951 - protein, 353 aa, Chara fragilis
SDSGKDAGRLSAAWGLFQAQAKIVKMAEKYGIKVTLFHGRGGTIGRGGGPTHLAILSQPPGTVNGSLRVTIQGEIIEHSFGEEQLCFRTLRAFTAATLEVGPHPPRPPSPEWCDLMDEMCTVSTKEFRRVLQDKRFIRYFQAGTPVLEYGRMNIGSRPSKRSCDMGIQSLRAIPWIFAWTQTRVHLPVWLGGWNGSESCHRQGSATLDVLRHMHSEWPFFRGDVRIAAMYDSLLVSEDLRILGDELRTSTDTRHLLLKCTHSHTLDNNPALKQRIILREPLTTPLNVQQAITLKKMRLASPIPSAGSAEDLTGSDVKLSPLVQLNPDRSYAPGLEDTLIITMKGIAAGIENTG

SEQ ID NO: 4952 - protein, 404 aa, Triticum aestivum
  misc_feature (209)..(209): Xaa can be any naturally occurring amino acid
  misc_feature (278)..(278): Xaa can be any naturally occurring amino acid
  misc_feature (283)..(283): Xaa can be any naturally occurring amino acid
  misc_feature (286)..(286): Xaa can be any naturally occurring amino acid
  misc_feature (290)..(290): Xaa can be any naturally occurring amino acid
  misc_feature (299)..(299): Xaa can be any naturally occurring amino acid
  misc_feature (317)..(317): Xaa can be any naturally occurring amino acid
  misc_feature (320)..(329): Xaa can be any naturally occurring amino acid
  misc_feature (372)..(372): Xaa can be any naturally occurring amino acid
  unsure (1)..(404): unsure at all Xaa locations
AYLGDTIEQVCTKKQAGTGPEFPGYRRPTRPATPQIYRKTLLPVLLLLAAAALYPAAADGDEVLALTESTFEKEVGQDRGALVEFYAPWCGHCKKLAPEYEKLAASFKKAKSVLIAKVDCDEHKSVCSKYGVSGYPTIQWFPKGSLEPKKYEGQRTAEALTEYVNSEAATNVKIAAVPSSVVVLTEETFDSVVLDETKDVLVEFYAPWXCGHCKSLAPIYEKVASVFKQDEGVVIANLDADKYTSLAEKYGGSGFPTLKFFPKGNKASVKSYKNRSGXWMPLXKSXNEKXELSRESKGXSLLQEAGLVANFGCSDQXRKXXXXXXXXXXVNTKRTLNERVELSGPAVKHGKIYVNVAKKILQKGSDYKALTXKSNERLVLLWKSISPSKPRIAIKKNILSAFSS

SEQ ID NO: 4953 - protein, 365 aa, Lycopodium annotinum
SDSGKDAGRLSAAWEMFKAQEELIKVAKHHDIKITMFHGRGGTVGRGGGPTHLAILSQPPDTINGSLRVTVQGEVIEQSFGEEHLCFRTLQRFTAATLEHGMHPPISPKPEWRARMAKMAAIATEEYRSIVFKEPRFVEYFRLATPEMEYGRMNIGSRPSKRKPTGGIDSLRAIPWIFACTQTRFHLPVWLGFGAAFKYVVTENSKNSNTLREMYNQWPFFRVTLDLVEMVFTKGDPRIAELYDRLLVSETLHAFGEHLRAKYAETRNFLLKVAGHTEILAGNPTLKQRLRLREPYITVLNVQQAYTLKKMRDESQYCSFPGSVTLNKPAAELVTLNTTSEYPPGLEDTLILTMKGIAAGMQNTG

SEQ ID NO: 4954 - protein, 595 aa, Neurospora crassa
MTDSIPPTDGKTPDNTCAPLEPRQKYSTTQSPFPDFEFPVEQGNPSYQGEKSSDRHCKEEEEGLSPNQWVASGEQEDNSGSYSEAENVEMSTWRGSPSVKGSTETMRMLLLTCVSVGITFTWGVEMTCVVADQSKSRWGRRRPVIVIGSIITALALMALGFTKEIVAYFIWDPTYARACTIAVAVLSLYCVDFAINADTLPIQKQQSGAAWASRMGSLGHIIGYGMGAIDLLQLFGTSLGDTQFKQLTVIAALGMLVTSSVTCWAVTERVLVTVRPDPRRQSGRFKVVRQIVSTLITLPPRIRAICYAVFWSWIGWFPFIIYSSTWVGETYFRYDVPADTRDSSDALGDMGRIGSTALTVYSTVTFISAWILPPFIRAPEDNTFTHRPPASIASLVETVNKYKPELLSAWIASHLMFAFAMFLTPFAASFRFATALVALCGIPWSIAIWAPTTFLGVEVNKLSGAPDPMSPGATSATNPSYRRLSTSSIEMRFVNEPAAGAVEEVTAGNSSTGELSGIYFGILNIYTTIPQFIATFMSSIVFAILEPGKSPELATDAHPSEHAKTDGPNAIAVCMFIGAISSLVAAYATAKMRDI

SEQ ID NO: 4955 - protein, 439 aa, Thiobacillus denitrificans ATCC 25259
MTISKDDQARLYRYYTEPTLVTELTRKTLALVLAGGEGSRLKDLTAWRAKPAVPIGGKYRIIDFPLSNCVNSGIRRIGVLTQYKSHSLIRHLQRAWGLMRTEVGEFVEILPAQQRTHKKEWYQGTADALFQNLDIMQRHHPEYVLVLGGDHVYTMDYTQMLLYHVQTGADVTVGSVEVPVAEAAAFGVMSVDESLRITEFNEKPREPDSMPGKPGTALVSMGIYVFSKDFLYKALIEDAGATRSSHDFGKDIIPSSISRARIMAFPFRDREGKPGYWRDVGALNCYWQTNMDLCSIEPALNLYDCEWPIWTYQPQYPPAKFIFDDEGRRGEAIDSLVAGGCVLSGARVKRSVLFFATTVGCSSLVKDSVILPKVRIGRNCRISCAIIDKGTVIPDGTVIGEDPVEDAKRFHVTPEGIVLVTPRMLGQNIYARWEDEYDG

SEQ ID NO: 4956 - protein, 313 aa, Solenostemon scutellarioides
MEAIGVLMMCPMSTYLEQELDKRFKLFRYWTQPAQRDFLALQAESIRAVVGNSNAGADAELIDALPKLEIVSSFSVGLDKVDLIKCEEKGVRVTNTPDVLTDDVADLAIGLILAVLRRICECDKYVRRGAWKFGDFKLTTKFSGKRVGIIGLGRIGLAVAERAEAFDCPISYFSRSKKPNTNYTYYGSVVELASNSDILVVACPLTPETTHIINREVIDALGPKGVLINIGRGPHVDEPELVSALVEGRLGGAGLDVFEREPEVPEKLFGLENVVLLPHVGSGTVETRKVMADLVVGNLEAHFSGKPLLTPVV

SEQ ID NO: 4957 - protein, 276 aa, Streptomyces coelicolor A3(2)
MISIPAYTLNDGTSLPALGLGTWPMKDEEAERAVRAALETGYRLIDTATNYRNETGVGRGVASAGLPREEIVVTTKLPGRHHGYEETLASFEESRARLGLEYVDLYLIHWPLPRVDKYVDSWKAMVKLREDGLVRSVGVSNFTAEHIERLERETGVLPSVNQIELHPLLPQDELRAYHERKGIRTESWSPLGRGSDLLDDPAVAAVAAAHGVTPAQAVLRWHTQLGAVPIPKSADPARQRANLDVFGFELDAEQLRAVADRVHRRIGGDPEVHEEF

SEQ ID NO: 4958 - protein, 599 aa, Mannheimia succiniciproducens MBEL55E
MQTVNVDIAIVGAGGGGLRAAIAAAEANPNLKIALVSKVYPMRSHTVAAEGGAAAVIKEEDSYDKHFQDTVAGGDWLCEQDVVEYFVQHSPVEMTQMERWGCPWSRKQDGDVNVRRFGGMKIERTWFAADKTGFHLLHTLFQTSIQFPQIQRFDEHFVLDVLVDDGHARGVVAMDMMEGKLVQINANAVVIATGGGCRSFKFNTNGGIVTGDGLSMAYRHGVPLRDMEFVQYHPTGLPNTGILMTEGCRGEGGILVNKDGYRYLQDYGLGPETPVGKPENKYMELGPRDKVSQAFWQEWKKGRTLKTAKGVDVVHLDLRHLGEKYLHERLPFICELSQAYEGVNPVNEPIPVRPVVHYTMGGIEVDFNSETRIKGLFAVGECASSGLHGANRLGSNSLAELLVLGRVAGEYAAQRAVEATAANQTAVDAQAQDVVRRLEDLFNQEGTENWADIREEMGTAMEEGCGFYRDQASMQTAVDKIAELKERCKRIRIQDRSSVFNTNVLYTVELGYILDVAQAIANSALERKESRGAHQRLDYVERDDTNYLKHTLAFYNENGAPRIDYSPVKITKSQPAKRVYGAEADAAEAAAKAKENANG

SEQ ID NO: 4959 - protein, 423 aa, Saccharomyces cerevisiae
MTKAYTIVIKLGSSSLVDESTKEPKLSIMTLIVETVTNLKRMGHKVIIVSSGGIAVGLDALNIPHKPKQLSEVQAIAAVGQGRLIARWNMLFSQYGEQTAQILLTRNDILRWNQYNDARNTINELLAMGVIPIVNENDTLSISEIEFGDNDTLSAITAALVGADFLFLLTDVDCLYTDNPRTNPDARPIVLVPELSEGLPGVNTSSGSGSEVGTGGMRTKLIAADLASNAGIETIVMKSDRPEYVPKIVDYIQHHFRPPRHIGNGTQQQFLDLQDTELEQLRRYDVPMHTKFLANDNKHKLKNREFWILHGLITKGAIIIDENSYDKLLSKDMASLTPNAVIEVRDNFHELECVDLKIGQRLPNGELDISKPIQSVGCVRSNYTSLELAKIKGLPSEKIHDVLGYSVSEYVAHRENIAFPPQF

SEQ ID NO: 4960 - protein, 325 aa, Novosphingobium aromaticivorans DSM 12444
MKARQARIFRTGGPEVIEWVEVDLPAPGPGEVLVEHTAVGLNMIDTYHRSGVYPIQLPSGLGVEAAGQVVATGPGVVGIAAGDRVSTFGPDLGAYASARIYPADWLFRLPDSIDEATAAAATLKGCTVEFLVERCARVEAGMPVLVHAAAGGVGLLLVQWLKHVGATVIGTVSTEEKAQAALAAGADHVINYATDAVAPRVRELTGGKGVRVAFDGVGMATWEASLDSTGRRGLVVSYGNASAPVTGVGLGTLSQKGSLFVTRPTLYHYYADREEREAGAARVWDMIASGAVKVTIGQTRPLSEVAEAHADLEARRTTGSTVLLP

SEQ ID NO: 4961 - protein, 281 aa, Brassica napus
RPTRPDFDAPATGTPSVVVREVWADNLESEFELISGIVEDYPFISMDTEFPGVIYKADLRRLNPGYLYKLLKSNVDALSLIQVGLTLSDADGNLPDLGGGGGGSRFIWELNFRDFDVDRDPRARESLELLRRHGIDFERNRREGVESGRFAELMVSSGLICNESVSWVTFHSAYDFGYLVKILTRRELPGSLGEFLRLLRAFFGERVYDVKHMMRFCERRLFGGLDRVARSLEVNREVGKCHQAGSDSLLTWQAFRRMRDLYFVEDGPEKHAGVLYGLEVF

SEQ ID NO: 4962 - protein, 499 aa, Arabidopsis thaliana
MATRLLRTNFIRRSYRLPAFSPVGPPTVTVSTAVVPEILSFGQQATEPPLQHPKPTEQSHDGLDLSDQARLFSSIPTSDLLRSTAVLHAAAIGPMVDLGTWVMSSKLMDASVTRGMVLGLVKSTFYDHFCAGEDADAAAERVRSVYEATGLKGMLVYGVEHADDAVSCDDNMQQFIRTIEAAKSLPTSHFSSVVVKITAICPISLLKRVSDLLRWEYKSPNFKLSWKLKSFPVFSESSPLYHTNSEPEPLTAEEERELEAAHGRIQEICRKCQESNVPLLIDAEDTILQPAIDYMAYSSAIMFNADKDRPIVYNTIQAYLRDAGERLHLAVQNAEKENVPMGFKLVRGAYMSSEASLADSLGCKSPVHDTIQDTHSCYNDCMTFLMEKASNGSGFGVVLATHNADSGRLASRKASDLGIDKQNGKIEFAQLYGMSDALSFGLKRAGFNVSKYMPFGPVATAIPYLLRRAYENRGMMPTGAHDRQLMRMELKRRLIAGIA

SEQ ID NO: 4963 - protein, 350 aa, Debaryomyces hansenii CBS767
MKPTIDEINTDINSPWFEVRNTTTGRGCISKCEIPKDTIIHISKALSSAISRPFKKEVCSSCFKFSGGQTLKFRMGVQLLLYFCSEQCLSAFTEEDIDQIYLDTLLNIENYYNNGLKKSDEPELALNEEEFDQQIIDEWKKVNEWEEKIDKMKASKRLNSIPKIGESEYIETKYIVGILFQMYKGKHKELKYFGSLQSNEFDKLKKYPQLLQSYTNIYKFVKLTAHTQLQPLITSELVRTILGTNLTNAFGIWSQPINDAEEKDYFGFAIYPSASFFNHSCDPNLVKTREGDTLYFRALKDIDPNTELFISYGNYSNENVQIRQEQLKEWFFNCLCTKCITELGMKLECK

SEQ ID NO: 4964 - protein, 434 aa, Mycobacterium bovis AF2122/97
MIAIGGVIGAGLFVGSGVVIRATGPAAFLTYALCGALIVLVMRMLGEMAAANPSTGAFADYAAKALGGWAGFSVGWLYWYFWVIVVGFEAVAGGKVLTYWIDAPLWLASLCLMMMMTATNLVSVSSFGEFEFWFAGVKVATIVGFLVLGTAFAFGLLPGHGMDFSNLSAHGGFFPDGVGAVFAAIVVAIFSMTGTEVVTIAAAEAPDPQRAVQRAMSTVVARIVIFFVGSVFLLTVILPWNSLELGASPYVAALRHMGIGGADQIMNAVVLTAVLSCLNSGLYTASRMLFVLAARQEAPAQLVKVNRRGVPTFAIMGSSVVGFLCVIMAWVSPATVFVFLLNSSGAVILFVYLLIALSQIVLRRQTSGQNLGVRMWLFPGLSIVTVTGIVAVLARMAFDYAARSQLWLSLLSWAVVVGCYLVTTLVRRPLNRPW

SEQ ID NO: 4965 - protein, 462 aa, Mycobacterium bovis AF2122/97
MGSTEQATSRVRGAARTSAQLFEAACSVIPGGVNSPVRAFTAVGGTPRFITEAHGCWLIDADGNRYVDLVCSWGPMILGHAHPAVVEAVAKAAARGLSFGAPTPAETQLAGEIIGRVAPVERIRLVNSGTEATMSAVRLARGFTGRAKIVKFSGCYHGHVDALLADAGSGVATLGLCDDPQRPASPRSQSSRGLPSSPGVTGAAAADTIVLPYNDIDAVQQTFARFGEQIAAVITEASPGNMGVVPPGPGFNAALRAITAEHGALLILDEVMTGFRVSRSGWYGIDPVPADLFAFGKVMSGGMPAAAFGGRAEVMQRLAPLGPVYQAGTLSGNPVAVAAGLATLRAADDAVYTALDANADRLAGLLSEALTDAVVPHQISRAGNMLSVFFGETPVTDFASARASQTWRYPAFFHAMLDAGVYPPCSAFEAWFVSAALDDAAFGRIANALPAAARAAAQERPA

SEQ ID NO: 4966 - protein, 355 aa, Ustilago maydis 521
MPQYPSAAPGQKTFKLNTGAEIPVIGLGTWQSAPGEVAKAVESAIKAGYRHIVSMLTSLLTLTLGYVALHPLYIPFLAKDAAWIYGNENEVGQGIKASGVPRSELFVTTKIWCTYHRQPEACLDESLQRLGLDYVDLLLVHWPVPLVKRGDEKIPLNEDGSRAIDRDWSPEQTWELMEKLPATGKTKAIGVSNWSIAFLDKLLAKAKIVPAANQVELHPFLPQHELVKYCHDKGILPQAYSPLGSSGGPVLQDERVQSIAKAHKADPAQVVISWAAQRGVVALPKSVTPSRIETNGKLIVLSDEEMLELNELHKQEGKAVRLVKPNSDICSPPSETCLAPLNVADEALSYLRNSD

SEQ ID NO: 4967 - protein, 422 aa, Campylobacter jejuni RM1221
MSNSVTITDNRNGKSYEFPIYDGTTGPSVVDMSSFYKQTGMFSYDEGLTSTATCKSKITYIDGENGILMHRGYPIEWLAENKLYLDVVHLLLYKELPDATRLEAFRYEMKKRSFIHEGMHRLFDSFPDNAHPMAVLQGAVSSLSAFYPDHLNMNVKEEYMEMAARIVAKIPTIVATAYRYKHGFPMAYPNLDRGFTENFLYMLRTYPYDHVELKPIEVKALDTVFMLHADHEQNASTSTVRAVGSTHAHPYACIAAGIGALWGHAHGGANEGVIRMLEQIGSVDRVDEFIKRAKDKNDPFRLMGFGHRVYKNFDPRAKVLKKLRDQLIDELGIDTNLIKVATRIEEIALSDDYFVQRGLYPNVDFHSGLILKALGIPNEMFATLFVIGRTPGWIAQWIEQKEQESLKIVRPRQLYLGETSKI

SEQ ID NO: 4968 - protein, 1079 aa, Candida albicans
DIRYNYISNVDVLGIIPNLEVAYASKNAISTFSDQMKCLRLLHFDRNPITELKFNTQMQMLSVLDLSRAKITAFPAEFVEKVPNIEKLVLDKNHLVSLPNELCQLSKLVSLSVHANNLQSLPANIGDLRFLKYLDLHSNNLKSLPDQIWDLCHLTSLNVASNNLTSFPKAPYSVVKRLSSSLVDVHLESSQTLSLADSLLILILSDNRLSDDCFDEISFLIALKSLNVSYNDLIEIPQGTLSRLTRLNELYLSGNELTTLPADDLEVLKSLKLLYMNNNKLVSLPAELSRIANLQHLDVSSNQLKYNISNWPYDWSWHWNKNLKYLNFSGNKRFEIKQSHIKNPETGEDFDSLLVLKQLRVLGLIDVTLTTTNVPEQAVDLRLRTTASEFDNFGYGVSDSLGMRDHVSARDLFVQKFRGKENEMLLCAFDGKHGATNQGHRISLVAKNMFVRNFTKELDEIKNDDEIENALRKAFLNFNKEINGILTAKKNKSFTPVPNMSKEALELNLVDDGNAGCTVSVIYIKDKKLYSANIGDIEALLCRNNGDQFLLTEKHDPTNREEFERIRASGGYVSGGGELDGQLSVSRGVGFFNFLPHTHCGPTIRRFKITNDDDMIILGSKQLWDFISYESAVDIIRKDKNDPMVAAQKLRDFAICYGATDKICVIVLTFGNRQKQAANMYSNYGVDRRRRDKQQVVGGDSNLRKLEQEIEPPIGPLALVFTDIKNSTLLWDSYPAPMRSAIKIHNTIMRRQLRITGGYEVKTEGDAFMVAFPSPTAALLWCFQVQQNLVTADWPSEILETDQCCVVSDSENNTIFRGLSVRMGIHWGSPVCEPDVITGRMDYFGPMVNRASRISAIADGGQIAVSSDFLDVLNSLTVKHNNIKNNVESLIDAYQGNENAGMTIERELNALEDLGCNYFKIGERKLKGLETPEPITLVFTNRLKLRYDIFQKRLDANHSTRVAGTLPVEIIYGLRTVSLRLENLCSSINNGGNYCSEGFESSSGVISQKMNSSFKDSDLISLLNHVTTRIESCTTTLFLRQQLSQIKGNGGLIETNNSPSLDVIMDEVADIMKTVNELK

SEQ ID NO: 4969 - protein, 371 aa, Isoetes durieui
SDSGKDAGRFSAAWQLYKAQEELVKVAHEYGIKLTMFHGRGGTVGRGGGPTHLAILSQPPDTVHGSLRVTIQGEVIEQSFGEEHLCFRTLQRFTAATLEHGMHPPTPPKLEHARLMDKMGVIATEAYRSIVFQHPRFVEYFRALTPEMEYGRMNIGSRPSKRRPSGGLNTSCYTWIFAWTQTRFHLLVWLGFGEAFKLTVDRDDPKNVDILREMSAHWPFFRVTIDLVEMVFKKGDPRIAELYDHLLVSPDLQDLGKTLRQKYKETENLLLQVAGHNELLAGNPTLKQRLRLREPYLTTLNVQQAHTLRKMRDRENVFCSSPRTVDGGTPRANKSAAELVTLNPTTEYAPGLEDTLILTMKGIAAGMQNTG

SEQ ID NO: 4970 - protein, 335 aa, Sulfolobus solfataricus P2
MKCTSKIYTDNDANLDLIKGKRIAVLGYGSQGRAWAQNLRDSGLNVVVGLEREGKSWELAKSDGITPLHTKDAVKDADIIIFLVPDMVQRTLWLESVQPYMKKGADLVFAHGFNIHYKLIDPPKDSDVYMIAPKGPGPTVREYYKAGGGVPALVAVHQDVSGTALHKALAIAKGIGATRAGVIPTTFKEETETDLFGEQVILVGGIMELMRAAFETLVEEGYQPEVAYFETINELKMLVDLVYEKGISGMLKAVSDTAKYGGMTVGKFVIDESVRKRMKEALQRIKSGKFAEEWVEEYGRGMPTVVNGLSNVQNSLEEKIGNQLRDLVQKGKPKS

SEQ ID NO: 4971 - protein, 401 aa, Acinetobacter sp. ADP1
MKHAYIVDAIRTPFGRYAGGLAAVRADDLGAIPIAALIERNPSVNWAQVDDVIYGCANQAGEDNRNVGRMSALLAGLPVEVPATTVNRLCGSSLDAIAMAARAIKAGEAHLIIAGGVESMSRAPYVMGKSEGAFGRTQKIEDTTMGWRFINPKLKAMYGVDTMPQTAENVAEQFGIQREDQDQFAYTSQQRTAAAQAKGYFAKEIVPVTIPQRKGEPVVIATDEHPRASTTLEGLAKLKGVVKPEGSVTAGNASGINDGAAAVLIASDEAVAQYQLKARAKIIASTTVGIEPRIMGFAPAPAIKKLLKQANLTLDQMDVIELNEAFAAQALACTRDLGLADDDARVNPNGGAIALGHPLGASGARLVTTALNQLEQSGGKYALCSMCIGVGQGIALIIERV

SEQ ID NO: 4972 - protein, 241 aa, Oryza sativa
MGRGKIVIRRIDNSTSRQVTFSKRRNGLLKKAKELSILCDAEVGLVVFSSTGRLYEFSSTNMKTVIDRYTNAKEELLGGNATSEIKIWQREAASLRQQLHNLQESHKQLMGEELSGLGVRDLQGLENRLEISLRNIRMRKDNLLKSEIEELHVKGSLIHQENIELSRSLNVMSQQKLELYNKLQACEQRGATDANESSSTPYSFRIIQNANMPPSLELSQSQQREGECSKTAAPELGLHLP

SEQ ID NO: 4973 - protein, 101 aa, Equisetum hyemale
SDSGKDAGRLSAAWQLFKTQEELTGVAKRFGVKLNMFHGRGGTVGRGGGPTHLAIPSSQPPDTITVLRVAVREVIGAVFGEEHLCFRTLQRFTAATLEHGM

SEQ ID NO: 4974 - protein, 247 aa, Nicotiana tabacum
MAKIAVGSSREAIQPDCIQALIVEFICTFLFVFAGVGSAMAANKLNGDPLVSLFFVAMAHALVVAVTISAGFRISGGHLNPAVTLGLCMGGHITVFRSILYWIDQLLASVAACALLNYLTAGLETPVHTLANGVSYGQGIIMEVILTFSLLFTVYTTIVDPKKGILEGMGPLLTGLVVGANIMAGGPFSGASMNPARSFGPAFVSGIWTDHWVYWVGPLIGGGLAGFICENFFIVRTHVPLPSDESF

SEQ ID NO: 4975 - protein, 546 aa, Corynebacterium diphtheriae NCTC 13129
MAKIIAFDEEARRGLEKGLNTLADAVKVTLGPKGRNVVLEKSWGAPTITNDGVSIAREIELEDPYEKIGAELVKEVAKKTDDVAGDGTTTATVLAQALVREGLRNVAAGSNPMGIKRGIELATAKVTEALLASAKEVETEEQIAATAGISAADPAIGEQIAKAMYAVGGGKLNKESVITVEESNTFGVDLEVTEGMRFDKGYISGYFATDMERLEAVLEDPYILLVSGKISNIKELLPLLEKVMQTGKPLLIIAEDVEGEALSTLVVNKIRGTFKSVAVKAPGFGDRRKAQLQDMAILTGSQVISEEVGLSLETADLPLLGRARKVVVTKDDTTIVEGAGDSAQIDGRVNQIRTEIENSDSEYDREKLQERLAKLSGGVAVIKVGAATEVELTERKHRIEDAVRNAKAAVEEGIVAGGGVALLQAAHVLANDLDLTGDEATGVKIVREALSAPLKQIALNAGLEAGVVADKVSHLPAGEGLNAATGEYVDLMAAGINDPVKVTRSALQNAASIAALFLTTEAVVADKPEPAAPAMPGADEMGGMGF

SEQ ID NO: 4976 - protein, 193 aa, Equisetum hyemale
LRAIRGVCMTQIRFHLPVWLDSGRPLSAIEKDPANLHMLAEMSPEWPFFRVTLDLVEMVFAKGDPRLALLNDSLLVNKELRYHRRYSSVKHLETKELLLKVTGYTEILEGNPTLRHDYFLRKPYITTLNVQQALALKKMRDRSEKLCQVQRHSVRTSAAELVTRNMASEYAPGVEDTLILTMKGIRAGMQNTG

SEQ ID NO: 4977 - protein, 367 aa, Neoregelia ampullacea
  misc_feature (232)..(233): Xaa can be any naturally occurring amino acid
  unsure (1)..(367): unsure at all Xaa locations
SDSGKDAGRLSAAWQLYKAQEELVQVAKKYGVKLTMFHGRGGTVGRGGGPTHLALLSQPPETINGSLRVTIQGEVIEQSFGEERLCFRTLQRYTAATLEHGMRPPISPKPEWRAILDEMAVVATAEYRSIEFGEPRFVEYFRLATPELEYGRMNIGSRPSKRKPSGGIESLRAIPWIFAWTQTRFLLPVWLGFGAAFNIYCKGQKDLRTLKEMYNEWPFFRVTLDLLEMVFXXGDPGIAALYDKLLVSDDLKPFGEQLRANYEETKQLLSQGCRPHGLLEGRPLLKQRIRLRERYITILNVCQVYSLKRIRDPNFHVHVRPPLSKRYDSNKPAELVKLNPRSEYAPGLEDTLILTMKGIAAGMQNTG

SEQ ID NO: 4978 - protein, 282 aa, Sulfolobus solfataricus P2
MSLKSYMQLVRIHNVIGAALGAIMGFLVSSQWYLELKGILLSALVVGLIAAGGYVINDVYDVEIDKINKPYRPIPSGKISVNKAKALSIALFIIGIALSILLNIYALVIALVTAIGLIYYAKDLKKTGFYGNLLVATTTALSIFYGGLAFFSDNWLLRIIIPTLYAFFLTLIREIVKGIEDYNGDSLNNVKTLATTLGINKSWRIAKILLVLLLIISPLPFFIGFNLIYLILLILVFIPFTILSIIQKETIEGASKARTYLKISAISGIIAFLLGSLPFFKG

SEQ ID NO: 4979 - protein, 398 aa, Xanthomonas campestris pv. campestris str. 8004
MAPVAITAFTATTALGAGLDAQASALRERRSGMRRNDFGPQPLECWIGRVAGVEDVVLPDALQGWDCRNNQLAWLALQQDGMAAAVQAAAQRYGAERVAVVMGTSTSSVGASEEAYTRLVEDAHGLRFPDDLQRPIVHTPHSLGDFVQHATGLRGPAITVATACSSSAKVFAQAARLMAAGVVDAAVVGGVDTLCGSVLFGFNSLQVVAPQLCQPFDARRVGLSLGEAGGFALLERPAAAPDAAQWLYGYGESSDAHHMSAPHPQGLGAQLAMRGALDTAGLDAAAVGYLNLHGTATPANDSVEAAAVAAIFPDTLHASSTKAWMGHTLGAAGIVESVIALLALRDGLLPGTLNSAVPDPACGPQIRFDNAHSRIQYAMNNSFGFGGNNCSLLFGQAR

SEQ ID NO: 4980 - protein, 369 aa, Pereskia aculeata
SDSGKDAGRLSAAWQLYKAQEELIKVAKQFGVKLTMFHGRGGTVGRGGGPTHLAILSQPPDTIHGSLRVTVQGEVIEQSFGEEHLCFRTLQRYTAATLEHGMHPPTSPKPEWRALLDEMAVVSTKEYRSIVFQEPRFVDYFRLATPELEYGRMNIGSRPSKRKPSGGIESLRAIPWIFAWTQTRFHLPVWLGFGAAFKNAIEKDIRNLHMLREMYNMWPFFRVTLDLVEMVFAKGDPEIAALYDKLLVSEELQSFGERLRKEYEETSRLLLEVAGARLLEGDPYLTQRLRLRDPYITTLNVSQAYTLKRIRDPNFKVTERPHLSKDIMESNNPAAELVKLNPTSEFPPGLEDTLVLTMKGIRAGMQNTG

SEQ ID NO: 4981 - protein, 276 aa, Chlamydomonas eugametos
MTSHAANPKEEQDQRLPFKSDISGPIAPSQAPAHTVQAHDSQPKPSDDSSDEHLSFYEAKARIVRAFAASRAPQPAAPAAKALEGDASVIVPGKLILSSCEVEESSELLTKLGVTHILQVGEELKPSHPGRFTYLSLPILDMEGQDIVALLPSCFQFLQQAQASGGVCLVHCLAGISRSASVVIAYLMWTQGMPYTEARAMVRRARSKVYPNTGFTLQLQELDRLRESGAIQWGDTPSLASSLEQHRQPWNLIRYLEVKEKQAQEEGWTWGRTLVI

SEQ ID NO: 4982 - protein, 547 aa, Angiococcus disciformis
MAAKEIFFHQSAREAILRGVRTLADAVAVTLGPKGRNVVIEKSFGSPTITKDGVTVAKEIDLDNKFENMGAQMVKEVASKTSDKAGDGTTTATVLARAIYEEGLKLVAAGHSPMDLKRGIDKAVEVVVEELKKLSKPTADKKAITQVGTISANGDETIGSIIADAMEKVGKEGVITVEEAKGLETNLDVVEGMQFDRGYVSPYFVTNRERMEVVMDDPFILISEKKVSSMQDMIPILEQVARSGKPLLIIADDIEGEALATLVVNKIRGVLNVAAVKAPGFGDRRKEMLKDIATLTGGMVVSEELGHKYENLTLNDLGRSKRITVDKDNTTIVDGAGTKSEIEGRIKLIRSQIDTVTSDYDREKLQERLAKLVGGVAVINVGAATETEMKEKKARVEDALHATRAAVEEGIVPGGGVAFLRCLPALEKLKLGGEQDFGVEIIRRALQEPLRKIASNAGVEGAVVINKVREGQGAFGYNARTEVYEDLEKAGVIDPTKVERTALQNAASVASLLLTTEAMIADRPAKKKGKNGGGAGMPDYGGDDMDY

SEQ ID NO: 4983 - protein, 619 aa, Actinobacillus pleuropneumoniae serovar 1 str. 4074
MEQQLEQQSQLELLIAQGREQGYLTISEVHDHLPEELVDAEQIEDIIQMINDMGIKVLETAPDTDELMLAENIADEDVVEEATKVLSTVESELGRTTDPVRMYMREMGTVELLTREGEIDIAKRIEEGINEVQCAVAEYPEALTELIGFYAQVEEGTMRLSDLVTAFVDPNIQADEALEDLDVDLDDEEEAEDVADVDDESEEEESDGSTDTGDDNSIDPELAREKFYALREQHEKALQAIQKHGRSHKKSREQIQALSDIFREFRLVPKQFDLLVESMQKMMKQVRSEERQIQRYAVEYAQMKKADFLKLFQGNETSEEWIEKAINAKKGAAPKLANYIDQIRVNIDNLQRMEQTTGLTIAQIREIGGRIANGELKARRAKKEMVEANLRLVISIAKKYTNRGLQFLDLIQEGNIGLMKAVDKFEYRRGYKFSTYATWWIRQAITRSIADQARTIRIPVHMIETINKLNRISRQCLQEMGREATPEELAERMGMPEDKIRKVLKIAKEPISMETPIGDDDDSHLGDFIQDESLELPLDSATAESLRLATNEVLEGLTPREAKVLRMRFGIDMNTDHTLEEVGKQFDVTRERIRQIEAKALRKLRHPSRSETLRSFLDD

SEQ ID NO: 4984 - protein, 263 aa, Streptomyces coelicolor A3(2)
MSTTGTTPATTGYAAEFAGRTALVTGAASGIGLATARRLGAGGARVVVADFNAEGAEKAAAELRAGGVEAAAVELDVTRPESVEAAVGFAVDTFGSLDLAVNNAGIGGPSAPTGEYDVAAYQRVVRTNLDGVFYSMRYELPAIEAAGKGGSIVNVASILGSVGFAGSPAYVAAKHGVVGLTKAAAAEYAARGIRINAVGPGFIDTPLLKTMDEAAYKGLVALHPAGRLGRSEEVAELIAFLLSDRASFVAGSYHLVDGAYTAV

SEQ ID NO: 4985 - protein, 164 aa, Sinorhizobium meliloti
MMAGLSNAVSSLFLKEFVGAFLLSMRYFFRPKATLNYPFEKGPVSPRFRGEHALRRYPNGEERCIACKLCEAICPAQAITIEAGPRRNDGTRRTVRYDIDMVKCIYCGFCQEACPVDAIVEGPNFEFSTETREELYYDKEKLLANGDRWEREIARNIAMDSPYR

SEQ ID NO: 4986 - protein, 268 aa, Schizosaccharomyces pombe
MKLKLFPFQAAGHGQVLVSEDDKILIKPCIKSEVDFYKTCNDNITLYNWIPKNFGEWMPSSRDIEGINPIAESVAFSLTGKAIILENILYQMETPCVMDIKLGKQLWADDAPLEKRKRLDAVSRSTTSGSLGFRITGILSWDRTNNTYIKRSTAWGKTLTDSDVVEGLNDFFVSCSLSQKARLVESFLNLLKLFEVDLSESYIELKSSSILFVYDYSSLNPTYHCESNVVLKLIDLAHSRWTKNTIDHNTLIGVKNLIHCFAMLLKNE

SEQ ID NO: 4987 - protein, 244 aa, Dendrocalamus latiflorus
MGRGKVQLKRIENKINRQVTFSKRRSGLLKKAHEISVLCDAEVGLIIFSTKGKLYEYATDSCMDKILERYERYSYAEKVLISAESETQGNWCHEYRKLKAKVETIQKCQKHLMGEDLESLNLKELQQLEQQLESSVKHIRSRKSQLMLESISELQKKEKSLQEENKVLQKELVEKQQVHKRLVQWDQTQPQTSSSSSSFMMREALPTTNISIYAAAAGERAEDAAGQPQIHIGLPPWMVSHING

SEQ ID NO: 4988 - protein, 448 aa, Geobacillus stearothermophilus
MKAKTKKYIQVKTAIPGPKAKELLRKKEENVPRGPFHTVPTFAVKGEGALLTDVDGNTFIDLAGAIGSLNVGHCPPKVVEAIQKQAEQYIHPCFHVMMYEPYVELAETLNRITPGNHSKKTFFLNSGAEAVENAVKIARKYTGRRAILSFERGFHGRTLLAMSLTSKVKPYKFGFGPFAPDTYKLPYPYYYRKPAGMTNEELDAELLRRLEDFFLSDVPAEEVAAIIMEPVQGEGGFIVPSKTFVQGVKRICEKYGILFIADEIQTGFGRTGKMFAIEHFDVIPDLITMSKSIGAGVPISAVTGRAEVMDAPNPGEIGGTYGGSPLGCVAALEVIRMLQQEQLVERANVIGQIAIDRFRRLQEKYETVGDVRGLGAMVAVEFVTDAKTKTPNKELTAAILRECHQRGVIVMGAGLYSNVIRLLTPLVITDEQLEEALDVIEEVIAELA

SEQ ID NO: 4989 - protein, 244 aa, Dendrocalamus latiflorus
MGRGKVQLKRIENKINRQVTFSKRRSGLLKKAHEISVLCDAEVGLIIFSTKGKLYEYATDSCMDKILERYERYSYAEKVLISAESETQGNWCHEYRKLKAKVETIQKCQKHLMGEDPESLNLKELQQLEQQLESSVKHIRSRKSQLMLESISELQKKEKSLQEENKVLQKELVEKQQVHKRLVQWDQTQPQTSSSSSSFMMREALPTTNISIYAAAAGERAEDAAGQPQIHIGLPPWMVSHING

SEQ ID NO: 4990 - protein, 622 aa, Saccharomyces cerevisiae
MSFSTINSNVNKTTGDSNNNTTENSSTADLLGMDLLQSGPRLMNAMQPNNSSDMLHINNKTNNVQQPAGNTNISSANAGAKAPANEFVRKLFRILENNEYPDIVTWTENGKSFVVLDTGKFTTHILPNHFKHSNFASFVRQLNKYDFHKVKRSPEERQRCKYGEQSWEFQHPEFRVHYGKGLDNIKRKIPAQRKVLLDESQKALLHFNSEGTNPNNPSGSLLNESTTELLLSNTVSKDAFGNLRRRVDKLQKELDMSKMESYATKVELQKLNSKYNTVIESLITFKTINENLLNNFNTLCSTLANNGIEVPIFGDNGNRNPTGNTNPATTTAIQSNNNTNNASPATSTVSLQLPNLPDQNSLTPNAQNNTVTLRKGFHVLLVEDDAVSIQLCSKFLRKYGCTVQVVSDGLSAISTLEKYRYDLVLMDIVMPNLDGATATSIVRSFDNETPIIAMTGNIMNQDLITYLQHGMNDILAKPFTRDDLHSILIRYLKDRIPLCEQQLPPRNSSPQTHSNTNTANSNPNTINEQSLAMLPQDNPSTTTPVTPGASISSAQHVQQGQQEQQHQIFHAQQQQQHHNAIANARSDVAIPNLEHEINTVPHSSMGSTPQLPQSTLQENQLS

SEQ ID NO: 4991 - protein, 273 aa, Geobacillus stearothermophilus
MNRPFDIALAQMMPADGDIGANLAKMETIIHECKRKFPNVRLLLFPELYTTGYVLSEMLKEAAQTWDGSTFQHMSQLAQTFQLYLAYGYVEKDHTGNLYNSLMLIDPNGQCIGNYRKIHLTPFEKAWFSKGAEPVLVDTELGRIGLMICWDLAFPELARYLAVHGAELLLVPCAWESPFHAPFQKFAMARAIDNTVYVAACNQIGSSSSFHFFGLSSIYGPDGRKIAAANMNGREELVHAMIDQNQRQALKKHFYTMMDERRIDLYRQWIWRE

SEQ ID NO: 4992 - protein, 213 aa, Agrobacterium tumefaciens str. C58
MKDFPETLLNGYKNFMSGRYVDERERYRVLADTGQKPQTLFIACCDSRSAPETIFDCGPGELFVVRNVANMVPPFEPDGQYHATSAAIEYAVQVLKVKDIVVMGHGRCGGIQAALDPNLEPLSPGDFIGKWMNMVKSAAEQIQSNDVMTASERQTALERVSIRNSIANLRGFPFVKAQETAGKVKLHGAWFDISTGELWVMDSKTGDFRRPDL

SEQ ID NO: 4993 - protein, 107 aa, Vicia faba
KGMFSFLKDSAGVVDSPKLQAHAEQVFGMVRDSAIQIRQTGDVFLKDGSLGAIHIQKGVVDPHFVVVKEALLKTIKEASGDKWSEELSIAWEVAYDGLATAIKKAMS

SEQ ID NO: 4994 - protein, 83 aa, Vicia faba
QVFGMVRDSAIQLRTTGDIVLKDGTLGAIHIQKGVVDPHFVVVKEALLKTIKEASGDKWSEELSIAWEVAYDGLATAIKKAMS

SEQ ID NO: 4995 - protein, 382 aa, Ustilago maydis 521
MAPVANTKSSVELSALKDNLILMATHKKELELIKSTPAAPGPGMALVHVRATGVCGSDVHFWKHAGLGPWKIESQCALGHESGGIVIAVGEGVDNVVPGDRVAIEPGVPCFKATCDFCRTGKYNLCPTVDFYSVPPKDGTLKRYHEHPAGWLHKVPDNMSYEEIALLEPLSVTLQATLQAEISLGTPVLITGAGPIGIVQLLCASAAGATPIVITDVVKDRLDFAQKIVPGTFTYQIDPKKSPLESATEICKVFSKASGKHIAQGERDVQPAITMECTGIESSIQTASYATAASGLVFVIGVGANLQQIPFMHLSTNEITLKFLFRYRDTWPRAIRLVSSGKIDVKQIVTSRFPLEKAKEAVEHAADRSKFSVKTIIYDDQE

SEQ ID NO: 4996 - protein, 488 aa, Retama raetam
MVEPSPTTGSFSKLLQTVHGSMPSAASATFPVTTACFNTNTVEERKSNIFEFKPHNKSNMVPADFKNHVSEQSIQAEGPGKAQSFASSPLIECEIDVPSNELSLSSPVQMVSSGASTPVEVDSDELNHKGNTITVLQASQVEEVKGSGLPVAPERASDDGYNWRKYGQKLVKGSEFPRSYYKCTHPNCEVKKLLECSHDGQITEIVYKGMHDHPKPQPSRRYSVSMQEERSGKASLAGRDAEPNSTPDLSSVATNDDSREGADRTNDEVDDDDPFSKRRKMELGFADITHVVKPIREPRVVVKTLSEVDILDDGYRWRKYGQKVVRGNPNPRSYYKCTNAGCPVRKHVERASHDPKAVITTYEGKHNHDVPAARNSSHDMAGPAGVVGGQTRIKLEESDSISLDRGMGISSAAENRSNGQGKMLLSEFGNSQTQTSNSNFKFVHTTAGPVYFGVNPYGSIENRSDGPSLNHASSYPCSQNIGRILTGP

SEQ ID NO: 4997 - protein, 405 aa, Oryza sativa
MVLRRFAWPYGGQRASFCGSFTGWRECPMGLVGAEFQVVFDLPPGVYQYRFLVDGVWRCDETKPCVRDEYGLISNEVLVDNTHPVVQPETSIRVVSMDEGTILTTMPPDQLSQNSGVQIAIFRHRVSEILLHNTIYDVVPVSSKIAVLDARLPVKQAFKIMHDEGLSLVPLWDDQQQTVTGMLTASDFVLILRKLQRNIRTLGHEELEMHSVSAWKEAKLQFYGGPDVAAIQRRPLIHVKDSDNLRDVALAIIRNEISSVPIFKPSTDSSGMPLLGLATLPGIVKFICSKLQEQPEGYSFLQNQIVSMPIGTWSPHTGKASNRQLRTSRPSTPLNSCLDLLLEDRVSSIPIVDDNGALLDVYSLSDIMALGKNDVYTRIELEQVTVEHVSPYSFQLYSLPYLTCM

SEQ ID NO: 4998 - protein, 368 aa, Sphagnum sp. HG-1998
  misc_feature (182)..(182): Xaa can be any naturally occurring amino acid
  unsure (1)..(368): unsure at all Xaa locations
SDSGKDAGRLSAAWYMFKAQEELVEVAKQYGVKLTMFHGRGGTVGRGGGPTHLAILSQPPDTINGSLRVTIQGEVIEHSFGEEHLCFRTLQRFTAATLEHGMHPPISPKPEWRKVMDSMALVATEEYRSVVFQNPDFVSYFRTATPELEYGRMNIGSRPSKRKPSGGIESLRAIPWIFAWTXTRFHLPVWLGLGGALAHALQSDPSNIVILHRMYNQWPFFHVTLDLVEMVFAKGDPRIAALNDSLLVSPELKPFGVELRRKYEETRSLLLKVAGHKDVLEGDPYLKQRLRLREPYITVLNVQQAYTLKKMRDEECKINCATEWAARKPGKRTTELVALNPMSEYAPGLEDTLILTMKGIAAGMQNTG

SEQ ID NO: 4999 - protein, 612 aa, Arabidopsis thaliana
MKMDKKTIVWFRRDLRIEDNPALAAAAHEGSVFPVFIWCPEEEGQFYPGRASRWWMKQSLAHLSQSLKALGSDLTLIKTHNTISAILDCIRVTGATKVVFNHLYDPVSLVRDHTVKEKLVERGISVQSYNGDLLYEPWEIYCEKGKPFTSFNSYWKKCLDMSIESVMLPPPWRLMPITAAAEAIWACSIEELGLENEAEKPSNALLTRAWSPGWSNADKLLNEFIEKQLIDYAKNSKKVVGNSTSLLSPYLHFGEISVRHVFQCARMKQIIWARDKNSEGEESADLFLRGIGLREYSRYICFNFPFTHEQSLLSHLRFFPWDADVDKFKAWRQGRTGYPLVDAGMRELWATGWMHNRIRVIVSSFAMKFLLLPWKWGMKYFWDTLLDADLECDILGWQYISGSIPDGHELDRLDNPALQGAKYDPEGEYIRQWLPELARLPTEWIHHPWDAPLTVLKASGVELGTNYAKPIVDIDIARELLAKAISRTREAQIMIGAAPDEIVADSFEALGANTIKEPGLCPSVSSNDQQVPSAVRYNGSKRVKPEEEEERDMKKSRGFDERELFSTAESSSSSSVFFVSQSCSLASEGKNLEGIQDSSDQITTSLGKNGCK

SEQ ID NO: 5000 - protein, 360 aa, Glycine max
MDRAALTVGPGMDMPIMHDSDRYDLVRDIGSGNFGVARLMQDKQTKELVAVKYIERGDKIDENVKREIINHRSLRHPNIVRFKEVILTPTHLAIVMEYASGGELFEKICNAGRFTEDEARFFFQQLISGVSYCHAMQVCHRDLKLENTLLDGSPAPRLKICDFGYSKSSVLHSQPKSTVGTPAYIAPEVLLKQEYDGKLADVWSCGVTLYVMLVGAYPFEDPNEPKDFRKTIQRVLSVQYSIPDGVQISPECRHLISRIFVFDPAERITMSEIWNHEWFLKNLPADLMDEKIMGNQFEEPDQPMQSIDTIMQIISEATVPAVGTYSFDQFMEEQIYDLESESDAESDLDIDSSGEIVYAI

SEQ ID NO: 5001 - protein, 708 aa, Myxococcus xanthus
MPTQKPSKASVKPTKKKVDPVIRKKKAPDGAAAKGAKTGAEEKEELVARDVVAEATEKLKKKKKGVAPAMGDDVDPEEAAEEAAAAVQVDPDAVEDDIEEDPVAERKEVKDLLAAGREKGFLTYDEVNDALPADIVSSDQIDDVMSMFGDNDIEIVDAQKAAQNNEIKPTVTVEEEKEDADEDEKDEDDEPGGKSNDPVRLYLRKMGSVSLLTREGEVEIAKRIEDGEKEVLRALLACKVAVEEILDIGNKLKTAKLRVRDVIKDAPEETQSEGAEEAPEEVGEGDAPAQLAQSELNKIEQICKQIERFRKFAQDCDVLEEELSSKKKLTEVRKKEVKQEIKDLRTKMMEVLEEMRLNKKQVDRIVINLKALIERVDKAEDELRDLERRYDCSMKELRPQLKESRENPNIGKKLQKQLNLTPEQLEVLDRDVRTAVRKIKKVEEEANLPVESLRRNYDAIRLGERRAERAKSELVEANLRLVVSIAKKYTNRGLQFLDLIQEGNIGLMKAVDKFEYKRGYKFSTYATWWIRQAITRAIADQARTIRIPVHMIETINKLIRTSRYLVQEIGREPTPEEIAEKMELPLDKVRKVLKIAKEPISLETPIGEEEDSHLGDFIEDKSLVSPADAVINMNLAEQTRKVLATLTPREEKVLRMRFGIGEKSDHTLEEVGQDFEVTRERIRQIEAKALRKLRHPSRSKRLRSFVES

SEQ ID NO: 5002 - protein, 525 aa, Oryza sativa
MASSQLARRAARRLLSSQHRRHCAAPACPWLLGSAPPVLAPSPVAAAAAGDRRGFCSVRRFTGESNAAAAVEEAENGLVAGGDQHLCAYSLGCKVTAKPSIPPLSFHERKRNLVERKQAIDFPGGKVSFVAEMNFLPESQRDRINCYRVLDDDGRTISGSRFQEVSKELALKMYNEMATLQVMDTIFFEAQRQGRISFYLTSHGEEAINIASAAALTIDDIVLPQYREPGVLLWRGFTLQEFANQCFGNKLDYGKGRQMPIHYGSNRLNYFTVSSPIATQLPHAVGAAYSLKMDKKDACAITYFGDGGTSEGDFHAALNFAAVMEAPVIFFCRNNGWAISTPTSEQFRSDLYNNLNSTAIAGDGAVIRGQAYGMRSIRVDGNDALAVYSAVHTAREMAIKEGRPILVEALTYRVGHHSTSDDSTKYRPVDEIEHWRTARDPISRYRKWVQGNGWWCDEDESELRNNVRQELLKAIQVAERMPKPPLAELFTDVYDEVPSNLREQERLLRDTIKKHPADYPADVHI

SEQ ID NO: 5003 - protein, 363 aa, Arabidopsis thaliana
  misc_feature (252)..(252): Xaa can be any naturally occurring amino acid
  misc_feature (259)..(259): Xaa can be any naturally occurring amino acid
  misc_feature (313)..(313): Xaa can be any naturally occurring amino acid
  unsure (1)..(363): unsure at all Xaa locations
MAKEPVRVLVTGAAGQIGYALVPMIARGIMLGADQPVILHMLDIPPAAEALSGVKMELIDAAFPLLRGVVATTDAVEGCTGVNVAVMVGGFPRKEGMERKDVMSKSVSIYESQAAALEKHAAPNCEVLVVANPANTNALILKGFAPSIPEKNISCLTRLDHNRALGQISERLSVPVSDVKNVIIWGNHSSSQYPDVNHAKVQTSSGEKPVRELVKDDAWLDGEFISTVQQRGAAIIKARELSSALSAASSAXDHIRDWXVLGTPEGTFVSMGVYSDGSYSVPSGLIYSFPVTCRNGDWSIVQGLPIDEVSRKXMDLTSESSRKEDLAYHALLGLLERSSRKRRTWRTHASLKPFWSKIFIYKV

SEQ ID NO: 5004 - protein, 165 aa, Rubrivivax gelatinosus PM1
MSAVASIKEFFNTFFLLELLKGMKLTGRHFLSPAITVQFPEEKTPLSPRFRGLHALRRYENGEERCIACKLCEAVCPALAITIESEVRDDGSRRTTRYDIDLTKCIFCGFCEESCPVDSIVETHIFEYHGEKRGDLYFTKDMLLAVGDRYENEIAANKEADAAYR

SEQ ID NO: 5005 - protein, 438 aa, Kluyveromyces lactis NRRL Y-1140
MGQILSNPVIDKEQHSGSDVLTAFGLCAMQGWRMSMEDSHIVDLNISDDEKEHLAYYCVFDGHGGSSVAQFCGSQFSKILQKQDAFKKKSYNEALIQSFIATDEELLKDPVLANDHSGCTATTLLISKLQNVMICANSGDSRTVLSRNHIAKALSYDHKPTLKSEYSRIVTADGFVEMDRVNGNLALSRAIGDFEFKSNPDLAPHEQIVTCVPDLIEHTIDYNSDEFVILACDGIWDCLTSQDCVDLVHYGLKQGLTLEEISSKIIDVCCSPTTEGTGIGCDNMSIIIVALLKEDEDETAWHKRIVAKNYTPPNSFENQRRAVFHFYDFPENDDHVFEVTNKRESDETDYNDDRKVGADRGASSLANLEAILGSGGIQITPGENNLSYIHGTALSEVLASLSGGIRSQIEEEDEDDEEDEADEPTHADEVEESEVKKD

SEQ ID NO: 5006 - protein, 519 aa, Streptomyces coelicolor A3(2)
MSTENEGTAVPPAPSAPPVPVDAPAASAQPPAPHQPPAATPEAPAAPPAQAPDPASHGSTAPDASWPPPQPPGSPAQPAGTPAPTPTYGAGGDNGYGGSFAGDNGTGGGNGTGNGFGDGPGEGAGGGAGGWGAGGWGASYQQPAPKPGRGRGGVLAGVLIAALVAGGLGGGLGYTLARNNDESGSTTVSASDTGGSVKRDAGTVAGVAAKALPSTVTIQAEGSNGEGGTGTGFVFDKEGHIVTNNHVVAEAVDGGKLSATFPNGKKYDAEVVGHAQGYDVAVIKLENAPSDLKPLALGDSDKVAVGDSTIAIGAPFGLSNTVTTGIISAKNRPVASSDGSADSKASYMSALQTDASINPGNSGGPLLDAQGNVIGINSAIQSTGNGGFGTGQAGSIGLGFAIPVNQAKFVAQQLIKSGKPVYAKIGASVSLEETTNGAKLTEQGVGGSDPVEKGGPADDAGLKPGDVITKLDDRVIDSGPTLIGEIWTHKPGDEVTVTYERGGKQHTAEVTLGSKLGDD

SEQ ID NO: 5007 - protein, 250 aa, Triticum aestivum
  misc_feature (184)..(184): Xaa can be any naturally occurring amino acid
  misc_feature (202)..(202): Xaa can be any naturally occurring amino acid
  misc_feature (210)..(210): Xaa can be any naturally occurring amino acid
  misc_feature (231)..(232): Xaa can be any naturally occurring amino acid
  misc_feature (236)..(236): Xaa can be any naturally occurring amino acid
  unsure (1)..(250): unsure at all Xaa locations
MGLGSDASSSSSRLDSAPLLPHHSAEGGHLSSQPKTFANVFIAVVGAGVLGLPYTFSRTGWAAGSILLLSVALLTFYCMMLLVACRRRLADDHPKMLSSFGDLGDAVFGAPGRLAVDTMLVLSQASFCVGYLIFISNTMAHLYPVFAPSSNVFLSPKALFIYAMLPFQLGLNSIKTLTLLAPLXSIFADVVDLGAMGVVVGXDVSTWLAXQPTVAAFGAPAALLYGGGRVXXYAFXGVCMGLAARRARAR

SEQ ID NO: 5008 - protein, 382 aa, Arabidopsis thaliana
MGNSSEEPKPPTKSDKPSSPPVDQTNVHVYPDWAAMQAYYGPRVAMPPYYNSAMAASGHPPPPYMWNPQHMMSPSGAPYAAVYPHGGGVYAHPGIPMGSLPQGQKDPPLTTPGTLLSIDTPTKSTGNTDNGLMKKLKEFDGLAMSLGNGNPENGADEHKRSRNSSETDGSTDGSDGNTTGADEPKLKRSREGTPTKDGKQLVQASSFHSVSPSSGDTGVKLIQGSGAILSPGVSANSNPFMSQSLAMVPPETWLQNERELKRERRKQSNRESARRSRLRKQAETEELARKVEALTAENMALRSELNQLNEKSDKLRGANATLLDKLKCSEPEKRVPANMLSRVKNSGAGDKNKNQGDNDSNSTSKFHQLLDTKPRAKAVAAG

SEQ ID NO: 5009 - protein, 118 aa, Zea mays
TATAAAAAAAPKGCVTVRVGLEGEEQRRFAVPLGHLKHPLFGALLEEAEREYGFRHQGALAIPCRVDRFVQLERLIGRDLHGACAHHLVDLDGAAAAAAQHQHQHHLHLPRFVGCFRA

SEQ ID NO: 5010 - protein, 598 aa, Klebsiella sp. LX3
MSFVTLRTGVAVALSSLIISLACPAVSAAPSLNQDIHVQKESEYPAWWKEAVFYQIYPRSFKDTNDDGIGDIRGIIEKLDYLKSLGIDAIWINPHYDSPNTDNGYDISNYRQIMKEYGTMEDFDSLVAEMKKRNMRLMIDVVINHTSDQHPWFIQSKSDKNNPYRDYYFWRDGKDNQPPNNYPSFFGGSAWQKDAKSGQYYLHYFARQQPDLNWDNPKVREDLYAMLRFWLDKGVSGMRFDTVATYSKIPGFPNLTPEQQKNFAEQYTMGPNIHRYIQEMNRKVLSRYDVATAGEIFGVPLDRSSQFFDRRRHELNMAFMFDLIRLDRDSNERWRHKSWSLSQFRQIISKMDVTVGKYGWNTFFLDNHDNPRAVSHFGDDRPQWREASAKALATITLTQRATPFIYQGSELGMTNYPFRQLNEFDDIEVKGFWQDYVQSGKVTATEFLDNVRLTSRDNSRTPFQWNDTLNAGFTRGKPWFHINPNYVEINAEREETREDSVLNYYKKMIQLRHHIPALVYGAYQDLNPQDNTVYAYTRTLGNERYLVVVNFKEYPVRYTLPANDAIEEVVIDTQQQAAAPHSTSLSLSPWQAGVYKLR

SEQ ID NO: 5011 - protein, 132 aa, Lactuca serriola
HLLLSLSTAADQTHTTATPMAIKTSGRKRFRTKFSLDQKEKMTIFAEKLGWKMQRCDDKLIADFCNEIGIRRGIFKVWMHNNKNNFGKREKDITTTAITGVAAAVVRSNDSTHQDNGSDDVHLQASTNGSSS

SEQ ID NO: 5012 - protein, 232 aa, Zea mays
MELELEAAARRFHLWFRGLRSLRRDLASARWSDDPTAQLPAQVGRFVAHLESYCAARAGLDPVWTLSAPWATPAERGAAYWLAGWRPTTLVHLLYTESGRRLEAQLPDLLLGVRSGNLGDLTPAQLAQVDDLQRRTVAEEDALAREMALVQEGHGVVVLPAAPDGSGGLDVAGLVRRARAVLDRADALRLRTVKRAVEILEPAQAAELLVAAADLEIGFREFGLKHGSGRMT

SEQ ID NO: 5013 - protein, 303 aa, Oryza sativa (japonica cultivar-group)
MAGREDGAAAGAMEEGQDSKEVKCESSEDGSSSSSSSRCHGNDVISVQFMQKVHPWCMCMNKNLLILAEILGTYFMIFAGCGAVVVNQSTGGAVTFPGICAVWGLVVMVLVYTVSHISGAHFNPAVTVAFATCGRFRWKQVPSYVVAQVLGSTMASLTLRVVFGGGGGGARGEHLFFGTTPAGSMAQAAALEFVISFFLMFVVSGVATDNRAIGELAGLAVGATVAVNVLFAGPVTGASMNPARSLGPAMVAGRYGGVWVYVAAPVSGTVCGAWAYNLLRFTDKPLRDIANTASFLRRSSRRS

SEQ ID NO: 5014 - protein, 468 aa, Arabidopsis thaliana
MGTVCESVATAKSSTAVMSSIPPFLSKTYDMVDDPLTDDVVSWSSGNNSFVVWNVPEFAKQFLPKYFNHNNFSSFVRQLNTYGFRKVDPDRWEFANEGFLRGQKQILKSIVRRKPAQVQPPQQPQVQHSSVGACVEVGKFGLEEEVERLQRDKNVLMQELVRLRQQQQVTEHHLQNVGQKVHVMEQRQQQMMSFLAKAVQSPGFLNQFSQQSNEANQHISESNKKRRLPVEDQMNSGSHGVNGLSRQIVRYQSSMNDATNTMLQQIQQMSNAPSHESLSSNNGSFLLGDVPNSNISDNGSSSNGSPEVTLADVSSIPAGFYPAMKYHEPCETNQVMETNLPFSQGDLLPPTQGAAASGSSSSDLVGCETDNGECLDPIMAVLDGALELEADTLNELLPEVQDSFWEQFIGESPVIGETDELISGSVENELILEQLELQSTLSNVWSKNQQMNHLTEQMGLLTSDALRK

SEQ ID NO: 5015 - protein, 339 aa, Achlya bisexualis
MAPVAIGINGFGRIGRLVCRAAFANPNATVVAINDPFMDLDYMVYLFKYDSTHGGYKGTVVAEDGNLVIDGHVVRVFSERNPNEIPWGEAGADYVCESTGVFTTTEKAGLHLQGGCKKVVISAPPKDSTPMYVMGVNHDKYDGSAHVVSNASCTTNCLAPLAKVIHDNFGIVEGLMTTVHAVTANQLTVDGPSRGGKDWRAGRGAGANVIPASTGAAKAVGKVLPELNGKLTGMAFRVPVPDVSVVDLTVRLEKGASLDTIKAAVKEASEGSMAGILGYTEDEVVSQDFVSDKRSSIFDANACIALNDNFVKLVSWYDNEWGYSNRLVDLVVHMATIDN

SEQ ID NO: 5016 - protein, 587 aa, Brassica napus
MYRLISSIASKARVARNCTSQIGSRLSSTRNYAAKDIRFGVEGRALMLRGVEELADAVKVTIPPKGRNVIIEQSWGAPKVTKDGVTVAKSIEFKDRVKNVGASLVKQVANRPTQLNRCLGDGTTCATVLTRAIFTEGCKSVAAGMNAMDLRRGIKLAVDTVVTKLKSRARMISTSEEIAQVGTISANGDRELVTDCKAMESVGKEGVITIQDGKTLFNELEVVEGMKIDRGYISPYFITNQKNQKCELEDPLILIHEKKISNLNSMVKVLELALKSQRSLLIVAADLESDALAVLILNKLRAGIKVCAVKAPGFGENRKANMHDLATLTGAQVITEELGMNLEKIDLSMLGNCKKITVSKDDTVFLGWGAGDKKAIGERCEQIRSMVEASESDYDKEKLQERLAKLSGGVAVLKIGGASESEVGEKKDRVTDALNATKAAVEEGIVPGGGVALLYASKELDKLSTANFDQKIGVQIIQNALKTPVYTIASNAGVEGAVIVGKLLESDNPDLGYDAAKGEYVDMVKSGIIDPVKVIRTALVDAASVSSLLTTTEAVVTEIPTKEDASPAMGGGGGGMGGMGGMGGMGF

SEQ ID NO: 5017 - protein, 132 aa, Lactuca saligna
HLLLSLSTAADQTHTTATPMAIKTSGRKRFRTKFSLDQKEKMTIFAERLGWKMQRCDDKLIADFCNEIGIRRGIFKVWMHNNKNNFGKREKDITTTATTAVAAAVVRSNDSTHQDNGSDDVHLQASTNGSSS

SEQ ID NO: 5018 - protein, 596 aa, Achlya bisexualis
MQVRRFSSVARKFFVGGNWKCNGSLSQAQSLVDTLNTATIPKNVEVVVAPASIHALSVKSSLRKDIGVSGQDTWSRGNGAFTGEVSAEMLKDAGINYTIIGHSERRQKGETNEEVASKAGYALSKGVSVIACIGETKIEREAQKTMQVVTEQLAAYAKNITDWSNVVIAYEPVWAIGTGLTATPEQAQEVHAGIRSWLKQNVSSAVADATRIIYGGSVTAGNAAELSKKADIDGFLVGGASLKPDFLSIINCQNDKAHQGGPVNIAINGFGRIGRLVLRAAQTNPLLNVVAVNDPFIPTEYMEYMLKHDTVHGHFDGTVRHEGDHIIVNDRKIRVFGEKDPKAIKWGESDVEYVVESTGAFTTKEKASAHLLNGPRKVVISAPSADAPMFVVGVNHDKYDPSMNIVSNASCTTNCLAPLAKVVNDKFGIIEGLMTTVHAVTATQLTVDGPSKKDWRGGRAACFNIIPSSTGAAKAVGKVIPELNGKLTGMSFRVPTANVSVVDLTVRLRNKASYEDIKAAIKYASENELRGILGYTDTAVVSSDFISDPRSSIFDADAGIVLTDDFVKLVSWYDNEWGYSNRVLDLITHMVHTERQ

SEQ ID NO: 5019 - protein, 314 aa, Glycine max
  misc_feature (49)..(49): Xaa can be any naturally occurring amino acid
  misc_feature (123)..(123): Xaa can be any naturally occurring amino acid
  misc_feature (160)..(160): Xaa can be any naturally occurring amino acid
  unsure (1)..(314): unsure at all Xaa locations
MGDEEEEEVLGSGQSASTNSLPPPADSTLLQLKPPSRTLHADDAVFTRXLAAKKKKRGGQRAVGPDKSGRGLRQFSMKVCEKVESRGRTTYNEVADELVAEFSEPSNSELPPDQQQYDETDHXENIRRRVYDALNVLMAMDIISKDKKEIQWRGLPRTTXNDIEELKSERLGLRNRIEKKAAYLQELEEQYIGLQKLIQRNEQLYSSGNAPNGGVSLPFILVQTRPHATVEVEISEDMQLVHFDFNSTPFELHDDNYVLKAMKFCERSQNDNTTDNSTDGGEGSSIYAQVPTSVSNPPNMFKHNKVGTGGGKGV

SEQ ID NO: 5020 - protein, 612 aa, Arabidopsis thaliana
MKMDKKTIVWFRRDLRIEDNPALAAAAHEGSVFPVFIWCPEEEGQFYPGRASRWWMKQSLAHLSQSLKALGSDLTLIKTHNTISAILDCIRVTGATKVVFNHLYDPVSLVRDHTVKEKLVERGISVSSYNGDLLYEPWEIYCEKGKPFTSFNSYWKKCLDMSIESVMLPPPWRLMPITAAAEAIWACLIEELGLENEAEKPSNALLTRAWSPGWSNADKLLNEFIEKQLIDYAKNSKKVVGNSTSLLSPYLHFGEISVRHVFQCARMKQIIWARDKNSEGEESADLFLRGIGLREYSRYICFNFPFTHEQSLLSHLRFFPWDADVDKFKAWRQGRTGYPLVDAGMRELWATGWMHNRIRVIVSSFAVKFLLLPWKWGMKYFWDTLLDADLECDILGWQYISGSIPDGHELDRLDNPALQGAKYDPEGEYIRQWLPELARLPTEWIHHPWDAPLTVLKASGVELGTNYAKPIVDIDTARELLAKAISRTREAQIMIGAAPDEIVADSFEALGANTIKEPGLCPSVSSNDQQVPSAVRYNGSKRVKPEEEEERDMKKSRGFDERELFSTAESSSSSSVFFVSQSCSLASEGKNLEGIQDSSDQITTSLGKNGCK

SEQ ID NO: 5021 - protein, 119 aa, Hydrogenothermus marinus
GHYERFTHVVLTKYNNATSGKLYNTILEKERRGAYLGATVQIIPHFTNEIKRAIEKAADGADIILVEIGGTVGDIESLPFLEAIRQMSLELGKENSLFIHLTYVPYIKAAGELKTKPTQ

SEQ ID NO: 5022 - protein, 90 aa, Hydrogenothermus marinus
GICLGMQVAVIEFARNVVGLKGANSTEFDPETPYPVIDLMPEQRNINNKGGTMRLGAYKCTLKEGTKRFEIYGKKDIYERHRHRYEGTRI

SEQ ID NO: 5023 - protein, 157 aa, Arabidopsis thaliana
MQIFVKTLTGKTITLEVESSDTIDNVKAKIQDKEGIPPDQQRLIFAGKQLEDGRTLADYNIQKESTLHLVLRLRGGAKKRKKKTYTKPKKIKHKHKKVKLAVLQFYKIDGSGKVQRLRKECPNATCGAGTFMASHFDRHYCGKCGLTYVYQKEGVEA

SEQ ID NO: 5024 - protein, 610 aa, Arabidopsis thaliana
MATVTASSNFVSRTSLFNNHGASSCSDVAQITLKGQSLTHCGLRSFNMVDNLQRRSQAKPVSAKSSKRSSKVKTAGKIVCEKGMSVIFIGAEVGPWSKTGGLGDVLGGLPPALAARGHRVMTICPRYDQYKDAWDTCVVVQIKVGDKVENVRFFHCYKRGVDRVFVDHPIFLAKVVGKTGSKIYGPITGVDYNDNQLRFSLLCQAALEAPQVLNLNSSKYFSGPYGEDVVFVANDWHTALLPCYLKSMYQSRGVYMNAKVVFCIHNIAYQGRFAFDDYSLLNLPISFKSSFDFMDGYEKPVKGRKINWMKAAILEAHRVLTVSPYYAQELISGVDRGVELHKYLRMKTVSGIINGMDVQEWNPSTDKYIDIKYDITTVTDAKPLIKEALQAAVGLPVDRDVPVIGFIGRLEEQKGSDILVEAISKFMGLNVQMVILGTGKKKMEAQILELEEKFPGKAVGVAKFNVPLAHMITAGADFIIVPSRFEPCGLIQLHAMRYGTVPIVASTGGLVDTVKDGYTGFHIGRFNVKCEVVDPDDVIATAKAVTRAVAVYGTSAMQEMVKNCMDQDFSWKGPARLWEKVLLSLNVAGSEAGTEGEEIAPLAKENVATP

SEQ ID NO: 5025 - protein, 362 aa, Bordetella bronchiseptica RB50
MTGSTAGKVLVVGALGVVGRAALEHFGQRPGLARVGLSRRAPDFAPEATWISADLRDAQATRAALAAHGDATHVVYAALNEQPDLLKGWRDSGNVDLNTRMLRNTLDALREAPLRHVTLLQGTKAYGVHTGRPMPVPARETDAVRDHANFYFDQQDLLAERAAAQGFAWTIFRPQIVLGVALGSAMNPVATLGAYAALSREAGQPLRYPGHPHLLTECTDARLIARAIAWAWDEPRAHGEAFNIANGDVVLWQPVFERLAALFGMPLGEPVDTRMREAMPEQAERWRAIAERERLAVPQLRDLIGLSWQYADATWAARHPLPVPPLVSTIKLRQAGFGDCIDTQECIVEHLREMQRLRYLPR

SEQ ID NO: 5026 - protein, 368 aa, Pseudomonas aeruginosa PAO1
MSNPTSTPRADGFRMPAEWEPHEQTWMVWPERPDNWRNGGKPAQAAFAAVAKAIARFEPVTVCASAGQYENARARLDDGNIRVVEISSDDAWVRDTGPTFVIDDKGDVRGVDWGFNAWGGFEGGLYFPWQRDDQVARKILEIERRARYRTDDFVLEGGSIHVDGEGTLITTEECLLNHNRNPHLSQAEIERTLRDYLAVESIIWLPNGLYNDETDGHVDNFCCYARPGEVLLAWTDDQDDPNYLRCQAALRVLEESRDAKGRKLVVHKMPIPGPLYATQEECDGVDIVEGSQPRDPSIRLAGSYVNFLIVNGGIIAPSFDDPKDAEARAILQRVFPEHEVVMVPGREILLGGGNIHCITQQQPAPRKA

SEQ ID NO: 5027 - protein, 409 aa, Bradyrhizobium sp. BTAi1
MDYSQYFSAALGRLHDERRYRVFADLERIAGRFPHATWHSPSGPRNVVIWCSNDYLGMGQHPKVVGAMVETATRVGTGAGGTRNIAGTHHPLVQLEAELADLHGKEAALLFTSGYVSNQTGIATLAKLIPDCLILSDALNHNSMIEGVRQSGCERQIWRHNDLAHLEQLLIAAGPDRPKLIACESLYSMDGDVAPLSAICDLAERYKAMTYVDEVHAVGMYGPRGGGIAERDGVMHRIDILEGTLAKAFGCLGGYIAAKGEIIDAVRSYAPGFIFTTALPPPICSAATAAIRHLKSSSWERERHQDRAARVKSILNAAGLPVMANDTHIVPLFVGDPEKCKQASDLLLEEHGIYIQPINYPTVAKGTERLRITPSPYHDDGLIDRLAEALLQVWERLGLALHKKPLAAE

SEQ ID NO: 5028 - protein, 269 aa, Ustilago maydis 521
MPPVDAKAPSQTPAEPILFSFADSDELSRNLADFVIKAQNDAISRRNKFTLATSGGSLPKMLAKYLINRDDNALRWDKWEIFFCDERLVPLDHEDSNYYLCHQEFFSKVPELKRSQIHTIDEALLDDPEELSDAYEKQLVQAFAGKEAVRNPVFDLILLGMGPDGHTCSLFPGHELLTEQDRWVAPIEDSPKPPAKRITFTYPVLNHAHRLAFVLAGEGKQEMLSKVLDQPELGLPASRVRPSPPGDIYFFTDNAASKTTKYARSDFKL

SEQ ID NO: 5029 - protein, 1166 aa, Ustilago maydis
MPPLPYRRSSSLLPVTHSGTSTVARATTSLATRTPIHLTLEDLKRRTIKFISEEDNTTRIVNVSDCRDAYDVMARVLKKFGKPPSGNSYTPTADQGPTGDELGATETWGIFATSADGQNTKALSDNELLAICHAPQPHDPLRERGLTLRRIPNHLPGEDARKVPVRSGRNKLEAFFGERMPVAQMQPAGPGSGVNADEEDAGSVTISGKKMKRASTVSIMSGLGVGPFSSSSHNTGAGHTHGSTRAEGKLLSKKESKHMSPPPVTSKPSKIRNFFGQRPPSELINTNLADFFPSTDSKALQRTARRSIYGRASASTRSKRNSTWSFVADPDAPPLPNKGSMDGHPTPLERSSISIRERGTTPVIQIGYDSRSEDDHQSNARRTSSGTHSHLHSSLTGPPTLPPVVSRDSLDEWSRDLKAVGSPVTEENAMFQSSRHGHASGSQQHHAAMKHYPSHASGYADRPSISRRASGESARSRRSLASQVRHGLSAARERNADTASLLTVDEITQEVENRRESISLAGAGGGWVVDEDGVPIPIPGSSSPFSSSAAASTRPSSGISSSYVHNGHLEHDDSEGHSDEEANQSSDLEEATRTRKARGVPSKAASIRTVASKRASSVLQAPGDESDRHLGDPMAVARSTTSRASSVSELRRSVHDHGDPSDGESGSDFTDSDLDSDGSETDEDEQANDVYLPSAKPAPIKWHKGALIGAGSFGNVFLGMNAKTGLLMAVKQVELPSGDSHLDQRKKGMLEALEREIKLLKSLEHENIVQYLDSFADDSHLNIFLEYVPGGSIVALLRNYGAFEEPLVRNFVRQILNGLSFLHNRGIMHRDIKGANILVDNKGGIKISDFGISKKVESDLVLATNKSGAGGGGAGGAAHRPSLQGSVFWMAPEVVKQTSYTIKADIWSLGCLVVEMISGTHPWAELNQMQALFQIGMGRKPSLPDEISNECRDFLEKTFELDYNNRPSADELLNHAFMGTEMTFPPSSGADGSGGGDDDAGGSGDAGDGDASTMGMTNDAETGTTRETRETKDGKRPTRSKSTRRLEREKRHKEAAAAAAAATALDTGTPNTPTSHTAAAAAAAAAAAASASASASASPAVASTSPAPGDAETGSPTNGKSAVPPAGSTGGTPESILTVSIATARGNSTSTALSAADAAFSEEADS

SEQ ID NO: 5030 - protein, 768 aa, Kluyveromyces lactis NRRL Y-1140
MVQSYVLGFPRIGPNRELKKATEGYWNGKVSAEQLQQVAKDIKASNWKLQKDAGVNVIASNDFSFYDQVLDLSLLFNVIPQRYSKYELSPLDTYFAMARGLQRKATETTAAVDVPALEMVKWFDSNYHYVRPTFSNSTEFKLNGQKPVDEYLEAKQLGVETRPVLVGPVSFLHLGKSDKDSADLEPISLLEKILPLYVQILKKLADAGAKSVQLDEPTLVLDLPAEVQAAFNKAYTFLASQEGLPEITVASYFGTVVPNLAALKNLPVAGFHFDFVRNPEQLNDVISILNDKQTLSVGIVDGRNIWKNNFAKSVEFVESAISKLSSDRVLVATSSSLLHTPVNLENETKLNPEIKDWFAFATQKVSEVVTIAKKLSGEDVTAEFEANAKSLNNRATSSITNNADVKARVASINESMGKRSSPFVERIKEQQEILKLPLFPTTTIGSFPQTKDIRINRNKFNKGTITREQYEQFINEEIERVIRFQEEVDLDVLVHGEPERNDMVQFFGEQLEGYAFTVNGWVQSYGSRYVRPPIIVGDLSRPKAMSVKEVVYAQSITQRPVKGMLTGPVTCLRWSFPRDDVDQKTQAYQLALAIRDEVSDLEAAGIKVIQVDEPAVREGLPLRAGQERTEYYNWSAESFRVATSVVANKTQIHSHFCYSDLDPNHIKALDADVVSIEFSKKDDPNYILQFANYPNHSGLGLFDIHSPRVPSKEEFIQKMEEFLKYYPAEKFWVNPDCGLKTRGWEETKATLTNMVNAAKHFREIYAKK

SEQ ID NO: 5031 - protein, 339 aa, Brassica napus
VRIPGSTHASADAWATHASANFSTLSLSRELRFKMQIFVKTLTGKTITLEVESSDTIDNVKAKIQDKEGIPPDQQRLIFAGKQLEDGRTLADYNIQKESTLHLVLRLRGGMQIFVKTLTGKTITLEVESSDTIDNVKAKIQDKEGIPPDQQRLIFAGKQLEDGRTLADYNIQKESTLHLVLRLRGGMQIFVKTLTGKTITLEVESSDTIDNVKAKIQDKEGIPPDQQRLIFAGKQLEDGRTLADYNIQKESTLHLVLRLRGGMQIFVKTLTGKTITLEVESSDTIDNVKAKIQDKEGIPPDQQRLIFAGKQLEDGRTLADYNIQKESTLHLVLCLRGGI

SEQ ID NO: 5032 - protein, 276 aa, Medicago truncatula
MWILLSCVFVGGRPATFNQDFHVTWSEPHIKQIDQGRTIQLTLDQGSGCGFASKVKYLFGRVSMKIKLVPGDSAGTVTAFYMNSDTDSVRDELDFEFLGNRTGQPYTVQTNIYAHGKGDREQRVNLWFDPSADFHTYSILWNHHHIVFYVDEVPIRVYKNNEAKGIPYPKMQAMGVFSTLWEADNWATRGGLEKINWSKAPFYAYYKDFDIEGCAIPGPTTCSTNPKNWWEGVEYQALSAIEARRYRWVRMNHVIYDYCQDKSRYPMTPHECLSGI

SEQ ID NO: 5033 - protein, 422 aa, Streptomyces sp. PGA64
MSRRVVITGVGVLAPGGIGAKNFWSLLSEGRTATRGITFFDPSSFRSRVAAEADFDPEMHGLTPQEIRRMDRAAQFAVVTAREALADSGLDLAGFDPHRTGVTIGSAVGATTGLDDEYRVVSDGGRLDLVDHTYAPPHLYNYFVPSSFSAEVAWAVGAEGPATVVSTGCTSGLDSVGHATELIREGTADVMITGATDAPISPITMACFDAIKATTPRNDDAAHASRPFDGTRNGFVLGEGSAVFVLEELESAKKRGAHIYAEIAGYASRCNAFHMTGLRPDGREMSEAIDVALGEARMNPDRIDYINAHGSGTKQNDRHETAAFKLSLGDHAYRTPVSSIKSMVGHSLGAIGSIEIAASVLAMKNHVVPPTANLHTPDPECDLDYVPLTAREQRTDTVLTVGSGFGGFQSAMVLARPERNAA

SEQ ID NO: 5034 - protein, 405 aa, Streptomyces sp. PGA64
MSTRTVITGIGVATPNGLGVDEFWAATRVGKNAIARVTHFDPSSYPARLAGEIRGFEAKDHLPSRLIPQTDRMTQLALVAADCAFEDAGVELGNIPAYDMGVVTASTSGGFEFGQNELKKLWSQGSRYVSAYQSFAWFYAVNSGQISIRNGMKGPSGVVVSDHAGGLDAIAQARRQIRKGSKLIFSGGFDASICPWGWAAQIAGGRLSHSDRPERAYLPFDRAANGYVPGEGGALLILEDERTARERGAEKIYGEVAGYGSTFDPRPGSDREPGLRHAIEVALADAGVTAADVDVVFADAAGSPDLDRQEADAITAVFGPSGVPVTAPKTMIGRLYSGAAPVDVVAAVLAIREGLIPPTTNVELSPDYDLDLVTGQPRTASVRTALVLARGVGGFNSAVVVRAVD

SEQ ID NO: 5035 - protein, 577 aa, Silicibacter sp. TM1040
MATSFAARLSQLLTQIYPDLDTEILGSKVVEAFWPEGSHRRKRPRRPGNSLWSERDALLITYGNTMRDGAHKPLDLLHDFLLTYMKGVVNGVHILPFFPFTSDDGFAVTDYRKVNPELGDWADIRRIGGAFHLMSDMVLNHVSSQSAWFNAYRQGQPPYDRFFYEASPSDDLSAVVRPRTTPLLQEVETATGAKHVWCTFSHDQVDLNFENPEVLLEILRIIRLHIDQGVRIIRLDAVAFIWKEVGTSSIHLPQTHAIVQLLRLLADYATETVVLLTETNVPRAENLSYFGNRNEAHVVYNFPLPPLILHAMMAGSARYLLNWARAMPPAPLGCAYLNFTASHDGIGMRPAEGVLPQEEIDQMIACVRAVGGLVSMRALPGGGEAPYEVNCTYFDALGRTFDRGEARKVDRFICAQTIPMSLEGIPAFYIHAMLATANDHDAVARRGMNRAINRHRWDYGELKARLNDADSAQAQVMSALSERLRVRAEQPAFHPNATQFTLQLDDRVFALWRQSLDRAQSIFALHNVSGDGVILHPGALNLIEGETWRDLLSGDMFESDAEITLAPYQCRWITNQA

SEQ ID NO: 5036 - protein, 136 aa, Corynebacterium efficiens
MTERTLILIKPDGVTNGHVGEIIARIERKGLKLAALDLRVADRETAEKHYEEHADKPFFGELVEFITSAPLIAGIVEGERAIDAWRQLAGGTDPVSKATPGTIRGDFALTVGENVVHGSDSPESAEREISIWFPNL

SEQ ID NO: 5037 - protein, 302 aa, Pseudomonas fluorescens Pf-5
MDRKKRIAAIGECMIELQQHHDGSLQQSFGGDTLNAAVYLAREMGEAGRVDYVTALGDDSFSDAMCQGWAAEGIGLERVQRLPGRLPGLYCIQTDARGERRFLYWRNEAAVRDCFTTVAAGPILEALKHYDVLYFSGITLAVLGEVGRGKLLQTLAEARQRQALIVFDNNYRPRLWASVEQARAAYREVLPQVDLALLTLEDEQALFAYPDAEAVFAAYQGIPEVVLKRGAEPCLIRVAGGAFEVPAQRVEQVVDSTAAGDSFSAAYLARRLLGGSPVQAAEAGHRLASQVIQHPGALIPRH

SEQ ID NO: 5038 - protein, 59 aa, Schizosaccharomyces pombe
LAIIIAFGQATAYVLTGMYGRPQDLGAGICLLLILQLAAASLIVLLLDELLQKGYGLGS

SEQ ID NO: 5039 - protein, 363 aa, Legionella pneumophila str. Lens
MEMMRQQRNLLLIPFILCFILAKPVFSLNLDALLPDERNTVEVFQKASSKVVYVHRLANATVQRRYSLQKTHVPDGAGSGIIWDNKGHVVTNFHVINGADDIAITLGNMTVPAKVIGSEPRKDIAVLEIKSPKALDYLKSFQPFEIVSLNDLIVGQKAIAIGNPFGLDHSLSKGVISALGRKVPGIGGVTIYDMIQTDTPINPGNSGGPLLNSAGQLIGMNTMIYSRSGSSAGIGFAVPAEDIQKIASQIINHGRVVLSGIGIQRVEPHLAERLGVKKGILIADVVPGTPADKLKLRGTHRNQWGRIVLGDVIVGVNAHPVPNYDALYNLLTEIKVGEQITVSIIRNGKKMDVKMKTIDIAAL

SEQ ID NO: 5040 - protein, 987 aa, Triticum aestivum
MIQPEQINHNDEVLSCTLHHTVRDLIMYKSKEENFITSIDYSKAITGNSNMVRRLSLHFSSAKYATKPSGVILSQSRSLFFFGLLRCLPSDVEFKLLRVLILDFWGNQYGLTSLNLTRIRSLVHLRYLKISCDIIVELPAQMRGLRYMETLEINARSSAVPLDIIHLPGLLHLSLRDETNLPDGIGRIRSLRTLQYFDLGNNPAGRVLSLCGLMNLQYLHLTYSTVQSDEHLKRNMVALASSVIKLVNLKSVIPTPGALSTAIYHDVLSSVSSPPVFLQGLQRLVVLPPICMFSRVPKDIGAVRKLCYLSLVVRELRRNDIDSITGLPALTVLSLYVRQPPAESIIFNNGVFPALKYFKYMCGVLCLAFQEGALPNVHRLKLGFNARKGQQYDVLLAGIQHLVNLKKIDGIIGAAEGAEEPDRGAAESAFKDTIHKHSRFPSYVNVKRVDWVEEENEPRTEVNSSSSKCHEILQEQRGVNETEEDTKQFADSGVTNQIMQVSPQHMDLCAADTKLTMPSNNRMSFPEKLHDSIAAEAVSFSCTTSSGSSPKSSSAPSSHHSLPETYTWDPGGSPWSRALSSPSLTPRNTSAPQSAMHPMLSPEDHISRAEGTWSTAYFHPLPLPPSAISQVKATLSNQPAPKVEMSLVAGQWEKRKLIGSGTFGDVYEATNRHTGALCAVKAISIPNDSKSAESLKQLDQEIKLLSQFKHENIVQYYGSETIEGHLYIYMEYVHPGSINKYIQQHCGAITESIVCNFTHHILRGLAFLHGQNIMHRDIKGANVLIDGNGVVKLADFGTAKHLSTAAPNLSLKGTPYWMAPEMIRATLVKDVGYDLAVDIWSLGCTIIEMFNGKPPWSGLEGPTAMFKVLNKDPPLPDNLSHEAKDFLKCCFKRNPAARPSARELLTHPFIRNSSHYSKHVQEVIIAGCEEVIRASCDPSLTRKTTTSGGNDARSSESLVSQLTLQPVQVVTPYFPPRNSGFVSNPGS

SEQ ID NO: 5041 - protein, 484 aa, Pasteurella multocida subsp. multocida str. Pm70
MSKCPFDHGSKTLTNAAGAPIVENDNTMSAGPKGPLLLQDVWFQEKLAHFARERIPERVVHAKGSAAYGTFTVTHDISKYTKADLFNGIGKQTQVLLRFSTVAGERGAADAERDVRGFALKFYTEQGNWDLVGNNTPVFFIRDPLKFPDFIHTQKRNPQTNLRDANAAWDFWSRHPESLHQIMILFSDRGIPTDLRHMNGYGSHTYSFINAQNERFWVKFHFKTQQGHKFYTNEEAAKVVGENRESSQQDLYEAIERGEFPRWNVQVQIMPEADAHKHNYAFDLTKVWPHKDYPMIEVGVLELNQNPINYFAEVEQAAFAPSNIVPGIGFSPDRMLQGRLFSYQDAQRYRLGVNHHQIPVNAPKCPYHTTHRDGAMRVDNNGGTHPNYAPNRFDTYVPTHQQEPALELERSAAHFNFREYDEDYYTQPAALYNLFDVDQKARVAANFAAGLAGVTEPAIVERQLAHFDKVSKELADAIRANLAK

SEQ ID NO: 5042 - protein, 604 aa, Solibacter usitatus Ellin6076
MSRRRAPLRRLSIRELLRPHRKSLALGLIAVVVEGIAGLLEPWPLKIVLDNVVKQKALSGWLNHLVLSVAGNDRLAILKFAAMLALGIAVVGSLAAYTEKYLTTSVGQWVMHDLRRSVYFHIQRLSLDFHDRRQTGDLISRVTSDIDAIQSFIASGLLSSLVNGLTLFGMVGVMFYINWRFTLIALSVAPVLFVVVYSYTRRIKKASREVRKKEGEIVSVIQEVLTSIRVVKAFAREEYEQRRLEEESLESVEAALHARALKARLSPLVDVIVAIGTSLVLWFGARLALQGSLSAGSLVVFIFYLGKMYKPMQELSKMTDSYSKAAVGYERIKEVMDTESDVKDLPGARPAPPLQGAVQFEHVSFRYPDSGPILRDVSFRIEPGQVAALVGPTGAGKTTIASLIPRFYDPTDGVVRVDGLDVRSLQQKTLRRQISFVLQETLLFHGTVWANIAYGKPDATRTEIIRASQIANANEFVEKLPQGYDTMVGERGVTLSGGQRQRIAIARAVVRDTPILILDEASSGLDAASEKLVFEALDRLMEGKTSLVIAHRLSTIRRADIILVIKDGEIVERGTHDELLSVGGLYAELHALQFGGEEAAARQI

SEQ ID NO: 5043 - protein, 371 aa, Malus x domestica
MGKGGMSDGDHADRCCGEAINGDVQQENMAAWLLGVKNLKIQPYKLPNLGPHDVRVRLKAVGICGSDVHHFKNMRCVDFIVKEPMVIGHECAGIIEEVGSEVEDLVPGDRVALEPGISCKRCNLCKQGRYNLCRKMKFFGSPPNNGCLANQVVHPGDLCFKLPDNVSLEEGAMCEPLSVGIHACRRANVCQETNVLVVGAGPIGLVTLLAARAFGAPRIVIADVNHERLLIAKSLGADAVVKVSTNIEDVAEEVAKIQKVLENGVDVTFDCAGFNKTITTALSATRPGGKVCLVGMGQREMTLPLATREIDVIGIFRYQNTWPLCLEFLRSGKIDVKPLITHRFGFSQKEVEEAFETSARGGNAIKVMFNL

SEQ ID NO: 5044 - protein, 406 aa, Bacillus clausii KSM-K16
MGYYDDQQETRYREPNKSSKKVAGLSAFGGAIIGGALVLIASPIMSSLGLGIDDSASENNNANTEPNTEQNAENVINLDVNSAVTDVVSKVSDAVVGVINMQQANMFGSNETGETGTGSGVVYKKEGDSAFIVTNNHVIEGASEIEVALTDGTRVPATLVGHDELTDLAVLEIDGENVTTVAEFGNSDELSVGEPAIAIGNPLGLEFAGSVTQGIISATERSIPVDLSGNGQIDWNAEVLQTDAAINPGNSGGALININGEVIGINSMKISGGAEGLGFAIPSSIVQPTISDLEQYGEVRRPTLGITLRSLNELPSSALQGTLNLPEDVTEGIVVVGVQNGSAAADAGLQERDVIVEIDGKAIENPQDLRKLLYAERSIGDTISVTLYRDGDKQTIDVTLEEQSDV

SEQ ID NO: 5045 - protein, 204 aa, Zea mays
EVGGLARDSLCPAVGSVEEREAGMCDLVARTGRHLQRYENGHRLVAGCIPFRYRDINDGASDDEQKKLVEVLMISSQSGPGLLFPKGGWENDETVEEAAAREAIEEAGVRGDLVQLLGFYDFKSKQPEATCRAAIFALHVKEELASWPEQSTRQRSWLTVPEAAERSRYPWMQEALVTGFSAWLENWRNGGGGGGGGCVDRTER

SEQ ID NO: 5046 - protein, 269 aa, Picea mariana
SGVPPFWAETQQGIFDAVLRGYIDFDSEPWPSISESAKDLIRKMLTSNPAERLTAHGVLCHPWICKDGVAPDQALDPAVLSRLKQFSAMNKLKKMALMVIAESLSEEEIAGLREMFEAMDTDNSGSITFDELTAGLKRYGSNMKESEIRALMDAADVDNSGTIDYAEFIAATFHLNKLEREEHLFAAFSYFDKDASGYITVDELQQACLEHNLTDVRIDEIIREVDQNNDGRIDYNEFVAMMRKGNGAIGRRTMRNSLNFSRKDNLPIG

SEQ ID NO: 5047 - protein, 127 aa, Thermocrinis ruber
GICLGMQLMSIEFARSVLSGESNANSTEFDPYTPYPVIDIMEGQKKVDKLGGTMRLGAYPCKVAEGSKARAIYGKEIVYKRHRHRYEFNNAYRDIFQKEGVVFSGLSPDGKLVEIMELKDHPWYIGC

SEQ ID NO: 5048 - protein, 368 aa, Malus x domestica
MGKGGQSCNGVVRDAKPVEQENMAVWLVDVNTIKILPFKLPAIGPNDVRIRIKAVGICGSDIHYLKTMKCGDFQVKDPMVIGHECAGIVDKVGSKVKHLVPGDRVAVEPGISCAHCQQCKGGRYNLCFDMKFFATPPVHGSLANQIVHPADLCFKLPENVSLEEGAMCEPLSVGVHPFRRANVGPETTVLIVGAGPIGLVSVLAARAFGAPRIVIVDMDDRRLAMAKSLGPDGTVKVSTKMEDLDDELAKIKEAMGSEVDVTFDCVGFNKTMSTGLNATRPGGKVCLVGMGHGVTTVPLTPAAAREVDVVGVFAYKNTWPLCLEFLRSGKIDVKPLITHRFGFTEKEVEEAFATSARGGNAIKVMFTL

SEQ ID NO: 5049 - protein, 368 aa, Malus x domestica
MGKGGQSCNGMVRDVKPVEKENMAAWLVDVNTIKILPFKLPTIGPNDVQIRIKAVGICGSDVHYLKTMKCADFEVKEPMVIGHQCAGIVDKVGSEVKHLVPGDRVAVEPGISCAHCQQCKGGRYNLCPDMKFFATPPVHGALANQIVDPADLCFKLPENVSLEEGAMCEPLSVGVHACRRANVGPETTVLIVGAGPIGLVSVLAARAFGAPRIVIVDMDSKRLAVAKSLGADGTVKVSRKMEDLDDEVAKIKETMGAEVDVTFDCVGFNKTMSTGLNATRPGGKVCLVGMGHSMMTVPLTAAAAREVDVVGVFRCKNTWPLCLEFLRSGKIDVKPLITHRFGFTEKEVEEAFATSARGGDAIKVMFNL

SEQ ID NO: 5050 - protein, 612 aa, Bacillus clausii KSM-K16
MERNVGFFKSIRFKLIIIYVLLIVLAMQIVSVYFSRELERSLLENYETLLNDRLNVLSLSVGQELQEDPEERDLDTLVRNAFPQNDENTRKGKAQVIGYNSVVLASSSDEDANIIDQQTDQTIVKRALTGTPTYEFQERINQEDQERYIIKAHPVRSNEDGTGEILGAVYIEASIEGVSKQAQAINRIFISATGIAMVVTFLVIILLARTITMPILDMRRQALRMSHGDFSRQVRVYSTDELGQLATAFNELTNRLHDTTLMRDREQKRLRSVLAHMTDGVIATDQSGLIILMNRRAEELLGIPLKHVLRRPIMNVLRMEEEVSIFELYERNEPLLLDLSTGEEPIMLEVNFSAIQEDEGPFNGLIAVLHDVTEKEKIENERREFVANVSHELRTPLTTMKSYLEALADGAMQDEDIAPRFLEVTQKETDRMIRLVNDLLQLSKIDSNDYRLDLHWVELGAFLHSIVERFEMVVKDKNIDFHRHIAKQPTYVKIDTDKMTQVLDNILSNAIKYSPSGGNVTITLLHQGNKARISIADEGLGIPAESQDKIFERFYRVDKARARNVGGTGLGLAIASEYVHAHEGDIWVHSEYNEGTTIYITLPYSTFKGGTM

SEQ ID NO: 5051 - protein, 85 aa, Brassica napus
MSLFLKDDSIQIREVWHDNLESEMALIRDIVDDFPFVAMDTEFPGIVCRPVGTFKTNTEYHYETLRTNVNLLKMIQLGLTFSDER

SEQ ID NO: 5052 - protein, 534 aa, Yarrowia lipolytica CLIB122
MHFSNFLLGALAATAAAKNTYQINKYGSPLTNQKRSLSENSVVQLDTVGVRSIRDEPAPRDAALMKRQTATLPLKNLVTYYEAEVKIGTPAQTVKLLIDTGSSDIWVIGSGNPDCGSAQDAQRDPNIIDCSISGTFDTSKSSSWSQNQTDFFIQYGDQTAAEGGWGTDTFAFGNTNVSGLSIAVASKTNSSNGVMGIGLAGLESTITYRGNDQISGNPYENLPMKMKAEGLIKANAYSLWLNNLSSDSGNVLFGGVDYAKIDGDLFTVKLVNPQRSVSSKPIAFYVGLDSVSITDVKGVSGFITKQPVPALLDSGTTLTYLPQDAFNYVVRAMGATYDPQNGYVCPCKNGYSGHLDYNFSGANISVPLYQLTYPIQLQSQSGRVVNAQFRNGDDACLLLMQASQDHVILGDSFLRAAYVVYNLDSYEVSMGQTKYGVTDTNIVEIDSNGVKNANPAPEYSSSFTNVNSETTILRGAPGSADSNPSTTLSGGLVAGSSASSGSSGDGKGKNNAAGLELSIVGLAVAVVMASFGLM

SEQ ID NO: 5053 - protein, 602 aa, Oryza sativa
MAMSRAAAAAAGTPVARRRLMGAVAARSMASWFGHVEPAAKDPILGVTEAFLADPSPDKVNVGVGAYRDDSGKPVVLECVREAERRIAGSMNMEYLPMGGSIKMIEESLKLPYGENCEFIKDKRIAAVQALSGTGACRLFADFQKRFLPDSQIYIPTPTWANHHNIWRDAQVPQKTFTYYHPESRGLDFAGLMDDIKNAPDGSFFLLHACAHNPTGVDPSEEQWREISHQFKVKKHFPFFDMAYQGFASGDPERDAKAIRIFLEDGHQIGCAQSYAKNMGLYGQRAGCLSILCDDEMQAVAVKSQLQQIARPLYSNPPVHGALIVSTILGDPELKSLWLKEVKGMADRIIGMRTALKENLEKLGSPMSWEHITNQIGMFCYSGMTPEQVDRLTKEFHIYMTRNGRISMAGVTTGNVAYLANAIHEVTKTNLLIQRHARRTLSLSGGTAATVGWCVRGGRVSAAWQHLQRHNSHANVDASRVNGWATHRNGGRVRLLLLQRRFHQTPGANGGAVADGGLVLSFSPACCMSRKREKGKGGKPTGGEMEEIESRKGAVQAWNIQQRKFQHKSHPPQLNNTPTIPPAIRAPLGRTLDTMASSRFNI

SEQ ID NO: 5054 - protein, 327 aa, Escherichia coli O157:H7 EDL933
MATRIEFHKHGGPEVLQAVEFTPADPAENEIQVENKAIGINFIDTYIRSGLYPPPSLPSGLGTEAAGIVSKVGSGVKHIKAGDRVVYAQSALGAYSSVHNINADKAAILPAAISFEQAAASFLKGLTVYYLLRKTYEIKPDEQFLFHAAAGGVGLIACQWAKALGAKLIGTVGTAQKAQSALKAGAWQVINYREENLVERLKEITGGKKVRVVYDSVGRDTWERSLDCLQRRGLMVSFGNSSGAVTGVNLGILNQKGSLYVTRPSLQGYITTREELTEASNELFSLIASGVIKVDVAEQQKYPLKDAQRAHEILESRATQGSSLLIP

SEQ ID NO: 5055 - protein, 452 aa, Bradyrhizobium sp. BTAi1
MMSKEQNDLITRIGPSAPAGKLMRMYWQPAALVDELTGDRPVRAVKLLGQDFVLFKDEQGRYGLLDRDCPHRGADLAFGRLEHGGLRCAFHGWLFDVEGQCLETPAEPAGSALCKNVKQRAYPVVEKGGILWAWLGNGAAPAFPDLDCFTAPEAYTFAFKGLIECNWLQALEVGIDPAHASFLHRFFEDEDTSTAYGKQFRGASADSELPMTKVLREYDRPILNVERTEYGLRIIALREIDAERTHVRVTNQLFPHAFVIPMSTEMTITQWHVPVDDETCYWYAIFTSYGAPVDKAKMRAQRLELYELPEYRSRKNKSNDYGFDPREQATATYTGMGNDINVHDQWAVESMGRIQDRTREHLGQSDKAIIQYRRLLREQIEAVATGDKPMLFLDAAEARSVQGPATMDGIGPTRGWETYWMEVDVRRRRNAPWAAPVPADIIRLAPHLSAAE

SEQ ID NO: 5056 - protein, 397 aa, Escherichia coli O157:H7 EDL933
MFQKVDAYAGDPILTLMERFKEDPRSDKVNLSIGLYYNEDGIIPQLKAVAEAEARLNAVPHGASLYLPMEGLNSYRHAIAPLLFGADHPVLQQQRVATIQTLGGSGALKVGADFLKRYFPESGVWVSDPTWENHVAIFAGAGFEVSTYPWYDEATNGVRFNDLLAMLKTLPARSIVLLHPCCHNPTGADLTNDQWDAVIEILKARELIPFLDIAYQGFGAGMEEDAYAIRAIASAGLPALVSNSFSKIFSLYGERVGGLSVLCEDAEAAGRVLGQLKATVRRNYSSPPNFGAQVVAAVLNDEALKASWLAEVEEMRTRILAMRQELVKVLSTEMPERNFDYLLNQRGMFSYTGLSAAQVDRLREEFGVYLIASGRMCVAGLNTANVQRVAKAFAAVM

SEQ ID NO: 5057 - protein, 534 aa, Bradyrhizobium sp. BTAi1
MSEEKPQRARAVVDRGDASDLSSERHDIFFAAVETTRMPMIVTDPRQSDNPILFANRAFLEMTGYELNEIVGTNCRFLQGPDTDQETIAAIRSAIASRRDIAVEILNYRKNGAAFWNALFISPVYNRAGELVYFFGSQLDVSRRRDAESALVQSQKMEAIGQLTGGIAHDFNNILQVIIGYTETLQGAVSELAPRHRRAVENIRSAANRAATLTQQLLSFARKQRLDSRPINLNNMIETLVQMARHTLGESVRIAVKAQPGLWNSRIDQTQAEVALLNLFVNARDAMPDGGTLTIRTENKEISEEDVVQFGVPKGGRYVALKVSDDGVGIPPHILARVAEPFFTTKEEGKGTGLGLAMVYGFTRQSGGSTYIYSEVGLGTTVQLLFPATEQEIAAPAIRPQMAMDRTGSERILIVEDRADVAELARSILEDFGYRTEIAANAPTALELLDSEIRFDLLFTDLVMPGGMNGTVLAREARKRQPKLKVLLTTGYSDAAVERADANIGEFEIINKPYRRTDLVRRVRQLLDGPTGVT

SEQ ID NO: 5058 - protein, 347 aa, Novosphingobium aromaticivorans DSM 12444
MECAKAQPDFPDTGQPHMTSQFRMPPEWHPQDWLWIGFPHLAEEWSGVIDEAQVQIAAFANAVADSGQEVRLVVRDAANEMRAKSLVSGAVTLERRTYGDVWLRDTGPLVVLDGAGRREARLFGFNGWGEKYLMPGDQEIGADLAKSAGLATHGKADWILEGGALDGDGTGLVATTEQCLLNPNRNPHLSRGDLEARLLRDLGYDRVLWLGDGLINDHTDGHVDNLARFVGPNRLALPRATGPNDPNAAIYADARARALDAGVEVVEVPSPGRIEWGDMVQPASYMNFVITSDLVVVPVFGSPHDDDGVAAIAELFPDRATVGVMGDAVLAGGGGFHCASQQMPKPF

SEQ ID NO: 5059 - protein, 465 aa, Photorhabdus luminescens subsp. laumondii TTO1
MQHIHFDAIVIGSGPGGEGAAMGLVKQGKSVAVIERYNNVGGGCTHWGTIPSKALRHAVSRIIEFNQNPLYSDNSRVLRSSFAEILRRAEMVINQQTRMRQGFYERNGCRMFSGEATFIDDHRVSVRYADDNHDILSADKIIIATGSRPYCPPDVDFTHSRIYNSDSILKLDHEPRHVIIYGAGVIGCEYASIFRGLGVKVDLINTRNHLLAFLDQEMSDALSYHFWNSGIVIRHNEEYSKIEGVDDGVIVHLKSGKKVKADCLLYANGRTGNTDTLGLKNVGLEADSRGLLKVNKIYQTSNENIYAVGDVIGYPSLASAAYDQGRIAAQAMTKGNAEVHLIEDIPTGIYTIPEISSVGKTEQQLTAMKVPYEVGRAQFKHLARAQIAGMNVGSLKILFHRETKEILGIHCFGERAAEIIHIGQAIMEQKGESNTIEYFVNTTFNYPTMAEAYRVAALNGLNRLF

SEQ ID NO: 5060 - protein, 167 aa, Arabidopsis thaliana
MGSSTSGNCSSVSTTGLANSGSESDLRQRDLIDERKRKRKQSNRESARRSRMRKQKHLDDLTAQVTHLRKENAQIVAGIAVTTQHYVTIEAENDILRAQVLELNHRLQSLNEIVDFVESSSSGFGMETGQGLFDGGLFDGVMNPMNLGFYNQPIMASASTAGDVFNC

SEQ ID NO: 5061 - protein, 367 aa, Geobacillus stearothermophilus
MELFKYMETYDYEQVLFCQDKESGLKAIIAIHDTTLGPALGGTRMWMYNSEEEALEDALRLARGMTYKNAAAGLNLGGGKTVIIGDPRKDKNEAMFRAFGRFIQGLNGRYITAEDVGTTVADMDIIYQETDYVTGISPEFGSSGNPSPATAYGVYRGMKAAAKEAFGSDSLEGKVVAVQGVGNVAYHLCRHLHEEGAKLIVTDINKEAVARAVEEFGAKAVDPNDIYGVECDIFAPCALGGIINDQTIPQLKAKVIAGSANNQLKEPRHGDIIHEMGIVYAPDYVINAGGVINVADELYGYNRERAMKKIEQIYDNIEKVFAIAKRDNIPTYVAADRMAEERIETMRKARSQFLQNGHHILSRRRAR

SEQ ID NO: 5062 - protein, 233 aa, Zea mays
MMAEAWTPVLLPATAPCFWQQDTHSVLWRRGDAWTAEENKLFEKALAQIDRNAPDRWEKVAAVLPWKTVDDVRSQYHALEKDVGVIEAGGLVPFPRYSGSVPPPSGFALEDWGGGDRGFRRARGSEEMQERKKGVPWTEEEHKLFLMGLRKYGRGDWRNISRKYVTTRTPTQVASHAQKYFIRLSSGGKDKRRSSIHDITTVNLPGDAPRSSPPAATTNPSAGALVVDVKPFV

SEQ ID NO: 5063 - protein, 408 aa, Nocardioides sp. JS614
MSREHAGVAITGIGAITPVGASPEEFTRALDEGRTAISPAPWADAEAPTSWAAMIADFDPLDWMDPRLVDGTDRFAQYALAAAQQAVEDHGEPLEPGTGVVIGTTMAGVTSLTEAQRQLDLVGPEAVHRKLNIRAWPNMAAGQIAIRYALHGPLLTVSTACASSIDALGTAMGMIQTGRADVVIAGGTERGLCEVLHHSQASYGMTNPVTDPMLATMPFDRRRSGLVEGEGAAVFVLESLERATARGARIHGVLAGYGSLSDGSHPSSPDPSGAYEAQAMRDAQRMAGVTPDDVVGLVAHATSTPKGDTVEISAINQVFGERDDSLHVTSIKGSVGHTGAASGGMGLVLALHAIATGRLAHIPTTHEVEEGARFHIVTQKPAIADFRTVQVNAFGFGGQNASIVVTRP

SEQ ID NO: 5064 - protein, 363 aa, Arabidopsis thaliana
MISLQTSGGSSEEEDMLLAIQLGGLNFVPYIVKTARELDLFEIMAKARPLGSYLSPVDLASMAAPKNPHAPMMIDRLLRFLVAYSVCTCKLVKDEEGRESRAYGLGKVGKKLIKDEDGFSIAPYVLAGCTKAKGGVWYNVQHAIQEGGASAWERANEALIFEYMKKNENLKKIFNESMTNHTSIVMKKILENYIGFEGVSDFVDVGGSLGSNLAQILSKYPHIKGINFDLPHIVKEAPQIHGVEHIGGDMFDEIPRGEVILMKWILHDWNDEKCVEILKNCKKALPETGRIIVIEMIVPREVSETDLATKNSLSADLTMMSLTSGGKERTKKEFEDLAKEAGFKLPKIIYGAYSYWIIELYPN

SEQ ID NO: 5065 - protein, 358 aa, Pirellula sp. 1
MIELRSDAKYAMVIPTSMGIRLTPVDHQPFHCSDTFKMQATSAESNVGSISSFLGLPVKILTAFVKDSPVARFIKDDLAGRHMDYEGPEFVQDNPWGVRHQINMADSGWGSRGPRVQNDRAGEVGRKLNVKDFDLDRIFGTDGAKIVHLSGLIAALSEETSEFCLEIARAAKKHGSRISFDLNHRASFWKGREDQLAAQFKEIASLSDILIGNEEDFQLCLGVEGPEAGGSDISAKIDGFKEMINRVKKEYADTTLFATTLREVESANLHHWGAIVSHGTEFAVIEPREIGVIDRIGGGDGFVGGLLYGVLQGWDAEKSSQFGWATGALTATLYTDYGQPADEDQVWSIWKGNARVQR

SEQ ID NO: 5066 - protein, 652 aa, Arabidopsis thaliana
MSTAPSPGTTPSPSPPSPPTNSTTTTPPPAASSPPPTTTPSSPPPSPSTNSTSPPPSSPLPPSLPPPSPPGSLTPPIPQPSPSAPITPSPPSPTTPSNPRSPPSPNQGPPNTPSGSTPRTPSNTKPSPPSDSSDGLSTGVVVGIAIGGVAILVILTLICLLCKKKRRRRHDDEAAYYVPPPPPSGPKAGGPYGGQQQYWQQQNASRPSDNHVVTSLPPPKPPSPPRKPPPPPPPPAFMSSSGGSDYSDLPVLPPPSPGLVLGFSKSTFTYEELSRATNGFSEANLLGQGGFGYVHKGILPSGKEVAVKQLKAGSGQGEREFQAEVEIISRVHHRHLVSLIGYCMAGVQRLLVYEFVPNNNLEFHLHGKGRPTMEWSTRLKIALGSAKGLSYLHEDCNPKIIHRDIKASNILIDFKFEAKVADFGLAKIASDTNTHVSTRVMGTFGYLAPEYAASGKLTEKSDVFSFGVVLLELITGRRPVDANNVYVDDSLVDWARPLLNRASEEGDFEGLADSKMGNEYDREEMARMVACAAACVRHSARRRPRMSQIVRALEGNVSLSDLNEGMRPGHSNVYSSYGGSTDYDTSQYNDDMIKFRKMALGTQEYGTTGEYSNPTSDYGLYPSGSSSEGQATREMEMGKIKKTGQGYSGPSL

SEQ ID NO: 5067 - protein, 516 aa, Pisum sativum
MAVVAAPKKNNSFNKKDNPNLLLGRFELGKLLGHGTFAKVHLAKNIKTGEAVAIKIISKDKILKSGLVSHIKREISILRRVRHPNIVQLFEVMATKTKIYFVMEYVRGGELFNKVAKGRLKEEVARKYFQQLICAVEFCHARGVFHRDIKPENLLLDENGNLKVSDFGLSAVSDEIKQDGLFHTFCGTPAYVAPEVLSRKGYDGGKVDIWSCGVVLFVLMAGYLPFHDPNNVMVMYKKIYKGDFRCPRWFSPELVNLLTRLLDTKPQTRISIPEIMENRWFKIGFKRIKFYVEDDVVCNLDSLGLDGNNGNDGNDDKKVLNIDEHRDEALESVSESEWDSEVVNRRKNRQLGSLPRPASLNAFDIISFSQGFDLSGLFEEKGDEARFVSGASVSKIMTKLEEVAQLVSFKVRKKDCRVSFEGSREGVKGPLSIAAEVFELTPSLVVVEVKKKGGDKVEYDRFLNTELKSALHSLTMEESAGSSCQNTPDETLQQRAFSDSAIDKHSDSIESLNLDT

SEQ ID NO: 5068 - protein, 431 aa, Vibrio vulnificus
MTKSAELYQKAQQTIPGGVNSPVRAFNGVGGSPIFVERADGAFIFDADGKAYIDYVGSWGPMILGHNHAVIREAVIEAAQRGLSFGAPTEMEIKMAELVSELVPSMEQLRMVSSGTEATMSAIRLARGFTGRDKILKFEGCYHGHADSLLVKAGSGALTLGQPSSPGVPADFAKHTLTATFNDLDSVRELFAANKGEIACIIVEPVAGNMNCIPPVEGFHEGLREICDQEGALLIFDEVMTGFRVALGGAQAHYNIKPDLTTLGKVIGGGMPVGAFGGRKEVMQYIAPTGPVYQAGTLSGNPVAMAAGYACLTLLREEGNEKRLASKTKHLADGFKSLAAQHGIPLVVNQVGGMFGFFFTEQEQITCYEDVTKCDIERFKRFFHLMIDHGVYLAPSAFEASFTSLAHGSKEIEATLEAADRCFAILAAESK

SEQ ID NO: 5069 - protein, 569 aa, Glycine max
  misc_feature (228)..(228): Xaa can be any naturally occurring amino acid
  unsure (1)..(569): unsure at all Xaa locations
MCGILAVLGCVDNSQTKRARIIELSRRLRHRGPDWSGIHCYEDCYLAHQRLAIVDPTSGDQPLYNEDKTVIVTVNGEIYNHKQLRQKLSSHQFRTGSDCEVIAHLYEEHGEEFVNMLDGMFAFILLDTRDKSFIAARDAIGITPLYLGWGHDGSTWFASEMKALSDDCERFISFPPGHIYSSKQGGLRRWYNPPWFSEDIPSTPYDPTLLRETFERAVVKRMMTDVGXPPLLSGGLDSSLVAAVVNRYLAESESARQWGSQLHTFCIGLKGSPDLKAAKEVADYLGTRHHELYFTVQEGIDALEEVIYHIETYDVTTIRASTAMFLMSRKIKALGVKMVLSGEGSDEIFGGYLYFHKAPNKKEFHEETCRKIKALHLYDCLRANKSTAAWGVEARVPFLDKEFINVAMSIDPEWKMIRPDLGRIEKWVLRNAFDDDKNPYLPKHILYRQKEQFSDGVGYSWIDGLKDHANKQVTDATMMAANFIYPENTPTTKEGYLYRTIFEKFFPKNAAKATVPGGPSVACSTAKAVEWDAAWSKNLDPSGRAALGIHDAAYDAVDTKIDEPKNGTL

SEQ ID NO: 5070 - protein, 350 aa, Bacteroides thetaiotaomicron VPI-5482
MLAYTYIEHGKFELREKPEPKITDARDAIVRVTLGSICTSDLHIKHGSVPRAVPGITVGHEMVGVVEEVGAEVTSVRPGDRVTVNVETFCGECFFCHHGYVNNCTDPNGGWALGCRIDGGQAEYVRVPYADQGLNRIPDTVSDEQALFVGDVLATGFWATRISEITEKDTILLIGAGPTGICTLLCSMLKNPKRIIVCEKSPERIQFVREHYPDVLITTPENCKEFVLQNSDHSGADVVLEVAGTEDSFRMAWDCARPNAIVTIVALYDKPLLFPLPEMYGKNLTFKTGGVDGCDCAEILSLIEEGKIDTTPLITHRCSLNEIEEAYRIFENKLDGVIKVAIVCQTESNK

SEQ ID NO: 5071 - protein, 488 aa, Solanum tuberosum
MVATCNSGEILHVLFLPFLSAGHFIPLVNAARLFASRGVKATILTTPHNALLFRSTIDDDVRISGFPISIVTIKFPSAEVGLPEGIESFNSATSPEMPHKIFYALSLLQKPMEDKIRELRPDCIFSDMYFPWTVDIADELHIPRILYNLSAYMCYSIMHNLKVYRPHKQPNLDESQSFVVPGLPDEIKFKLSQLTDDLRKSDDQKTVFDELLEQVEDSEERSYGIVHDTFYELEPAYVDYYQKLKKPKCWHFGPLSHFASKIRSKELISEHNNNEIVIDWLNAQKPKSVLYVSFGSMARFPESQLNEIAQALDASNVPFIFVLRPNEETASWLPVGNLEDKTKKGLYIKGWVPQLTIMEHSATGGFMTHCGTNSVLEAITFGVPMITWPLYADQFYNEKVVEVRGLGIKIGIDVWNEGIEITGPVIESAKIREAIERLMISNGSEEIINIRDRVMAMSKMAQNATNEGGSSWNNLTALIQHIKNYNLN

SEQ ID NO: 5072 - protein, 372 aa, Dianthus caryophyllus
ENDPFTPVSNPHGVIQMGLAENQLCFDLVKQWIMDNPSASICTIEGVDEFQDIANYQDYHGLPQFRNAVARFMEKVRGERVKYDPSRIVMSGGATGAHELMAFCLADPGDAFLVPTPYYTGFDRDLRWRTGVQLVPVLCHSSNNFNITREASEEAYEGAQEANIKVKGLLITNPSNPLGTVLDKDTLTSILAFTNDKNIHLVCDEIFGATVFGKLKFTSISEVILDQPHNPDLIHIVYSLSKDLGFPGFRVGIVYSYNDNVVNCARKMSSFGLVSTQTQRLIASMLSDEAFVGRFLEESTKRLETRTRFLLGGLSQVGIQTLKSSVGLFVWMDLRHMLQDPTVEGELTLWRVIINEVKINVSPGSSFHCTEP

SEQ ID NO: 5073 - protein, 399 aa, Chromobacterium violaceum ATCC 12472
MNHTYLAHLQATLAQIRADGFEKPERVIATPQSADIALAGGEHVLNFCANNYLGLADDKRLVLAAKAGMDQYGYGCASVRFICGTQSIHKQLEKSISEFLGADDTILYSSCFDANGGVFETLLTEEDAVISDELNHASIIDGVRLSKAKRFRYKNNDMADLEAQLVAAEQAGARFKLIVTDGVFSMDGIIADLKGICDLAERHDALVMVDDSHAVGFIGETGAGTPEYCGVSDRVDIYTGTLGKALGGASGGYVAAHQPIVDLLRQRSRPYLFSNTLAPAIAAASVEVLNILKGGEGAELRAKVRRNAELFRKEMSAAGFTLVPGEHPIIPVMLGDARLAGEMAAKLLAEGVYVIGFSYPVVPKGKARIRTQMSAAHSEEQVKKAVAAFIKVGRELGVI

SEQ ID NO: 5074 - protein, 149 aa, Glycine max
QKFLVVSLSILFCIVLVSFVIVKITAICPMTLLERMSDLLRWQQKDPSFVLPWKQDSLPIFAESSPLYHTQKRPEPLTPEEESDLQLANQRLLELCQRCEEANMPLLVDAEHTTVQPAIDYFTYSSSIRHNKDDNPIVFGTIQTYLKDA

SEQ ID NO: 5075 - protein, 341 aa, Chromobacterium violaceum ATCC 12472
MKALAKLKAAPGLEMTDVPLPEVGHNDLLIKIVKTAICGTDIHIWNWDEWSQKTIPVPMHVGHEYVGVVAGMGSEVQGFKIGQRVSGEGHITCGYCRNCRAGRRHLCRNTTGVGVNREGAFAEYLVIPAFNAFPIPDDISDDLASIFDPFGNAVHTALSFNLVGEDVLITGAGPIGIMAVAIAKHVGARHVVITDVNDYRLELAKKMGATRAVNVAREDLKAVMQELHMSEGFDVGLEMSGNPQAFRQMLETMNHGGKVALLGIPPSNTAIDWNQVIFKGLEIKGIYGREMFETWYKMVALIQSGLDISPIITHHFKVDEFEQGFAAMLSGQSGKVILDWR

SEQ ID NO: 5076 - protein, 449 aa, Pasteurella multocida subsp. multocida str. Pm70
MSQVATLDAFLERVAQRDGTQPEFLQAVREVFTSIWPFLEANPKYRSQALLERLVEPERVIQFRVAWTDDQGQTQVNRAFRVQYNSAIGPFKGGMRFHPSVNLSILKFLGFEQIFKNALTTLPMGGGKGGSDFDPKGKSDGEVMRFCQALMAELYRHVGADTDVPAGDIGVGGREVGYLAGYMKKLSNQAACVFTGRGLSFGGSLIRPEATGYGLVYFAQAMLAEKGQSFAGKTVSVSGSGNVAQYAIEKALQLGAKVVTCSDSSGYVYDEAGFTTEKLAALMELKNEKRGRVEEYAKQFGLKYVAGKTPWEVKVDIALPCATQNELDLASANTLIANGVQLVAEGANMPTTIEATDAFLDAGVLFGPGKAANAGGVATSGLEMTQSSQRLYWSAEEVDKKLHSIMLDIHANCKKYGTIEGQANINYVVGANVAGFVKVADAMLAQGVY

SEQ ID NO: 5077 - protein, 356 aa, Oryza sativa
MGEMNQPPPPPVAVPPPMVMQPIMHPPVGTGAVFPPHEQFHHLAYCVHSNPSWVQVAALAFLHYLVMLGSTVMLASTIVPAMGGTPGDKARVIQSFLFMSGINTLLQTLVGTRLPTVMNASFAFVVPVLSIAKDFEQNNYASSHQRFTHTMRATQGALIVASILNMILGFSTIWGAFARKFSPVIMTPVVCVVGLGLFALGFPQVGKCVEIGLPMLILAVVVQQYVPYYFHHYHERITFLFERYSLLLCIGIVWAFAAILTAAGAYNHVSLKTQQHCRTDKSYLISSAPWIKIPYPFQWGTPIFTAGHSFGMMGAVLVSAFESTGAHFATARLAGATPPPASVLSRSVGLQGIGMF

SEQ ID NO: 5078 - protein, 222 aa, Acinetobacter sp. ADP1
MQQLWTDIDHYIESNLIPEDSNLKFALQNTEDQGFPDHLAVAPNQGMLLQMLIQMNQCKRVLELGTFAAYSTIWLARALPKDGYLMTIEGRDTHAALAQQNIDHANLPVNIELKVGRAADILSKIDTDTFEPFDFIFIDADKQSYPEYLDLSLKLSHSGTVIVLDNVIRAGALIDLDNQRPSIEGIRLTFEALQNHPQLLSCTALQTVGSKGHDGFAIAIVK

SEQ ID NO: 5079 - protein, 544 aa, Chlamydia trachomatis
MVAKNIKYNEEARKKIQKGVKTLAEAVKVTLGPKGRHVVIDKSFGSPQVTKDGVTVAKEVELADKHENMGAQMVKEVASKTADKAGDGTTTATVLAEAIYTEGLRNVTAGANPMDLKRGIDKAVKVVVDQIRKISKPVQHHKEIAQVATISANNDAEIGNLIAEAMEKVGKNGSITVEEAKGFETVLDVVEGMNFNRGYLSSYFATNPETQECVLEDALVLIYDKKISGIKDFLPVLQQVAESGRPLLIIAEDIEGEALATLVVNRIRGGFRVCAVKAPGFGDRRKAMLEDIAILTGGQLISEELGMKLENANLAMLGKAKKVIVSKEDTTIVEGMGEKEALEARCESIKKQIEDSSSDYDKEKLQERLAKLSGGVAVIRVGAATEIEMKEKKDRVDDAQHATIAAVEEGILPGGGTALIRCIPTLEAFLPMLTNEDEQIGARIVLKALSAPLKQIAANAGKEGAIIFQQVMSRSANEGYDALRDAYTDMLEAGILDPAKVTRSALESAASVAGLLLTTEALIAEIPEEKPAAAPAMPGAGMDY

SEQ ID NO: 5080 - protein, 215 aa, Triticum aestivum
NGCEVEGGGWGFQSPRQAGVRRDPWGRYAAEIRDPAKKSRVWLGTYDTAEEAGRAYDAAAREYRGNKAKTNFPFAPASAPPAAAAALTVDGSRSSNSSTVESFGGDVQAPMQAMPLPPSLDLDLFHRAATSTAGAGMRFPFSGYPVSHPYYFFGQAAAAAAAGCHMYSQAPKVTVASVSPSDSDSSSVVDLAPSPPARKPVPFDLDLNCPPPAEL

SEQ ID NO: 5081 - protein, 394 aa, Lactobacillus gasseri
MPKLANDLSLTKNTRLNSLGPSKIRAFDAKASQIPGIIKLTIGEPDLNTPDHVKDAAIADIKANDSHYAPQAGKPELQDAISKYLNRSLNIKYDPATEICVTVGATGALNDVFMSILNPGDKILVPTPVWALYFQLIKLTGAIPVQMDTSKDGFILTPEHLEKVLQNEGKGAKAIILTDPSNPTGRVYPEETLKALAEIITKYHLFSVTDEIYGELVYDNNVHHSLSQYIPERNILISGLSKAYAMTGWRLGYIAAPADIMKTIQKVNAFLVTSVTDNVQAAAIEALNNGQADPLESRKIYEDRLKFMKAGLEKLGFEMSTPQGAFYIFAKIPDAFGTDDEAFANELATKAKVGVTPGRYFGQGGQGYVRMSYASSTEQLKEALKRIAEFVKNI

SEQ ID NO: 5082 - protein, 317 aa, Arabidopsis thaliana
MATLKVSDSVPAPSDDAEQLRTAFEGWGTNEDLIISILAHRSAEQRKVIRQAYHETYGKDLLKTLDKELSNDFERAILLWTLEPGERDALLANEATKRWTSSNQVLMEVACTRTSTQLLHARQAYHARYKKSLEEDVAHHTTGDFRKLLVSLVTSYRYEGDEVNMTLAKQEAKLVHEKIKDKHYNDEDVIRILSTRSKAQINATFNRYQDDHGEEILKSLEEGDDDDKLPCTLRSTIQCLTRPELYFVDVLRSAINKTGTDEGALTRIVTTRAEIDLKVIGEEYQRRNSIPLEKAITKDTRGDYEKMLVALLGEDDA

SEQ ID NO: 5083 - protein, 676 aa, Escherichia coli CFT073
MKLAACFLTLLPGFAVAASWTSPGFPAFSEQGTGTFVSHAQLPKGTRPLMLNFDQQCWQPADAIKLNQMLSLQPCSNTPPQWRLFRDGEYTLQLDTRSGTPTLMISLQNTVEPVASLVRECPKWDGLPLTLDVSATFAEGAAVRDYYSQQIAIVKNGQITLQPAATSNGLLLLERAETDTSAPFDWHNATVYFVLTDRFENGDPSNDQSYGRHKDGMAEIGTFHGGDLRGLTNKLDYLQQLGVNALWISAPFEQIHGWVGGGTKGDFPHYAYHGYYTQDWTNLDANMGSEADLRTLVDSAHQRGIRILFDVVMNHTGYATLADMQEYQFGALYLSGDELKKTLGERWSDWKPAAGQTWHSFNDYINFSDKTGWDKWWGKNWIRTDIGDYDNPGFDDLTMSLAFLPDIKTESTSASGLPVFYKNKTDTHAKDIDGFTPRDYLTHWLSQWVRDYGIDGFRVDTAKHVELPAWQQLKTEASAALREWKKANPDKALDDKPFWMTGEAWGHGVMQSDYYRHDFDAMINFDYQEQAAKAVDCLAQMDTTWQQMAEKLQDFNVLSYLSSHDTRLFREGGDKAAELLLLAPGAVQIFYGDESSRPFGPTGSDPLQGTRSDMNWQDVSGKSAASVAHWQKISQFRARHPAIGAGKQTTLSLKQGYGFVREHGDDKVLVIWAGQQ

SEQ ID NO: 5084 - protein, 265 aa, Hordeum vulgare subsp. vulgare
MGRGPVQLRRIENKINRQVTFSKRRSGLLKKAHEISVLCDAEVALIVFSTKGKLYEYSSQDSSMDVILERYQRYSFEERAVLDPSTGDQANWGDEYGSLKIKLDALQKSQRQLLGEQLDPLTTKELQQLEQQLDSSLKHIRSRKNQLLFESISELQKKEKSLKDQNGVLQKHLVETEKEKNNVLSNIHHREQLNEATNIHHQEQLSGATTSSPSPTPPTAQDSMAPPNIGPYQSRGGGDPEPQPSPAQANNSNLPPWMLRTIGNR

SEQ ID NO: 5085 - protein, 348 aa, Listeria innocua Clip11262
MKALKLYGKRDLRYEDADMPTIEQPDDVILKVKTVGICGSDISRYSKLGPYVPGMVWGHEFSGEVIEVGSAVTDIEIGDRAAGCPALYCGECEYCKKGEFARCRKLTVIGARHPGAYAEYIKLPAENVVKIPDELDYEAAALVEPSAVVVHGFYHTKLQAGDDVVVVGSGNIGLLAIQWAKVFGARRVIAIDVDDKKLALAKEVGADVVINSLKEDPLEVVAAHTDGLNADLVVEAAGSPITSAQVFAYAKKGGGVVFLGIPYADVTIERFYFEKIVRSELTVWGSWNAISAPFPGKEWQTTIHFLANKQINIEPMITHRLSLAEGPEVFERIYERNEFFGKVLFFPE

SEQ ID NO: 5086 - protein, 363 aa, Rosa hybrid cultivar 'Kardinal'
MGLAENQLSFDVIEEWIKKNPKASICTPEGVAEFKNVANFQDYHGFPDFRKAIANFMSKARGGRVKFDPDRVVMAGGATGANETVMFCLADPGDAFLVPSPYYPAFYRDLGWRTGVKIVPVDCDSSNNFQVTRAALEAAYEKARNNNINIKGLIITNPSNPLGTTVDRDTLTSLVKFINDKNIHLVCDEIYAGTVFSCPKFTCVTEVLQDVKNCNRDLIHIVYSLSKDMGVPGLRIGIVYSYNDAVVNCARKMSSFGLVSSQTQHMLSAMLLDDEFVSNFLETSSKRLARRHRFFTTGLEEVGINCLKGNAGLYCWMDLRKLLKDQTFEAEMVLWRMIINEVKLNVSPGSSFRCVEPGWFRVC

SEQ ID NO: 5087 - protein, 878 aa, Photorhabdus luminescens subsp. laumondii TTO1
MNQQYSAMRSNVSMLGKLLGDTIKEALGEDILDKVETIRKLSKSSRAGNEAHRQQLLSTLQNLSNNELLPVARAFNQFLNLTNVAEQYHSISPHGEAASNPVALAKLFTRLKEKNFNNGDLKKAVNELSIELVLTAHPTEIARRTLIHKLVAVNTCLSQLDHDDLADYERNNIMRRLRQLVAQSWHTDEIRKIRPTPIDEAKWGFAMVENSLWEGVPAFLREFNEQLEESIDYSLPVEAVPVRFTSWMGGDRDGNPNVTAEVTRHVLLLSRWKAADLFLKDIQVLVSELSMSECTPEVRKLAGGDEILEPYREIAKKLRTQLSNTLTYLEKQLKGEQVLPPTDLLVDNEQLWQPLYACYQSLKTCGMEIIANGQLLDILRRIRCFGLSLVRIDVRQESTRHTTAISELTQYLELGDYASWSEEEKQAFLLYELHSKRPLIPHNWQPSAETQEVFATCKVIAESPQDAIAAYVISMAKAPSDVLAVHLLLKEAGCPFTLPVAPLFETLDDLNNAENIIQQLMNIQWYRELIHDKQMVMIGYSDSAKDAGVMAAAWAQYRAQDALINVCEKEGITLTLFHGRGGTIGRGGAPAHAALLSQPPGSLKGGLRVTEQGEMIRFKFGLPQVTISSLALYASAILEANLLPPPEPKPEWHQVMDTLSDVSCKMYRDYVREQPDFVPYFRAATPEQELAKLPLGSRPAKRHPAGGVESLRAIPWIFAWTQNRLMLPAWLGAGAALQQVVNDGKQDVLAEMCRDWPFFTTRIGMLEMVFAKADLWLAEYYDHRLVDKNLWPLGQKLRKQLSADIKTVLAISKDEHLMADLPWIAESIALRNVYTDPLNVLQVELLLRSRQQQYSDPQVEQALMVTIAGIAAGMRNTG

SEQ ID NO: 5088 - protein, 273 aa, Frankia sp. CcI3
MQSRLDAVFAAAREEGRSVLVGYLPAGFPTVDGAIEAMRAMVAAGVDVVEVGLPYSDPTMDGPVIQDAADAALRGGVTTRDVIRTVEAVAATGAPALVMSYWNPIDRYGAASFAADLAAAGGAGAITPDLPPEEAGPWLDACAAHGLAPVFLVAPSSSDTRLRLVAGVARGFVYAASLMGVTGTRAAVGERAADLVARVRAATELPVAVGLGVSTAAQAAEVAGFADGVIVGSALVKVLLEAERSGAGASAGLAGIRRLAAELAGGVRAPVPA

SEQ ID NO: 5089 - protein, 444 aa, Leuconostoc mesenteroides subsp. mesenteroides ATCC 8293
MSKNKEILEEEKIHLANATRVKYFDIVIDHGKGAIITDADGHEYIDLLASASATNTGHSHPKVVEAITSQAQKLIQYTPAYFANTVTAKLADRLVNVAPGNFQKQVAFGNSGSDANDAIIKFARGYTGRQYVVSFTGAYHGSTYGSLSISGVSLNMTRKIGPLLPNTVKVPFPDQTQRIAGESDNDFSERLFKQFKLPFETYLPADEVALVIIEPIQGDGGIIKAPQHYVELVYEFTREHGIVFAVDEVNQGLGRTGKMWSIDHFGIAPDLMSVGKSIASGLPLSAVIGRKEIMDSLQAPANVYTTAGNPVTAAAALATLDVIEEENLVARSRQLGELAKAFFESAAKRYAFIGDVRLYGLNGGIDIINDHGEPDNEATNKLIYRIFELGAIMISLRGNTLRFQPPLVIQEEELQRAFEILEKAFSDLASGKIALPKTDNHIGW

SEQ ID NO: 5090 - protein, 468 aa, Novosphingobium aromaticivorans DSM 12444
MSQQPQPGGNLGFIGLIVAVATIGGFMFGYDSGAINGTQDGLKHAFGLGEAELGLTVSALLPGCALGAFLAGRFADIWGRRAVMMMAAALFILSALGSGAAPSAIVLAVARFFAGAAVGAASVLSPAYISEVTPAHVRGRLSSAQQVMIISGLTGAFLANYWLAGAAGSSLGAFWCGYPAWRWMFWVQAAPAILFLVTLLLIPESPRFLVAKGRTEEARSVLARLFGDATADAKLGEIRASLAADHQPSLADIRKPGGGWRPIVWVGIGLAVFQQLVGINVVFYYGAVLWQAVGFSEADALKINILSGVVSIAACLVSIGLVDKLGRKPLLLIGSAGMTATLGALAWCFAQASTGPDGALVLPEGVGTIALYAANIYVVFFNMSWGPVMWVMLGEMFPNQMRGSALAVAGAAQWLANFAVSSSFPWLAGNIGLPVTYAAYTLFAAISLVFVWTSVKETKGKELEAMEG

SEQ ID NO: 5091 - protein, 218 aa, Ipomoea batatas
MGRGKVEIRRIEKSTNRRVTFWKRRNGLLKKAMEMGILCDAEVGLMIFSSTGKLHEFATTSIRSVIERYNKTQGDSLQSPLDPTLELKFWQIEVAILRQQLHNMQEDHRKVMGEVYGLSVKDLQNLENQLEMSLSGIRMKKEQILIEQIQELTHKQGSFVHQENFELFNKFQAYGTSDPNAVNGDTISPYDFTISEESQGHIHFQLPQNFSDLARALY

SEQ ID NO: 5092 - protein, 334 aa, Glycine max
MSSGSVRRVSRQDIQLVQNLIERCLQLYMSQKEVVETLLAQAKIEPGFTELVWQKLEEENEEFFKAYYARLVLKQQIMQFNKLLDQQVQLMQLHSSTVASLPTSNGSHIPAVSSLPSSNGSHIPAIPENPACYTADRTQTSLKPENMQHHVDSRLSNVFNNGGSSLHTSMHAAVDMSAHGNRINGPSSMLSAQSANMGLIQGINGGGMIKSEPGYSGCSPYMFGTDGNVLETRPTIGGASVTSFTNVESNSHSLNEVVLDPDTSSFGFLGQIPRNFSLSDLTADFSQSSDILETYSRSPFLATDNENFLDRGEQDNNRLDSISEGLSYEDFGSE

SEQ ID NO: 5093 - protein, 447 aa, Sinorhizobium meliloti 1021
MTHLLHRAIHAKLPVAVRGEGIRLFDAEGRAYIDASGGAAVSCLGHAHPDVLAALHAQLDRIAYAHTGFFTTEAAERLADRLVADAPDGLDHVYLVSGGSEAVEAALKMARQYFVEKGEPQRRHIIARRQSYHGNTLGALAAGGNEWRRAQFRPLLVETHHIDPCFAYRLQQAGESDTDYAARAAGQLEAKILELGADQVIAFVAETVVGATAGAVPPVADYLKRVRAICDKYGVLLILDEVMCGMGRTGTLHACEQDGVVPDLMTIAKGLGGGYQPVGAVLLSSAIFQAFSEGSGFFQHGHTYMGHPMAAAAGLAVQEVIRRDGLLENVVSMGDYLERCLVERLGNHHHVGDIRGRGLFRAVELVADRATKSPFDPGLKLNARIKKEAMARGLMVYPMGGTIDGQRGDHVLLAPPFILNREDVGQIVERLGDAVDAAIASLTKAAG

SEQ ID NO: 5094 - protein, 404 aa, Mycobacterium leprae TN
MREVPQVLGIVLAGGEGKRLYPLTADRAKPAVPFGGAYRLVDFVLSNLVNARYLRICVLTQYKSHSLDRHISQNWRLSGLAGEYITPVPAQQRFGPHWYTGSADAIYQSLNLIYDEDPDYLVVFGADHVYRMDPEQMLRFHIGSGAGATVAGIRVPRSDATAFGCIDADDSGRIRRFTEKPLKPPGTPDDPDKTFVSMGNYIFTTKVLVDAIRADADDDHSYHDMGGDILPRLVDGGMAAVYDFSQNEVPGATDWDRAYWRDVGTLDAFYDAHMDLVSLRPVFNLYNKRWPIRGESENLAPAKFVNGGSVQESVVGAGSIISAASVRNSVLSSNVVVDNGAIVEGSVIMPGARVGRGAVIRHAILDKNVVVGPGEMVGVDPERDREHFAISAGGVVVVGKGVWI

SEQ ID NO: 5095 - protein, 472 aa, Mycobacterium bovis AF2122/97
MSGTSSMGLPPGPRLSGSVQAVLMLRHGLRFLTACQRRYGSVFTLHVAGFGHMVYLSDPAAIKTVFAGNPSVFHAGEANSMLAGLLGDSSLLLIDDDVHRDRRRLMSPPFHRDAVARQAGPIAEIAAANIAGWPMAKAFAVAPKMSEITLEVILRTVIGASDPVRLAALRKVMPRLLNVGPWATLALANPSLLNNRLWSRLRRRIEEADALLYAEIADRRADPDLAARTDTLAMLVRAADEDGRTMTERELRDQLITLLVAGHDTTATGLSWALERLTRHPVTLAKAVQAADASAAGDPAGDEYLDAVAKETLRIRPVVYDVGRVLTEAVEVAGYRLPAGVMVVPAIGLVHASAQLYPDPERFDPDRMVGATLSPTTWLPFGGGNRRCLGATFAMVEMRVVLREILRRVELSTTTTSGERPKLKHVIMVPHRGARIRVRATRDVSATSQATAQGAGCPAARGGGPSRAVGSQ

SEQ ID NO: 5096 - protein, 206 aa, Oryza sativa (japonica cultivar-group)
MVSLKLQKRLASSVLKCGKGKVWLDPNEVNEISMANSRQNIRKLVKDGFIIKKPQKIHSRSRARRAHEAKQKGRHSGYGKRRGTREARLPTKILWMRRMRVLRRLLRKYREAKKIDKHMYHDMYMKVKGNMFKNKRVLMESIHKSKAEKAREKTLSDQFEAKRAKSKASRERKIARRDERLAQGPREPAAPAVPAQTAAAPKKYKK

SEQ ID NO: 5097 - protein, 299 aa, Candida albicans SC5314
MIFNYLLALFQILVLASARAQADEYASDPNIFELTPSNFDKVVHKSNYTTLVKFYAPWCGYCQKLQPVYHKLGKYINKDAKYSINIASVNCDKDYNKQLCSQYQVRGFPTLMVFRPPKYEKGKQVKLQKHASEVYQGERTVKSITKFLTSRLKNYVKKFHNIRSDGIAEWLAEDIPSVLLISNANSVSPLLKSIAIDFLDRVNVGMISTFNDESHKFVIGDKEIEVPATSKSSLFYFNKEKGELVAYTKSDKLNDKIKITEWIIEQTQQQPIEGPLSKKEKKYYYKYRTGKKKIEHDEL

SEQ ID NO: 5098 - protein, 533 aa, Mycobacterium leprae TN
MNTRVDTDNAVIRYRRRNRPCLERSEEDNVTSDQGTNNDQNPGHHLATRPVARPPVDAASREAFGRPCGFSGSFVAEYVRPQKYRDRSEFRPDDQPADPVLAEAFSRPFGSVDSLQRHPIDAGALAAEKDATQLDEPDDPWRDPAAAATLASPAVASPVPHTELGQCGKLGVRDVLFGGRVSYLALVILVFIALALGAIGGVIGRKTAEIVDAFTTSKVTLATTNNTEEPAGRFAKVAAAVADSVVTIESKSDQEEMQGSGVIIDGRGYIVTNNHVISEAANKPSQFKTTVVFNDGKDVPANLVGRDPKTDLAVLKVDNVDNLTVARLGDSGKVRVGDEVIAAGAPLGLRSTVTHGIVSALHRPVPLSGEGSDTDTVIDAIQTDASINHGNSGGPLIDMDSQVIGINTAGKSLSDSASGLSFAIPVDEMKSVVQTLIKDGKIVHPTLGVSTRSVSNAIASGAQVANVKAGSPAQKGGILENDVIVKVGNRKVADADEFIVAVRQLTIGQDASVEVVRDGRHVTLTVKSDPDSS

SEQ ID NO: 5099 - protein, 281 aa, Picea mariana
AAGSGYWKATGADKPITAKGGKKRVGVKKALVFYVGKAPNGSKTNWLMHEYRVTNVSRPVKKKNSLILDDWVLCRIYNRRISAEKLALQQKESFNDVPMETIDEKEMENQLTSTSIEHSGIEQSNPSFDHLSKLGSSPTCYNSAPLCVSPMNSNICLQNLDFFQNSTTPFSDSTLKAPVQNTTFNPISSSINHQWTNCNSTDLMSGLHNDSSCSKPSSFSEPISEKEEVQSSFRLENFSQEQQQSLFNFGLEGLQNTFTHLDQITLPGAYQDWFYPNEPFH

SEQ ID NO: 5100 - protein, 363 aa, Pseudomonas fluorescens Pf-5
MNNIQLDQANVKKHPPGAYDATTRVAASWYVAMRSNGLRDKPKELTLFGRPYVAWRAATGQAVVMDRHCSHLGANLADGRIKDGCIQCPFHHWRYDEQGKCVHIPGHSEVVRQLEPVPRAARQPTLVTTERYGYVWVWYGSPQPLHPLPEITAADVDNGDFMHLHFAFETTTAVLRIVENFYDAQHATPVHALPISAFELKLFDDWSRWPEVESLARAGAWFGAGIDFHVNRYFGPLGMLSRALGLNMSQMNLHFDGYPGGCVMTVALDADVKYKLLQCVTPVSDGKNIMHMLISIKKVGGVLRRATDFVLFGLQTRQAAGYDVKIWNGMKPDGGGAYSKYDKLVLKYRAFYRGWVDRVASEQ

SEQ ID NO: 5101 - protein, 521 aa, Xanthomonas campestris pv. campestris str. ATCC 33913
MTTSTLPAPAADARLPRQIPFIIGNEACERFSFYGMRNILVQFLITSLLLQEVGAPERDAEAKHILHSFMIGVFFFPLLGGWLADRFFGKYTTIIWFSLIYCAGHACLALFEDSRSGFFVGLGLIAFGAGGIKPLVASFMGDQFDQSNKHRAKVVFDAFYWIINFGSLFASLLIPLALKHLGPSWAFGIPGILMFIATAVFWLGRKRYVRVPLPPKDPHGFGAVVRSALLAHAPGQGRPGLALAAISVLLALACLGLTEQLGLVICLCMALVLLLAGIGGGTWWQLERARGTHPDAAVDGVRALLRVLVIFALVTPFFSLFDQKASTWVLQGREMRMPAWFTASQMQALNPLLVMLLIPFNNLVLYPLLRRLGWEPTSLRRMTSGIAFSGVAWIAVGAIQVAMDGGEPMHIAWQILPYALLTFGEVLVSATGIEFAYSQAPPSMKGVVMSFWYLTTTVGNLWVLLSNVAVRNATVTSHIADTGLSEAAFLMFFFAAFAFLAALAFGLYARRYRMVDNYRPA

SEQ ID NO: 5102 - protein, 463 aa, Comamonas testosteroni
MSLPSAAAEARVAEHAGSVLCAQRHRQCQCLCHRLQAPCLHCPHGWPARLGKSRAVLAAHAYGGRCSYRAPDGAGASAIADPAVPNGLSRAKVVRTDVPTTPGPEWPLALNHSKGASVMSSPGPYPQRPAPDHFVRRWLVISACVAALMLFWQFLPAIEAWFSPRQAAERTVTPRGDLAADEQATIELFEKSRTSVVYITTSQLVRDVWTRNVFSVPRGTGSGFIWDDAGHVVTNFHVIQGASEATVKLADGRDYQAALVGVSPAHDIAVLKIGVGFQRPPAVPVGTSADLKVGQKVFAIGNPFGLDWTLTNGIVSALDRSLPGESGGVTIEHLIQTDAAINPGNSGGPLLDSAGRLIGINTAIYSPSGVSAGIGFAVPVDTVMRVVPQLIKTGKYIRPALGIEVDEQLNLRLQALTSTQGVFVLRVAPGSAAQKAGLSGITVGPEGIVPGDRITGIGGAPVD

SEQ ID NO: 5103 - protein, 404 aa, Pasteurella multocida subsp. multocida str. Pm70
MAHFPKSDKLEHVCYDIRGPVHKEALRLEEEGHKILKLNIGNPAPFGFEAPDEILVDVIRNLPTAQGYCDSKGLYSARKAIVQYYQSKGIHGATVNDVYIGNGVSELITMSLQALLNDGDEVLIPMPDYPLWTAAATLAGGKPVHYLCDEEANWFPDVNDIKSKITKRTKAIVVINPNNPTGAVYSQDLLLEIIEVARQHKLIIFADEIYDKILYDDAVHHHIAALAPDILTVTFNGLSKAYRVAGFRQGWMILNGPKKAAAGYIEGLDMLASMRLCANVPMQHAIQTALGGYQSINEFILPGGRLLEQRNKAYELINQIPGVSCIKPQGAMYMFPKIDIKKFNIYDDEKMVFDLLAQEKVLLVHGRGFNWHSPDHFRIVTLPHVHQIEEALTKLARFLAHYHQ

SEQ ID NO: 5104 - protein, 251 aa, Glycine max
MEFEDQEEQEEELCMGGGAGYDPTQMKIPVAAEPVRSSSSNGGGCGRARYRECLKNHAVGIGGHALDGCGEFMAAGMEGTLDALKCAACSCHRNFHRKEADSSAVVSLSGGDPYFLPHHHHHHHPPPPQFSGYYRHPAGYLHMGGQLRSAVGGTLALPSTSGGGGTQSTREDQEDISNNPSAGGTGSKKRFRTKFTVEQKDKMLELAEKLGWRIQKHDEAVVQAFCDETGVKRHVLKVWMHNNKHTLGKKP

SEQ ID NO: 5105 - protein, 201 aa, Lactobacillus gasseri
MEIIQNYSKLERSTNKMEVAKPLDNTKESHYDTAIFAGGCFWCMVEPFDTYPGIVSVVSGYTGGHVENPSYEEVCTGTTGHVEAVEITFDPKIISYKKLVDIYWQVTDPTDAMGQFQDRGSQYQPIIFYNSPQQKEIAEESKMQLEDSHRFDEPIVTKIEPAEPFYPAEDYHQDFYKKDPLRYQIEEAGGRAQFIEKHWKK

SEQ ID NO: 5106 - protein, 198 aa, Picea mariana
MSTCKFIKCVTVGDGAVGKTCMLISYTSNTFPTDYVPTVFDNFSANVVVDGNTVNLGLWDTAGQEDYNRLRPLSYRGADVFILAFSLISKASYENIMKKWLLELRHFAPGVPIVLVGTKLDLRDDKQFFTDHPSAVPITTAQGEELKKQIGAAAYIECSSKTQQNIKAVFDSAIRVVLQPPKVKRKKKRKSHKTCSIL

SEQ ID NO: 5107 - protein, 542 aa, Oryza sativa; identical to SEQ ID NO: 1032

SEQ ID NO: 5108 - protein, 533 aa, Thiobacillus denitrificans ATCC 25259
MLGAPSLILPASAREAGTAAGSAPVLSGTEFDLTIAETAVNFTGKPRMATTINGSIPGPTLRLREGDTVTIRVHNRLTEDTSIHWHGILLPFEMDGVPGISFKGIPPGQTFTYRFKVKQTGTYWYHSHSGMQEQTGMYGTIIIDPARGNSVGADRDYVVQLSDWTDEHPMRVLHKLKVQGDYFNFNQPTAGDFFRDVSKEGLKAAIDKRRMWNEMRMSPTDLADVSAHTYTYLMNGAAPAGNWTGLFRPGGKVRLRFVNSAAMTFFDVRIPGLKMTVVQTDGQDVEPVTVDEIRIGVAETYDVIVSPKDEAYTIFAQSMDRTGFARGTLATRAGLVAAVPSPDKPVALEMQDMMGDMTGLARAHHARTEYGPSVDMRVDTPRTDLDDPGVGLRDNGRRVLTYDHLHSVGGPLDARGPGREIELHLTGNMERYAWSIDGVEFEKSTPVHFRHNERLRVVFVNDTMMTHPMHLHGMWSELESPEGKFQVRKHTIAVQPAQRVSFLVTADALGRWAWHCHLGLHMDMGMFREVVVA

SEQ ID NO: 5109 - protein, 456 aa, Bacillus thuringiensis serovar konkukian str. 97-27
MYKYLHILNDIEKMIQNGAINEGQKLPSIRSLVTQYECNKATVIRALYELEKRHIIYSVPQSGYYVVKKSGSTIENDEIIDFASSAPDPDVFPYLDFQHCINKAIDTYKNDLFVYGTPKGLPSLIPVIQKQLANYQVFTKEDNIFITSGVQQALAILTSIPFPNKNETILVEQPTYHLYIEYLEINKVPVIGIKRTSEGIDLNELERIFRTGKIKFFYTIPRYQHPLGTSYSKGEKEKVVLLAKKYNVFIVEDDYLADLETDSKADPLYSLDHDNHVIYLKSYSKIIFPGLRVGVAVIPPVISSAFHTYKKVLDIDSPMISQAALEIYIKSGMFERHKNKIQSSYNNRSKKLAEVLERMYSENPLLFTYKKQNTIGIHTCLEVHKTSISDMLIQRLSEMQISIDTIDKNYVRGFPKQRLLKLNVSNVKEDRIEEGIRIVMEEIKQVERLNFQFKKE

SEQ ID NO: 5110 - protein, 322 aa, Ostreococcus tauri
GEAPSSNDTGDEATVTTNDATSDPTTTEGKAVKTRKPYTITKKRERWSDEEHALFVESLKKYGRAWKRIEEYIGTKSAVQIRSHAQKFFAKLQKEQIVASGSEGSGSTRKRGADRSTSQSKRSKSSYATDINLEIPPARPKKKPAHPYPRKATSQQPSGGSGERDNSGGTGKSSGTAQKWPTEASQEFIASTSSSAAIAAVLSVACDKMQNNLHQELRQGYFGIPTGMQPQQGMFAQPGMFPMNAMMSPFVAMNTVSGAPTPPPMTNPQQFLNYANFFSNYWPQFANAANANAVNVMFQQQQQQQQQQQQQQHKQRAGGETK

SEQ ID NO: 5111 - protein, 616 aa, Rhodospirillum rubrum
MCGLVAILERRGPADEAAVSKALARLARRGPDGEGRAAFWDGRLLLGHRRLAIFGKGADGAQPMVDPETGSVLVFNGALYNYVELRQALQALGQRFAGESDTEVALLAWRQWGEAAFARFNGMWAMVLLDAPGDRLVVSRDRLGVKPLYLCDTGGRVTFASTIAATLAASGIAPRVDDDAVFDFLVGGLTDHRGGSFFAGIVEVPAGALWSVDRSGGIDRRRFHDWRKEGSGEAAPPSAEALRATLSDAVRLRLRADVPAVALLSGGLDSSIVTRLATAPDMPRGALAGLLTYGYRDATEADETREAGRFAATLDSALPHDILRVAPLPAAPDLDALLAAQEQPFNTPSLVAAFRLYRLIAARGVKVAITGEGADELFAGYTNRYGALLAREHLRLGRLRPLGALLGSAHCPPRLVANRLAWDLPLAIVRPLMAGRVHGRVIARSFWQDSAERFEALAAYHHQPLASRLRDDALRALLPYSLRFADRSGMASGVEVRSPFLDYRVVEAALALPVAAKIDDRGGKRILRQAFRHDLPAEIIGAGKTHGLGMAEQFQVGHLDWAALAEAPPTLAARYLDLGRLKTALAAHPSDPRLWWPLCLLRWLAWVEGGMADAPR

SEQ ID NO: 5112 - protein, 369 aa, Ostreococcus tauri
MSTATSISPARFEDEVKDAAKKPRKPYVRANAPTTWTANEHERFVEAIRLHQRDWRAVTAHVRTKTPTQIRSHAQKYFAKLRRDASGEAPPRTRGRRVDLSRLAVKLHADARGRTEAMRVRVERTSDGSFVDRARGAYRRAARDRAETPNLSAVYGFLAAFFDVDPTTCDDDNRRRAHAEASARLDALRARDRGAALDVLANLRRIRESSASRSATDAMVAVNLHAAVAAVDAERACEDEEGSSGAILSGDDATSRTSGERASPRRSHRQGRARAFTVRRKCALGRCACEPYASMRKMCFTRDSTIAFSTPRDAATAHSRASRSTPRMRRARAIDHARRALGALVNAHERRAVRSRHVFAVRRRWAIDE

SEQ ID NO: 5113 - protein, 1039 aa, Bacillus halodurans C-125
MFYQLEKLQNRINELASYRYRDVKPLDSFYMYEPEQGKESVVPTHYPKQTFHVNDTWSGRNKYVWLNTSLHLPEAWSDKRCVLFLDVGRTGGGNNSGFEALLFVNKQPFQGVDSNHQEVLLPKEGGNRLEIDVMMWSGLEGGGTPRTQYYRFKQAWYGWLDQKVDAFYFQAKAILEAIGQLDVHDATRVAMLSRLNQAFASINWTQPGNEQFYDSVYEALERLERDMEHLPKHSDVHIHAIGHSHIDLAWLWQTKHTKEKAKRTFSTVLRLMDLYPDYVYLQSQPQLYQWMKEEEPKLYEAIKQKVDDGQWEVEGGMWVEADCNIPSGESLVRQLLYGKRFFKKEFHKESKILWLPDVFGYSWALPQILKKSGIDTFMTTKISWNQYNRMPNDTFYWRGLDGTEILTHFITTPEPGRPKDSWFYTYNGLMSAETIKGTWEKYRDKAVNQDLLLAYGYGDGGGGVNREMLEMKRQLDQVPGVPHVKSTHVKEYFHQLHENVANTAEYVHTWDGELYLEYHRGTYTSQAKMKKKNRQLEFSYRDAEILAVTASAEKGWDAYPGSSLEKGWKLLLLNQFHDIIPGSSIKEVYEDAAKDYTEAAAIQKQVVTTQEKRMVNDKREKWTFFHPYQYDTPILVTIPKGTDERFVDQTGHGLSSQQTANNETLVLLEKSIPFAYQTISRATMVAEEVQMLSQVNFEERRWETPWYQLEWNDEGQFIRMYDKLGKREWLAQGKLGNVFKRFEDKPLAHDAWDIDLFYQEKSSTVSSFQGCELIENGPLRTTVLFRWKEDGVVIKQAIRCYRHTARIDFATEVDWQARQQLLKVEFPVDIRTNEAIYDIQFGNLKRPTHWNTSWDMARFETVGHKWAAIAEADYGISLLNDSKYGYSIKDNVLSLSLLKGAIYPDPEADIGNHQFTYALYPFQGPAFKRDVEREATYLQSAIIAVPGEAEMPFDQPLFTVSSDQVIVDAIKKSEDGTSVIIRLHEMEGARATVKLDCRYEAKQWREVNLIESEALSEWSTRPVELTFTPYEIKTIELTL

SEQ ID NO: 5114 - protein, 277 aa, Triticum aestivum
  misc_feature (268)..(268): Xaa can be any naturally occurring amino acid
  unsure (1)..(277): unsure at all Xaa locations
MDLIFQGTTITAATAGGETNGKSSEGKEKSPIKRSKGSLGSLNPRARKNCVEHGKTSGASANGTISQSGESGSESSSEGSEANSQNDSQHKESGQEQDGDVRSSQNGVSPSPSQAQLKQTWAIMQMPSSGPVPGPTTNLNIGMDYWANTASSSPALHGKVTPTAIPGAVAPTEPWMQDERELKRQKRKQSNRDSARRSRLRKQAECEEWAQRAEVWKQENASLKDEVSRIRKEYDELLSKNSSLKDNVGEKQHKSDEAGLDNKLEHSXGDDSQKDTN

SEQ ID NO: 5115 - protein, 272 aa, Ostreococcus tauri
MRAREGEAAGGADATRLPGTSATTSEGKKARKPYTQTKTRVSWTAKEHARFVKALQMYSRDWKKIEQYVRTKSVVQIRSHAQKYFLKMIKNGEGDALPPPRQKKAPAATAAELKLHGDSSARAEAMRFKVAKLAHTPHPNLTGYHIRDLTVKSQTPNFSNVYDFLASFFHTKKSGCTQGVEPAESAQLDHLNTMNDVDKETALALAQNMRRNLTSREMWKQQVDLVKDGYVTFLDKDDLRAFHSTTTPKNATALDANAESGGGSNEETQTGP

SEQ ID NO: 5116 - protein, 345 aa, Triticum aestivum
MQIFVKTLTGKTITLEVESSDTIDNVKAKIQDKEGIPPDQQRLIFAGKQLEDGRTLADYNIRKEWTLHLVLRLRGGMQIFVKTLTGKTITLEVESSDTIDNVKAKIQDKEGIPPDQQRLIFAGKQLEDGRTLADYNIQKESTLHLVLRLRGGMQIFVKTLTGKTITLEVESSDTIDNVKAKIQDKEGIPPDQQRLIFAGKQLEDGRTLADYNIQKESTLHLVLRLRGGMQIFVKTLTGETITLEVESSDTIDHVKAKIQDKEGIPPDQQRLIFAGQQLEDWRTLPDYKSRRVHPPLCLPLRGGSKSLENPTGKTYLEVRAPTIQNLGQIRKRGVSPTRGLIFWKT

SEQ ID NO: 5117 - protein, 394 aa, Lentinula edodes
MQSLLRWGIENSTPQNTNTNTNTTTTANNTANTNTTTANAPPSRRPDLNPEIIDLLLGKSDAVLMKEAMAIAVDEGNTEEDRVSALDNLEMLIEQIDNANNLTNLKMWEPLHALLTSSPDSVATQALWVIGTALQNNPSAQDAYLKLNPLPTLTSFLSPPPQSTNSNSTPPKSPKTPSKPLRSKAIYALSGLLKHNAPALLQLSVNDAHGCDGWDRLCLALQDPDITIRRKTLFLLNALLIPSPSPDPSPSPDRSPSPSLGNLHTPSQTQHSQNSQHPIHPNSHSIHLSDPSRVSTSAPTYQALLTHGIIDTLIAGLTRSLPYGGDGDTGDTKEEVDGEFKEMGVSLLNTYISLSQSHTHTQHPTTPLTPSQKTVSGNGSPLSLPPKNKNWLPS

SEQ ID NO: 5118 - protein, 543 aa, Mesorhizobium loti MAFF303099
MSAKEIKFATDARDRMLRGVEILTNAVKVTLGPKGRNVIIDKAYGAPRITKDGVTVAKEIELADKFENMGAQMVREVASKTNDLAGDGTTTATVLAASILREGAKLVAAGMNPMDLKRGIDQAVAAVVVEIKAKAKKVKSSAEIAQVGTIAANGDATVGAMIAKAMDKVGNDGVITVEEAKTAETELDVVEGMQFDRGYLSPYFVTNADKMRVELEEPYVLIHEKKLGNLQAMLPILEAVVQSGRPLLIISEDVEGEALATLVVNKLRGGLKVAAVKAPGFGDRRKAMLEDIAVLTAGQMISEDLGIKLENVTIEMLGRAKRVLIEKDTTTIIDGAGTKATIQARVAQIKGQIEETTSDYDKEKLQERLAKLSGGVAVIRVGGVTESEVKEKKDRIDDALNATRAAVEEGIVPGGGVALLRARSALSGLNGANADVTAGISIVLRALEAPIRQIAENSGVEGSIVVGKLADSKDHNLGFDAQNETYVDMIKAGIVDPAKVVRTALQDAGSIAALLITAEAMITDIPAKDAAPAGGGGGGMGGY

SEQ ID NO: 5119 - protein, 328 aa, Triticum aestivum
LEGAVALLTLPSCSQPPDTINGSLRVTVQGEVIEQSFGEEHLCFRTLQRFTAATLEHGMRPPISPKPEWRALLDEMAVVATEEYRSIVFQEPRFVEYFRLATPETEYGRMNIGSRPSKRKPSGGIESLRAIPWIFAWTQTRFHLPVWLGFGGAFKHILKKDIRNFHMLQEMYNEWPFFRVTIDLVEMVFAKGNPGIAALYDRLLVSEGLQPLGEKLRANYEETQKLLLQVAGHKDLLEGDPYLKQRLRLRDAYITTMNVCQAYTLKRIRDPDYHVAFRPHLSKEVMDTSKPAAELVTLNPGRVSYAPGLEDTLILTMKGIAAGLQNTG

SEQ ID NO: 5120 - protein, 104 aa, Mesorhizobium loti MAFF303099
MKFRPLHDRVVIRRAEGDTKSKGGIIIPDNAKEKPQEGEVIAVGPGARDENGALVPLDVKAGDLILFGKWSGTEVKIDGEDLLIMKEADIMGVIDKSVEAKKAA

SEQ ID NO: 5121 - protein, 317 aa, Triticum aestivum
NLLQSFPWVFFLRFPFQGRLFLGREEAILFGLNRIREEEEEEEEEEEEEEEEEEEEEMELIAKVRSPYIVEYRDSWVEKGCYVCIVIGYCEGGDMLEAIKKANGSHFPEEKLCVWLVQLLMALDYLHASHILHRDVKCSNIFLTKDQNIRLGDFGLAKVLTSDDLASSVVGTPSYMCPELLADIPYGSKSDIWSLGCCIYEMTALKHAFQAFDMQTLINQINQSVVAPLPTIYSGAFRGLIKSMLRRNPDHRRSAVDLLNHPHLQPYVLEIQSKSSPARNMFPAILPNRHEKNKTTCSDDEDNCKPQYIKSQSFKVQ

SEQ ID NO: 5122 - protein, 465 aa, Schizosaccharomyces pombe
MAPISKVFDYLVIGGGSGGLASARRAAKHGAKVALIEASGRLGGTCVNYGCVPKKIMWNIADLVAKMKTAKQNGFPNSQLGSFDWGMIKRKRDAYIGRLNGIYERNVNKDGVAYISGHASFVSPTEVAVDMNDGSGTQVFSAKYILIAVGGHPIWPSHIPGAEYGIDSDGFFELESQPKRVAIVVGAGYIAVELAGVFAALGTETHMFIRQSKFLRKFDPIISDGIMDHFQHIGINVHTNSLEFKKVEKLPSGELCIHQQDGSTFNVDTLLWAIGRAPKIQGLRLEKAGVKTLPNGIIIADTYQRTNVPTVLSLGDVCGKLELTPVAIAAGRRLSDRLFGGIKDAHLDYEEVPSVVFAHPEAGTIGLTEQEAIDKYGESQIKVYNTKFNGLNYSMVEQEDKVPTTYKLVCAGPLQKVVGPTFSWRFSAEILQGFGVAIKMGATKSDFDSCVAIHPTSAEELVTLV

SEQ ID NO: 5123 - protein, 449 aa, Sinorhizobium meliloti 1021
MTGNKIDSIDPTDEVLPPRSLVLFGLQHVLVMAASPITAVFLVSKALGFSDALTVSLISATFLICGLGTILQSFGPAGFGARLPFIMVPGGAPIAIFLAIAQQTDVQTAVGAVILTAGFYFLALPVFRRLLRYFPPIVVGTMLLLVSVNLVRIYGGTITGKQGSEGFADPMNVGLALATIALTVIFARVFTGTLQRISVMFGLIAGSAIAIGAGYMDLSGIFDGPVIAMPQLLPFGMPKFDFFAALPLIVFSIISMAEATGQTIATAEIVGRRGDAHAIVPATIRGDAVASLVGGLFGTSLIITSGENVGIVRATNVKSRYVTATAGVILVLIALFAPVGRLASALPGPVVGGTAVIVFSIIGVIGIDLLRRVDLREHGPMFTLAAALSMGLLPILVPGVYSQFPPWSQMILANGLAAGTITAVIVNAFFQHLPLEQFQEKCAAVFRPE

SEQ ID NO: 5124 - protein, 327 aa, Salmonella typhimurium LT2
MATRIEFHKHGGPEVLQTVEFTPAEPAEHEIQVENKAIGINFIDTYIRSGLYPPPSLPAGLGTEAAGVVSKVGNGVEHIRVGDRVVYAQSTLGAYSSVHNVTADKAAILPDAISFEQAAASFLKGLTVFYLLRKTYEVKPDEPFLFHAAAGGVGLIACQWAKALGAKLIGTVGSAQKAQRALDAGAWQVINYREESIVERVKEITGGKKVRVVYDSVGKDTWEASLDCLQRRGLMVSFGNASGPVTGVNLGILNQKGSLYATRPSLQGYITTREELTEASNELFSLIASGVIKVDVAENQRYALKDARRAHEVLESRATQGSSLLIP

SEQ ID NO: 5125 - protein, 252 aa, Frankia sp. CcI3
MAKSPAQKIREVATTGVGTLRREGAKNGKGLKSAYLADPIHSYLTEHSSPPDPILDALSAVTATLPEAEMQVPAEQGTFLTILTASIAPRRAVEIGTFTGYSALCIARGLPPGGRLLCLDISAEWTSIARQYWARAGVSDHIDLALGPAADSLGMLPEEPTFDLAFIDADKTSYRRYYELLFPRMNPNGVIIVDNVLQYGHVVRSHSDNPAVVAVKQFNELLAGDSRVQVVMLPIADGLTIVRKLPSPRTPV

SEQ ID NO: 5126 - protein, 337 aa, Magnetococcus sp. MC-1
MKAILVTGGAGYIGSHVCKVLSQSGFLPITYDNLSEGHPWAVRWGPLVVGGLDDGAKLAGLFAQYQPQAVIHLAGRAYVGESMTDPALYYRNNVQAALVLLECMRQYGCKNIIFSSSCATYGEHRQMPITEAMSQHPINPYGRSKLMFEWMLQDYQVYGLQSVALRYFNASGADLEGEIGEQHQPEPHIIPRLLEAARKGSPFTIYGTDYESEDGTCVRDYIHVSDLAQAHLLALQWLWRGGESRAFNLGNGQGFSIRQLIKVAETVTGKSIAVQLGARRPGDPAVLVGSAEKAREELGWQPQYGTLEIILTSAWRWMQRRQDPPVVDGIEESIGEP

SEQ ID NO: 5127 - protein, 523 aa, Vigna unguiculata
MAMASLARRKAYAVVSSSRSSVFLTSLRGFASGSDENDVVVIGGGPGGYVAAIKASQLGLKTTCIEKRGTLGGTCLNVGCIPSKALLHSSHMYHEAKHSFANHGIKLSSVEVDLAGMMAQKDKAVSNLTKGIEGLFKKNKVNYVKGYGKFVSPSEVSVDTIDGGNTVVKGKHIIIATGSDVKSLPGVTIDEKKIVSSTGALALTEIPKKLVVIGAGYIGLEMGSVWGRLGSEVTVVEFASDIVPTMDAEVRKQFQRSLEKQGMKFQLKTKVVGVDTSGDGVKLTLEPAAGGDQTILETDVVLVSAGRTPFTAGLGLDKIGVETDKIRRILVNERFTTNVSGVYAIGDVIPGPMLAHKAEEDGVACVEFIAGKVGHVDYDKVPGVVYTTPEVAYVGKTEEQVKALGVEYRVGKFPFMANSRAKAIDNAEGLVKILAEKETDKILGVHIMAPNAGELIHEAAIALQYDASSEDIARVCHAHPTMSEAVKEAAMATYDKPHSHMKSWLLLHSLLFIFVQQFTMTWR

SEQ ID NO: 5128 - protein, 397 aa, Salmonella typhimurium LT2
MFQKVDAYAGDPILSLMERFKDDSRHDKVNLSIGLYYNEDGIIPQLKTVAEAEARLNAQPHGASLYLPMEGLNTYRHTIAPLLFGADHPVLQQQRVATIQTLGGSGALKVGADFLKRYFPDAGVWVSDPTWENHIAIFAGAGFEVSTYPWYDDATNGIRFNDLLATLNTLPARSIVLLHPCCHNPTGADLTPSQWDAVIEIVKARDLIPFLDIAYQGFGAGMDDDAYVIRAIASAGLPALVSNSFSKIFSLYGERVGGLSVVCEDAEIAARVLGQLKATVRRIYSSPPCFGAQVVATVLGDEALKAGWLAEVDAMRNRIISMRQTLVKELKAEMPDRNFDYLLQQRGMFSYTGLSEEQVDRLRDEFGVYLIASGRMCVAGLNASNVHRVAKAFAAVM

SEQ ID NO: 5129 - protein, 329 aa, Mycobacterium leprae TN
MSPRPLKVAVTGAAGQIGYSLLFRLASGSLLGLDRPIELRLLEIEPALKALEGVVMELDDCAFLLLAGVEIGADPNKVFDGVNLALLVGARPRGPGMERGDLLEANGAIFTAQGKALNAVAAADIRVGVTGNPANTNALIAMTNAPDIPRERFSALTRLDHNRAIAQLATKTGSAVTDIRKMTIWGNHSATQYPDVFHAEIGGKNAAEVVGDQAWIEDYFIPTVAKRGAAIIDARGASSAASAASATIDAARDWLLGTPEGNWVSMAVVSDGSYGVPEGLISSFPVTTTDGDWTIVRGLGIDDFSRGRIDKSTAELADERMAVKQLGLI

SEQ ID NO: 5130 - protein, 333 aa, Arabidopsis thaliana
  misc_feature (123)..(123): Xaa can be any naturally occurring amino acid
  unsure (1)..(333): unsure at all Xaa locations
MDMTPTITTTTTPTPKSPEPESETPTRIQPAKPISFSNGIIKRHHHHHHPLLFTYKECLKNHAAALGGHALDGCGEFMPSPSSISSDPTSLKCAACGCHRNFHRRDPDNNNDSSQIPPPPSTXVENQPHHRHHPPPPPPPPPPRSPNSASPPPISSSYMLLSLSGTNNNNNNLASFSDLNFSAGNNHHHHHQHTLHGSRKRFRTKFSQFQKEKMHEFAERVGWKMQKRDZDDVRDFCRQIGVDKSVLKVWMHNNKNTFNRRDIAGNEIRQIDNGGGNHTPILAGEINNHNNGHHGVGGGGELHQSVSSGGGGGGFDSDSGGANGGNVNGSSSS

SEQ ID NO: 5131 - protein, 227 aa, Picea mariana
AILIDWLIEVHLKFELMPETLYLTVNIIDRYLSIEIVTRKNLQLVGITAMLLACKYEEIWAPEINDFVCISAKEYASEQLVAMEHTILNQLKFNLTVPTPYVFLVRFLKAAGSDKEMENLAFFLVDLSLLHYIMIKYSPSMLAAAAVYTAQCTLKKSSPWSKTLILHTGYSEADLKECAHFMVNFHLNAGGSKLRVVHKKYSDPFFGCVAFLSPANLPVDDSCSSSN

SEQ ID NO: 5132 - protein, 321 aa, Oryza sativa (japonica cultivar-group)
MASLSVPPVPTDPRRDAIDLHRAFKGFGCDATAVTAILAHRDASQRALIRRHYAAVYHQDLLHRLAAELSGHHKRAVLLWVLDPASRDAAVLHQALNGDVTDMRAATEVVCSRTPSQLLVVRQAYLARFGGGGGGGLEHDVAVRASGDHQRLLLAYLRSPRYEGPEVVDMAAAARDARELYRAGERRLGTDERTFIRVFSERSAAHMAAVAAAYHHMYDRSLEKAVKSETSGNFGFGLLTILRCAESPAKYFAKVLHEAMKGLGTNDTTLIRVVTTRAEVDMQYIKAEYHRSYKRSLADAVHSETSGNYRTFLLSLIGRDR

SEQ ID NO: 5133 - protein, 282 aa, Pseudomonas aeruginosa UCBPP-PA14
MSIAVIQMVSQDDVTANLAAARRLLEQAAEGGARLAVLPENFAAMGRRDLAELGRAEARGNGPILSWLNSAARDLRLWIVAGTLPLPPDGQPEAKANACSLLIDEHGERVARYDKLHLFDVDVADARGRYRESDDYAFGQKIVVADTPVGRLGLTVCYDLRFPELYTALREAGAELITAPSAFTAVTGAAHWQVLVRARAIETQCYLLAAGQGGVHPRGRETFGHSAIVDPWGRVLAERPQGEAVLLAARDAAEQADIRRRMPVVAHRRFFPPAEPRPARTE

SEQ ID NO: 5134 - protein, 332 aa, Triticum aestivum
GSGNFGVAKLVRDVRTKEHFAVKFIERGHKIDEHVQREIMNHRSLKHPNIIRFKEVVLTPTHLAIVMEYASGGELFQRICNAGRFSEDEGRFFFQQLISGVSYCHSMQVCHRDLKLENTLLDGSVAPRLKICDFGYSKSSVLHSQPKSTVGTPAYIAPEVLSRREYDGKVADVWSCGVTLYVMLVGAYPFEDPDEPRNFRKTITRILSVQYSVPDYVRVSMDCIHLLSRIFVGNPQQRITIPEIKNHPWFLKRLPVEMTDEYQRSMQLADMNTPSQSLEEAMAIIQEAQKPGDNALGVAGQVACLGSMDLDDIDFDIDDIDVESSGDFVCPL

SEQ ID NO: 5135 - protein, 489 aa, Streptomyces coelicolor A3(2)
MSKDAVDTAQVAAHPQATGTIPADAGDAGYSKDLKARHVNMIAIGGAIGTGLFLGAGGRLRDAGPALAIAYLVAGVFAFFVVKALGELVLYRPSSGSFVSYAREFLGEKGAYVAGWMYFLNWSTTGIADITAIALYTHYWSMFTSIPQWVLALVALAVVLAVNLISVKIFGEMEFWFAIVKVATLVGFMLIGIFLLATQHEVSGQTPGMGMITDHGGILPHGVMPVVLVMQGVIFSYAALELVGVAAGETAEPHKIVPRAVNSIMWRVALFYVGSVVLLALLLPSSLYSGDESPFVTVLSGIGVPAAGDVMNLVVLTAAMSSLNSGLYSTGRILRSMAMAGSAPRFTGVMSRSQVPYGGILLTCAVCVLGVGLNYLVPSKAFEIVLNVASLGIISTWVIIMICHLVFVRRARAGLVERPGFRLPGSPVTEIVTIAFLLAVVGLMWNDEEVGRKTVLLVPVIAVMLVAGWFGVRRRVAHQAGQERPAPRE

SEQ ID NO: 5136 - protein, 217 aa, Mycobacterium avium subsp. paratuberculosis K-10
MTEKPTPKDVDAFLDSTVVGGDPSVIDALEASSAAGLPPIAVSVQQGKFLSLLATAMGARRILELGTLGGFSTIWLARGAGPQGRVVTLEYEPKHAEVARANLQRAGLADRVEVIVGAALDTLPSVTGPFDLVFIDADKENYPAYLDWAVRLARPGAVIVADNVIRQGQILKPEADAQARAVRQTLQAMGEHPRLDTAVIQTVGAKHWDGFAFAVVR

SEQ ID NO: 5137 - protein, 662 aa, Clostridium tetani E88
MNKLDTTAINTIRILSAEAIQKSNSGHPGLPLGSAPMAYTLWAKNMKHNPKNPNWTNRDRFVLSAGHGSMLIYSLLHLFNYGLTMEDLKDFRQWGSKTPGHPEYGHTIGVETTTGPLGQGIANAVGMAMAEAYLAEKFNKPGCELIDHYTYSLVGDGCLMEGISSEAASLAGTLGLDKLIVLYDSNNITIEGNTDIAFTEDVKGRFEAYNWQVINVEDGNDVEAIDKAIKEAKSDKKRPSIIIIKTQIGYGCPAKQGKSSAHGEPLGEENLKITREFLKWGHEEEFFVPEEVREYMKEKVEELSKEEEEWNKLKEEYDNKYPELAKEWELWFSGKIEKDLLNDEDFWKFEKKTATRAASGDVINRLAAVVPNLIGGSADLAPSNKTYMKDKGDFSKEDRKGANLHFGVREHAMAAIANGMYLHGGLKVFVSTFFVFSDYMKPSMRLSALMNLPITYVLTHDSIGVGEDGPTHEPIEQLASLRSIPNMTVFRPADAKETAAAWYYAITKEDGPVSLVLSRQNLPLYNETGKDALKGAYILKDTEDKKPDIILMATGSEVELIYEGAKILEEKGIKVRVVSMPSLEVFEKQSKEYKEEVLPSNVTKRLAVEAASSFGWHKYLGFDGDILSIDHFGASAPGDVLFKEFGFTIENLVKKAEEVLNK

SEQ ID NO: 5138 - protein, 586 aa, Vibrio vulnificus CMCP6
MSSKNNKNLGILLKLSTFVSPYRWRVAAALVALVATASLTLSVGYGVRMLIDQGFAQQSLHELTNAIQFIVGVTLCIAIGTFFRFYLVSSVGERVSADIRLAVFNHVITLHPSYFETNSSGDIMSRLTTDTTLLQSIIGSSFSMAMRSALMCVGAIIMLFATNFKLTLIVLASVPFVLVPILVYGRRVRALSRQSQDSMADVGSYAGEAIEHIKTVQSFSSEQHEKAAFAVEVEKAYEIGRQRVKQRAILISGVIVIVFGAIAGMLWVGGSDVIHGKMSAGDLGAFVFYAIMVASSTATISEVLGELQRAAGATERLIEILQVESDIKAPSHQQSIPADIPAEVSFDSVNFNYPSRPNQPAIKGLNLTAEQGKVLALVGPSGAGKTTLFELLQRFYDPQQGHVLLGGIDIRQFDPNELRQQMALVPQQPALFSHDVFHNIRYGNPDATDEQVIEAAKKAHAHEFIEKLPEGYHSFLGERGVRLSGGQKQRIAIARAILKDPKILLLDEATSALDSESEHHVQQALEALMKGRTTLIIAHRLSTIQHADKIAVLDNGELVDIGNHHALMQSCELYQRLVALQFKHLN

SEQ ID NO: 5139 - protein, 221 aa, Brassica napus
  misc_feature (24)..(24): Xaa can be any naturally occurring amino acid
  unsure (1)..(221): unsure at all Xaa locations
MGRRPARCYRQIKGKPYPKSRYCXGVPDPKIRIYDVGMKKKGVDEFPFCVHLVSWEKENVSSEALEAARIACNKYMVKSAGKDAFHLRIRVHPFHVLRINKMLSCAGADRLQTGMRGAFGKALGTCARVAIGQVLLSVRCKDNHGAHAQEALRRAKFKFPGRQKIIVSRKWGFTKFNRADYTRLRQSKRIVPDGVNAKFLSNHGRLANRQPGSAFISATSD

SEQ ID NO: 5140 - protein, 329 aa, Rhodococcus erythropolis
MKLLVTGGAGYVGSVCSTVLLERGHEVVVIDDLSTGNADAVPAGAEFIEGDVGALAADVLGSAGSPVFDGVLHFAAQSLVGESVLHPEKYWRGNVVTTIELLEAIRVSGTPRLVFSSTAATYGEPEQSPIVETAPTRPTNPYGATKLAIDHAITSYSIAHGLGATSLRYFNVAGAYKSAGENRVIETHLIPLVLQVALEQRDKISVFGTDWPTPDGTAVRDYIHVLDLAEAHLLALESSVPGEHRIYNLGSGAGFSVREVIAACARVTGLPINVEDASRRLGDPAVLIASSDKAIAELGWTPTRTDLDVIVADAWQFLQDLGDRSHAAR

SEQ ID NO: 5141 - protein, 580 aa, Ostreococcus tauri
MSDARTRSRGTVDIDGETLKRADRGRRGRESGDRRSETNAVAAAGEDGGERDADALRVLLATDDAHTRGMVHKMLRELGVEVVMATNGKEVLEVLRGRPKGVAAAAEDVSVDMILLDVLMPALDGEVELVEVCKSNEALRGVPIVIMSTVDERKACGTRYEHSGAAGFLTKPVNRTELKESLSHTRMLKSHESGSAENDGSGNDPNVGSAKSSLTKLTNGEKAAGGSGDGGSGGGGSGQGQNDSGSDNVRLYNEGNEKSRRREAEAMDRWASREGGSGDCGSGGSGQGTGSGSGSHEGSGSGQRDSNENEKFRGLSVQLIKAHGGATTMLELSLPEHSSEHVVVRRSNSRSAFKGFQTYLKSEKKESSVQMMSLDLTQQQHQSFYEASSMMPPADFARFYGPIMPAGMPPPPMDLPLPPPPYIDMNQFTAAAFTSASIRPDMMDSTANPFWSVLQTAADHTQQTSSSQAAEHRAAAIRRFLKKRKERNFDKKVRYASRQQLAASRPRLRGQFVRNAEETTTENGSNGSDGKKSNEFNASAAKGEVQGREEQYVDRHGSNTGTSNEGSKEGSRSSSRDGSK

SEQ ID NO: 5142 - protein, 205 aa, Shewanella sp. MR-7
MSNIVWHQHSVDQADRAKLKGQNPVLLWFTGLSGAGKSTLAGALERALFDAGFHTYLLDGDNVRHGLCKDLGFSVADRDENLRRVGEVAKLMVDAGLVVLSAFISPTREERDSIRARFPEGQFIEVHVSTPLSICEQRDPKGLYVKARRGEISNFTGISSPYEAPLSAELTIDTSKGDLASQVRALIDYLTAIEVINPSRLTASA

SEQ ID NO: 5143 - protein, 155 aa, Magnaporthe grisea 70-15
MAICILGDQHDLDRAKHGGIDSMSADDLKKLNKNKKLIKKLARKYDAFIASDTLIKQIPRLLGPGLSKAGKFPTPVSHADDLSGKVTEVKSTIKFQLKKVLCMGVAVGNVEMTQEQLVGNIMLAINYLVSLLKKGWQNVGSLTIKATMSPPKRIY

SEQ ID NO: 5144 - protein, 106 aa, Juglans nigra
LTLWKADLADEGSFDAAIDGSTGVFHVATPMDFESKDPENEVIKPTVNGVLSIMKACVQAKTVRRLVFTSSAGALDVSEHQRPVYDESCWSDVEFCRAKKMTGWMY

SEQ ID NO: 5145 - protein, 214 aa, Arabidopsis thaliana [sequence omitted]

SEQ ID NO: 5146 - protein, 428 aa, Frankia sp. EAN1pec
MGRLGRAVRRGFEPYPCSPPGFRVLPLAGRGPWRVSRGKETHERHRRTSGRTGTPVVSTTVAGYPRIGPARELKTTTEAYWADRLGEDELVWIAQQLRADVWKDLAAAGLDAIPSNTFSFYDQVLDTAVLFDAVPDRFRGLTGAGGSPATPLETYFAMARGADGVAPLEMTKWFDTNYHYLVPELDPSTRFRLVGDKPLREVREARELGVETRPVLVGPVTFLLLAKAAAGAPAGFRPLDLLDDLVGQYVELLDDLASDSVAWVQLDEPALTRDLTPAELAATARAYARLGGATTRPRILVSTFFGEAGEALPVLRDAPIDGIGLDLVAGPGNLDAVARAGGVGAKTLFVGVVNGHNVWRADLPAALATCATLSGLAADVVVTTSCSLLHVPIDVEAETNLDPRLADRWPSPGRSARSRAARTACGTG

SEQ ID NO: 5147 - protein, 556 aa, Magnetococcus sp. MC-1
MGKTFDSNRLKELTGHANPLEILNDPYMNKGVAFTEEERDLFHLRGLLPPRVQTMEAQLGRALDNFRCKPNDLEKYIFLTGLQERNETLFYRLVMTNIEEMLPIIYTPTVGKACQTYGHIFRRPQGMFISINDKGRIAELLGNWVHKDVRVIVVTDGSRILGLGDLGAHGMGIPVGKLALYTALAGIPPIHCLPVTLDMGTNNEALRNDPLYVGLPQPRVTGEIYDEMIEEFVLAVQEQFPRAMIQFEDFSNDNAFRLLEKYQDRICTFNDDIQGTAAVALAGILGALRITEADLCTQRYLFMGAGSAGFGIADLILRAMEQKGIPREQGLKQFRFMDSRGLVTRSRTDLRGRKSEFVCDDPPLTDLQQVVERFMPTVLIGVSGQPGVFHQGVVEAMARINPRPIIFALSNPTSKAECSAQQCYQWSDGRAIFASGSPFEPVTIAGQTFVSGQGNNAYCFPGIGLGVIMCEASRVTEEMFLVAAQTLAQMTAQSDLDQGRVYPSMQDIRAISLNIALAVVDLASKRGLAQRDLGEHAKERISAWMCNANYRNYANR

SEQ ID NO: 5148 - protein, 276 aa, Photorhabdus luminescens subsp. laumondii TTO1
MSQTTSTTLTGQCISEFLGTALLVFLGVGCVAAARIAGAQLGLWEISIIWGMSVALAVYLTAGVSGAHLNPAVTIALWLFARFDGKKVIPFIIAQMIGGFIAAALIYMMYYSVFLDYEQVHNIVRGTPESLFTAGVFSTYPMASLSISQAFMIEVIIAAILLCLILSLTDDGNGIPRGPLAPLLIGIVIAVIGGAFGPLTGFALNPARDFGPKLIAYLAGWGDIALTGGREIPYCLVTLTAPIIGGIVGAFGYRKLIGRNLPSDVHKTEDQKKKKA

SEQ ID NO: 5149 - protein, 417 aa, Pseudomonas stutzeri
MDSTALIPVQYGLDTFYFVICGALVMWMAAGFAMLEAGLVRAKNTAEILTKNIVLYALASIMYLLVGYYIMYSSPEGGIFPSLGFLIGDEHAVDLVAAGGEDAPYYSARADFFFQIVFAATCMSVVSGAVAERMKLWAFIAFAVVMTGFIYPIQGFWKWGGGFLDAAGFLDFAGSGVVHMAGAAAALAGVLLLGARKGKYGPNGQINAIPGANMPLATLGAFILWMGWFGFNGGSQLKMSTIEDANAVAQVFVNTNMGAAGGLIAALITARLLFGKSDLTMVLNGALAGLVAITAEPLTPSALQATLIGGVGGVLVVFSILGLDKLKLDDPVGAISVHGVAGMWGLLAVTADQCRRFFRQSSCLGLVSIFLWVFFASLIVWGIIKAVMGLRVSEEEEYEGVDVVECGLEAYPEFTRQ

SEQ ID NO: 5150 - protein, 833 aa, Oryza sativa
  misc_feature (695)..(695): Xaa can be any naturally occurring amino acid
  misc_feature (726)..(726): Xaa can be any naturally occurring amino acid
  unsure (1)..(833): unsure at all Xaa locations
MPPWWGKSFSKDAKKTTKENLIDTFHRLISPNDQKGSTKSKRSCRRGNDSSVEKSCRSTTVSRPTSPSKEVSRCQSFSADRPHAHPLPIPGVRPPVTRTVSDITESKPILEKRGKPPLLLPLPKPNRPPRRHGNSEVVSEIVVASPSSNCSDSDDHGDSQLQSPVGNDAENATLVTLKNKSSNARKECPGPITAKNMKEIHRPANQVHGSHILSTSPRGVAADSYQSNLQNPRPLVLDSAPNSLMSSPSRSPRRICPDHIPTSAFWAVKPHTDVTFVGSGQCSSPGSGQTSGHNSVGGDMLAQLFWQPSRSSPECSPIPSPRMTSPGPSSRVHSGSVSPLHPRSGGMAPESPTNRHDDGKKKQTHKLPLPPLSISHSSFHPNNSTPTSPISVPRSPGRTENPPSPGSRWKKGKLIGRGTFGHVYVGFNSDSGEMCAMKEVTLFLDDPKSKESAKQLGQEISLLSRLQHPNIVQYYGSETVDDKLYIYLEYVSGGSIHKLLQEYGQLGEQAIRSYTQQILSGLAYLHAKNTVHRDIKGANILVDPSGRVKLADFGMAKHINGQQCPFSFKGSPYWMAPEVIKNSNGCNLAVDIWSLGCTVLEMATSKPPWSQYEGIAAMFKIGNSKELPPIPDHLSEPGKDFIRKCLQRDPSQRPTAMELLQHPFVQKAVSLEKSVLSEPLEHLAVISCRSSAKFXMAAHTRNISSLGLEGQTIYQRRGAKFSSKHXQSTYSNEGFAIPSRSPDDLFASRPTDPDLGQFIRVHQVSQGLQERVVSEADILSPQFGKRLGNVFDLRDKLSPSERFTHHAFVDHVKLNPSLDLTSGSPHLGLKHGN

SEQ ID NO: 5151 - protein, 263 aa, Frankia sp. CcI3
MERVIVTVVPQPPRRCRSSTPCCNAPMATFGAVRRHRERHSTNRSGWLRAAVLGANDGLVSTSSLIVGVAASGASTGAVLTAGIAGLTAGAMSMAAGEYVSVSSQADVERADRAKESAELAADPVAELAELVGIYERRGLPRDLATQVAVTLTERGALEAHLRDELGQSEATRARPVQAAVASAGSFTAGGLVPFLGMSAPAGAGRLMLVVVVTVIGLAVAGILAARAAGMALLRPTLRVVLGGAAAMLVTALVGLITDAAGG

SEQ ID NO: 5152 - protein, 202 aa, Saccharomyces cerevisiae
MATNITWHPNLTYDERKALRKQDGCTIWLTGLSASGKSTIACALEQLLLQKNLSAYRLDGDNIRFGLNKDLGFSEKDRNENIRRISEVSKLFADSCAISITSFISPYRVDRDRARELHKEAGLKFIEIFVDVPLEVAEQRDPKGLYKKAREGVIKEFTGISAPYEAPKAPELHLRTDQKTVEECATIIYEYLISEKIIRKHL

SEQ ID NO: 5153 - protein, 273 aa, Arabidopsis thaliana
MATDSFIKLNPISFNRARFDLRDFAGISPKSISSLCCISPRLISCNHFSPRTLISGENGNILFSKKKIPAFVRCQTSLGIGRNQKWWEKELKPNMKSVTSPQDLVVSLRNAGDKLVVVDFFSPSCGGCKALHPKICKIAEKNPEVEFLQVNYEEHRSLCQSLNIHVLPFFRFYRGSSGRVCSFSCTNATIRKFKEALEKHGREQCSIGETKGLEEKELVAMAANKDLSFDYKPTSCGNIQEQKKKEIFLPKSPTFNKQKEVEHSLLLVSPAPA

SEQ ID NO: 5154 - protein, 537 aa, Leuconostoc mesenteroides subsp. mesenteroides ATCC 8293
MADKQVKYIFVTGGVVSSLGKGIVAASLGRLLKNRGLKLAIQKLDPYINIDPGTMSPYQHGETFVTGDGLETDLDMGHYERFMDINTNMYSNVTTGRIYSEVLAKERRGDYNGGTVQVIPHITNAIKEKMQKAAESTDADAVIVEVGGTVGDIESLPFVEALRQMKSDLGSENVFYIHTSLIIYLAAAGEAKTKPTQHSVAQLRSLGIQPDMIVLRTQRPLEENLKQKISTFTDVNENAVIESRDVETLYEIPLNLQAQGMDDVVLHKLKLDAPKAEMSDWSKMVELIKHPKKTVNVTLVGKYTDLPDAYISVNEALKHAGYAQDADVKINHVKSENVTPENVAELLAGADGVIVPGGFGERGTEGKIQAIRYARENNIPFLGICLGMQLASIEFARHVLGYKDANSTELNPNTSAPIIDLMKDQANVENLGGTLRLGLYPAMLLPGTLTAKAYGNQSEIEQRHRHRYEFNTQYREEFEKAGMLFSATSPDNRLMEVIEYPKNDFFIAAQYHPEFLSRPDRPEGLYHDFVAASIKNS

SEQ ID NO: 5155 - protein, 165 aa, Triticum aestivum
KSTLSLGNYSSIEGVPYCKPHFEQLFKETGSYNKSFQSPAKPASEKLTPELTRSPSKAARMFSGTQEKCATCSKTAYPLEKVTVEGQAYHKSCFKCSHGGCAISPSNYAALEGILYCKHHFSQLFKEKGSYNHLIKCASVKRAEAQPAPPPAAARIPSLNVPYLQ

SEQ ID NO: 5156 - protein, 202 aa, Zea mays
MYHHHFHGEVASLRFLSPPNVSTSFAAHHHMNMALPPPSYFQDDDATLAAIDGGDAACFDELDTIVVVPEADAAAAARCHLTGSNNGGLSDSDQLLDAAVIMAADEERRRRRMVSNRESARRSRMRKQRQLSELWAQVSHLRGANRRLLDDLNRALRSCADARRESARLREEKAELTKKLEQLLQAEKGSLSEAAEPCKSYC

SEQ ID NO: 5157 - protein, 156 aa, Arabidopsis thaliana
TEMATMLRSGGQLIWIAPSGGRDRPNPSTGEWFPAPFDASSVDNMRRLVEHSGAPGHIYPMSLLCYDIMPPPPQVEKEIGEKRLVGFHGTGLSIAPEINFSDVTADCESPNEAKEAYSQALYKSVNEQYEILNSAIKHRRGVEASTSRVSLSQPWN

SEQ ID NO: 5158 - protein, 1051 aa, Oryza sativa
MAAAGGGGDAKYNSYKAAGLRGAILEAAHVSCLEDRYALGPQLGWGQFGVIRSCSDMVTGEALACKSIAKDRLVSPDDVRGVKLEIEVMARLSGHPNVVDLKAVYEDEASVHLVMELCAGGELFHRLEERGCFSEHEAAALFRYLMEVVAHCHSKGIVHRDLKPENILLVSKSPSSPIKLADFGLATYIQPGRSLSGMVGSPFYIAPEVLAGGYNEAADVWSAGVILYILLSGIPPFWGKTKSKIFECIRSTELRFPSDPWDKVSDSAKELITEMLRRDPRQRLTAKQSIPGYKIMPTNPKILVDIAMRSISEERTPAHVRSRRRWRHAAAISSFSAFVAENAPSCALSGFSFGGVCEPCNAVFPSPVASMPSFSFFCGQEPGEPESSPDGDALGEKAHCDATVVALVSSSAPRTAEVLRAAVRANPSRAIGMNSRRNHTIGAGEREHLDVAVAESVIRWASCTNLSTTHSLRASLANGADLRGCTIRRCGREGYGVFSTAAEAGATDEVVMVVPLDLAITPMRVLQDPLVGPRCRALFEEGGVDDRLLVMLFLMVERLRPSSLWKPYLDMLPSTFGSSIWFTEDELAELEGTTLHRATVMQRKSLQTLFDNKVKGLVGELLNVDESGSSIEVRFEDFLWANSIFWTRALNIPLPRFYVFPESLDEKRANIGDDCGDSSLSAPQREEHRIGPFLALKIFHTNREILLLKAYSGLKGTGTAITAKNISGNDNPKSSNTESIWVEGLVPGIDFCNHNVKALATWEVDSMGHVTGCPSSMYLVLADKSFVKAETEICINYGNKGNEELLYLYGFVIDNNPDDYLMVTLSKRLLLATGSHYLIVLQLNIIHYPVEALRQVQSADIKMKLLEIQNAELRCLLPRSLLENGFFGSCSGENKENKNNTSPFSSYSWSGQRKVPSYIEKIVFSQEFISTLRTIALQEHELEHTASLLGEIGSNEDRDDELRSAIWEPFSFARMTELEEGTGTEASDSQLLEKFDLSDSEDATRSDESNETKSKVNIRTCIVYRRGQKQLTKLFLREAEHLLELSSKEEN

SEQ ID NO: 5159 - protein, 310 aa, Nostoc punctiforme PCC 73102
MSIIVFGSINIDLVATTPRLPVPGETLLGEEFFKVSGGKGANQAVALAKLGIPTQMVGRVGADDFGVELVNNLQSSGVQIDNIFVDETVSSGVAIIAVNHAGENQIIVIPGANGRVNQEDVERLSQLLPEATALLLQLEIPITTVIAAATAARKSKIRVILDPAPAQSNFPDELYPLVDIITPNEVEAAQLVGFPVDGEEQAAKAAEVLLQRGVKCAIVKLGAKGVFCATAEEKFFVPVFPVHAVDTVAAGDAFNGGLTAALFAGFSLHQAVVWGAAAGALATTKSGAQTSLPDRFTFDAFLREKASVRD

SEQ ID NO: 5160 - protein, 120 aa, Picea mariana
TDDKRLQSTLKRLGVNSIPAIEEVNIFKDEMVIHFVNPKVQASIQANTWVVSGSPQTKNLQDLLPGIINQLGPDNLINLKKIAQQFQRQEPHTAEEDDDDVPDLVEGETFEEAAKDEPSS

SEQ ID NO: 5161 - protein, 473 aa, Pseudomonas syringae pv. syringae B728a
MTLYVNLAELLGSRIENGFYRPGDRLPSVRALSVEHGVSLSTVQQAYRVLEDHGLAAPKPKSGYFVSVSRKAPALPAVGRPVQRPVDISQWDQVLDLIRVAPLEAVTQLGRGMPDVTSPTLKPLMRALSQLSRHQDMPGLYYDNIYGVRRLREQIARLMLDSGCSLTANDLIVTNGCHEALSASVRAICSPGDIVAVDSPSFFGAMQTLKGVGMKAMEIPTDPLTGISLEALELALEQWPIKVIQLTPNCNNPLGYVMPEARKRALLTLAQRFDVAIIEDDVYGDLAYNYPRPRTIKSFDEDGRVLLCSSFSKTLAPGLRIGWVAPGRYLEQVLHMKYIGTGSTAPQPQLAIADFIEGGHYEPHVRRMRSQYQRSRDQMIDWVMRYFPEGTRASRPQGGFMLWVELAEGFDTLRLNRALLGKGVQIAVGSIFSASGKYRNCMRMNFATKPSREIESAVRIVGETIALLNAQTD

SEQ ID NO: 5162 - protein, 727 aa, Zea mays
  misc_feature (409)..(409): Xaa can be any naturally occurring amino acid
  unsure (1)..(727): unsure at all Xaa locations
MGEVSDDNSNMSFLKRIATSDVPLLKEYGVNGVVVALLLAVVTPVLLSMMFGKKTKQRAVRADVGGEEGFAMRNNRFSSLVEVPWEGATTMSALFEMASKKYSRRRCLGTRKLIKREFMESSDGRKFEKLHLGEYEWDTYTEAFNRACNFSSGLIKMGHDLDSHAAIFSDTRAEWIIAAQGCFRQNLTVVTIYASLGEDALVHSLNETQVSTLICDSKQLKKIPAISSKLQSLRRIIYIEDEPVEAETLNQVKHLTTLSFTEVEELGKTSHVDARLPSGSDTAVIMYTSGSTGLPKGVMITHGNMVATTAAVMTIVPNLGMNDVYLAYLPLAHVFELAGETVMLASGSAIGYGSALTMTDTSNKIKKGTKGDVSVLNPTLMISVPAILDRIRDAVFKKVGEKGGLTKKXLFDFSYKRNIAAIEGSWFGSWAPERMLWDHIIYKPIRAMLGGRLRFVLCGGAPLSSDTQRFMNICLGVPVGQGYGLTETCAGAAFTEWDDTSVGRVGPPLPCCYVKLVSWEEGGYKISDSPMPRGEVAVGGHSITKGYFNNEAKTNEVYKVDERGIRWFYTGDIGQFHPDGCLEIIDRKKDIVKLQHGEYVSLGKVESALATSNYVENIMVYADPFHNYCVALVVPAHQALEKWAQNSGMNYEGFGELCQNDRAIKEVQQSLSKAAKAARLEKFEVPAKIVLLPEPWTPESGLVTAALKLKREQIKAKFKGDLDKLYH

SEQ ID NO: 5163 - protein, 226 aa, Brassica napus
AVRDLCTKHNVLMIADEVQSGLARSGKMLACDWEEIRPSMVTSGKALGGGVVPVSAVLADKNVMLHIKPGQHGSTFGGNPLASAVAMASLDVIEEEKLVERSASRGDELRIQLNEIKEKFPDYIKEVRGRGLFNAVEFNSESLSPVSAYDICLSLKERGVLAKPTHNTIVRLTPPLSISSDELREGSKALRDVLEVDLPNLQKINAGKTPVSHLTECDRCGRSLYA

SEQ ID NO: 5164 - protein, 256 aa, Zea mays
MKRGAWTAKEDDTLAAYVKAHGEGKWREVPQKAGLRRCGKSCRLRWLNYLRPNIKRGNISYDEEDLIVRLHKLLGNRWSLIAGRLPGRTDNEIKNYWNSTLGRRAGAGAGGSRVVFAPDTGSHATPAAAGSHEMTGGQKGAAPRADLGSPGSAAVVWAPKAARCTGGLFFHRDTPHAGETETPTPMMMAGGGGGEARSSDDCSSAASVSPLVGSSQHDPCFSGDGDGDWMDDVRALASFLESDEEWLRCHTAEQLV

SEQ ID NO: 5165 - protein, 159 aa, Pseudomonas stutzeri
HALQDAGYPADEANGLAEQAFQVFLDARHEVQIFPDVQPTLEFLANHYTLGVITNGNADVRRLGLADYFQFTLCAEDLGVGKPDPHPFQQALRLGDARPEQAVHIGDHALDDIAGAQQAGLRAVWFNPKRIAWAHDYQPDAEIQRLADLPKLLLAWRDN

SEQ ID NO: 5166 - protein, 738 aa, Yarrowia lipolytica CLIB122
MSYPDRRASFGSSPRQSAIQRLGTPVQVGSPNSNPGSVTGSFKDSMRESMKRFEEQADANKNVEEVTFNKRTPEEQHKNGSDSSKGGLKGLMDKGKEKDDASNKTDSNTNTTTKTTPSNSSKNNSNTKTNNNSNSNSSNDTKKDQSASPANPPNPADADTQSIHSVDIDNPNPEVVKAVGRHLVSDDKTRNYGATESENFDSLKLQGGDITRQLYKWQKEHEEGGLKRSKSFDAGEGASSSATQELGQDINSIKAPGGFRRNFIAQKVQQENGQDKPPTFLTRNFIEFLSIYGHFAGEELEEDDDDDDDDDYDGDDEVDENDYDEETPLRRRARKQRGAKPGHPPQGNASATKAVMLLLKSFVGTGVLFLPKAFFNGGLLFSACVLTMVAALSYWCFLLLIQCRMKTGVSSFGDIGGALYGPKMRSLILFSIVISQIGFAAAYIVFTSENLQAFILSVTKGETFVKIETLIFLQLIIFLPLSMIRDIAKLSGTALIADLFILLGLVYLYYWSGMIVATEGVADVKMFNPNSWSLFLGTAIFTFEGIGLIIPIQESMKKPEQFTPVLAGVMVGITALFVSMGAICYMAFGSEVKTVVISNLPQDSKFVNGVQILYSAAILLSTPLQLFPAIRIIENGLFTRSGKYNSTIKWQKNIFRFFLVFVTAFVAWGGADDLDRFVALTGSFACVPLVYIYPPLLHYKGVARGTTARTADVCIFIFGLCAMGYTTANTVGSWIGGN

SEQ ID NO: 5167 - protein, 559 aa, Ostreococcus tauri
MSVASTSAAAKGRTLVWFRKALRVHDNPALSRGTLHATACQPVFVLDPWFCQPSRVGANRMRFLLQSLRDLDAQLRARGSSLLVLHGEPRVVLPRACKKWRVDSVTWEHDIEPYAKIRDAAVRGALERAGVECHAASGHTLYDVDEMLEKCKGAPPTTYQGFFKIVDKMGAPNAPIDAMEKMPGSFASSDEETKALVQGVADAYGIPTLEDLGYEPLGDDEGFPGVGGETEGLRRLRLMLARKEWIGQFEKPSTNPTTRFHGLSQSGKTKPKSPFEIAAGRSKDGDASTSGAEALMIPSTTALSPYMKFGCVSPRVFYHELTAVYKELEGKHSKPPTSLMGQLMWREFYYLVAAGTKNFDKMEGNAICRQIPWKKDRELFAAWENAQTGFPWIDAAMTQLRREGWLHHLARHAVACFLTRGDLFIHWEWGRDAFDRDLVDADWALNNGNWMWLSCSAFFYQYFRVYSPIAFAKKYDKDGQYVRHYLPVLKNMPSKYVYEPWLAPLDVQKKAGCVVGVDYPAPIVDHSAASKRCVDDIATAYAAHKDANAVAGKKRKASD

SEQ ID NO: 5168 - protein, 281 aa, Ralstonia eutropha JMP134
MHYATNEVAVPLAERAYRIRRNALLMGEVQGQGYIGQALDIADVLAVAYFGAMRYRAEEPDWEGRDRFLLSNGHYAIALYAALLEAGILPMEELETYGSDDSRLPMSGMASYTPGMEMSGGSLGQGLTIAVGRCLGLKRKGSDAFVYTLFSDGELDEGAIWEGIQSASHWKLDNLIGIVDVNNQQADGPSSQIMAFEPLVEKLQAFGWFTQRVDGNDIDAVAAAFDTARKHPGEQPRMIVCDTRMGCGVPFLEQREKNHFIRVDAHEWQLALQALEAGRQA

SEQ ID NO: 5169 - protein, 548 aa, Ostreococcus tauri
TRVFASKRYEPENAEADERASVEMAVRGVELVRTRGFLLFEPSEVRIDVAARDGYFGTLMPFVHAAERTCGDPGKPKPAPVDVRMVDLGTESDHEWEQIGLEDLGVAPASDRRVDWSAGIRADWDISEGGAVETWSQFTAVGLDRFEAEHGRADPEAGVTVSRLSPYLRFGMISPRTVYHDLVKKDGKNISKTFWHRLYRRELAYWQLHHWPDLPKTSVRSHYENRAWLSGDEADEALRRWQRGETGFPVVDCGMRRLWRTGWMHQTERMITATFLVDYLGVHWTRGADWFMRTLVDADEAINSMMWQNAGKSGLDQWDFFEGTLAPDGSARAHDPHGDAIARWIPELAALPRGYLRHRPWEASKATLAECDVELGSTYPRRMIVDLDRARQRMLDDVTTIRHAELVRAGGLVKPGSMEDLVVAPRAAVVRGAADLARVSTRKEFKRSLKALKASIAGIDLPSNPSSKPHGKSRANASRPKVSAASRPKSGPRSGRLPAPDRDAVRASRREAKRLDAAFRGRVFHHLPVDDLDDRDAAPPRVGRRPAR

SEQ ID NO: 5170 - protein, 468 aa, Pseudomonas putida KT2440
MTQTSPIATDEPHLQRNLTNRHIQLIAIGGAIGTGLFMGSGKTISLAGPSIIFVYMIIGFMLFFVMRAMGELLLSNLNYKSFIDFSADLLGPWAGYFTGWTYWFCWVVTGIADVVAIAAYTQFWFPDLPQWIPALTCVGLLLSLNLVTVKMFGELEFWFALVKIVAILGLVATGLYMVITGFTSPSGRTAQLANLWNDGGMFPHGLMGFFAGFQIAVFAFVGIELVGTTAAEAKNPERTLPRAINSIPIRIIVFYVLALIAIMAVTPWRDVVPGKSPFVELFVLAGLPAAASIINFVVLTSAASSANSGVFSTSRMLYGLSQEGDAPKAFEKLSSRSVPANGLYFSCTCLLLGAVLIYLVPNVVEAFTLVTTVSAVLFMFVWTLILLSYLKYRKDRAALHQASNYKMPGGRFMCYVCLSFFAFILVLLSLEADTRSALVVTPIWFVVLAVTYQLVRSRRHPRTAVRNG

SEQ ID NO: 5171 - protein, 173 aa, Mesorhizobium loti MAFF303099
MTIRDLMPWGRDTSQSPTLFREGDRDPFMGLHREMSRLVDDMFRGFESRLPSMGRFSLAGTGWPSVEISETDKDIRVTAEIPGMEEKDIEVLLDDGVLTLRGEKHSETDDKERQFSERFYGRFERRIPIGFEVAEDKVAADFRNGVLSVSLPKSEKAQSKAKRIPIGGKSTKH

SEQ ID NO: 5172 - protein, 461 aa, Magnaporthe grisea 70-15
MASKGAFEVQAIPAPGIMEANRRADIRAELVGGLGWSTSPNCTSCGKEQTLAAQGRALGTADSWHGKITAEGPFTPEVGRYRLYIGLFCPYAHRANLIRHLKGLKDIIPLTTVKPYPKGNDKGYPGWQFPATADEYPGSDLDPLFGAKYLHELYFKDDPDYKGVYSVPLLWDTKTNAAVNNESLELLRDLQTSFNSLLPEGSAERELTVYPDDLRPQIDEVSAWLLPHLCNGVYRAGFNSTQEGYDASVPFVFAALNKLERLIRSNGGPYILGSRLTELDITAYATVVRFDTIYVQHFKCNLGTVRHDYPQVNNWLKNLYWNVPGFRETTDFRHIKENYTKSHASINPLAITPMGPWPEVEEGYESDLSKSTCTAAALSGTQPASMTSLASSDLPPAPVVDVVVAHVGHGAPQVDEDGRAARELLPGVAHAAKEVTRTRIALEALQLGTLSRASHQQRRRE

SEQ ID NO: 5173 - protein, 230 aa, Brassica napus
  misc_feature (202)..(202): Xaa can be any naturally occurring amino acid
  unsure (1)..(230): unsure at all Xaa locations
MELITLMNPILALLVLLFVVPKMYNALIILVWQPFVLTRRFKKQGISGPKYRFLYGNIDEINKMKTESHLSVLDPISHDIFPRIFPHYQQWMSLYGETFLYWDGTEPRLCISDPELVKHVLSSKSGFFVRAKIRPELLKLVGRKGLVFLQGADWVRHRRILNPAFSIDRLKVMTKVVVECTLRMLDEWSDVKREQKMEMNTXFRRLTADIIATAAFGSSYNEGIRSVLGH

SEQ ID NO: 5174 - protein, 401 aa, Glycine max
MTLQAFHGSACCFRSHLLHFSSSTASSPPFLASRRFQSCPSTRKSLKLNCSSSGNNGDQDYLLDAPVSVGDGFSFSGGKYSDGPSPSDEWFKQGKKVKAYSIPGTGEKAKDPIFGLAMGSGSQATGDRFRWFCVESGSADNPSVILIHGFPSQAYSYRKVLPVLSKDYHVIAFDWLGFGFSDKPQPRYGFDYTLDEYVSSLESLIDELAATKVSLVVQGYFSPVVAKYASIHQEKVRNLILLNPPLTAQHAKLPPTLSIFSNFLLGEIFSQDPLRASDKALTSCGPYKMKEEDAMVYRRPYLTSGSSGFALNAISRNMNKDLKRYVEDMQTILKDKNWKVQTTICWGQRDRWLSYDGVEDFCKDSNHKLIDVPTAGHHVQEDCGEEVGQLIRGIISKRTKI

SEQ ID NO: 5175 - protein, 491 aa, Zea mays
MDPYKHRPSSAFNAPYWTTNSGAPVWNNDSSLTVGARGPILLEDYHCEKLANFDRERIPERVVHARGASAKGFFEVTHDITHLTCADFLRAPGVQTPVIVRFSTVIHERGSPETLRDPRGFAVKFYTREGNWDLVGNNFPVFFIRDGIKFPDMVHALKPNPRTHIQDNWRILDFFSHHPESLHMFSFLFDDVGIPADYRHMDGSGVHTYTLVSRAGTVTYVKFHWRPTCGVRSLMDDEAVRCGANHSHATKDLTDAIAAGNFPEWTLYIQTMDPEMEDRLDDLDPLDVTKTWPEDRFPLQPVGRLVLNRNIDNFFAENEQLAFCPGLIVPGIYYSDDKLLQTRIFSYSDTQRHRLGPNYLLLPANAPKCAHHNNHYDGSMNFMHRHEEVDYFPSRYDAVRNAPRYPIPTAHIAGRREKTVISKENNFKQPGERYRAMDPARQERFITRWVDALSDPRLTHEIRTIWLSNWSQADRSLGQKLASRLSAKPSM

SEQ ID NO: 5176 - protein, 589 aa, Populus balsamifera subsp. trichocarpa x Populus deltoides
MESTLKEMRDGASVLDMDPKSTVGGGVEDVYGEDRATEDQLVTPWTISVASGYTLLRDPHHNKGLAFTEKERDAHYLRGLLPPTTISQQLQEKKLMNTIRQYQLPLQKYTAMMELEERNERLFYKLLIDNVEELLPVVYTPTVGEACQKYGSIFKRPQGLYISLKEKGKVLDVLKNWPQKSIQVIVVTDGERILGLGDLGCQGIGIPVGKLSLYTALGGVRPSACLPVTIDVGTNNEQLLKDEFYIGLRQRRATGQEYSELLHEFMTAVKQNYGEKVLIQFEDFANHNAFDLLAKYGTTHLVFNDDIQGTAAVVLAGLISALKLIGGSLADHTFLFLGAGEAGTGIAELIALEMSRRSKTPLEETRKKIWLTDSKGLIVSSRKESLQHFKKPWAHEHEPVKGLLEVVKAIKPLVLIGTSGVGKTFTKEVIEAMASFNEKPLILALSNPTSQSECTAEEAYTWGKGKAIFASGSPFDPVEYEGKVFVPGQSNNAYIFPGLGLVISGAIRVHDDMLLAAAEALAGQIKEEYLAKGLIYPPLSNIRKISVQIAANVAAKAYELGLATRLPRPENLVKHAESCMYSPAYRYYR

SEQ ID NO: 5177 - protein, 434 aa, Crocosphaera watsonii WH 8501
MIVNSSQSLLLKETAEKTSQAARKLGGLSTGDRNQAIEAIATALENASADIIKANEIDCEIAEKEGISRPLYNRLKLGKTKLEATIKGVRDVINLSDPVGHISIHRELDEGLILKRLSCPLGVLGIIFEARPEALIQITSLAIKSGNGVILKGGKEALNSCKTLVKIIREALSKTKVSPDTVQLLTTREEIRNLLELDEYIDLIIPRGSNEFVRFIQQNTNIPVLGHADGICHLYVDKEAELDTAIAVAVDAKTQYPAACNAIETLLIHQDIAREFLPKIAQGLTSHEVQLKGDQLTQTYLDIEAATEEDWKTEYSDLILSIKVVDSLEAAINHINTYGSKHTDAIITEDKNSAEIFMNQVDAAGVYHNCSTRFADGFRYGFGAEVGISTQKMPPRGPVGLEGLVTYKYQVIGNGHIAATYAGENAKPFTHKDV

SEQ ID NO: 5178 - protein, 455 aa, Hordeum vulgare subsp. vulgare
MAPPPPHIAVVAFPFSSHAAVLFSFARALAAAAPAGTSLSFLTTADNAAQLRKAGALPGNLRFVEVPDGVPPGETSCLSPPRRMDLFMAAAEAGGVRVGLEAACASAGGARVSCVVGDAFVWTADAASAAGAPWVAVWTAASCALLAHLRTDALRRDVGDQAASRADELLVAHAGLGGYRVRDLPDGVVSGDFNYVISLLVHRQAQRLPKAATAVALNTFPGLDPPDLIAALAAELPNCLPLGPYHLLPGAEPTADTNEAPADPHGCLAWLDRRPARSVAYVSFGTNATARPDELQELAAGLEASGAPFLWSLRGVVAAAPRGFLERAPGLVVPWAPQVGVLRHAAVGAFVTHAGWASVMEGVSSGVPMACRPFFGDQTMNARSVASVWGFGTAFDGPMTRGAVANAVATLLRGEDGERMRAKAQELQAMVGKAFEPDGGCRKNFDEFVEIVCRV

SEQ ID NO: 5179 - protein, 241 aa, Oryza sativa
MGGEAERCALCGAAAAVHCEADAAFLCAACDAKVHGANFLASRHHRRRVAAGAVVVVEVEEEEGYESGASAASSTSCVSTADSDVAASAAARRGRRRRPRAAARPRAEVVLEGWGKRMGLAAGAARRRAAAAGRALRACGGDVAAARVPLRVAMAAALWWEVAAHRVSGVSGAGHADALRRLEACAHVPARLLTAVASSMARARARRRAAADNEEGWDECSCSEAPNALGGPHVSDTARQK

SEQ ID NO: 5180 - protein, 512 aa, Trametes villosa
MSFSSLRRALVFLGACSSALASIGPVTELDIVNKVIAPDGVARDTVLAGGTFPGPLITGKKGDNFRINVVDKLVNQTMLTSTTIHWHGMFQHTTNWADGPAFVTQCPITTGDDFLYNFRVPDQTGTYWYHSHLALQYCDGLRGPLVIYDPHDPQAYLYDVDDESTVITLADWYHTPAPLLPPAATLINGLGRWPGNPTADLAVIEVQHGKRYRFRLVSTSCDPNYNFTIDGHTMTIIEADGQNTQPHQVDGLQIFAAQRYSFVLNANQAVNNYWIRANPNRANTTGFANGINSAILRYKGAPIKEPTTNQTTIRNFLWETDLHPLTDPRAPGLPFKGGVDHALNLNLTFNGSEFFINDAPFVPPTVPVLLQILNGTLDANDLLPPGSVYNLPPDSTIELSIPGGVTGGPHPFHLHGHAFSVVRSAGSTEYNYANPVKRDTVSIGLAGDNVTVRFVTDNPGPWFLHCHIDFHLQAGLAIVFAEDAQDTKLVNPVPEDWNKLCPTFDKAMNITV

SEQ ID NO: 5181 - protein, 351 aa, Nostoc punctiforme PCC 73102
MSNSTPMDDEKNLPKKKGRTLPPKLIIWLGKFVWTTMWQIMMSKLAPSNQSGAYIRPNSQFRKFIGTEEGNPHPPAAGRYRLYVGLGCPWAHRTLVVRSLKKLEAVISVCIVSPSPIEGGWIFNEEEEGCRTLAEFYQLAEPGYSGRSTVPILWDNQTKTIVNNESSEIIVMLNSEFNEFANNPTLNLYPEALKEKIDWWNEKIYHAVNNGVYRCGFAQTQEAYNQACNELFGTLDEIDIALQTSRYLCGDNLTLADVRLFTTLFRFDSAYYGLFKCNRQRIRDYHNLGAYLRDLYQLPGVADTCDVESVKRDYYGNLFPLNPGGIIPDGPDMSYLYEPSGRDRIGTLNAS

SEQ ID NO: 5182 - protein, 212 aa, Helicobacter hepaticus ATCC 51449
MKLHNDYRLLTPRINRDKQSFLARVIITLKTSFSLDLFSGLKTALGAFFSPKVTIHYPLESAPLSPRYRAIHKLQRLLESENERCIGCGLCEKICTSNCIRIITDKGEDGRKKILNYSINFGRCIYCGLCAEVCPELAIVHGDLVENASTQRAFFGFKPQLLEHKSSLLEFGGFGSISVNADERVKTTPLSYCTQDSQNMLSESAPQENTNV

SEQ ID NO: 5183 - protein, 172 aa, Glycine max
  misc_feature (72)..(72): Xaa can be any naturally occurring amino acid
  misc_feature (97)..(97): Xaa can be any naturally occurring amino acid
  misc_feature (108)..(108): Xaa can be any naturally occurring amino acid
  misc_feature (146)..(146): Xaa can be any naturally occurring amino acid
  unsure (1)..(172): unsure at all Xaa locations
LHRPAYASPMDNKDACAVTYHGERGSREGDCHAALKFAPFLEAPDIFICQSHAWAITTPIAEHLTNCMEANXKAVHHGDRILRVDGNDALALYRAVXRAARQMSITEXRPIRRETLTYRDGRHTTSDDSTDYLPTNDIEGWRVARXPVVRYRKCDHTHGWRNDMAETELMTI

SEQ ID NO: 5184 - protein, 1021 aa, Actinoplanes sp. 50/110
MDERLKSHIVRALLPVLVGAAGGLPAPRAAQAESPPDRPSHAEQLYLVMPDRFANGDTGNDQGGLTGDRLTTGYDPTDAGFYHGGDIQGVIDKLDYIQGLGTTAIWLTPIFKNKPVQGTGPNASAGYHGYWITDFTQVDPHFGTNEDLKRLVGLAHRRGMKIYLDIVVNHTADVIKNAEGTAYADKGTAPYRDTAGRPFEDRNYADGTHGFPKVDEKSFPHRPFFEKPSDATAKAPAWLNDPTMYHNRGETTFGGENAEYGDFTGGLDDLWTERPEVLHGLTDIYAGWIRRFGVDGYRLDTLKATDLAFWRPFAEGVGKAADKAGKRDFFLFGEAWSKDQEVTSTFVRRGGLPATLDFPFQGAAQSYARGQGTGQQPWQDLYAKDDLYSRRPGPTPAGCHLGEWNHDMGRIATLIKAGSDPKRGCRLELVNELMFLTRGQPGGLLRADEQGFTGRPRLNKGSRQDMFASRTPDYLDDRLIGTDKTHASDNHDTGHPLYRTIAELGAVRKAHPGLRDGEQITRYAADRAGVFAASRIDRDQRAEYVIAVNNATTAQTVTFDTYTPGCGFQPLYGTGETAATGADGRLTITVPALSAVAYRAEKPIPAADGAPAVTITAPAGRDPRAGPHRTDRAVTGDPLSTVTFSARAGNGPWQPIGTAGRGPYRVFHDLTGLAGGAEVQYRRSPGTPRPYRHHHQPDPVGTVRAEAGYAVVHYQRPAGDYDGWRLHATGERSKRPRSNPQGEPFTGNGTPNGPFAWVKLRPGATKVTFTVSDANGVKDVDADRSLNPQQTPGIWLHQGDPAISYQGPAPAPAPNTAILHYRRPAGDYTGWGLHLWDGAATPTADWGAPLLPESFDSFGAVFRIPLAAGATGLSYIMHAGEAKDLPTDQRLEFADAGREVWVQAGVQERLLPSVVKPAKLDLTRADAVRVDRDTIAWQTGTPDTLEPAGAATDGRVYDLVHAPNGGLRLVDGDLAGDYRSIRLTAQRDGLTEKQRRQAPELWQYPAFQAAAPCPPVTDSSM

SEQ ID NO: 5185 - protein, 922 aa, Oryza sativa
MAASTSQHALVSVKSLCTGANFGFEKRTSKVRFVLVGRCCSGTRKLGLVCASNSHSSVMEPAQLPLSPESGNTPKKSSESALILIRHGESLWNEKNLFTGCVDVPLTPKGVDEAIEAGKRICNIPVDVIYTSSLIRAQMTAMLAMMQHRRKKVPIVVHSESEQAHRWSKIYSEETKKQSIPVITAWQLNERMYGELQGLNKQETADRFGKEQVHEWRRSYDIPPPNGESLEMCAERAVAYFKDQIVPQLVAGKHVMIAAHGNSLRSIIMHLDKLTSQEVISLELSTGIPMLYIFKEGKFIRRGSPAGPSEAGVYAYTRALFPPASEEFSSVEHTVYPPICHKEVAKHTIHWMSNHNSPCDIPKPASVDEFVKNGKKKKSFMSSIFRKKGRSGTGSSDKKLLSRRDIVFDRHCATKIESLTLSCLDSPHRQFDTREYRVFVGTWNVAGKPPNSSLNLEDFLQIEGLPDIYVLGFQEIVPLNAGNVLVIEDNEPAAKWLGLIYQALNKPQDQSSGDELSPPETSDSRQGGGSGSRDSIPKSSSGGMLFFQKPSLKMLSKNYRVDSALVKTCTCLTDPSTMQRRAREMREFLYRIEASPPPSLASAAAAADEDGGPDAGGELARSSVNYCLIASKQMVGIFLSVWVRRELVQYIGHLRVDSVGRGIMGRLGNKVLDAVLLCLCSLFGSLDSWRRHGWLSCLQGCIAMSMTLHQTSVCFVCSHLASGEKEGDEVRRNSDVAEIIKSTQFPRICKVPGQRIPDKILDHDRVIWLGDLNYRVALSYDETKTLMGENDWDTLLEKDQLMIERQAGRVFKGWKEGKIYFAPTYKYKQNSDSYAGETAKSKKKRRTPAWCDRILWHGQGIEQLQYIRGESRFSDHRPVCSVFVIEADVDNGSMIRKGYSTLDSRIHFESPIPQRHSFYDDF

SEQ ID NO: 5186 - protein, 314 aa, Streptomyces avermitilis MA-4680
MNAPGAGALLVVGDVVTDVVARHRGPLASGTDTAAAIRTVPGGAGANVACWAAHWGWADVRLLGRVGADGAAWHERELTASGVRPRLVVDPDVPTGTVICLVDTGASAERTFLTDSGASLRLAPGDWSNALLDGVVRLHLSGYLLFSEQSRALVAAALESARARGVPVSLDPASAGFLAELGVDRFLALIEGVDVLLPSRDEACLLTGLPDPADAAAKLSRHVPLVVAKQGAEGALVAEAGAVRARVPATPATPRDTTGAGDAFTGAFLAALLVGVEPAQAAAEGCRAGAAAVAGVGGRPPSGTRQNRGAVKLD

SEQ ID NO: 5187 - protein, 156 aa, Brassica oleracea var. acephala
AQTNWSVEYSRLKAKIELLERNQRHYLGEDLESISIKELQNLEQQLDTSLKHIRSRKNQLMHESLNHLQRKEKEILEENSMLAKQIKERESILRTHQNQSEQQNRSHHVAPQPQPQLNPYMASSPFLNMGGMYQGEYPTAVRRNRLDLTLEPIYNC

SEQ ID NO: 5188 - protein, 392 aa, Silicibacter sp. TM1040
MKQAVIVSTARTGLAKSYRGAFNDTHGAQMAGHAIEHAVARSKVDPALIEDAFIGCGYPEGWTGGNIARQAVVRAGLPVTVAAATVNRFCSSGLQALAMASHAVTMEGASAAIAGGVESISQMPPSRPAQRRDAWIEANKPDVYMTMIETADVVAKRYGVSREAQDELALQSQMRTAAAQAAGKFDDEIVPITVTQKLTDKETKEVSYKEVAFAMDDCNRPGTTLEGLAGLKPVRGEEHFVTAGNASQLSDGAAALVVMDADLAAKQGLEPLGALKGFVTAGCEPDEMGIGPVFAVPRLLERHGLKVSDIDLWELNEAFASQALYCRDRLEIDPEICNVNGGSISIGHPFGMTGARMSGHLLLEGKRRGAKLGVVTMCIGGGQGAAGLFEIF

SEQ ID NO: 5189 - protein, 724 aa, Actinoplanes sp. 50/110
MQRHARHAIAAAVGFPLLPPSLPAHAAGASAVVPYAGNPASLKQDLCYQIATDRFSDGTPANNNPGNVPGMFADKTKLNDRQEWLKYMGGDFAGITQRMEYLKNLGVGAIWISPHVDNINVPANGATGYHGYWPRDFKRLEEHFGTDEEFDALVSAAHASNIKVIMDWTPNGTNPPNQAEDGALYDDGQLVGRYGADSAGHFHHGPAIGDFNDRYQDQYYSLADIADLDQQNPRVDQLLKDDANYWMDRGVDGIRVDAVKHMPLSWQRSFADAVTSHKSAAIFGEWYMGDQSDPLYADQVKFANTSGIAAMDFYTNRSIRDTFAGAGSMKSLDAAITKTNRDYLYEQDLITFLDNQDTRRFGTLNSDPAALHRALAFLLTTRGTPCLFYGTEQYLHNDTGEGSNKGKDPYNRPPMASFDTDTVAYREIRRPLRPAPVEPRGGYGDHQQRWINDDVYVYERRFGDNVLLTAINKGSHEYRLERAGTALPAGTYRDVLGGTFGGSDLTVEDGDGTDRSTVAPVLGAGQVAVWSYRAPVDTEPRIGGVGPVVTRAGATVTVEGTGFGSGGTVAIGGVPATVQQWTADRITATVPVGVPTGAVQVTVGNGSGTSNGYPITTRTGKPVPVQFTVQNPPATAPGESLYLTGDVAELGHWSTSPDQTAGQLLRVPNESRGVLVADLPAGAPVEFKFVKVAADGTVTWEGGANHRYTVPAGGTGTTSLTWQR

SEQ ID NO: 5190 - protein, 228 aa, Staphylococcus epidermidis ATCC 12228
MPKLILCRHGQSEWNAKNLFTGWADVKLSKQGIEEAQSAGKKIYDNQIEIDIAFTSLLTRALETTQYILAGSDQQWIPVYKSWRLNERHYGGLQGLNKDDARKKWGEDQVHQWRRSYDVRPPRESEEQREAYLKNRRYQHIDHRMMPYCESLKDTLERVVPFWTDHISQHLLDDKTVLVSAHGNSIRALIKYLEGLSEEDIVGYEIKTGAPLVYELTDDLVVKDKYYL

SEQ ID NO: 5191 - protein, 464 aa, Bacillus halodurans C-125
MDRKETAKLMENVMTELSEKEGFLGIEDDEKRKRIVLSAQEILTTTDKIIKSYIRVSTEHGIMRIPAYRVQHNNISGFYKGGIRFSEFVSEEEVENLAILMTLKNALHRLPFGGAKGGVHVDPRKYSEKELNLISKKYVQRFARDLGPNHDIPAPDLGTNEQVIDWMVGEFKTIHPGQAYLGSFTGKSVENGGARGRREATGKGTFLSYIWLLSQWYDEHVSGNGINRTKQWETISNLKQQADNSDPIRVAVQGFGNVGSVAALEAYQCSEIAHRVVAVSDRYTTLYNEKGLDVRALAAYTIGGKDLPKNSEELAAAGVEASVLPVDAVLTCETDVLILAAIENQIHERNMKQVNARVLVEGANAPISTEADDYFEAAGTVVIPDILANAGGVIVSYLEWKQSRITELYSEDDILDEMGTQMKETLKSVYERYFSSVGHTLRFTCFTLALERLTSLLYKHGKLY

SEQ ID NO: 5192 - protein, 228 aa, Fusobacterium nucleatum subsp. nucleatum ATCC 25586
MKLVLIRHGESAWNLENRFTGWKDVDLSPKGMEEAKSAGKILKEMNLVFDVAYTSYLKRAIKTLNIVLEEMDELYIPVYKSWRLNERHYGALQGLNKAETAKKYGDEQVHIWRRSFDVAPPSIDKNSEYYPKSDRRYADLADSDIPLGESLKDTIARVLPYWHSDISKSLQEEKNVIVAAHGNSLRALIKYLLNISNEDILNLNLVTGKPMVFEIDKDLKVLSSPELF

SEQ ID NO: 5193 - protein, 345 aa, Idiomarina loihiensis L2TR
MSLYEHPEFDHHEQVVFCHDQESGLKAIIAIHDTTLGPSLGGTRLWNYASSAEAVTDVLRLSRGMTYKSAMAGLPLGGGKAVIIGDAKKIKSEELFRAYGRFIESLSGRYITAEDVNIRTEDIGMVAKETSYVAGTADKAGDPSPHTALGTYLGLKAAAKHKLGSEDLKGVKIAIQGLGAVGYDFAKYCAEDGAELIVTDINEEAIERAVKELGAKAVGLDEIYGVDADVYAPCALGATINDETLKQLKVKIIAGSANNQLANPKHDKAVKDMGILYAPDYVINAGGVIHICSEAANFTVEETEKRVRGIYDTLDQLFARAQDEDRPTGTVADEMAREIIAKGKQ

SEQ ID NO: 5194 - protein, 448 aa, Lycopersicon esculentum
MGKEKIHISIVVIGHVDSGKSTTTGHLIYKLGGIDKRVIERFEKEAAEMNKRSFKYAWVLDKLKAERERGITIDIALWKFETTKYYCTVIDAPGHRDFIKNMITGTSQADCAVLIIDSTTGGFEAGISKDGQTREHALLAFTLGVKQMICCCNKMDATTPKYSKARYDEIVKEVSSYLKKVGYNPDKIPFVPISGFEGDNMIERSTNLDWYKGPTLLEALDQINEPKRPSDKPLRLPLQDVYKIGGIGTVPVGRVETGVIKPGMVVTFGPTGLTTEVKSVEMHHEALQEALPGDNVGFNVKNVAVKDLKRGYVASNSKDDPAKGAASFTAQVIIMNHPGQIGNGYAPVLDCHTSHIAVKFAEILTKIDRRSGKELEKEPKFLKNGDAGMVKMIPTKPMVVETFAEYPPLGRFAVRDMRQTVAVGVVKNVDKKDPTGAKVTKAAQKKGK

SEQ ID NO: 5195 - protein, 170 aa, Zea mays
MAPTVMMASSATAVAPFQGLKSTASLPVARRSSRSLGNVSNGGRIRCMQVWPAYGNKKFETLSYLPPLSTDDLLKQVDYLLRNGWIPCLEFSKVGFVYRENSTSPCYYDGRYWTMWKLPMFGCNDATQVYKELQEAIKSYPDAFHRVIGFDNIKQTQCVSFIAYKPPGSD

SEQ ID NO: 5196 - protein, 599 aa, Pichia pastoris
MLKDQFLLWVALIASVPVSGVMAAPSESGHNTVEKRDAKNVVGVRQLDFSVLRGDSFESASSENVPRLVRRDDTLEAELINQQSFYLSRLKVGSHQADIGILVDTGSSDLWVMDSVNPYCSSRSRVKRDIHDEKIAEWDPINLKKNETSQNKNFWDWLVGTSTSSPSTATATGSGSGSGSGSGSGSAATAVSVSSAQATLDCSTYGTFDHADSSTFHDNNTDFFISYADTTFASGIWGYDDVIIDGIEVKELSFAVADMTNSSIGVLGIGLKGLESTYASASSVSEMYQYDNLPAKMVTDGLINKNAYSLYLNSKDASSGSILFGGVDHEKYSGQLLTVPVINTLASSGYREAIRLQITLNGIDVKKGSDQGTLLQGRFAALLDSGATLTYAPSSVLNSIGRNLGGSYDSSRQAYTIRCVSASDTTSLVFNFGGATVEVSLYDLQIATYYTGGSATQCLIGIFSSGSDEFVLGDTFLRSAYVVYDLDGLEVSLAQANFNETDSDVEAITSSVPSATRASGYSSTWSGSASGTVYTSVQMESGAASSSNSSGSNMGSSSSSSSSSSSTSSGDEEGGSSANRVPFSYLSLCLVVILGVCIV

SEQ ID NO: 5197 - protein, 177 aa, Lemna gibba
MASSMMASTAAVARAGPAQSNMVAPFNGLRSSVAFPATRKANKNLSTLPSNGGKVSCMQVWPPEGLKKFETLSYLPPLSVEDLAKEVDYLLRNDWVPCIEFSKEGFVYRENHASPGYYDGRYWTMWKLPMFGCTDASQVIAEVEEAKKAYPEYFVRIIGFDNKRQVQCISFIAYKPT

SEQ ID NO: 5198 - protein, 426 aa, Ralstonia solanacearum [sequence omitted]

SEQ ID NO: 5199 - protein, 334 aa, Arabidopsis thaliana
  misc_feature (221)..(221): Xaa can be any naturally occurring amino acid
  unsure (1)..(334): unsure at all Xaa locations
FYYLYNVTPGRLVPESLGKTWGILPSDRGHMHAAASDSSDRSKDKLDQKTLRRLAQNREAARKSRLRKKAYVQQLENSRLKLTQLEQELQRARQQGVFISSSGDQAHSTGGNGALAFDAEHSRWLEEKNRQMNELRSALNAHAGDTELRIIVDGVMAHYEELFRIKSNAAKNDVFHLLSGMWKTPAERCFLWLGGFRSSELFKLLANQLEPMTERQVMGIXNSLQQTSQQAEDALSQGMESLQQSLADTLSSGTLGSSSSDNVASYMGQMAMAMGQLGTLEGFIRQADNLRLQTLQQMLRVLTTRQSARALLAIHDYSSRLRALSSLWLARPRE

SEQ ID NO: 5200 - protein, 294 aa, Arabidopsis thaliana
MATNGSASSAQLSQKEADVRMMCAAEVHLGTKNCNYQMERYVFKRRNDGIYIFNLGKTWEKLQMAARVIVAIENPQDIIVQSARPYGQRAVLKFAQYTGANAIAGRHTPGTFTNQMQTSFSEPRLLILTDPRTDHQPIKEGALGNIPIIAFCDTDSPMRFVDIGIPANNKGKHSIGCLFWLLARMVLQMRGTIAAGQKWDVMVDLFFYREPEETKPEDEDEAGPQAEYGALPAPEYGMVGGDQWTTAQIPDAAWPGEGQAPISAAPAAASWSDSADGGWEAAAPPSGAPAAGWE

SEQ ID NO: 5201 - protein, 690 aa, Arabidopsis thaliana
MDATEQSLRQSLSEKSSSVEAQGNAVRALKASRAAKPEIDAAIEQLNKLKLEKSTVEKELQSIISSSGNGSLNREAFRKAVVNTLERRLFYIPSFKIYSGVAGLFDYGPPGCAIKSNVLSFWRQHFILEENMLEVDCPCVTPEVVLKASGHVDKFTDLMVKDEKTGTCYRADHLLKDYCTEKLEKDLTISAEKAAELKDVLAVMEDFSPEQLGAKIREYGITAPDTKNPLSDPYPFNLMFQTSIGPSGLIPGYMRPETAQGIFVNFKDLYYYNGKKLPFAAAQIGQAFRNEISPRQGLLRVREFTLAEIEHFVDPENKSHPKFSDVAKLEFLMFPREEQMSGQSAKKLCLGEAVAKGTVNNETLGYFIGRVYLFLTRLGIDKERLRFRQHLANEMAHYAADCWDAEIESSYGWIECVGIADRSAYDLRAHSDKSGTPLVAEEKFAEPKEVEKLVITPVKKELGLAFKGNQKNVVESLEAMNEEEAMEMKATLESKGEVEFYVCTLKKSVNIKKNMVSISKEKKKEHQRVFTPSVIEPSFGIGRIIYCLYEHCFSTRPSKAGDEQLNLFRFPPLVAPIKCTVFPLVQNQQFEEAAKVISKELASVGISHKIDITGTSIGKRYARTDELGVPFAITVDSDTSVTIRERDSKDQVRVTLKEAASVVSSVSEGKMTWQDVWATFPHHSSAAADE

SEQ ID NO: 5202 - protein, 316 aa, Thiobacillus denitrificans ATCC 25259
MSREHSDESDDLTPDETEADEERHAASDSNEELASAILDEPQVDVTQLYLNEIGQAPLLTAAEEVALARRTVLGDFEARQTMIERNLRLVVNIAKHYANRGLTLLDLVEEGNLGLIHALEKFDPERGFRFSTYATWWIRQNIERAIMNQSRTIRLPVHIIKELNIYLRAQRHLETHGVTDATSDDIAALTGHPVADVRRIMQLNERIASLDAPLDVDPTLSLGEAIADDNAHLPDEMLQLEEIENHVQEWLTQLNDKQRWVIERRFGLNGCEACTLEDLALELEVTRERVRQIQMESLRVLRQLLRRRGVTKDELF

SEQ ID NO: 5203 - protein, 222 aa, Neisseria gonorrhoeae FA 1090
MTTHLSNVAPDLQNYLNAIGEPEHPVLTRLREKAGHHRMGKMAIAREQAAVLVWLAKLIRAEKYLEIGVFTGYSSTALALALPEHGRITACDINVTFTDTARQVWNEAGVAHKISLHLQPALLTLDDLIAQGEAGSYDLALIDADKPPTPQYFERCLKLVRQGGIIAIDNILLNGRVMREAAFDAPPSVKILKDFNQNLPNDTRIVPITLPVGDGLTLLLKK

SEQ ID NO: 5204 - protein, 374 aa, Solanum tuberosum
MNYSTYTQFVASRRMGICEPIHQMGMWDDFNASCPSTSATMILEVEKCLEDQIPIIDKRLDIETEDTSHGTVGTSNRYEAETSKPIEKVLRRLAQNREAARKSRLRKKAYVQQLENSKLKLIQLEQELDRARKQGLYVGAGLDASQLSYSGTASSGTAVFDTEYGQWVEEQNRQTNDLRNALHHSQISEAELRIIVDGCLNHYFELFRVKATAAKADVLYIMSGMWKTSAERFFMWIGGFRPSELLKVLTPHLELLTEQQLREVCNLRQSCQQAEDALSQGMVKLHQILGEAVAAGRLGEGNYSLPQMGPAIEKLEALVRFVNQADHLRQETLQQMSRILNTHQAAQGLLALGEYFEQLRVLSSHWATRLHEPA

SEQ ID NO: 5205 - protein, 404 aa, Vibrio vulnificus CMCP6
MQDILTVILAGGMGSRLSPLTDDRAKPAVPFGGKYRIIDFTLTNCLHSGLRKILVLTQYKSHSLQKHLRDGWSIFNPELGEYITSVPPQMRKGGKWYEGTADAIYHNLWLLERSEAKYVMVLSGDHIYRMDYAPMLEEHIANNAALTVACMDVNCKEAKAFGVMGIDERHRVHSFVEKPQNPPHLPNDPERSLVSMGIYIFSMEVLQQALIEDADDDASSHDFGKDIIPKLIDTGSVFAYKFCGSKGRVDKDCYWRDVGTIDSFYQANMDLLEPIPPMNLYQKDWGIRTYEPQYPPARTVSSGSGNEGIFINSIIANGVINSGGSVQHSIVSSNVRINDSATVVDSIIFDDVEIGEGCQLVNCIIDKHVKVPPYTQIGLNRLEDAQRFKISENGIVVVPESYQF

SEQ ID NO: 5206 - protein, 245 aa, Bacillus thuringiensis serovar konkukian str. 97-27
MIKLVLIRHGQSLWNLENRFTGWTDVDLSENGLSEAREAGAILKKNGYTFDVAYTSVLKRAIRTLWIVLHEMNLAWVPVHKSWKLNERHYGALQGLNKDETAQKYGEEQVHIWRRSIDVRPPALTEDDPRYEMNDPRYKTLKKGEFPLTECLVDTEKRVLAYWHSEIAPKLKDGNKVIISSHGNTIRSLVKYLDNLSSDGVVSLNIPTSIPLVYELDENLRPIRHYYLSMDGEVPEGEIPKHITF

SEQ ID NO: 5207 - protein, 341 aa, Escherichia coli CFT073
MKALSKLKAEEGIWMTDVPVPELGHNDLLIKIRKTAICGTDVHIYNWDEWSQKTIPVPMVVGHEYVGEVVGIGQEVKGFKIGDRVSGEGHITCGHCRNCRGGRTHLCRNTIGVGVNRPGCFAEYLVIPAFNAFKIPDNISDDLASIFDPFGNAVHTALSFDLVGEDVLVSGAGPIGIMAAAVAKHVGARNVVITDVNEYRLELARKMGITRAVNVAKENLNDVMTELGMTEGFDVGLEMSGAPPAFRTMLDTMNHGGRIAMLGIPPSDMSIDWTKVIFKGLFIKGIYGREMFETWYKMAALIQSGLDLSPIITHRFSIDDFQKGFDAMRSGQSGKVILSWD

SEQ ID NO: 5208 - protein, 398 aa, Escherichia coli CFT073
MRGEFYQQLTNDLETARAEGLFKEERIITSAQQADITVADGSHVINFCANNYLGLANHPDLIAAAKAGMDSHGFGMASVRFICGTQDSHKELEQKLAAFLGMEDAILYSSCFDANGGLFETLLSAEDAIISDALNHASIIDGVRLCKAKRYRYANNDMQELEARLKEAREAGARHVLIATDGVFSMDGVIANLKGVCDLADKYDALVMVDDSHAVGFVGENGRGSHEYCDVMGRVDIITGTLGKALGGASGGYTAARKEVVEWLRQRSRPYLFSNSLAPAIVAASIKVLEMVEAGSELRDRLWANARQFREQMSAAGFTLAGADHAIIPVMLGDAVVAQKFARELQKEGIYVTGFFYPVVPKGQARIRTQMSAAHTPEQITRAVEAFTRIGKQLGVIA

SEQ ID NO: 5209 - protein, 458 aa, Staphylococcus epidermidis ATCC 12228
MAKQLQRELNNRHIQLIAIGGAIGTGLFLGSGQTISLTGPSLLFTYMLIGIVLFAFMRALGELLLSNSKFNSFVDIANEYLGPFGGFVIGWTYWVCWIVSSMSDLTAMGQYFAYWYPQVPHWLTVLFIVLLLISFNLLGARLFGELEFWFSIIKVVTIITMVIVGLVLIFLSFKTEYGHASFGNLIHHGGMFPHGAAGFLMSFQIAVYSFIGIELIGVTAGETKNPEKTIPKAINNVPIRILLFYIGGLLVIMSVIPWFKVDPDSSPFVKLFTLIGVPFAAGIVNFVVLTAAASATNSGIYSNSRILFGLAKQGLGPKVLTKTNSNGVPYLSMLVSSITLLIAALLNFIFPDAIKLFIYVTTLSTVLFLVVWGMIIVSYIAYVKKNPEQHQSSAFKLWGGKIIAYIVLSFFIFIFILLFFSKDTRVAIFISPLWFIFLFFYYKKYKNNAESLADRQRH

SEQ ID NO: 5210 - protein, 400 aa, Ralstonia eutropha JMP134
MSSAEAFYASVRAELDAIREAGLYKEERVIATPQGARVRTADGREVINLCANNYLGLSSHPGVIEAAHEALRTHGFGLSSVRFICGTQDLHKTLEARLSSFLGTEDTILYGSAFDANGGLFETLLGAEDAIISDELNHASIIDGIRLSKARRYRYKHNDMDDLRAQLAQADADGARYKLVFTDGVFSMDGTIARLDEMRTICDAHGALLGIDECHATGFLGSRGRGTHEFRGLFGKIDIITGTLGKALGGASGGFTSARKEVVALLRQRSRPYLFSNTVAPAIVGASIAVLDILEGSTELRDRLERNTVFFRKGLTALGFDVKPGEHPIIPIMVYDAEKAQQLAQRLLELGVYVVGFFYPVVPKGQARIRVQMSALHDEAALKAALEAFGQAGKELGLTR

SEQ ID NO: 5211 - protein, 376 aa, Oryza sativa
LISPAARGGREAKEMDRAALTVGPGMDMPIMHDGDRYELVRDIGSGNFGVARLMRSRADGQLVAVKYIERGDKIDENVQREIINHRSLRHPNIIRFKEVILTPTHLAIVMEYASGGELFERTCNAGRFSEDEARFFFQQLISGVSYCHSMQVCHRDLKLENTLLDGSTAPRLKICDFGYSKSSVLHSQPKSTVGTPAYIAPEVLLKKEYDGKIADVWSCGVTLYVMLVGAYPFEDPDEPKNFRKTIQRILGVQYSIPDYVHISPECRDLIARIFVANPATRISIPEIRNHPWFLKNLPADLMDDSKMSSQYEEPEQPMQSMDEIMQILAEATIPAAGSGGINQFLNDGLDLDDDMEDLDSDPDLDVESSGEIVYAM

SEQ ID NO: 5212 - protein, 372 aa, Idiomarina loihiensis L2TR
MLGYEQRLNERKDSSLFRSRKVRSSDAHWQLDFSTNDYLGLSQHPDIKRAFKQAIDTWGVGSTGSPLLSGYSKVHQELEELLAEWMNKPRALLFNSGFAANHGVLTTLVDKQQKLFADKLVHASIIDGMQHGEGRFKRFPHNQPEPLIGKASPGDWLVTEGVFSMDGDVCDLNHLAYLKQRYGLKIMLDDAHGIAAYGAEGKGSLVADSAVADVITGTFGKALGVGGAFVCADDDEIESLIQFCRDYIYSTAMPPAQAAAIKASVEIVRSAEGDDRRGRLAERIQYFREQLKQRGLKTIESNSAIQTWLFNSDEDALNMATELQAQGYLCSVIRPPTVPAGSSRIRFSLTSEMSKPELAQFWSRVDRILSQL

SEQ ID NO: 5213 - protein, 160 aa, Triticum aestivum
LAQSFAKNMGLYGERVGSFSIVCADAEEKARVDSQLKIIIRPMYSNPPIHGAHIVSTVLNTPELKKEWLGEVKLMADRIITMREKLRGHLENDFGSKKSWRHITDQIGMFCYSGMTPEQVNKIKSDWHVYLTQDGRISMAGISSSNVKYLAEAIHNVTKD

SEQ ID NO: 5214 - protein, 431 aa, Idiomarina loihiensis L2TR
MSKSDIEFDRQHIWHPYTSMLNPLPAYKVESAKGCRLTLDTGHEVVDGMSSWWAVIHGYRNPRLDAVAHRQIDKMSHVMFGGITHQPAIDLARRLIELTPEPLQRVFIADSGSVSVEVAIKMALQFWLAQERPEKHRLLTIKGGYHGDTFKAMSVCDPVNGMHHLFNRAINSQLFAEAPRLTPDDDWAETAGDELRHWFEQHHHELAAVILEPVVQGAGGMRFYHPEYLRLIRQLCDDFDVLLIADEIATGFGRTGKLFACEHAGITPDVLCVGKALTGGYMTLAATLTTKQVAETIGHGPGGGALMHGPTFMGNPLACAVAAESLAIIAEGKWQQQVAEIEAQLKQQLLPLAECDAVKDARVFGAIGVLEMHHPIDVAIAQKRFVELGVWIRPFGRLLYIMPPYVISTNELSRLTVAMKDYVETQSSIKA

SEQ ID NO: 5215 - protein, 551 aa, Buchnera aphidicola
MSKMGAKDVKFGNEARIKMLRGVNVLADAVKVTLGPKGRNVVLDKSFGAPSITKDGVSVAREIELEDKFENMGAQMVKEVASKANDAAGDGTTTATLLAQSIVNEGLKAVAAGMNPMDLKRGIDKAVISAVEELKNLSVPCSDSKAITQVGTISANADEKVGALIAEAMEKVGNDGVITVEEGTGLQNELEVVKGMQFDRGYLSPYFINKPETGIVELENPYILMADKKISNVREMLPILESVAKSGKPLLIISEDLEGEALATLVVNPMRGIVKVAAVKAPGFGDRRKAMLQDISILTGGSVISEELAMDLEKSTLEDLGQAKRVVINKDTTTIIGGSGEKQAIQSRIGQIRQEIQEATSDYDKEKLNERLAKLSGGVAVLKVGAATEVEMKEKKARVEDALHATRAAVEEGVVAGGGVALVRVAGKISNLRGHNEDQNVGIRVALRAMEAPLRQIVSNSGEEPSVVTNNVKDGKGNYGYNAATDEYGDMIDFGILDPTKVTRSALQYAASVAGLMITTECMVTDLPREDKSSDVASSPAGGMGGMGGMM

SEQ ID NO: 5216 - protein, 177 aa, Lemna gibba
MASSMMASTAAVARAGPAQSSMVAPFNGLRSSVAFPATRKANNDLSTLPSNGGRVSCMQVWPPEGLKKFETLSYLPPLSVEDLAKEVDYLLRNDWVPCIEFSKEGFVYRENHASPGYYDGRYWTMWKLPMFGCTDASQVIAEVEEAKKAYPEYFVRIIGFDNKRQVQCISFIAYKPT

SEQ ID NO: 5217 - protein, 177 aa, Lemna gibba
MASSMMASTAAVARVGPAQTNMVAPFNGLRSSVAFPATRKANNDLSTLPSNGGRVSCMQVWPPEGLKKFETLSYLPPLSVEDLAKEVDYLLRNDWVPCIEFSKEGFVYRENHASPGYYDGRYWTMWKLPMFGCTDASQVIAEVEEAKKAYPEYFVRIIGFDNKRQVQCISFIAYKPT

SEQ ID NO: 5218 - protein, 189 aa, Larix laricina
MASSIMALSSTAAVAAVAAPSKTGNSNVVSAFTGLKSMAQFPSSKTMSNAGAEWEQKTTSNGSRVRCMQVWPPYANKKFETLSYLPRLTPEQLVKEVEYLLKNKWVPCLEFEEDGEIKRVYGNSPGYYDGRYWVMWKLPMFGCTEASQVLNEVNECAKAYPNAFIRVIGFDNVRQVQCISFIVHKPEYN

SEQ ID NO: 5219 - protein, 181 aa, Nicotiana sylvestris
MAFLIMSSAAAVATGTNAAQASMIAPFTGLKSATSFPVSRKQNLDITSIASNGGRVQCMQVWPPINKKKYETLSYLPDLSEEQLLREVEYLLKNGWVPCLEFETEHGFVYRENNKSPGYYDGRYWTMWKLPMFGCTDATQVLAEVEEAKKAYPQAWIRIIGFDNVRQVQCISFIAYKPEGY

SEQ ID NO: 5220 - protein, 113 aa, Nicotiana benthamiana
REFVPKRGFVYREHHSSPGYYDGRYWTMWKLPMFGCTDATQVLAEVEEAKKAYPQAWVRIIGFDNVRQVQCISFIASKPEATKISIFKATYRMCSPEKLFWFPCFIILFNVCF

SEQ ID NO: 5221 - protein, 419 aa, Sulfolobus tokodaii str. 7
MLSRKIIEESDIYLATSTRDPELFPLVIDHGEGVWIYDVDGNKYLDFTSGIGVNNLGWPSHPEVIKIGIEQMQKLAHAAANDFYNIPQLELAKKLVTYSPGNFQKKVFFSNSGTEAIEASIKVVKNTGRKYIIAFLGGFHGRTFGSISLTASKAVQRSIVGPFMPGVIHVPYPNPYRNPWHINGYENPSELVNRVIEFIEDYIFVNLVPPEEVAGIFFEPIQGEGGYVIPPKNFFAELQKLAKKYGILLVDDEVQMGLGRTGKLFAIENFNTVPDVITLAKALGGGIMPIGATIFRKDLDFKPGMHSNTFGGNALACAIGSKVIDIVKDLLPHVNEIGKIFAEELQGLADDVRGIGLAWGLEYNEKKVRDRIIGESFKRGLLLLPAGRSAIRVIPPLVISEEEAKQGLDILKKVIKVVK

SEQ ID NO: 5222 - protein, 269 aa, Magnetospirillum magnetotacticum MS-1
MSRLEQRFAKLKAENRAALVTFITAGDPDRATSQALLDGMPAAGADIIELGMPFTDPMADGPVIELAAGRALKAGGSLKQTLEMVEVFRKTDSETPIILMGYYNPVYAWGAEKFSADAARAGVDGLIIVDLPPEEADELVPHLRRSGIDFIVLTTPTSDDARLPVVLSNASGFVYYVSIAGITGTASAAQSAIDDAVARIRRHTDLPVCVGFGIKAPAQAAQVARVADGAVVGSAIVSVLADNIGKPSAVSAPLALAKDLAEGVRGARK

SEQ ID NO: 5223 - protein, 332 aa, Ralstonia solanacearum
MTIKIGINGFGRIGRMVFRAAIANFKDIEVVAINDLLEPDYLAYMLKYDSVHGRFDGEVSVDGNTLVVNGKKIRLTAVKDPAELKWGEVGADVVVESTGIFLTKEGAQKHIDAGAKKVIMSAPSKDDTPMFVYGVNHGTYKGEAIISNASCTTNCLAPVAKVLNDKWGIKRGLMTTVHAATATQKTVDGPSNKDWRGGRGILENIIPSSTGAAKAVGVVIPQLNKKLTGMSFRVPTSDVSVVDLTVELEKAASYDEICAEMKAQSQGALKGVLGYTEDKVVATDFRGDARTSIFDAEAGIALDGTFIKVVSWYDNEWGYSNKVLEMARVVAK

SEQ ID NO: 5224 - protein, 602 aa, Oryza sativa
MAPTQSERTPLLGTQQRQPSVSRHRPSFAASIGRPDLTAEEEDAIAQESAFSAIQGAAHGVDPNSSAFVPLDQSHFSVSGIGGAIAEEPEEPPLRADIWVIMGAMWIGSFLAALDGTIVATIMNSVGSEFRVSKEVGWLGTSYLLTQTAFQPLYGRASDIFGRKAATLFASVVFLIGSLLCGLSQTFWQLCAARAIAGIGGGGLTTMATLVTSDLVSLKARGTWQGLGNLVYATGAALGGPLGGALADAGLGWRWAFLVQVPLCAVHFAVVSWKIDIPAGPGSMIEKIKRIDALGSLSLVTSVTLILVGLSLGGNEREWSDKLVLGSLIGGGAVLVLFVLIERYVAREPLMPMSVLFNRTPGFVAIACWFITMSQFGIIFNVPTYFQSVEQTASSYAGLHLIPNAIIASSCSLGSGLIMARTGRYRKMLLLGGLFGFLGPLMMCFWHRGTSEVFYWATMPFGGAAYGSILTITLVALIASVDPKDMAAATGVTYLFRATGSVLGISLSSAILQNSLQKNLEKTEIPRKVIQLIRQDAGAIKELSKPLRQAAIGAYEQSMHTVFIAIAAAGFFAFLALFFIEERDLPGKKPAAPAAAPARAQR

SEQ ID NO: 5225 - protein, 294 aa, Cyanothece sp. PCC 8801
MWEYTDKVMEFFYNPRNQGTITEKQEGQAITTGEVGSIACGDSPKIHLKIDEATQIILDARFQTFGCASAIASSSALTELLVGKTLDEALSLTNREIAEFLGGLPEEKMHCSVMGQEALEAAIFNYRGIPLDHHEDDEGALICKCFGVTDARIRRVIIENDLTTAEQVTNYVKAGGGCSSCLSDIDDILADITQEKATAVTAATELVQSKLTPQKPLNNLQKITLIQQILDEEIKPALAKDGGDVELFDVEGDLVKVILQGACGSCASSTQTLKMGIEARLRERVSPELTVISV

SEQ ID NO: 5226 - protein, 675 aa, Ralstonia solanacearum
MSAPALHSITSLPTQQMANAIRVLAMDAVQQANSGHPGMPMGMADIAVALWSRHLRHNPANPHWPDRDRFVLSNGHGSMLLYALLHLTGYDLPMSELKNFRQLHSKTAGHPEYGITPGVETTTGPLGQGLTNAVGMALAERLLGQEFNRPGFDIVNHHTYVFLGDGCLMEGISHEACSLAGTLGLNKLIALWDDNGISIDGDVVHWFNDDTPKRFEAYGWNVIRAVDGHNVAAVEAAIAQAKTSDKPTLICCRTVIGKGAPTKAGGHDVHGAPLGGAEIAAAREALAWPHAPFDVPQAVYDAWDARGQGQALEKAWNALFDAYAERYPAEAGQFQRRMRGQLPEAFEQAAAEFIEKCELKAETIATRKASQNTLEAYGPVLPELLGGSADLTGSNLTNWSGSKAVRVDAWGNHVNYGVREFGMSAIMNGIALHGGYIPYGGTFLTFSDYSRNALRMAALMKLRSLFVFTHDSIGLGEDGPTHQSIEHVASLRLIPNMDVWRTADTTETAVAWAAAIARQNGPSCLIFSRQNLPFQARNPATREAIARGGYVLRDATEGKRPDVVIIATGSEVGLAVGAAEHLAAEGIQARVVSVPSTTVFDKQDAAYKASVLPAGVPRIAVEAGVTDFWWKYQVQAVVGIDTFGESAPAGVLFKHFGFTVENVVNTAKSVIAPAV

SEQ ID NO: 5227 - protein, 499 aa, Zea mays
MTATPAVIGLSARGNRLLATSFGSAELAPPDAYPSRQFAAAAPKLTVVAHRASASASSPADIGGAGHARAHAIRALRNHSAPALAPPPPADPAPELDSKFEFEFESSLEAIVLLQRSMLEKQWELPFEDDISSTEDEDEDERSTVVVARSGVSARQRRMSGRRRGAVVGRKSVTVSPELMQSRNRIYLRGTVSKDLLTHKQVVQLSRKIKDGIWLQHQRSKLKEKLGNEPSYKQLAQSLRIPAPELRARMRESFLAREMLAMSNTRLVISIAQKYDNLGVELPDLIQGGLIGLLRGIEKFDASRGFRISTYVYWWIRQGVSRALADNSRSFRLPTYLHERLVAIRGAKYALEDQGIAPTVENIAESLNISEKKVHNATEAVHKVISLDQQAFPSLNGLPGDTLHSYIEDQNVANDPWHGFEERYLKEEVNSLINSTLNERERDIIRLYHGIGKQCHTWEDISRQFGLSRERVRQVGLVAMEKLKHAARREHLDALLEEY

SEQ ID NO: 5228 - protein, 141 aa, Cryptococcus neoformans var. neoformans B-3501A
MSGNNAEYREAFALFDKRGTGHVPRESLGELLRSLGQNPTQAEVAELEKTVGATFSYDEFLAVLNRPDGWKPAGTADEFIKGFQVFDKAGNGFIGAGELRYVLTQLGEKMTDEEVDELLKGFPVQDGQINYHSFVRSILSQ

SEQ ID NO: 5229 - protein, 265 aa, Ralstonia solanacearum
MTAPPTSFPPRLAGKVALVTGATQGIGAATARLFARHGARVIVNALVRDAAAEAFAASIGHDGNVLLVQADVRYRDQADAMVAAGVARFGGIDVLVNNAGINVFSDPLALSEADWARCLSVDLEGAWHCARAVLPHMLARGAGSIVNIASVHGHKIIPGAFPYPVAKHGLIGLTRALGIEYAARGIRVNSISPGLILTPIAEAGFAAAPDPEAERRRQADLLPCKRIGEPEEVAYTALFLASDEARFINAADILIDGARSQLYHE

SEQ ID NO: 5230 - protein, 146 aa, Brassica napus
  misc_feature (58)..(58): Xaa can be any naturally occurring amino acid
  unsure (1)..(146): unsure at all Xaa locations
EYSGQSIPVSGLAYLITAPASFSDMAAHPFHALFYIVFMLTACALFSKTWIEVSGSSXARDVAKQLKEQQMVMPGHRESNLQKELNRYIPTAAAFGGVCIGALTVLADFMGAIGSGTGILLAVTIIYQYFETFEKEKASELGFFGF

SEQ ID NO: 5231 - protein, 426 aa, Thiobacillus denitrificans ATCC 25259
MFCLEFTHWEIAVTADKKPRLRTIQKSTKLDNVCYDIRGPVMARARQMEEEGQRIIKLNIGNPAPFGFEAPEEIVQDVILNLPNASGYSDSKGLFAARKAIMHETQRKGIAGVTIDDIIVGNGVSELIVMAMQALLNNGDEVLVPAPDYPLWTAAVSLGGGKPRHYLCDEGAGWLPDLDDIRAKITPSTRAIVIINPNNPTGALYPTELLREILEIARQHQLIVYADEIYDKVLFDGVVHTSIASLADDLLIVTFNGLSKNYRACGYRSGWLVVSGDKRHAKDYLEGLNMLASMRLCSNVPGQHAIQTALGGYQSINDLVAPSGRLTRQRDLAHELLTLIPGVSCVKPKAAMYLFPRLDPKLYPIHDDQKFILNLLEEERVLVVQGTGFNWPRPDHLRVVFLPHEEDLTEAIGRMSRFLDRQRAHR

SEQ ID NO: 5232 - protein, 1486 aa, Mougeotia scalaris
MSSRPGHVRNDIRPIRGPSRLSAQANLAAERQDAADAFIQSNYEKAAAGKGEFNYKGLLTTMDGRKPWEVDQMAYLAKMRRSGLGQPYGAMIVVEPPLRHAPKLHLLAYSENVAELLGVDPKEVGLGKNAIGFFSDSSGMVLYREASSRNSFQQPLVLHLRNKPVDFYAILHRGPEGILIDLEPVFPEDKSLSVATLRGISGDRDPTAAITMTEAKESVSGAIRRLQNLPSGSVLSMCQAVVEEVRDLLQYDRVMVYKFHPDQHGEVFAESVRDDMEPFLGLHYPSTDLPQAIRMLLMRVGSRMICDASRPMVKIVQPEVEEKSVDLSESTLRAPHGCHVQYMCNMGSMASITTAIMADERKDDLDPHESSKNKRLWGLIVGHHCGARYTPYPMRKAIEHLAQQFGLLLDREISLAANFHEENILNMQKKLCDMLESNIPLGIVKNSPSIMDLVKCDGAALLFADRFWLLGATPTERQVFDIAEWILKAHGKRSALCTDSLAEAGFPGAADLGEKTCGLVAIKIGPQDFVFWFRSHTAKEVRWGGRRQVQGEIDDDNKLMPRNSFQAFLDVVKKRCLPWEDIELEAINGLRLLLNETLENSRSDAVSNLEGGTDVDGNAMTTRVLLTAQRSIPKPVSALTEEVEVVLACFKTSFLVTDATKEDYPVIFCSEAFSLLSGYKAEDLLGGSCRKLEGYETDELEVSRFLEALEAGSQYSGRQLHYKSDGSPFWDLVTSAAVQDEFDNVVNHVIVYQEVAKYAEGQLPQGKPSIAMASPSTEKGFPVSLIRYDGRLKEKSTRKVNEIVQAMKNPSRAKVDGPLTPGRQGGIAEELKIPMPASPDFSRPQVRHGSIDHSKPSVKPARRRSVVDILMGKPKEEAEAARRGAVSTEEPKVSMDGSDSGKKRRAAKGIDFGTTLERIEYSFLVTDPRLDENPIIFMSDEYIRLTAYTREEHIGGELIYLDGDNTSTSDVRKIRSAAQNNKELSMQFLAYKKNGDTFWALYHFSMVKDSDGTVLYIVNVVKDLGKSMVDDAAFKKAVAKAEKEASSVAEALRDLPDAASEERQWTIHSRAVLPKPHKVEDPAWAAIKKVRAEEGRLGLKHFKPIKPLGNGDSGSVMLVELRGTGQLFAVKVMEKESMIERNKVHRVASEREILDNLDHPFLPTLYASFQTAKHVCFVTDFCPGGELYDFLEVQPGHRFEEKVAQFYAAEILLALEYLHCKGVVYRDLKPENILLTNGGHVVLTDFDLSVLSSTFPKVLRDTKGKRGRSRRPSKEPHPTFVAEPVTRSNSFVGTEEYIAPEIVTGAGHNSSIDWWSFGILLYEMLFGHTPFCGSSMRKTFSNILNREVFFPPEVNVSAEAKDLITLLLVKDADQRLGSKSGAAEIKVHKFFANIDWPLIRFKATAVPKVPVRLDNTVAPSTNAEGGASLENWRLQEVPSGVESARSSGSYLRDSIGSPYVMGASDSPMLKNPDEEYGKWYSSSSQV

SEQ ID NO: 5233 - protein, 769 aa, Staphylococcus aureus subsp. aureus COL
MDIGKKHVIPKSQYRRKRREFFHNEDREENLNQHQDKQNIDNTTSKKADKQIHKDSIDKHERFKNSLSSHLEQRNRDVNENKAEESKSNQDSKSAYNRDHYLTDDVSKKQNSLDSVDQDTEKSKYYEQNSEATLSTKSTDKVESTEMRKLSSDKNKVGHEEQHVLSKPSEHDKETRIDSESSRTDSDSSMQTEKIKKDSSDGNKSSNLKSEVISDKSNTVPKLSESDDEVNNQKPLTLPEEQKLKRQQSQNEQTKTYTYGDSEQNDKSNHENDLSHHIPSISDDKDNVMRENHIVDDNPDNDINTPSLSKTDDDRKLDEKIHVEDKHKQNADSSETVGYQSQSTASHRSTEKRNISINDHDKLNGQKTNTKTSANNNQKKATSKLNKGRATNNNYSDILKKFWMMYWPKLVILMGIIILIVILNAIFNNVNKNDRMNDNNDADAQKYTTTMKNANNTVKSVVTVENETSKDSSLPKDKASQDEVGSGVVYKKSGDTLYIVTNAHVVGDKENQKITFSNNKSVVGKVLGKDKWSDLAVVKATSSDSSVKEIAIGDSNNLVLGEPILVVGNPLGVDFKGTVTEGIISGLNRNVPIDFDKDNKYDMLMKAFQIDASVNPGNSGGAVVNREGKLIGVVAAKISMPNVENMSFAIPVNEVQKIVKDLETKGKIDYPDVGVKMKNIASLNSFERQAVKLPGKVKNGVVVDQVDNNGLADQSGLKKGDVITELDGKLLEDDLRFRQIIFSHKDDLKSITAKIYRDGKEKEINIKLK

SEQ ID NO: 5234 - protein, 392 aa, Oryza sativa (japonica cultivar-group)
MPSYAHHHSSLGDDEEENGRFLSLCLLGFWNFGNLWFLLCVYVGAFWTEKDGKMDALKSSCRSEEAADEGAAAAPSAWGMVERDGFSVEDLLDLEEFCEAEKDAAEENEQALALVAAPEEEKSKDDSQPSSVVTYELVAPPPPPPEIVDLPAHDVEELEWVSRIMDDSLSELPPPPQPPASVVASLAARPPQPRQLQRRPQDGAYRALPPASYPVRTPTICALSTEALVPVKAKRSKRSRATAWSLSGAPPFSDSTSSSSTTTTSSCSSSASFSSFSPLLKFEWHPLGGTSDLPDDHLLPPGEEVQARHCGVQKTPQWRAGPEGAKTLCNACGVRYKSGRLLPEYRPACSPTFVSAIHSNSHRKVLEMRRKKEVGSGLLTAAAAAAPAVASF

SEQ ID NO: 5235 - protein, 1442 aa, Mougeotia scalaris
MDRTIDISDEKWQSRFAAQSSQAAESQYSSDALLNEKYEMASTHGSFVSYKELMKSSAEAPKPWEVDQIAYLEKMRRSGLTQRFGTMLVVEPPLRHAQKLHLLAHSENAVDLLGIEPRELEIGGDILPFFTSESGKALFSEAASKGDSVKTAIVTGRDGETKFYAICHRNACGVIIDLEPVVPKGIHTSYEPNLDTSSPPLSMEAALDIVQPAIQRLKAIPAGSVQEICDTVTREVRELLQYDRVIVYKFHPDQHGEVFAESAKEGLDPYVGLHYPSTDLPQAIRVLLLRVGIRMICDATQSMVKIIQPDDVEPVDLSDSTLRAPHGCHAQYMINMGSLSSITFAIVVESDKTVRAGEEPEKERTLWGIIVGHHSIPRFTPYPLRKAVQSLAETFGSLLTREIALAASWHEEKTLNMQKKLCDMLEADIPLGIVIDSPNIQDLVKCDGAALFFSGRFWLLGSTPTERQVADLAEWILKHHSKKGAVCTDSLAEAGYPNADELGSKTCGMVAVKVGKRDFVFWFREHTAKVVRWAGQRQKKEEIDDESKMMPRNSFKAFMEIVRKRCLPWEDIELEAINGLRLMLQDALDVSRGADIPVVVGGTTIEGDPFDGAGYHESTSEKPVSAITSEVEAALSAVEACFLITDATQESRPIIYCSHVFSTLTGYSAGELEGGTLEKLEGLETDVAAASKLHLALSGRTQYSGRLLHYKKDGTPFWNLITCGPIKNGQNEVVNFVIVFQELAKYHEISSVPPNLVDGDLSAPEKGFPVSLIRYDGRLKEKSSRIVDEIIRLVKNPATIADSLALLGQMSAMASPSVSQVESVPVVEHRERHSSMHIAKPAATKTSRRRSLVEVLLGKGKEIEAPVKEAFDSDVKSDDGKKRRAAKGIDLGTTLERLDYGFLVIDTRLDECPIIFMSDRYILQTQHTREENIGGDILFLDGEESSPAEVDKIRKAVQNNDELSLQLVAYRKNGDKFWALYHLSVAKDKDGNALYIINVVKDLGEAQISDAAFRKEDAEARKEAAEITRALHDLPDTAAYELWTVHSKFVASKPHRAWDSAWTAIKEVREKEGRLCLKHFKPIKPLGNGDSGSVVLVELRGTGHVFAAKIMEKERMIERNKVHRIASEREILNQLDHPFLPSLYASFQTTKHVCFITNFCPGGELYDFLEIQPYHRFEEHVAQFYAAEILISLEYLHCQGVVYRDLKPENILLAEDGHIVLTDFDLSILSSTFPKLIREANGTSKRKSSRRPSKERAPTFVAEPTMRSNSFVGTEEYISPEIVTGEGHGPSIDWWSFGILIYEMLYGETPFCGSSMNKTFHNILNKEVAFPSPVPVSDMAKDLITSLLIKDSEKRLGSKLGAAEIKVHPFFHGINWPLIRNKKVVPPKVPNKLNSVVGGHEEQDISSNHWRLQDTNNDSNRSFPNMSFDGSIIDATEDRSTW

SEQ ID NO: 5236 - protein, 839 aa, Mougeotia scalaris
MAALVNLPISRYPQPLLGEGVDVIHKSEKVLGEASQGLKDALTAFQQTFVMCDATKPNTPVMFASEGFYRMTGYSAKEVIGKNCRFLQGPETDRSEVEKLKQALLDGQSWCGRLLNYRKDGSSFWNLLTVSPVKDDSGRVVKFIGMQVEVSKFTEGKNDDIKRPNQLPVSLIRYDDRQKDEAEVRVEELLQDMKESESPAEVEAKVQTVQVSVPAQPSKLSKEAPAETKKTRRSSYFGKNAAPKAEEVPPVFEPGVEVSLLMEDELDTMAVEKKHRHGIDLATTLERIQKNFVITDPRLPDNPIIFASDDFLELTEYTREEIIGRNCRFLQGKDTDKETVAKIRHAIDNHQDITVQLLNYTKSGKPFWNLFHLQAVRDTKGRLQYFIGVQLDASTYVEQASKNIPDNLKKMGTEEIHNTANNVDFGLKELPDTNTGNKDDIWTLHSKQVTALPHKSNTENWDAIRKVIASEGQISLKNFRPIKPLGYGDTGSVHLVELRDSGVFFAMKAMDKEVMVNRNKVHRACTEREILELLDHPFLPTLYGSFQTPTHVCLITDFCPGGELFAHLENQKQKRLKENVAKVYAAQILMALEYLHLKGVIYRDLKPENILICEGGHLLLTDFDLSFRTETEVKVAMVPIPEEEGAPVVEKKKKKKGKAPAAAAMAPRFIPQLVAEPSGTSNSFVGTEEYIAPEIISGVGHGSQVDWWAFGIFIYEMLYGKTPFRGKNRKRTFTNVLTKELAYPTVPEVSLDVKLLIKDLLNRDPSQRLGATRGASEIKEHPWFNAIQWPLICKDVPESDVPVKFMQVENERRDSTADDDADWESNDGRNSLSLDLGRQ

SEQ ID NO: 5237 - protein, 616 aa, Chromobacterium violaceum ATCC 12472
MCGIAGWVSFERDLSTQRAVAETMTKTMALRGPDDEGLWLDRRAALGHRRLSIIDLEGGRQPMTADEDGRTLACLVYTGEVYNFRELRLELQGLGHAFRTRSDTEVVLRAYLQWGEAMLERLNGMYAFALWDAREQRLLLVRDRMGVKPLYYYPMPDGVLFGSEPKAILAHPEAERRVTAGGLREMLDLVKTPEAAAFAGMHEVRPGQVVTIDRGGLRKRRYWQLEAREHTDDLPTTIRTVRELLDDIVERQIIADVPLCTLLSGGLDSSVVTALAARSMRRQGKGTVRSFSVDFVKHGAAFEADYLRGSPDAPFVRDLAAHAGTEHREILLESRELADPRLRAAVLGAQDLPPAYWGDMLPSLYKLFEAIRAQSTVALSGESADEVFGGYRWFHDAAAVDGDAFPWLAGSSGAFFDGQSLIAPGLLRELDMPGFRRDSYAQALAEVPRLASDSTRERRMREISHMHLTRFVQALLDRKDRMSMAVGLEVRVPFCDHRLVEYVFNAPWSMKNFDGREKSLLRAAGKDVLPESIVRRVKSPYPATQDPAYEQALRQGLARVLDDSRSPALPLLDKAAAWKLLDRPFGKTSTSPERAGLEMALGLDEWLRHHQVSLDL

SEQ ID NO: 5238 - protein, 177 aa, Thiobacillus denitrificans ATCC 25259
MAHEIATLAGGCFWCIETVFNRLQGVESAVSGYMGGHTETPSYEAVCNGDTGHAEVVQITFDPDVISYRDLLDVFFTIHDPTQLNRQGNDVGTQYRSAIFWHTPAQKAEAEAAIAALDASKQYGSPVVTEVAEATTFYPAETYHQRYYEANPRQPYCQYVVAPKVAKAEQKFADRLK

SEQ ID NO: 5239 - protein, 803 aa, Mougeotia scalaris
MNSPLSPSRAIQTSEGKILEQKSELKDVLTSFHQTFVISDATKPDIPIVFASEGFYEMTGYGPEEVIGYNCRFLQGEGTSRDEVTRLKQCLVEGQPFCGRLLNYRKDGTPFWNLLTVSPVRSATGKVVKFIGMQTEVSKFTEGAADGIKRPNDLPVSLIRYDARQKDEAEVSVTEIVHAVAHPEKAIARLSTAVTESSKKHQQQSVSPEFGAEGLKTPLITINEKEAVDEVEVEEEGRDSFEITGEKKIRRGLDLATTLERIQKNFVITDPRLPENPIIFASDDFLELTEYSREEVIGRNCRFLQGPDTDQDTVQKIRDAIRDCRDVTVQLLNYTKSGKPFWNMFHLQAVKNSKGELQYFIGVQLDASTYIEPKLQPLSESAEKEGTKQVKTTADNVDSSLRELPDPNVSKEDIWGIHSSVAEPKPHQKRGYSSKWDAVLKIKARDGKIGLKHFRPVKPLGCGDTGSVHLVELKDTGKFFAMKAMDKEVMINRNKVHRTCTERQVLGLVDHPFLPTLYASFQTTTHICLITDFCPGGELYMLLDRQPSKRFPEYAARFYAAEILLALEYLHLQGVVYRDLKPENILIGYDGHLMLTDFDLSFVSETVPELVFPPNYNKDKPKSKNKKDREGNLPVLVARPSGTSNSFVGTEEYICPEIISGIGHNSQVDWWSFGIFLYEMLYGKTPFRGRNRQRTFSNALTKQLEFPPTPHISQEAKDLITLLLVKDPSKRLGAIFGANEVKQHPFFRDFDWTLIRCRQPPSLDVPVKFNNHSPQRTSGDEEEMEWDEDENISTSTTVSLDFD

SEQ ID NO: 5240 - protein, 403 aa, Zea mays
MADYVYGPGRTHLFVPGPVNIPDPVIRAMNRQNEDYRSPAVPALTKVLLEDVKKIFKTTTGTPFMIPTTGTGAWESALTNTLSPGDRVVSFLIGQFSLLWIDQQRRLGFDVDAVESEWGQGADLAALERRLREDAPRHAIKAVAIVHNETATGVTNDLAAVRALLDKHAHPALLLVDGVSSICALDFRMDEWGVDVALTGSQKALSMPTGMGIVCASPRALEAQQTARSVRVFFDWKDYLRFYDMGTYWPYTPSIQLLYGLRTALDLIFEEGLDNVVRRHNRLGTATRLAVEAWGLSNCCQKEEWFSDTVTAVVVPPNIDSAEVVRHAWKRYNLSLGLGLNKVAGKVFRIGHLGNLNELQLLGCLSGVEMVLKDVGYPVKLGSGVAAAAAYLSNSTPLIPSRI

SEQ ID NO: 5241 - protein, 488 aa, Bacillus thuringiensis serovar konkukian str. 97-27
MNSATNQATSKTEATKGKGELRRGLKSRHLTMISLGGTIGTGLFLASGGVIHSAGPGGALIAYAAIGIMVYFLMTSLAELAAYMPVTGSFSTYATKFVDPSLGFALGWNYWYNWAITIAAELAAVTLIMKFWFPDTPSLIWSGLCLAIIFLLNYLSVKGFGESEYWFALIKVATIIIFLIVGFMMIFGIMGGETVGFKNFTVADAPFNGGIMAIIGVFMAAGFSFQGTELLGVAAGETSDPERNIPKAIRSIFWRILLFYILAILVIGLLIPYTTESLAASDVTVSPFTLIFEKAGVAFAASVMNAVILTAVLSAGNSGMYASTRMLWDLARQGKAPKFLGKLDSRGVPVNALIVTSIVGSIAFIASLFGDGVVYIWLLNASGMSGFIAWVGIAISHYRFRKAYIAQGKDLNDLPYRAKWFPFGPIFAFALCVIVILGQNYGAFMGESIDWNGVLVSYIGLPLFLVLWLGYKFTKKTKVIPLDKCELK

SEQ ID NO: 5242 - protein, 295 aa, Medicago sativa
MGNTNSSHNLLITVTVFAVTVTVFFILYFILRRRRFSPSSSSTVRVSPVTPTSSTSSSVVDSLPIFTFSSIKRRSSTVVSGDCAVCLSKFEQNDLLRLLPLCCHAFHTECIDAWLASNQTCPLCRSSVFVSESEIMKIFRSSSTSSGNNSFRLEIGNISHRREATATDNNNNNNNVAGETDRRTYSVGAFDYFVDEEAEIPVGNTNRRIFSGEKDDAAVLSVEVETPVDSQASLIGEGNWLKDYVDGLTRVMSFRGSGSSRRNDVVAGVGDFDVEANGNGFGEEISEMFRWISGV

SEQ ID NO: 5243 - protein, 700 aa, Neurospora crassa
MAYRLSLLQYLVSVLVLCKHVLTLDFGQSYSAGNSDLLAPRRYTEHDLKRKGLSDHVSFHPEGASEGFYCHYPDLKSKEWEACNDGADSRWCWLRQLQAQEGESRPKGYTVTTNYDNFTPIGIQRHYHMDISKQTIAPDGTPREARLMNGTYPGPTIEACWGDTVIVHVTNNLDDEGSVIHWHGLRQFYNNDQDGVALTQCPIARGSTWTYNFTMLQYGTTWYHSHYILQYADGVLGPVVVHGPASAPYDVSLPSPHFMSDWVYRKAEEEFENEKDPVVRGSKADNILVNGIGRSKEAVAAYNGEDIQSLYPITEILPGQRVRLRLINGAAGTSFIFSIDGHALEIIANDLVPVEPQIVDSLLVAVGQRYDIIIHGLDNPSPSGNYWIRTHPADGCNTFRNGLFNSTDSTNEDPLDPRTGILHYGHSSATYLSLPDTTANTISDFSCARVSEQSSLRPVVPWSISTTPLNNLTLSTFYPSHQTEDDVPYGNYTHWLLRLDPLVEKQGGVSFHNPLFANFSTPSLLDFTNIGQGENDNVIRLPYSSHPTDFIHMVIDGSLLPSTNQTDLDPDVIPLLAHPMHWHGSDVVLLAQSEQPFDPATSMDTWNYENPPRRDTIMAPAGGYVAVAFKPDNPGVWLVHCHIAWHASAGLALQMVIDDGQGMVEKMLAGERMKRLEGGCEEWKADLGKVVDYKKEESGV

SEQ ID NO: 5244 - protein, 394 aa, Rubrivivax gelatinosus PM1
MKPLAVTDHTLASALGVGRAATLAALRDGRSGLARKTFETAALDTWIGEVEGVDAQALPPALADFDCRNNRLAWLGLQADGFAASVARARARFGPRRIGVFLGTSTSGILQTELAYRRRDPATGALPADFRYAQTHNTYSVVDFTRRVLDLEGPSCAVSTACSSSAKVFGHAARLIELGVIDAAVVGGVDSLCLTTLYGFNSLELLSDDICRPWDAQRHGLSLGEAAAFALLERDADTPQAWLRGVGESSDGFHMSSPHPQGAGAAEAMQAALAQAGVAPGEIDYLNLHGTATPNNDSAEDLAVCTVFGDRLPCSSTKGATGHTLGAAGGVEAAIAMLALQHGLMPGGLNRRTPDAALRSRYLDANVEARLRLVASNSFGFGGSNACLVFGAAA

SEQ ID NO: 5245 - protein, 595 aa, Pseudomonas syringae pv. syringae B728a
MKLAMKLRTRLFLSISALITVALLGLLLGLVSVMQMARTQESLIQHNFAILDLGLKLRQNMGDQLVLMTGSSRNEPELQRMQKQFEELLEEGSAQDTQQNVRNGFEKTRGDYQRFIATWQQYGNDPRGIRGNSQLSESFDTLRNGLMDVHRKALENISNAEINSRDRALWIAGLLGLVGLAVLCIGFVTAHGIARRFGAPIEALAKAADRIGEGDYEVTLPISSAAEMNLLTRRFGIMAEALRQHQATNVDELLAGQQRLQAVLDSIDDGLLMIDRQGHLEHLNPVAQRQLGWDESRLGHSLGEALGRPELDEQLHLVLRGGTLERAPEDLAIEIDGESRLLTYSMTPVSHTKGHILGAVMVLHDVTEQRAFERVRSEFVLRASHELRTPVTGMHMAFGLLQERLHFAPESREADLLNTVTEEMQRLMQLINDLLNFSRYQNGLQKLKLAPCSIETLLQEAKARFEDQAQEQDIVLMLDMQEPMPRLHADQSQLERVLDNLLDNALRHTPPNGLIRLQARRHGERAIISVEDNGEGIAYGQQGRIFEPFVQVGRKKGGAGLGLALCKEIVQLHGGRMGVYSRPGQGTQFYMALPL

SEQ ID NO: 5246 - protein, 771 aa, Zea mays
MASSAFLPELGTQVVVPVAAVVGIAFAVLQWVLVSKVKLSPEPRRGDGSAGKSGAGAGASEYLIEEEEGLNEHNVVVKCAEIQNAISEGATSFLFTEYKYVGLFMGIFAVLIFLFLGSVESFSTKSQPCHYSKGKTCKPALANAIFSTIAFVLGAVTSLVSGFLGMKIATYANARTTLEARKGVGKAFITAFRSGAVMGFLLAASGLFVLYIAINLFGIYYGDDWEGLYEAITGYGLGGSSMALFGRVGGGIYTKAADVGADLVGKVERNIPEDDPRNPAVIADNFGDNVGDIAGMGSDLFGSYAESSCAALVVASISSFGINHEFTPMLYPLLISSVGIIACLITTLFATDFFEIKAVDEIEPALKKQLIISTAVMTVGIALVSWLGLPYTFTIFNFGVQKTVYNWQLFLCVAVGLWAGLVIGFVTEYYTSNAYSPVQDVADSCRTGAATNVIFGLALGYKSVIIPIFAIAFSIFLSFSLAAMYGVAVAALGMLSTIATGLAIDAYGPISDNAGGIAEMAGMSHRIRERTDALDAAGNTTAAIGKGFAIGSAALVSLALFGAFVSRAEISTVDVLTPKVFIGLIVGAMLPYWFSAMTMKSVGSAALKMVEEVRRQFNTIPGLMEGITKPDYATCVKISTDASIKEMIPPGALVMLTPLIVGIFFGVETLSGVLAGALVSGVQIAISASNTGGAWDNAKKYIEAGASEHARTLGPKGSDPHKAAVIGDTIGDPLKDTSGPSLNILIKLMAVESLVFAPFFATHGGILFKWL

SEQ ID NO: 5247 - protein, 552 aa, Francisella tularensis subsp. tularensis SCHU S4
MIKKFLRLIYIFYVINKYCLLNEPIRATKIKTLRALLLLNPFYYSRRVRRLEHGVRIREALEKLGPIFIKFGQALSVRADLLPPDVIKEVSKLQDNVPLFDNKIAAEQIEKAAKKPINEIFKSFESSPLASASVAQVHAAILQNDDKVVVKVLRPGIEKILKLDTSLMLFFATLLSKLKEIRRFKPVEIVKEINQSFFDELDLVREASNASQIRRNFEDSAIHYVPKIYWEYTSSTVMVMERVGGVRVSDIETLDALGVDRRLLAQRGVEIFYSQVFDDCFFHADMHPGNMFIDVSNPADPKYISIDFGIVGTLNRDDQRYLAGNFLAFFKRDYRKVAELHIESGWVPSDTRVDVLESAIRTVCEPIFEKPMKEISLGYTLMQLFAVARRFNMNIQPQLTLLQKTLFHVEGLGQKLCPELNIWETSRPILEKWMKEQMGLRGFYHRSMENMPRVSDKLPELPRMVFDILQQTQINLKNTTTSTQFNNLKEPKKKYRFALGCGLVLTTIGVIYTLNKDTTPLIKLQNFISNYSTSFIIVGVACLIYYSFKKEK

SEQ ID NO: 5248 - protein, 379 aa, Oryza sativa (japonica cultivar-group)
MVSGVAHRPDDDGGRAASTFQRPPQPAGARPSLATPPPSGGAQSASTSGGSAGSPSSRSEQHVPAAAGMAAGAAAASTPISENTFLRLNDLDIHGDDAPSSQAPTSKKKKRGARAVGPDKGGRGLRQFSMKVCEKVESKGRTTYNEVADELVAEFADPNNSILPPDPDNPNAQQYDEKNIRRRVYDALNVLMAMEIISKDKKEIQWKGLPRTSINDIEDLQTELVGLKSRIEKKNTYLQELQDQFVGMQKLIQRNEQLYGSGNIPSGGVALPFILVQTRPHATVEVEISEDMQLVHFDFNSTPFELHDDSFVLKAMSSCGEEQIDGIHDLISNGGESSSMPNIYRQQVQQPARSTNGTARLPSSPPIPGILKGRVKHEH

SEQ ID NO: 5249 - protein, 462 aa, Glycine max
  misc_feature (308)..(308): Xaa can be any naturally occurring amino acid
  unsure (1)..(462): unsure at all Xaa locations
MESKPHVLMQRYELGRLLGQGTFGKVYYARSTITNQSVAIKVIDKDKVMRTGQAEQIKREISVMRLARHPNIIQLFEVLANKSKIYFVIEYAKGGELFNKVAKGKLKEDVAHKYFKQLISAVDYCHSRGVYHRDIKPENILLDENGNLKVSDFGLSALVDSKRQDGLLHTPCGTPAYVAPEVIKRKGYDGTKADIWSCGIVLFVLLAGYLPFHDPNLIEMYRKISKAELKCPNWFPPEVCELLGMMLNPNPETRIPISTIRENSWFKKGQNIKNKRPVVENNTVSSSSTVLLDQNDCDGLAAEANGEXVVPLSINAFDIISRSVGFDLSRFFDESFKIKEARFSSRLPANVIISKLEDIAKQLRMKIKKKAAGLLKLESLNEGRKGVLSIDAEIFEVIPCFHMVEVKKSNGDTLEYQKILKEDIRPSLHDIVWVWQSDQQLQSQQSEQHQHTDDQQQQQPQS

SEQ ID NO: 5250 - protein, 835 aa, Gloeobacter violaceus PCC 7421
MRAVLMAGGSGTRLRPLTCDLPKPMVPILNRPISEHILNLLKRHGVDEVIATLYYLPDVMREYFRDGSDFGLRMTYAVEEEKPLGTAGCVKNIENLLHETFIVISGDSLTDIDLSAAVAFHKEHGSKATLVLARVPDPMEFGVVITDAHGRIVRFLEKPSTSEVFSDTVNTGTYILEPEVLEYLPADTEVDFSKDLFPKLLAKGEPMYGYVAEGYWCDVGSLDTYREAQYDALAGKIRLEHGYRQHAEGIWIGDNTLVDPSVHLEPPLIIGHNCRIGPRARLSAGTIIGDNVTVGAAADLKRPVIWNGAIIGEEVHLRGCTIARGARVGRRAQLLEGSVVGALTTVGDEAVIAPEVRLWPSKKVEVGAHVTMNLIWGTTAIRNLFSQRGVSGLANVEITPEFAVKLGAAYGATLKPGAQVQVSRDQRAISRMISRSLVSGLMSVGVNVQNLEATAIPIARYVAPMLEVNGGIHVRVHPEHNDRTLIEFFDSQGINLGKSREKKIESAFFKEDFRRARIDEIGEITYPSRTLEFYGAGFIDHLSAVALRNSPARVVIDYAYGVSGAVLPTLLGKLGCEAVVLNAALTPNAPPTSKQRESLLTQLGNVVEALQATFGVQIFANGERFTLVDEAGAAIKDEQLTALLVELVLTDSPRAVVVVPTEVSGVVEQIAHRHDGRVVRTKASPTALMEAAAATNNVALAGSAEMGFIFPQLHPGFDAMFAVARLIEMLAEQERSLSQTRQDLPRIHHRHHVIHCPWNAKGAMMRQLVESHPEESLELMDGVKVHFSKEDWVLILPDAGEPLVHIYSNGHNRESVERMARKYREVVQEFTRDRR

SEQ ID NO: 5251 - protein, 440 aa, Oryza sativa
MVTGGGHRHGGAAAERGEGKEETRRRSTAHPRSTATTKKAAGGVEGGGAARVDLDGGAPAIGELDEGVDGVDGCAAKPEEATPGREAVSEEPNVVNRITTAFWELQLPACSDEPISSGTPSSPSSPPTKETGDANTVVIDDLFLAHSDAILPAGGDQKEEHQLGDDLGQQQAATAMEIDDDVIYSLIRNWDNDSSSSWIELLDHAIVSPASCFVPWKRTELDKEAVAGGEAAQRLLKKVVGGGGAWMNRAAGSCSIKNHVMSERRRREKLNEMFLILKSLVPSIDKVDKASILSETIAYLKELERRVQELESGKKVSRPAKRKPCSETIIGGGGGGGGAGAVKEHHHWVLSESQEGTPSDVRVIVMDKDELHLEVQCRWKELMMTRVFDAIKSLRLDVVSVQASAPDGLLGLKIRAKYASSAAVVPAMISETLRTAVAGY

SEQ ID NO: 5252 - protein, 208 aa, Lycopersicon esculentum
NSARAQLAINDNANGLARYAIICQQNGLVPIVEPEILVDGAHDIKKCADVTERVLAACYKALNDHHVLLEGTLLKPNMVTPGSESPKVAPEVIAEYTVRALQRTMPPAVPAVVFLSGGQSEEEATVNLNAMNKLQTKKPWSLSFSFGRALQQSTLKAWGGKEENVQKAQAAFLTRCKANSEATLGKYVGASNLSEGASESLHVKDYKY

SEQ ID NO: 5253 - protein, 181 aa, Escherichia coli K12
MLKLLKTIMRAGTATVKYPFAPLEVSPGFRGKPDLMPSQCIACGACACACPANALTIQTDDQQNSRTWQLYLGRCIYCGRCEEVCPTRAIQLTNNFELTVTNKADLYTRATFHLQRCSRCERPFAPQKTIALAAELLAQQQNAPQNREMLWAQASVCPECKQRATLINDDTDVLLVAKEQL

SEQ ID NO: 5254 - protein, 303 aa, Streptomyces avermitilis MA-4680
MIVVAGEALIDLVPQGAGALAGLKPALGGGPYNTAVALGRLGSPTAFCSRTSRDAFGEALLDGLRTAGVDVSAVQRGAEPTTLAVATIDEHGSAAYSFYVDGTADRQFAAPDRLPGATRAVSFGTCSLVLEPGASAYEELLRSAAAQGLFTTLDPNIRAGLIPDPDAYRARFKSWLASVTLLKLSEDDATWLGGSPREWLASGPSAVVLTRGGDGLTVFTRDGAEHSVPGEPVDVVDTIGAGDTVNAALLHGLAARDALSPEGLAGLDAEGWTELLRFAARAAAITCSRAGAEPPYASELGAF

SEQ ID NO: 5255 - protein, 294 aa, Arabidopsis thaliana
MQIFVKTLTGKTITLEVESSDTIDNVKAKIQDKEGIPPDQQRLIFAGKQLEDGRTLADYNIQKESTLHLVLRLRGGMQIFVKTLTGKTITLEVESSDTIDNVKAKIQDKEGIPPDQQRLIFAGKQLEDGRTLADNIQKESTLHLVLRLRGGMQIFVKTLTGKTITLEVESSDTIDNVKAKIQDKEWIPPDQQRLIFAGKQLEDGRTLADYNIQKESTLHLVLRLRGGMQIFVKTLTGKTITLEVESSGTIDNVKAKIQDKEGIPPDQQRLIFAGKQLEGGPGGGGGSRASRVGV

SEQ ID NO: 5256 - protein, 618 aa, Alkalilimnicola ehrlichei MLHE-1
MAGLCGWFSTGGGQDGRDIRSRADTLAARRGAGMDSRSNPRAACLVRDGWLAEDDQGRMVALVGHPHWRDGELAELARAQDPAQALLEAWRRHGPGLLDCLAGDFALAVIDTAQGRVLAGVDRMGQQPLHYARIPGGVVFGSTADSVLAHPGLSRTPTPEGLYHYLFFHMLPAPVSLFPDLAKLQGAHCLQAEGGAVEATPYWQPRFQEPDGADGAELGEELRGLLHESVRRRADVDRPGAFLSGGLDSSTVAGMLAGVRPEGADTFSIGFHAEGYDELPYARIAARHFGTRSHEYYVTPEDVVEAVPLIAASYDEPFGNSSALPAYFCARVAAEQGVTRMLAGDGGDELFAGNARYAKQGVFEHWGRLPAPARRALEPLFTRLPRGLPVLGKARSYVEQARIPLPDRLQTYNYLHRLAVEEMLEPDFLGQVDREAPWGLMRSIYQRPQGASALNRMMYLDWQQTLADNDLRKVSRMVQLAGLDVVYPMLDDDLVVFSCRVPSALKLHKGRLRHFYKEALSGFLPAEIIDKKKHGFGLPFGVWMHEHPPLREMAYDSLLRLKGQGFLRPAFIDELIRLHREGHSAYYGDFVWILMMLDLWLEAHPAEGAGRLPRAAQA

SEQ ID NO: 5257 - protein, 464 aa, Lycopersicon esculentum
MATCGIDWKSVLPNCFKGNNVRSEAKVMENSKQMNSDHHRLAFSDISTDSRSVLISLDDLSSNAVIGSNLHVFTYEELKLITSDFSSANFLGKGGFGPVHKGFIDDKIKPGLDAQPVAVKLLDLDGNQGHQEWLTEVVFLGQLRHHHLVKLIGYCWEEEQRLLVYEYMARGNLEDQLFSRYSSCLPWLTRIKIMVGAAKGLAFLHGEEKPVIYRDFKASNILLDSDYRAKLSDFGLAKDGPEGDDTHVSTRVMGTHGYAAPEYIMTGHLTSKSDVYSFGVVLLELITGRRAMDKKRPLKERILVDWARPMLRDPHKLDRIMDPRLEGQYSTQGAKKVAALAYQCLSHHPRSRPTMSNIVKILEPVLDMKDIPMGPFVYVVPSSKPDKGTEIGELKTKVNDENKAGVRENEVDNAGENREDGNAKQRRVGHRYKHRLKTDASVYSDTHLYHKTVKHERTNKLNSY

SEQ ID NO: 5258 - protein, 338 aa, Escherichia coli
MRVLVTGGSGYIGSHTCVQLLQNGHDVIILDNLCNSKRSVLPVIERLGGKHPTFVEGDIRNEALMTEILHDHAIDTVIHFAGLKAVGESVQKPLEYYDNNVNGTLRLISAMRAANVKNFIFSSAATVYGDNPKIPYVESFPTGTPQSPYGKSKLMVEQILTDLQKAQPDWSIALLRYFNPVGAHPSGDMGEDPQGIPNNLMPYIAQVAVGRRDSLAIFGNDYPTEDGTGVRDYIHVMDLADGHVVAMEKLANKPGVHIYNLGAGVGNSVLDVVNAFSKACGKPVNYHFAPRREGDLPAYWADASKADRELNWRVTRTLDEMAQDTWHWQSRHPQGYPD

SEQ ID NO: 5259 - protein, 156 aa, Brassica oleracea var. oleracea
AQTNWSMEYSRLKAKIELWERNQRHYLGEDLESISIKELQNLEQQLDTSLKHIRSRKNQLMHESLNHLQRKEKEILEENSMLAKQIKERESILRTHQNQSEQQNRSHHVAPQPQPQLNPYMASSPFLNMGGMYQGEYPTAVRRNRLDLTLEPIYNC

SEQ ID NO: 5260 - protein, 350 aa, Staphylococcus epidermidis ATCC 12228
MKAAVWYGQKDVRVEDREPKAIKDNEVQVKVSWAGICGTDLHEYLEGPIFISTDQPDPLLGQTAPVTLGHEFSGVIENVGKDVSRFKKGDRVVVNPTVSKREKPENVDLYDGYSFIGLGSDGAFAEFTNAPETNVYHLPDNVSAREGALVEPTAVAVQAVKEGELLFGDTVAVFGAGPIGLLTIVAAKAAGASKIFVFDLSEERLAKAKSVGATHVYNSGNVDPVQTVYEHTDNGVDVSFEVAGVGITLQQSIEVTRPRGTAVIVSIFGHPVEFNPLLQMNKGVKLTTTIAYTPTTFQQTIDLIANGSLNVKDVVTDQIELENIVESGFNQLVNDKSQAKILVRLNGDQK

SEQ ID NO: 5261 - protein, 480 aa, Arabidopsis thaliana
MQISSSSFITKFTNLHMVRSTSDHHQWRHNYNLKQLFIPNLSVSNSQHLPLNQSVAAIVFGGGSDSELYPLTKTRSKGAIPIAANYRLIDAVISNCINSGITKIYAITQFNSTSLNSHLSKAYSGFGLGKDRFVEVIAAYQSLEDQGWFQGTADAIRRCLWVFEEFPVTEFLVLPGHHLYKMDYKMLIEDHRRSRADITIVGLSSVTDHDFGFGFMEVDSTKAVTRFTIKGQQDLISVANRTATRSDGTSSCSVPSAGIYVIGREQMVKLLRECLIKSKDLASEIIPGAISEGMKVKAHMFDGYWEDVRSIGAYYRANMESIKRCRLDLRFYDRQCPLYTMPRCLPPSSMSVAVITNSIIGDGCILDKCVIRGSVVGMRTRIADEVIVEDSIIVGSDIYEMEEDVRRKGKEKKIEIRIGIGEKSRIRRAIVDKNARIGKNVMIINRDNVEEGNREAQGYVIREGIIIILRNAVIPNDSIL

SEQ ID NO: 5262 - protein, 447 aa, Galactomyces geotrichum
MREIIHVSAGQCGNQIGAAFWETISGEHGINPSGIYEGTDPLQLERLSVYYNEAGNGKYVPRAVLVDLEPGVMDAVRSGTYGNLFRPDNFIFGQSGAGNNWAKGHYTEGAELVDSVLDIVRREAENSDSLQGFQISHSLGGGTGSGMGTLLISKIREEYPDRMMATFSVVPSPKVSDTIVEPYNATLSVHQLIENADETFCIDNEALYDICQHTLKLKQPTHADLNQLVSGVMSGITTCLRFPGQLNSDLRKLAVNLVPFPRLHFFMVGYAPLSAPGQQSFRSLTVPELTQQLFDSKNMMAASDPKRGRYLTVAAFFRGKVSIKEVEDQMRSVQERNSAYFVEWIPNNVQTAICSVPPKDVKMSATFIANSTSIQELFKRVGDQFSAMFRRKAFLHWYTNEGMDITEFAEAESNMNDLVSEYQQYQNATVDDEDMEYEDELPLEDEM

SEQ ID NO: 5263 - protein, 393 aa, Mycobacterium leprae TN
MTTSVIVTGARTPIGKLMGSLKDFSASDLGAITIAAALKKANVAPSIVQYVIIGQVLTAGAGQMPARQAAVAAGIGWDVPALTINKMCLSGLDAIALADQLIRAGEFDVVVAGGQESMTKAPHLLMDSRSGYKYGDVTIVDHLAYDGLHDVFTNQPMGALTEQRNDVEKFTRQEQDEFAARSHQKAAAAWKDGVFADEVVPVSIPQSKGDSLQFTEDEGIRANTSAESLAGLKPAFRCGGTITPGSASQISDGAATVVVMNKEKAQQLGLTWLVEIGAHGVVAGPDSTLQSQPANAIKKAVDREGISVEQLDVVEINEAFAAVALASARELGIAPELVNVNGGAIAVGHPLGMSGARITLHVALELARRGSGYGVAALCGAGGQGDALILRAV

SEQ ID NO: 5264 - protein, 410 aa, Mycobacterium bovis BCG
MTVFSALLLAGVLSALALAVGGAVGMRLTSRVVEQRQRVATEWSGITVSQMLQCIVTLMPLGAAVVDTHRDVVYLNERAKELGLVRDRQLDDQAWRAARQALGGEDVESDLSPRKRSATGRSGLSVHGHARLLSEEDRRFAVVFVHDQSDYARMEAARRDFVANVSHELKTPVGAMALLAEALLASADDSETVRRFAEKVLIEANRLGDMVAELIELSRLQGAERLPNMTDVDVDTIVSEAISRHKVAADNADIEVRTDAPSNLRVLGDQTLLVTALANLVSNAIAYSPRGSLVSISRRRRGANIEIAVTDRGIGIAPEDQERVFERFFRGDKARSRATGGSGLGLAIVKHVAANHDGTIRVWSKPGTGSTFTLALPALIEAYHDDERPEQAREPELRSNRSQREEELSR

SEQ ID NO: 5265 - protein, 585 aa, Bacillus licheniformis ATCC 14580
MRKTKIVCTIGPASESVEKLTQLMEAGMNVARLNFSHGDFEEHGARIKNIREAAGKLGKDIGILLDTKGPEIRTHTMENGSIELAAGSQLIVSMDEVIGTPDKISVTYDGLIHDVSVGSTILLDDGLVGLEVTDINKDKREIVTKVMNSGTLKNKKGVNVPGVSVNLPGITEKDANDIVFGIEQGVDFIAASFVRRPSDVLEIRELLEEHNAADIQIIPKIENQEGVDNIDAILEVSDGLMVARGDLGVEIPAEEVPLVQKELIKKCNALGKPVITATQMLDSMQRNPRPTRAEASDVANAIFDGTDAIMLSGETAAGNYPVEAVQTMHNIASRSEEALNHKKILSARSKQVSMSITDAIGQSVAHTAINLDVNAIVTPTESGHTARMISKYRPQAPIVAVTVNDAVSRKLSLVFGVFATSGQNHSSTDEMLEKAVQKSLDTGIVRHGDLIVITAGAVGEAGTTNLMKVYVVGDVVAKGQGIGRKSAFGEVVIAQNAQEAAKKMKDGAVLVTKSTDRDMMASLEKAAALITEEGGLTSHAAVVGLSLGIPVIVGMENATSILKEGEDITVDSARGAVYKGRASVL

SEQ ID NO: 5266 - protein, 587 aa, Arabidopsis thaliana
MGVLQEKLSSFYKSRWLVFVAAMWLQSWAGIGYLFGSISPVIKSSLGYNQKQLAMLGVAKDLGDAVGFMTGLLCEILPIWGALLVGAALNLVGYGWVWLVVTSQVPVLPLWAMCALIFVGTNGETYFNTVSLVSCVQNFPKSRGPVVGILKGFAGLSGAILTQIYALFHAPNQASLIFMVAVGPSLVGIGLMFIVRPVGGHKQVRPSDGKCFTLIYGVCLLLAAYLLGVMVVQDLVEVSETVISIFTGVLLLILLVPIVIPITLSFGPEQRHPEVEALLPPPQNKEAGKSQLDSDEVILSELEDEKPKEVDMLPASERQKRIAHLQQRLLQAAAEGAVRVKRRRGPHRGEDFTLTQALIKADFWLLFISMIMGSGSGLTVIDNLGQMSQSLGYDNAHIFVSMISIWNFLGRVGGGYISELVVRDHAYPRPVALAVFQLIMTLGHVFLGMGWPGSMYVGTLLVGLGYGAHWAIVPATASELFGLRNFGALYNFITIANPAGTLVFSSLIASTIYDAEAEKQHRQNMMLRVLNASEPLKCEGSVCFFLTSMIMAGLCVVGAGLCMVLVLRTRIVYANLYGKASSSRLRL

SEQ ID NO: 5267 - protein, 286 aa, Thermotoga maritima MSB8
MGALTRHEVLELKRKAIEIRKMILDMIYKAKSGHTGGSLSSVEILVTLFYKILRVKPEDPNWEDRDRFILSKGHSVEAYYAVLADKGFFPKEELETYCKYGSRLTGHPTRKVPGVEVNTGALGHGLAIGVGMALAGKMDGKDYKVYVLMGDGELDEGSVWEAAQVASHYSLDNLIGIVDRNRLQISGHTEEVLKLEPLSKRWEAFGWNVLEVDGHDFESLYKTFVSIPRETGKPHLIIANTIKGKGISFIEGRVEWHHKVPSDEEYRKAIEELEEQLKTLEEGDMV

SEQ ID NO: 5268 - protein, 321 aa, Bacillus thuringiensis serovar konkukian str. 97-27
MKALCFETFGNADVLQYKEIPDPIINPNEILVRTKAIGLNFADIYRRRGDYHLAGNPPYILGYEGAGIVEEIGTNVTTIKPGDRIAFADVPFANAELVAVPSEKTIQLPNSISFETAASVLLQGLTAHYLTKDSYQIKQGDIALVHATAGGVGQLLIQIIKLLGGTAIGLTSSNEKAKVATLAGADHVFLYSEKWHSKVLEITNGTGVNVVYESVGSTLEESFNATKIGGTVVFYGMAGGNPAPVDPRILMDTSKTLTGGDLWNVLTTFEERKQRSTQLFDWIASGKLNTASPTTFSLQDGAHAHKLLESRKSTGKILLIP

SEQ ID NO: 5269 - protein, 384 aa, Bacillus anthracis str. A2012
  misc_feature (365)..(365): Xaa can be any naturally occurring amino acid
  misc_feature (374)..(374): Xaa can be any naturally occurring amino acid
  unsure (1)..(384): unsure at all Xaa locations
MRKFDKSIAAFEEAQDLMPGGVNSPVRAFKSVGMNPLFMERGKGSKVYDIDGNEYIDYVLSWGPLIHGHANDRVVEALKAVAERGTSFGAPTEIENKLAKLVIERVPSIEIVRMVNSGTEATMSALRLARGYTGRNKILKFIGCYHGHGDSLLIKAGSGVATLGLPDSPGVPEGVAKNTITVAYNDLESVKYAFEQFGDDIACVIVEPVAGNMGVVPPQPGFLEGLREVTEQNGALLIFDEVMTGFRVAYNCGQGYYGVTPDLTCLGKVIGGGLPVGAYGGKAEIMRQVAPSGPIYQAGTLSGNPLAMAAGYETLVQLTPESYVEFERKAEMLEAGLRKAAEKHGIPHHINRAGSMIGIFFTDEXVINYDAAKXQTYILCGLLS

SEQ ID NO: 5270 - protein, 287 aa, Lupinus albus
GKEQDVSLGANKFPERQPLGIAAQSQDEFKDYQEPPPAPFFEPSELTSWSFYRAGIAEFVATFLFLYITILTVFGVQRSPTKCQSVGIQGIAWAFGGMIFALVYCTAGISGGHINPAVTFGLFLARKLSLTRAVFYIVMQVLGAIVGAGVVKGFEGKHRYTQYNGGANFVAPGYTKGDGLGAEIVGTFVLVYTVFSATDAKRSARDSHVPILAPLPIGFAVFLVHLATIPITGTGINPARSLGAAIIFNKDLGWNDHWIFWVGPFIGAALAALYHQVVIRAIPFKSK

SEQ ID NO: 5271 - protein, 322 aa, Sesbania rostrata
MAEKKIPEVLLNSGHKMPVIGMGTSVESRPSNDVLASIFVDAIQVGYRHFDSASVYGTEEAIGMAVSKAIEQGLIKSRDEVFITSKPWNTDAHHDLIVPALKTTLKKLGMEYVDLYLIHWPVRLRHDLENPVIFSKEDLLPFDIEGTWKAMEECYRLGLAKSIGICNYGTKKLTKLLEIATIPPAVNQVEMNPSWQQGNLREFCKQKGIHVSAWSPLGAYKIFWGSGAVMENQILQDIATAKGKTIAQVALRWVYQQGSSAMAKSFNKERMKQNLEIFDFELSEEELEKIKQIPQRRQYTGDMWLSENGSCKTLEELWDGDV

SEQ ID NO: 5272 - protein, 250 aa, Bacillus anthracis str. A2012
MNALAGKTVLITRAQHQAKQMSVAVKEKSGIPLEIPLLRMEGMFHRQIQHIAGQLHSYDWVIFTSKNGVAFFLDCLGKKLPVTTKIAAVGVKTKLELEKRGYHVDFVPTSFVAEAFAEEFVKRLSGNERILFPKGNLAREVIPVALREIGVSLDELIVYGTKVNIEKKQELIAALKLGKVDIITFTSPSTVTSFVRLLEGTNWREWTKKCTIACIGPITEKEASLYFPHVIMPKEYTVEALLQCVCESIK

SEQ ID NO: 5273 - protein, 631 aa, Alkalilimnicola ehrlichei MLHE-1
MCGITGIFDLQAQRPIDVPLLEAMNQTQYHRGPDEGGLHHEPGVGLAHRRLSIIDLSSGQQPLFNEDGSVAVTYNGEIYNFPELTRTLQSAGHTFRTHCDTEVIVHAWEEWGEACVERFRGMFAFALWDRNRETLFLARDRLGIKPLYYAALPDGHLLFASELKALMAHPDLPRQLDPCAVEEYFGFGYVPEPRSIFAGVHKLPPGHTLTVRRGQGGVPASRAYWDVPFAPLPAMGEAEAAEELVRRLREAVEIRLVAEVPLGAFLSGGVDSSAVVAMMAGLSPDPVRTCSIGFDDPRYDESEYARMVAERYRTAHRLDQVNPDDFDLLGKLGALYDEPFADSSALPTYRVCEQARRQVVVALSGDGGDENLAGYRRYRHHLGEERLRGLLPLGLRRGLFGSLARVYPKADWAPRVFRAKATFQALARDAVEGYFQGVSILRDDLRRHLFSSGFRSELQGYSAVDVLRRHAAQAPTDHPLSLVQYLDMKTYLPGDILTKVDRASMAHALEVRVPILDHKLVEWMSGLPPEMKLNGSEGKHLLKKAMEPHLPHEVLYRKKRGFAVPVAEWFRGPLRQRVRDQVLGPRIGESGLFDMDFLNRLVDEHTRGARDHSPALWSLLMFDEFLAKARP

SEQ ID NO: 5274 - protein, 429 aa, Escherichia coli K12
MTRRAIGVSERPPLLQTIPLSLQHLFAMFGATVLVPVLFHINPATVLLFNGIGTLLYLFICKGKIPAYLGSSFAFISPVLLLLPLGYEVALGGFIMCGVLFCLVSFIVKKAGTGWLDVLFPPAAMGAIVAVIGLELAGVAAGMAGLLPAEGQTPDSKTIIISITTLAVTVLGSVLFRGFLAIIPILIGVLVGYALSFAMGIVDTTPIINAHWFALPTLYTPRFEWFAILTILPAALVVIAEHVGHLVVTANIVKKDLLRDPGLHRSMFANGLSTVISGFFGSTPNTTYGENIGVMAITRVYSTWVIGGAAIFAILLSCVGKLAAAIQMIPLPVMGGVSLLLYGVIGASGIRVLIESKVDYNKAQNLILTSVILIIGVSGAKVNIGAAELKGMALATIVGIGLSLIFKLISVLRPEEVVLDAEDADITDK

SEQ ID NO: 5275 - protein, 445 aa, Oryza sativa
MSFRSIVRDVRDGFGSLSRRGFEVRLVGHRRGRSHSAVHELRDGHAAAAAADVVQSSCWANLPPELLRDVIERLEASEAAWPSRKNVVACAAVCRTWRDMCREIVKNPEFCGKITFPVSLKQPGPRNGAIQCFIKRDKSTQTYNLYLCLSSAVLVESGKFLLSAKRYSRATCTEYTIFMSADNTSRSSNMYIGKLRSNLLGTKFVIYDTQPPCNTANVSQSGKTSRRFYSRKVSPKNPSSTYSIAQVSYELNVLGTRGPRRMNCVMHSIPASSLEAGGTVPCQPDSVLARSLDESFGSISFSKSSIMDRAIRFSSSRYSDISVGGPMVGGQALGDSDESKERPLILRNKAPRWHEQLQCWCLNFKGRVTVASVKNFQLVAATQPAAGAPTPSQPAPPPPPDHDKVILQFGKVAKDMFTMDYRYPLSAFQAFAICLSSFDTKLACE

SEQ ID NO: 5276 - protein, 134 aa, Bacillus halodurans C-125
MRDQMLPSIILFDGVCNFCNYWVQFIIKRDPQATFQFASLQSEVGQELLEKHSIDRSTDSVVLIMEGQAFVCSDAVLKIVAQLDSPIRWLKWAVIFPRFLRDFIYRIVARNRYKWFGKRDECQIPTKEQRSRFL

SEQ ID NO: 5277 - protein, 156 aa, Brassica oleracea var. oleracea
AQTNWSVEYSRLKAKIELLERNQRHYLGEDLESISIKELQNLEQQLDTSLKHIRSRKNQLMHESLNHLQRKEKEILEENSMLAKQIRERESILRTHQNQSEQQNRSHHVAPQPQPQLNPYMASSPFLNMGGMYQGEYPTAVRRNRLDLTLEPIYNC

SEQ ID NO: 5278 - protein, 424 aa, Saccharomyces cerevisiae; identical to SEQ ID NO: 770

SEQ ID NO: 5279 - protein, 378 aa, Schizosaccharomyces pombe 972h-
MSSTALLPPNTDQVLSRRLHGKAAEKKTGLAAIASKDVDEQSRKLQEYFEFWDRNHENESEEDRARRIDGYKSVVNSYYDLATDLYEYGWSQSFHFSRFYKGEAFAQSIARHEHYLAYRMGIKPGSRVLDVGCGVGGPAREITEFTGCNLVGLNNNDYQISRCNNYAVKRNLDKKQVFVKGDFMHMPFEDNTFDYVYAIEATVHAPSLEGVYGEIFRVLKPGGVFGVYEWVMSDDYDSSIPKHREIAYNIEVGDGIPQMVRKCDAVEAIKKVGFNLLEEDDLTDHDNPDLPWYYPLTGDITKCQNIWDVFTVFRTSRLGKLVTRYSVQFLEKIGVAAKGTSKVGDTLAIAQKGLIEGGETHLFTPMFLMIAKKPETDA

SEQ ID NO: 5280 - protein, 369 aa, Frankia sp. CcI3
MGQARCCGQSRRTQHRDGFPAGCARPYNSSERRDVCNYPSITFQPAQAFPPTKDHQHNHEHPTLPLHHKIPHRPLPNPAHHHPRHHPRHHRHPRPQPPRRHHPPHRRRPRHSRQTRLARPTRRHPRPRPRHRPPPRPDHPPRHHHLAVDRNDRRRRGRCRPCNRHHPRRTPTHDRHRHDHRRPRRRHRRRPPRPAPTPPEHRPTTDHRHRGRAPPPRPTHSHPQKGSHDTMTDPHDTTGPDKIVKTDEQWRAELDPERYAILRRAATEPPFTGAYTYSKENGTYRCGGCGAALFTSDTKYDSGSGWPSFTQPAVADALELVEDHSHGMIRTEVRCARCGGHLGHVFDDGPGPTGQRYCMNSLALDLDPH

SEQ ID NO: 5281 - protein, 606 aa, Delphinium x belladonna
MDSCACIDTQWPADELLVKYQYISDFFIALAYFSIPLELIYFVQKSAFFPYRWVLMQFGAFIVLCGATHLINLWTFSMHSKTVAMVMTIAKISTAVVSCATALMLVHIIPDLLSVKTRELFLKNKAEELDREMGLIRTQEETGRHVRMLTHEIRSTLDKHTILKTTLVELGRTLGLEECALCMPSRTGMNLQLSHTLRHQIPVGSTVSTNLPIVTQVFNSNQAIKIPHTCPLARIGPTAGRYVPPEVVAVRVPLLHLSNFQINDWPELSAKSYAVMVLMLPTDSARKWHDHELDLIEVVADQVAVALSHAAILEESMRARDMLMEQNIALDMARREAEMAIRARNDFLAVMNHEMRTPMKAVIALSSLLLEIELTPEQRVMIETVFKNSNLLAALINDVLELSRLEDGSLELDIRTFNLHGIFREVLNMIKPITAVKKLSLTLMLSPDLPVVAVGDEKRLMQIMLNVVGNAVKFTKEGYVSVIASVAKAESLRDWQAPEIFMVSSDSHFHLCVQVKDSGCGISPQEIPHLFTKFTQLRSGQNRGNDGAGLGLALCKRFLNLMEGHIWVDSDGTDKGCTVTIIVKLGICEGQPEPSNLQVVSRPRLS

SEQ ID NO: 5282 - protein, 596 aa, Delphinium x belladonna
MMGSCDCIDTRWPANDLLVKYQYLSDFFIAVAYFSIPLELIYFVQKSAFFPYRWVLMQFGAFIVLCGATHLISLWTFSMHSKTLAMVMAIAKGATALVSCATALMLVHIIPDLLSVKTRELFLRNKAEALDRDLGLIRTEEETGRHVRMLTHEIRSTLDRHTILKTTLVELGRILDLEECALWMPSRNGMNLQLTHTLHHHIPVGSTVATNLPVVNLVFNSTEAIQIPPTCPLARIKPHTGRYLPPEIVAVRVPLLHLSNFEINDWPELSAKSYAVMVLMLPIDSARKWHDHELDLVEVVADQVAVALSHAAILEESMRARDKLMEQNIALDLARQDAERAIRSRNDFLAVMNHEMRTPMNAGMALSSLLLEIELTPDQRVMIESVLKNSNILETLINDVLELSRLEDGSLELNVKTFNLREAFREVLKLLKPIAAVKKLSLTLKVAPDLPVWAVGDETRIMQIILNVVGNAVKFTKEGHISVAACVAKAESIRGGLTPESHPLSSDSHFYLRIQVKDSGCGISSQDIPHLFTKFAQSRGGQIRNNDGAGIGLALSKRFLHLMGGHVSIESDGTGKGSTVTMVLKLGTSDGPNPQI

SEQ ID NO: 5283 - protein, 725 aa, Dianthus caryophyllus
MPAVACYVDTSAAVYGGAGALSLPAPEINFSGVPPTTNSTTVNQPPLPQQWSPSLSAELYRIDRWGPPYFAVNSSGNVTVKPFGDATLPHQEIDLLKVVKKVSDPKSSSGLGLHLPVIIRFPDVLKHRLESLQSAFDFAVRTHGYGSHYQGVYPVKCNQDRYIVEDIVEFGSGFRFGLEAGSKPELLMAMSSLCKGSPDSLLVCNGFKDAEYISLAIIGRKLGLNTVIVIEQEEEVDMAIELSRKMGIRPVVGVRAKLRTKHSGHFGSTSGEKGKFGLTTTQILRVVRKLESFGMLDCLQLLHFHIGSQIPTTALLSDGVAEASQVYCELTRLGAHMRVIDIGGGLGIDYDGSKSGDSDLSVGYTLEEYASAVVGTVKSVCDRKGVKSPVICSESGRAIVSHHSILVFEAVSSSSSASPPMPGSTLALDYLVDGLTDEVKGEYRSLTAAAMRGEYESCLMYSGMLKQRCVELFKDGCLGMEQLAAVDGLCELVSKALGVADGVCTYNVNLSVFTSIPDFWGIGQLFPIMPIHRLDQQPKARGILSDLTCDSDGKIDKFIGDESSLPLHELSGGEGYYLGMFLGGAYEEALGGVHNLFGGPSVVRVQQSDGPQSYAVTRAVPGPSSSDVLRVMHHEPELMFQTLKHRAEECDNDYTAGPLADMLAQSFNSTPYLVPGHATGSCGLSNGSGLVNGCREYFYGVDDGCNAAAVDAAAGEEEQWSYVCA

SEQ ID NO: 5284 - protein, 178 aa, Trifolium repens
MALISSAAVTTINRAPVQANLATPFTGLKSSAGFPVTKKNNDITSITSNGSRVNCMQVWPPVGKKKFETLSYLPPLTDEQLLKEVEYLLRKGWVPCVEFELEKGFVHRQYNSSPGYYDGRYWTMWRLPLFGTTDAAQVLKEVAECKAEYPEAFIRIIGFDNVRQVQCISFIASTPKVY

SEQ ID NO: 5285 - protein, 485 aa, Mycobacterium avium subsp. paratuberculosis K-10
MTENFTTTNAGAPAPSDELSLTLGPDGPVLLQDFYLIEQLAAFNRERVPERQPHAKGTGAFGRFEVTNDLSAYTKAAVFQPGTKTDVFVRLSGNAGERGSADTVRDTRGFSVKFYTTEGNFDLVGLDFPVFVIRDPIKFPQMVRSAKRRANNDCRDHNMQWDFWTLSPESAHQVAMIMSDRGIPKTFRHMHGFGLHTFSFLNAAGEISWVKFHFKSNQGIEWLTQEEGDRLAGTDPDYCIRDLYEAIERGDHPSWSVKVQIMPFEEAKTYRFNPFDVTKVWPHADYPLIDLGTMTLDRNVTDHHTEVEQVTFAPHALVPGIGLSPDKLLLGRSFAYADAHRYRVGANHNQIPVNAPRCPVRSYSKDGQMRFVNSTDPVYAPNSYGGPKADPDRASVVKWAVDGGMMVRAPYTLRPDDDDWGQAGALVRDVMDDAERERLVHNIVHHVTDGVKEPVLSRVVEYWYNIDADIGKRVEDGIRAANLGR

SEQ ID NO: 5286 - protein, 484 aa, Mycobacterium avium subsp. paratuberculosis K-10
MAENHTTTNAGAPAPSDELSLTVGPDGPLLLQDSYLVEQMAAFNRERVPERQPHAKGAGAYGRFEVTADVSEYTKAAFLQPGAVTEVFARFSSGNSGERGSADTARDNRGFSVKFYTTEGNFDLVGSDVPVFAIRDPMKFPNLIRAGGRRADNDLHDHNMVWDFWTSCPETAHLVTLVMGDRGIPRTFRHMNGFGLHAFSWVNSAGEIHWVKYHFKTDQGIQWLPQEEGRRLAGTHPDCCVRDLYEAIARGKYPSWSLQVQLMPFADAKTYRFNPFDVTKVWPHADYPPIEIGTMTLDRNVTDHHAEVEQAAFAPSNLVPGTGLSPDRLLLGRSFAYPDAHRARIGVNHDQLPVNAARCAVRSYAKDGRMRFVNTADPVYAPNSAGGPQADPARAGEVHWAADGQMLRAAYTLRRDDDDWGQAGTLVRRVMDDSQRERLVHNIVGHVSAGVNEPVLSRVFAYWRHVDADIGRKVEEGVRANLNS

SEQ ID NO: 5287 - protein, 306 aa, Ralstonia solanacearum
MSHAAQPTLHGHDAAAWRHSHRFVEDRPRAERRTLYAVQLTAAVMMAEIVGGWWTGSMALLADGWHMSTHVLALGIALVAYVIARRLGEDPRFTFGTWKIEILGSFASALLLGVVGVLMAVELAQRLLAPVGIHYSEALWVTAVGLAVNVVCALRLAGAHDHDHGHAHASGPAAGTRRHDDDRDRDRERDKERDDTHEHETRHRDHDRDHRHEHDHKHEPEHDHDEHRHRDHPQEAALHRRSHAARAHAHGDHGHPHHHHDLNLRAAYLHVVADAATSVLAADGAVRRQVPGAALDRLGGRDRRRG

SEQ ID NO: 5288 - protein, 239 aa, Triticum aestivum
  misc_feature (220)..(220): Xaa can be any naturally occurring amino acid
  unsure (1)..(239): unsure at all Xaa locations
MSSMQFSSVLPLEGKACVSPVRREGSACERLKVGDSSSIRHDRASRRMCNGGRGPAATGAQCVLTSDASPADTLVLRTSFRRNYADPNEVAAVILGGGTGTQLFPLTSTRATPAVPIGGCYRLIDIPMSNCFNSGINKIFVMTQFNSASLNRHIHRTYLGGGINFTDGSVEVLAATQMPGEAAGWFRGTADAVRKFIWVLEDYYKSKSIEHILILSGDQXYRMDYMELVQKHVDDNADI

SEQ ID NO: 5289 - protein, 761 aa, Triticum aestivum
MAILGELGTEILIPVCGVVGIVFAIAQWFIVSKVKVTPGAAAAGGSKNGYGDYLIEEEEGLNDHNVVVKCAEIQTAISEGATSFLFTMYQYVGMFMVVFAAVIFVFLGSIEGFSTKGQPCTYSTGTCKPALYTALFSTASFLLGAITSLVSGFLGMKIATYANARTTLEARKGVGKAFITAFRSGAVMGFLLSSSGLVVLYITINVFKMYYGDDWEGLFESITGYGLGGSSMALFGRVGGGIYTKAADVGADLVGKVERNIPEDDPRNPAVIADNVGDNVGDIAGMGSDLFGSYAESSCAALVVASISSFGINHDFTAMCYPLLVSSVGIIVCLLTTLFATDFFEIKAASEIEPALKKQLIISTALMTIGVAVISWLALPAKFTIFNFGAQKDVSNWGLFFCVAVGLWAGLIIGFVTEYYTSNAYSPVQDVADSCRTGAATNVIFGLALGYKSVIIPIFAIAVSIYVSFSIAAMYGIAMAALGMLSTMATGLAIDAYGPISDNAGGIAEMAGMSHRIRERTDALDAAGNTTAAIGKGFAIGSAALVSLALFGAFVSRAGVKVVDVLSPKVFIGLIVGAMLPYWFSAMTMKSVGSAALKMVEEVRRQFNTIPGLMEGTAKPDYATCVKISTDASIKEMIPPGALVMLTPLIVGTLFGVETLSGVLAGALVSGVQIAISASNTGGAWDNAKKYIEAGNSEHARSLGPKGSDCHKAAVIGDTIGDPLKDTSGPSLNILIKLMAVESLVFAPFFATYGGVLFRYI

SEQ ID NO: 5290 - protein, 96 aa, Zea mays
  misc_feature (46)..(46): Xaa can be any naturally occurring amino acid
  unsure (1)..(96): unsure at all Xaa locations
MAGGFRVLHLVRPFLAFLPEVQSADRKIPFREKVIYTVISLFIFLXGSKIIEVDNSVREDRALLNGAQKLLGILIAIGEAVAYVLSGMYGSVSQLG

SEQ ID NO: 5291 - protein, 650 aa, Neurospora crassa
MRPDDDEIGSPLLHGHFSTEHLEVGSDGGDYGTAITPLYESDCATPGSDIQEGVRQIEAVSRTWTKSALIVAYMSIFLIAFTTSLEGQVTYALTAFAVSSFNNHSLLSTVSVVQNVVNAVIKPPMAKIADVFGRLEAFAISIVLCVLGYILMAASKNVETYASAQIFYAAGSTGLQILQQVFIADTSSFLNRALFSSLPDSPFLVTVWIGPLIASAILASTTWRWGYGMWALILPVAFLPLALSLYLNRRKAEALGILKPKHYRSNNNHGTTKTKIRHILLRDLDIIGTLLFSAGLSLILIPLTLISRSPQGWRDPKLLPMIILGTFLLILFPLWESRPNLAPHPLLPLDLLKSRTFVAGCSLGFFYFMIFYIAVQPYFYSYLLVALNLPVNRAGQITQTFSFASTIAAILASLGIRQSRSPRPRPFIITGALLYTFAIVILLMTRTKGVSIHSLFSAQAVLGAGAGLMHVATQLAVQASCGDKHAHVGVATAAFLTLVEVGAAVGAAFSGVIWGRLIPRKLVAYLPDALKGEAKKIYASVVVARSYPWGSVEREAIARAYQETVTVLLKFALVWCVPLLVVALFVGDYRLGEGGKWEVWNGRGLVVGTGEEEIDERARRMEERVEWWRFWVWMGKGRGYYKRMRPGRRL

SEQ ID NO: 5292 - protein, 384 aa, Xanthomonas campestris pv. campestris str. ATCC 33913
MTQPVVATSLFTEQVLPPWRRAVLKVGSSLLAADGGGLSPRFALGLAQFVSANLAAGREVVIVSSGAVAAGRAILPKAAEAGAAIAARQALAALGQAQLIALWQRFFERPVAQVLLTHDDLRNRRRYLNARATLGELLRLGALPVINENDTVSVDELKLGDNDNLAAIVAALVDADALFIATDIDGLYSADPRSNPLARPLDEVAELSAEVLAMAGGSGSSVGTGGMRTKLEAAAKAGAAGIETYLFNGRSAEVVRGLAQDRLCGTRIHAARTRIAARKYWLRHAPVEPGTILIDAGAALALTDKGASLLPGGVAGAEGDFRRGDMVEIHLRDSVGSRCLARGVSQYSALDVRRIARRHSREIEPILGYSYGENVVHRDDLVVL

SEQ ID NO: 5293 - protein, 221 aa, Helicobacter pylori 26695
MKAFLGALEFQENEYEELKELYESLKTKQKPHTLFISCVDSRVVPNLITGTKPGELYVICNMGNVNPPKTSYKESLSTIASIEYAIAHVGVQNLIICGHSDCGACGSVHLIHDETTKAKTPYIANWIQFLEPVKEELKNHPQFSNHFAKRSWLTERLNARLQLNNLLSYDFIQEKASKNELKIFGWHYIIETGRIYNYNFESHFFEPIGETIKQRKSHENF

SEQ ID NO: 5294 - protein, 716 aa, Pseudomonas syringae pv. syringae B728a
MASKNAPPVTETPKSEMAGTDTLDRGNTNEKLESLEQFRSDATQQALRTNHGVKISDNQNTLKVGSRGPSLLEDFIMREKITHFDHERIPERIVHARGTAAHGYFQTYEDHGALSKAGFLRDPGKKTPVFVRFSTVQGPRGSGDTVRDVRGFAVKLYTDEGNFDLVGNNMPVFFIQDAIKFPDFVHAVKPEPHNEIPTGGSAHDTFWDFVSLVPESAHMVLWTMSDRAIPKSLRTMQGFGIHTFRFINTEGKSSFVKFHWKPKFGVCSLVWDEAQKLAGKDTDFHRRDLWESIEMGDYPEWELGVQIVAEEDEHKFDFDLLDPTKIIPEELVPVTPLGKMVLNRNPDNYFAETEQVAFCPGHIVPGIDFSNDPLLQGRLFSYTDTQISRLGGPNFHEIPINRPIAPNHNGQRDAQHRTTIDKGRASYEPNSIDGGWPKETPAGPVDGGFETYPERVEAHKVRERSESFGDHFSQATLFFQSMSHHEKEHIIAAYSFELGKVEREYIRARQVNEILANIDMDLAKRVAANLGLPAPAAGTVPARQTSVKESPALSQVNLLSGDIVSRKVAILVADGVDGKAVEAMKAALTAEGAHAKVLGPTSAPVKTADGKSLPVDASAEGLPSVAFDAVFVPGGKASIEALKGDGVALHFILEAYKHLKAISFAGEAKELLSLLRLEEDAGLLEVSDSTSFKPFFHAIAQHRVWDREAKAKAVPA

SEQ ID NO: 5295 - protein, 586 aa, Triticum aestivum
MDSTDQFDNSPLLDGDGSSQENTTEYTGDGSVCISGHPASRKHTGNWKASFLIIVCSFCCYLAYSSIGKNLVSYLTKVLHETNLDAARHVATWQGTSYLAPLVGAFVADSYLGKYRTALIACKIFIIGMMMLLLSAALQLISAGPHAWTVWVHLVSSQYTIFLIGLYMVGLGYGAQRPCVTSFGADQFDDTDYVEKTRKSSFFNWHYFAINAGSLIAGTVIVWVQEHEGWLWGFTISTLFVTLGVCIFFLGSIVYRFQKPRGSPLTRLCQVVIAATRNFDKVLPCDSSALYEFMGQGSAIEGRRKLEHTTGLGFFDKAAIVTLPDCESPGQHNKWKICTVTQVEELKILIRMFPIWSAMILFAAVQEQMSSTFVEQGMAMDKHIGSFEIPSASFQCVDTITVIVLVPIYERLIVPVIRKFTGRANGITSPQRIGIGLCFSMFSMVSAALVEGNRLQIAQAEGLVHRKVAVPMSIMWQGPQYFLLGVAEVFSNIGLTEAFYDESPDGMRSLCMAFSLVNMSAGNYLSSLILSLVPVFTARGGSPGWIPDNLNEGHLDRFYLMMAGLSFFNIVVFVFCAMRYKCKKAS

SEQ ID NO: 5296 - protein, 542 aa, Mesorhizobium loti MAFF303099
MARYVFITGGVVSSLGKGIAAAALGALLQARGYRARIKKLDPYLNVDPGTMSPYQHGEVFVTDDGAETDLDLGHYERFTGRSANQQDNITTGRIYKNIIERERRGDYLGATVQVIPHVTDEIKNFVLNGNDDYDFVLCEIGGTVGDIEAMPFLEAIRQLGNDLPRNNAVYVHLTLMPYIPTAGELKTKPTQHSVKELRGIGIAPDILLVRADRAIPKEERRKLSLFCNVRESAVIQALDVPHIYDVPMAYHKEGLDSEVLAAFGIDPAPKPRMEPWQKVSDRIHSPEGEVTIAIVGKYTGLKDAYKSLIEALSHGGLANHVKVKLDWIESEIFEKEDPTPWLEKVHGILVPGGFGERGSEGKILAAKFARERKVPYFGICFGMQMACIEAARSLAGVEHASSTEFGPTEEPVVGLMTEWLKGNMLEKRRETGDLGGTMRLGAYQADLAKGSKIAEIYGDTQISERHRHRYEVNIDYKERLEDCGLVFAGMSPDGVLPETVEYPDHPWFIGVQYHPELKSRPLDPHPLFASFIEAAVEQSRLV

SEQ ID NO: 5297 - protein, 459 aa, Bacillus thuringiensis serovar konkukian str. 97-27
MGENYDKQRQSLLGKDFNENGERNEQAILHSQTVGSRGPVLEQDSVLHEALQEFIHEKILERPVHVKGFGAFGYFQTIYPMSEHTKLSFLQHSNEKVPVMVRFSLAVSTKGTPDTARNVRGFSTKFYTKEGIFDLLCNHIPVFSVRDPMRFPETIQALSPSPKNNLLDPNRFWSFVARAPESIHFVVHLYSDNGTAKSFRRIPGHSVNTYVWRNAEGNRKYVKYHWYPFEGVQSITNEEANKLAAENPDYSGKDLYDAIANGKPVEYGLYVQLMDPKDEAHLSYDPLDDTKAWDEKAYPLIPVGKMVLNKNPENYMEQVEKVAFSPSNLLDGAELSDDKMLQGRANIYSDSQRRRIGPEFRKLAINQQQDWTPANQITSGDGRYVEGKLERTSIPKQDDFTQAGEFYAKLQPIEKEHLAENLASDLKVISDDIRKVVLGYFHNVSADLVKRIESAMQQL

SEQ ID NO: 5298 - protein, 246 aa, Pseudomonas syringae pv. syringae B728a
MTDIGKQHSATSSSTSSHSDSADVALKHIVDGFVHFRKEVFPQQEELFKKLATAQSPRAMFITCADSRIVPELITQSSPGDLFVTRNVGNVVPPYGQMNGGVSTALEYAVVALGVQHIIVCGHSDCGAMRAVLNPDSLDKMPTVKAWLRHAEVARTVVEQNCSCSGELETMQVLTQENVISQLQHLRTHPSVAAKMASGQLFIHGWVYSIETSEILAYDAELDRFIPLDGTGPTPMASPKARFSAD

SEQ ID NO: 5299 - protein, 458 aa, Bacillus halodurans C-125
MKPTETLQEKGKLFLVVMMPILITQIGLYAMNFFDTVMSGQAGANDLAGVAIGSSLWVPVFTGLNGVLLALTPIIAQSIGAEKRDDVPYVFLQGLYLSIAISIAVILIGAVVLDPILSAMSLEDEVGRIAKEYLIGLAFGIVPLFIYTTIRCLIDSLGETRVTMFITLLSLPINIFFNYVLIFGKLGFPRLGGVGAGYASAITYWFILAVAIVVVVKVRPFTDFQLFKKLYHVSLKKWKEILLLGLPIGFTIFFETSIFAAVTLLMSTFDTATIAAHQAAVNFASFLYMIPLSIAFTLTIAVGYEVGAKRVEDARQYSRLGITFALIMGLVAGVIIYVLRAPVASLYTNDSQVAWLIQQFLIYSIFFQLSDALATPIQGVLRGHKDVNVPFVMALVSFWIIGLPTGYLLANFSPLGPYGYWIGLITGLASCAIALSWRLKQMQRKFERAARLSQNGNS

SEQ ID NO: 5300 - protein, 396 aa, Haemophilus influenzae R2846
MFEHIKAAPADPILGLGEAFKSETRENKINLGIGVYKDAQGTTPIMRAVKEAEKRLFDKEKTKNYLTIDGIADYNEQTKALLFGKDSEVIKSNRARTVQSLGGTGALRIAAEFIKRQTKAQNVWISTPTWPNHNAIFNAVGMTIREYRYYDAERKALDWDHLLEDLSQANEGDVVLLHGCCHNPTGIDPTPEQWQELAALSAKNGWLPLFDFAYQGLANGLDEDAYGLRAFAANHKELLVASSFSKNFGLYNERVGAFTLVAENAEIASTALTQVKSIIRTLYSNPASHGGATVATVLNDTQLRQEWENELTEMRERIKKMRHLFVQLLKEYGAEQDFSFIIEQNGMFSFSGLTGEQVDRLKEEFAIYAVRSGRINVAGITEDNIRYLCESIVKVL

SEQ ID NO: 5301 - protein, 917 aa, Sinorhizobium meliloti 1021
MSALGHELRSTEAARPAKRLDSRITDLPISARVAALTAAGLISLVLSSLFLTQALYRSAERMAETRELFDRAASAASAHVAFGDLRYWLTDLSVSLLMNSQRNADEARERLQEQLAGLAKHAPEAVEAIRTEVDAYVETALQAADSYTQDNRIVGNALLAKARTHSGKVDADLNRLVEQVKAEAEAARNEVVVQTEKTATTAAILVGGVVLIGSLLTLLVLRSIVGPLRRLNRVIGDLTEGRYDVDIPEEGGDELGAMARTLSLFRESAIEKKKLEDEAERQRRTIAAALEVISDGFVLYDSEDRILVANSKYCEIFPSHKPNTLRGRSFREIVEQNLEMGQVDLEGKSPQEWVDERVRLHRDPAGLVDEKRFGDKWVRISKRKIPDGGTVAVYTDITQLKQRQVELERAKSHAESANEAKSRFLASMSHELRTPLNAIIGYSEMLIEEARDHEDEELVPDLDKIASAGRHLLSLINDILDLSKIEANKMEVFLETFSVADLLRDVAATVAPLMARNGNEFTQDFEADLGEMHSDQTKLRQNLFNLLSNAAKFTNGGRVTLRVRREQRPDRDWLVFQVTDTGIGMSPEQQERLFNAFTQADASTTRNYGGTGLGLSITRSFCRMIGGVVTVESEVGKGSVFTMEVPAQCEREADGSPAEPVPQVGSGRTALIIDDEPAARSLIAKALAEAGLASIEASNGQEGLAAARKHRPDAIILDIIMPHQDGWSVLRALKNDPELCTIPVILATILADRELGLSLGAVEYLTKPIDTDKLVRTIETFGGGKHDVLVVDDDQASREFLRRILVKRKWTVHEAGDGIRGLEMMKRILPRLVLLDLLMPEMDGFQTLSEMQRIPELQNIPVVVVTSKDLSASELKWLRDRAVAVVNKGANSRSQLVAALERQIGSGASVGKALADG

SEQ ID NO: 5302 - protein, 156 aa, Brassica oleracea var. oleracea
AQTNWSMEYSRLKAKIELLERNQRHYLGKDLESISIKELQNLEQQLDTSLKHIRSRKNQLMHESLNHLQRKEKEILEENSMLAKQIKERESILRTHQNQSEQQNRSHHVAPQPQPQLNPYMASSPFLNMGGMYQGEYPTAVRRNRLDLTLEPIYNC

SEQ ID NO: 5303 - protein, 230 aa, Spinacia oleracea
GRGKIEIKRIENTTNRQVTFCKRRNGLLKKAYELSVLCDAEIALIVFSSRGRLYEYANQSVKGTIDRYKKACSDQTGAGSVAEANAQYYQQEAAKLRNQIRTATENNRLLSRHMMGEGLSSLSMKELKNLETKLEKGISRIRSKKNELLFAEIEFMQKREIELHNNNQFLRARISENERAQQSMSLMPPGGSDYDLVPSQSFDSRNYFQVNALQPNSQYARQDQTPLQLV

SEQ ID NO: 5304 - protein, 568 aa, Streptomyces avermitilis MA-4680
MTPLRHAYLTCMHNRWHEQTGRRVSLNTHHWWRDAVIYQVYVRSFLDSTGDGIGDLAGVRAGLPYLKKLGVDGIWLSPFYPSPQHDHGYDVADYCDVDPLFGDLAEFDLLMTDARRLGIKVLLDIVPNHCSSEHPWFSQALDSAPGSAARARFHIADGRGPDGAEPPNNWHAMFGGPAWSRITEPDGTPGQWYLHMFTPEQPDLNWRNPEVGAHFDHALRFWLDRGVDGFRIDVAAGLFKHPDLPDSPDPEADARTRDSVNPLAWNQPEVHDVWRHWRTVCEEYTARDGRERLLVGEVSVPTAREHAQYVRHDELHQAFFFDLLSAPWNDDAFRKVISEAMQDIAGTGSTVTWVLNNHDQVRTVTRYGELGTEGSGLGAARARAAALLMLALPGAAYIYQGEELGLPEVVDLPDDVLTDPIFHRTGSRARIRDGCRVPLPWSGHASPFGFTPGVESAKPWLPQPAYFAEYATDRALADTRSFWHLYRDGLHLRAGLPQLGEGTLRWLDTPPGVLGFVRGDGLVCAVNFGTAPTPAPVSGTPLLSSGPCAPGVLPGSTAAWWISDSTNP

SEQ ID NO: 5305 - protein, 156 aa, Kluyveromyces lactis NRRL Y-1140
MDQPAANNQENVTNEQGPLMDLEEDEEIDVFHNVGQGLAGRYREIMIQYWQELINEIESTNEPGSQFQDDFKSHSLPLARIKKVMKTDEEVRMISGEAPILFAKACEIFITELTMRAWCVAEENKRRTLQKQDIADALQKSDMFDFLIDIVPRNVQ

SEQ ID NO: 5306 - protein, 491 aa, Buchnera aphidicola
MNYFNKLCFRKRINEIKKCRFMKENEFKNENKILKIKKIVIVGCGSQGLNQALNMRDSGLNISFALKKNSILRKNSSWLNATKNNFEVNDYESLIPNADLVINLTPDKQHENVVKELQKLMKKNSCLGYSHGFNIVECGEIIRKDITVVMVAPKCPGTEVREEFKRGFGVPTLIAVHTENDPKKIGLEIAKAWAFSTGGHRAGVLESSFIAEVKSDLMGEQTILCGLLQTASLICYEKLIKDKHNPSYAAKLIQYGWETITESLKHGGITLMMDRLSNPSKIKAFKISKKIKKILSPLFKKHMDDIISGSFSKEMMIDWHNNDKKLLNWREDTKKTPFEKNILSYSEKISEQEYYDHGTLMVSILKSGIELAFETMINTGIINESAYYESLHELPLIANTIARKKLYEMNIVISDTAEYGSYLFSEAAYPILKDFIMSLEKNVLGLSLPNTKIDNIELYKINEEIRNHPIEIVGKKLRKHMKEMKSICVAK

SEQ ID NO: 5307 - protein, 399 aa, Pirellula sp. 1
MESHRVVMSASKRSTIVVLAVMNLSLMLTVAGLLFWRPGPVRSAPPAIETQRSMVASEASDEAAPKVPVHTPTAGNLAESESRTIELFRVTSPSVVHITTSKVARDYFSMNVQEIPQGSGTGFVWDKAGHIVTNNHVIQNADVAMVAFDDQTSFPAKLVGVAPDKDLAVLLIDAPPERLRPIPRGVSADLEVGRTALAIGNPFGLDQTLTTGVISALGREIKSDSGVPIKDVIQTDAAINPGNSGGPLLDRSGQLIGVNTAIYSPSGAYAGIGFAIPVDTVRWVVPELIEHGRIIRPGIAITVASDSMSKRFKLPPGVLILDMPERGNAERAGLRPTRRTRFGDIVLGDIIVAVDEMPVASTADLTLIFENYESGDVVDLTVIRQGTELVLPVELETLD

SEQ ID NO: 5308 - protein, 355 aa, Zea mays
MSAYCGKYKDELIKNAAYIGTPGKGILAADESTGTIGKRLSSINVENVEENRRALRELLFCCPGALQYISGVILFEETLYQKTKDGKPFVDVLKEGGVLPGIKVDKGTIEVVGTDKETTTQGHDDLGKRCAKYYEAGARFAKWRAVLKIGPNEPSQLAIDLNAQGLARYAIICQENGLVPIVEPEILVDGPHDIDRCAYVTETVLAACYKALNEHHVLLEGTLLKPNMVTPGSDSKKVTPEVIAEYTVRTLQRTVPAAVPAVLFLSGGQSEEEATRNLNAMNKLSTKKPWSLSFSFGRALQASTLKAWAGKVENLEKARAAFLARCKANSEATLGTYKGDAAADTESLHVKDYKY

SEQ ID NO: 5309 - protein, 425 aa, Arabidopsis thaliana
MLPSGLKETQLRESNNNQKVHPQPMEESINQNPEAMEALISNLFGNISSLKSAYIELQSAHTPYDPEKIQAADKVVISELKNLSEMKHFYRENNPKPVCVSPQDSRLAAEIQEQQSLLKTYEVMVKKFQSEIQNKDSEITQMLQKIEEANQKRLKLEKNLKLRGMSTNEGSNGDGNMQFPDLTTELYVSTYEAAAKAVHDFSKPLINMMKAAGWDLDSAANSIEPDVVYAKRPHKKYAFESYICQRMFSGFQQKNFSVNSESAAVMANDDTDTFFRQFLALKDMDPLDALGTNPDSNFGIFCRSKYLLLVHPKMEASFFGNLDQRDYVTGGGHPRTAFYQAFLKLAKSIWILHRLAYSFDPAAKIFQVKKGSEFSDSYMESVVKNIVVDEKEENPRVGLMVMPGFWIGGSVIQSRVYVSGVKVLE

SEQ ID NO: 5310 - protein, 205 aa, Oryza sativa
MTDRQAMAMGSSDGDVLYARCLVTLYLLSPLNVFALWFMSAPYGKLSRPGWGPTVPAALAWCLMESPTLWLPPLVLSTTTTSLSTPTLRVTILPAALYMLHYVHRTLVHPIRLLRLRRAPVPMPILIIMFGFGFNLLNAYIQARSWALDAVPPATAAPLTVARCLVGLALFVWGMWTNIAADRELLRLKEAGKGYQIPKDGLFDV

SEQ ID NO: 5311 - protein, 250 aa, Brassica napus
MTKNYPAVSEEYQKAIEKCKRKLRGLIAEKNCAPIMVRLAWHSAGTFDCASRTGVPFGTMRFDGELAHGANSGLHIALRLLEPIREQFPTISHADFHQLAGVVAVEVTGGPEIPFHPGREDKPQPPPEGRLPDATKACDHLRQVFLKQMVLTDQDIVALSGAHTLGRCHKDRSGFEGAWTSNPLIFDNSYFKELLSGEKEGLLQLPSDKALLDEPVFRPLVEKYAADEEAFFADYAEAHLKLSELGFADA

SEQ ID NO: 5312 - protein, 451 aa, Magnaporthe grisea 70-15
MPLQRAPLERFVRQSGPRNILLCLDAFDTLIRPRRPVAEQYAQVADQCGLTGITPAQVQATFRNAFKQEAKKNPNYGKATNLGATRWWTNVITNTFSPFLKPGQDIPKELAPRLLHRFSSDEGYELIEPNLPETLRLLWDGQQHADWNLVVGLVSNCDDRILGIMESLGLRVGPLRYGNLTVLRPKGDREATGQFLRSSFEGDATEALEDVASRRRKQSVSLVRKSPGLPGSDAIGAAASLDTAVTQSEAPRYDLDFTLMSYDVGHEKPDPEIFVSAQEMGDLVLKSSVGQPLQPTGMSRSSDHNDGEMTTARVDILHSRSNKPWLNWINIMVGDDLKTDAAGALSTSAGFWNCCILDPEGKHKPTVEAGIESTQLNRSMTDIDHQGKHQLLKAMAQNQLSVGRPEGFLMRIDSVCDLIMRIRRGMKQSPEAIPQSLLQKLAESASHRDSH

SEQ ID NO: 5313 - protein, 970 aa, Zea mays
MASTKAPGPGEKHHSIDAQLRQLVPGKVSEDDKLIEYDALLVDRFLNILQDLHGPSLREFVQECYEVSADYEGKGDTTKLGELGAKLTGLAPADAILVASSILHMLNLANLAEEVQIAHRRRNSKLKKGGFADEGSATTESDIEETLKRLVSEVGKSPEEVFEALKNQTVDLVFTAHPTQSARRSLLQKNARIRNCLTQLNAKDITDDDKQELDEALQREIQAAFRTDEIRRAQPTPQDEMRYGMSYIHETVWKGVPKFLRRVDTALKNIGINERLPYNVSLIRFSSWMGGDRDGNPRVTPEVTRDVCLLARMMAANLYIDQIEELMFELSMWRCNDELRVRAEELHSSSGSKVTKYYIEFWKQIPPNEPYRVILGHVRDKLYNTRERARHLLASGVSEISAESSFTSIEEFLEPLELCYKSLCDCGDKAIADGSLLDLLRQVFTFGLSLVKLDIRQESERHTDVIDAITTHLGIGSYREWSEDKRQEWLLSELRGKRPLLPPDLPQTEEIADVIGAFHVLAELPPDSFGPYIISMATAPSDVLAVELLQRECGVRPAVPVVPLFERLASLQSAPASVERLFSVDWYMDRIKGKQQVMVGYSDSGKDAGRLSAAWQLYRAQEEMAQVAKRYGVKLTLFHGRGGTVGRGGGPTHLAILSQPPDTINGSIRVTVQGEVIEFCFGEEHLCFQTLQRFTAATLEHGMHPPVSPKPEWRKLMDEMAVVATEEYRSVVVKEARFVEYFRSATPETEYGRMNIGSRPAKRRPGGGITTLRAIPWIFSWTQTRFHLPVWLGVGAAFKFAIDKDVRNFQVLKEMYNEWPFFRVTLDLLEMVFAKGDPGIAGLYDELLVAEELKPFGKQLRDKYVETQQLLLQIAGHKDILEGDPFLKQGLVLRNPYITTLNVFQAYTLKRIRDPNFKVTPQPPLSKEFADENKPAGLVKLNPASEYPPGLEDTLILTMKGIAAGMQNTG

SEQ ID NO: 5314 - protein, 229 aa, Arabidopsis thaliana
  misc_feature (72)..(72): Xaa can be any naturally occurring amino acid
  unsure (1)..(229): unsure at all Xaa locations
MQIFVKTLTGKTITLEVESSDTIDNVKAKIQDKEGIPPDQQRLIFAGKQLEDGRTLADYNIQKESTLHLVLXLRGGMQIFVKTLTGKTITLEVESSDTIDNVKAKIQDKEGIPPDQQRLIFAGKQLEDGRTLADYNIQKESTLHLVLRLRGGMQIFVKTLTGKTITLEVESSDTIDNVKAKIQDKEGIPPDQQRLIFAGKQLEDGRTLADYNIQKESTLHLVLRLRGGF

SEQ ID NO: 5315 - protein, 443 aa, Magnetospirillum magnetotacticum MS-1
MGLKTACIEKRGSLGGTCLNVGCIPSKALLAASHHYHAASHDLGAFGIKVSKVEIDVAGMMGHKDKVVSDNTKGIEFLFKKNKVTYIIGAGAITAPGQIEVTAKDGAKSTVAAKHIVIATGSEVTPLPGVEIDEEVIISSTGALALPKTPKHIVVIGGGVIGLELGTVWGRLGAKVTVVEFLDRILPFNDGEVSKTMQRLLAKQGMEFKLGTKVTAITRKGKTATITVEPAAGGAAEKIEADCVLVAIGRRPFTEGLGLDKVGVAIDKRGFVTIDGHFRTNVPGIYAIGDVVGGAMLAHKAEEEGVALAEILAGQHGHVNYEAIPAVVYTWPEVASVGKTEEQLKAEGIAYKAGKFPFTANGRARSMNEVDGFVKILACATTDKVLGAHIVGPNAGDLIAEVVLAMEFGAASEDIARTCHAHPGLGEAVKEACLAVDGRPLHT

SEQ ID NO: 5316 - protein, 277 aa, Bacillus cereus E33L
MSLTSLKDYTTLHNGVKMPWFGLGVFKVEDGSQVIDSVKAAIKNGYRSIDTAAIYQNEEGVGQAIRESGVSREELFITSKVWNSDQGYETTLQAFETTLEKLGLEYLDLYLVHWPVKGKYTESWKALEKLYKDGRVRAIGVSNFHIHHLQDIFEIAEIKPMVNQVEYHPRLAQEELHAFCKEHNIQLEAWSPLMQGQLLDNPTLQDIAKKYNKSTAQIILRWDLQNEVVTIPKSIKEHRIIENANIFDFELSADDTKAIQALNEDRRVGPDPDNFNF

SEQ ID NO: 5317 - protein, 141 aa, Azoarcus sp. EbN1
MAIERTLSIIKPDAVAKNVIGKIYQRFEDAGLKIIASKMVHLSEREAGQFYAVHKERPFFKDLVSFMISGPVMIQVLEGESAIATNRDLMGATDPKKADAGTIRADFAESIDANAVHGSDAPETAAVEIAFFFPGMNVYTR

SEQ ID NO: 5318 - protein, 546 aa, Helicobacter pylori 26695
MAKEIKFSDSARNLLFEGVRQLHDAVKVTMGPRGRNVLIQKSYGAPSITKDGVSVAKEIELSCPVANMGAQLVKEVASKTADAAGDGTTTATVLAYSIFKEGLRNITAGANPIEVKRGMDKAAEAIINELKKASKKVGGKEEITQVATISANSDHNIGKLIADAMEKVGKDGVITVEEAKGIEDELDVVEGMQFDRGYLSPYFVTNAEKMTAQLDNAYILLTDKKISSMKDILPLLEKTMKEGKPLLIIAEDIEGEALTTLVVNKLRGVLNIAAVKAPGFGDRRKEMLKDIAILTGGQVISEELGLSLENAEVEFLGKAGRIVIDKDNTTIVDGKGHSHDVKDRVAQIKTQIASTTSDYDKEKLQERLAKLSGGVAVIKVGAASEVEMKEKKDRVDDALSATKAAVEEGIVIGGGAALIRAAQKVHLNLHDDEKVGYEIIMRAIKAPLAQIAINAGYDGGVVVNEVEKHEGHFGFNASNGKYVDMFKEGIIDPLKVERIALQNAVSVSSLLLTTEATVHEIKEEKAAPAMPDMGGMGGMGGMGGMM

SEQ ID NO: 5319 - protein, 331 aa, Neurospora crassa
MTGFTAANTTYTLNNGVRIPAVGFGTFANEGAKGETYAAVKKALEVGYRHLDCAWFYQNEDEVGQALAEFLENHKDVKREDIFICTKVWNHLHEPEDVKWSLQNSLDKLKVDYVDLFLIHWPIAAEKDEATNMPKIGPDGKYIIKKELTENPEPTWRAMEDLVDAGKTRSIGVSNWTIPGLQKLLKFARIKPTVNQIEIHPFLPNTELVEFCFKNQIIPTAYSPLGSQNQVPSTGERVRDDPTLKAVAERSGHNLAQVLLAWGLRRGYVVLPKSSTPSRIESNFQIPVLRDEDFKAIQEVAKGRHCRFVNMKDTFGYDVWPEESDGQLKQE

SEQ ID NO: 5320 - protein, 476 aa, Yarrowia lipolytica CLIB122
MINSFVKLAALMALANAAPASNSGSTPGTLKLDFTKRVENVASSNSPDPNSPFNPGKAGSTPQATLKNHLIYYDTEITLGTPPQKFTVDLDTGSSDLWVAADGSKGSYDSKKSSTYQDYKPGFSIYYGDGSHAAGDWVKDTIGFGGATVPQFIFAAASNVSSQEQIFGIGYKGNEASTFQGEQVGQTFQYDNFPIRLAQDGIINTPAYSLYLDGLDASTGSVLFGGIDTGKFSGELAILKTLTDEGASSPREFFVTLDSVDVSVGGKNTNALDKTRHVLLDSGTTLTYVPTETYQTLINALGLLDDDNYGPGTTKEHIDQLKADKAVVSYKFQGKKIEVPVDQLFILATDRWDNQVYVNQNGKVEEYYTFLVGDGSDGDRYDPPSEIGYIFGDSFLRSAYVVYDIGQDVIGLAQADYSKTGGSIEPIKKGADGIPSATSATGATWSINHPITTSPTSGPQASAFTKVSAVVAHPTA

SEQ ID NO: 5321 - protein, 422 aa, Triticum aestivum
  misc_feature (66)..(66): Xaa can be any naturally occurring amino acid
  misc_feature (391)..(391): Xaa can be any naturally occurring amino acid
  unsure (1)..(422): unsure at all Xaa locations
MIRPGSKESQIYDNNSQKVYPQPIDETMNQNMDTMDSMIGRIFNNISSLKAAYIQLQEAHTPYDPXKIQTADKLVIDELTRLSELKHTYREKNPKPVAASPQDSRLLSEIQEQQNLLKTYEVMGEEFQSQIQNRDTEITLLQQQIDEAKHRKSKLEKKLKQRGLLNKESEESDEEENYFSIELTPSLFTSAADNAYQSIHDFSKPLINMMKAAGWDLDAAANAIEPDVVYTRRAHKKYAFESYICQRMFSGFHEESFSIKAATASVSNEAFFHQFLAVRAMDPLDVLSQNPDSVFGKFCRSKYLLLVHQKMEGSFFGNMDQRNYVMSGGHPRTAFYQAFLKLAKSIWLLHRLAYSFDPKVRVFQVKKGSEFSEIHMESVVKNMVLDESAEXPKVGLMVMPGFLIGTSVIQARVYLSDVKYAD

SEQ ID NO: 5322 - protein, 273 aa, Zea mays
MDFDDHDDGDEEEMAPMPVSSSYDAPPLAAGGFGAPAPPKPPGERAKAPGGRYRECLKNHAVGIGGHAVDGCGEFMPAGEEGTLDALRCAACGCHRNFHRKESPEGSPAALVAYGGGAATPHHHHFSPYYRTPAGSYFHHHHQQQQPIHMAAAGHHTPRPLALPSTSHSWRDDGDDYLSGGMAAAGPVSALGPLGLGGGAGPSGSGGSGKKRFRTKFTQEQKDRMLAFAERVGWRIQKHDEAAVQQFCDEVCVKRHVLKVWMHNNKHTLGKKP

SEQ ID NO: 5323 - protein, 339 aa, Saccharophagus degradans 2-40
MTVLVTGGAGYIGSHTCIELIEAGFDVVVVDNLRNSKSESLKRVEKIVGKTIPFHKVDICDKAALSDVFASYKVSSVIHFAGLKAVGESCEMPLEYYRNNVGGTVTLCEVMDEHSVHNLLFSSSATVYGDPASVPILESFPTGATNPYGRSKLIVEEILRDVCKIPNSNWRISLLRYFNPIGAHISGTIGEDPQGIPNNLLPYVAQVAVGKLPKLGVFGSDYDTVDGTGVRDYIHVVDLAKGHVKALQKLEKSEPAAYTYNLGTGQGYSVLQVVEAFEKASGKKVPYELKPRRPGDIAECYADPALAASELGWKAEFGIERMVEDTWRWQSSNPQGYEG

SEQ ID NO: 5324 - protein, 297 aa, Helicobacter hepaticus ATCC 51449
MSKSLYDTLEVNENASNDEIKKAYRRLARKYHPDINKDAGAEEKFKEINAAYEVLSDENKKAQYDRFGDAMFGGQNFHDFSRSQGSNVNLDDILASIFGQGGFSAGNGSGFNFSRSAGFGSGGDFGFSGFNAPNLDIQENIQIPFESAALGGSYHYNGRSGSFDIKIPVGLKNGETIRLKGKGSTHNGRSGDLLLKVQVLQSNEYEIDGDDLSKSFDVPLKVALFGGKITLPTLYKDITLTIPPNTKNNQKFRIKGKGIKNRKTSIMGDLYLRANIILPHTDHLSNELKNMLQEQLP

SEQ ID NO: 5325 - protein, 714 aa, Arabidopsis thaliana
MAEGQSPENSPPSPTPPSPSSSDNQQQSSPPPSDSSSPSPPAPPPPDDSSNGSPQPPSSDSQSPPSPQGNNNNDGNNGNNNNDNNNNNNGNNNNDNNNGNNKDNNNNGNNNNGNNNNGNDNNGNNNNGNNNDNNNQNNGGGSNNRSPPPPSRNSDRNSPSPPRALAPPRSSGGGSNSSGNNEPNTAAIVGIVAGAGLLFLVMILFCVCCCRKKKKKHQMPYYAGNGYATGKGDQYQQQQYNNQSDHVMNLSQQYPGSNGNNNWMNSPPPPPPGSWQPSPPPPPPPVSGGMNGNSSDFSSNYSGPHGPSVPPPHPSVALGFNKSTFTYDELAAATQGFSQSRLLGQGGFGYVHKGILPNGKEIAVKSLKAGSGQGEREFQAEVDIISRVHHRFLVSLVGYCIAGGQRMLVYEFLPNDTLEFHLHGKSGKVLDWPTRLKIALGSAKGLAYLHEDCHPRIIHRDIKASNILLDESFEAKVADFGLAKLSQDNVTHVSTRIMGTFGISNCESNDRYLAPEYASSGKLTDRSDVFSFGVMLLELVTGRRPVDLTGEMEDSLVDWVRNHMARPICLNAAQDGDYSELVDPRLENQYEPHEMAQMVACAAAAVRHSARRRPKMSQIVRALEGDATLDDLSEGGKAGQSSFLGRGSSSDYDSSTYSADMKKFRKVALDSHEYGASSEYGNTSEYGLDPSSSSSEEIRRGGANNNKTTPSRDH

SEQ ID NO: 5326 - protein, 244 aa, Zea mays
AMQVDTTVLGLSKEEAENKPYIASMGIYIFKKDILLNLLRWRFPTANDFGSEIIPASAKEIDVKAYLFNDYWEDIGTIKSFFEANLALAEQPPRFSFYDADKPMYTSRRNLPPSMVNNSKITDSIISHGCFLDNCRIEHSVVGVRSRIGSNVHLKDTVMLGADYYETAVERGELLAEGKVPIGIGENTTIQKCIIDKNARIGKKVVISNSEGVDEADRTSEGFYIRSGITVVLKNAIIADGLVI

SEQ ID NO: 5327 - protein, 402 aa, Schizosaccharomyces pombe 972h-
MNSNNKRVALQEISNYVSKSLNVKGWVNAQVREISLQNGCSPSDKHFPSQSWHGISSIEESQIQKDYDSFLASPLEEEIVFTEKQLLVDLDVCSISNVQSPNCSVSEFGIAIEESNDNCAEEDEEEELQMRYSADESVSVEYAKEILSHMEKLEIRFMPDYRHMSAQPYYVTEMRASVINWIVGVHTCINLLPESLFLSINVLDRFLSLQNVPASKMKLCGATALFIACKYEEIHPPTVKDLEIVLEGEWIGEDICGMEKYMLMVLQYQLGWPGPVSFLRLLTIVNKWESQLRIMIKYFLEVSLVEQRFSSLRASQLVATCAYTGQSILQEENWSNTLPQITGYDYMSLVSYVHLLLKCLENPFDHHYAIYSKYATPYFHGISRQVHDWIATNTNLMAMDGS

SEQ ID NO: 5328 - protein, 260 aa, Streptomyces avermitilis MA-4680
MSTPQLVVHRDKELMAQAAAARLITKIVDAQASRGYASVVLTGGRNGNGLLAALAAEPARDAIDWGRLDLWWGDERFLPEGDPERNDTQAREALLNAVPLDPKRVHAMPASDGPHGSDADAAAAAYAEELARAAGPENHGAVPTFDVLMLGVGPDTHVASLFPEHPAVRETERTVVGVHGAPKPPPTRITLTLPAIRAAREVWLLAAGEDKAEAAAIALSGAGELQAPAAGAHGRSRTLWLLDAAAASQLPRSLYPPALA

SEQ ID NO: 5329 - protein, 540 aa, Nicotiana tabacum
  misc_feature (64)..(64): Xaa can be any naturally occurring amino acid
  misc_feature (67)..(67): Xaa can be any naturally occurring amino acid
  unsure (1)..(540): unsure at all Xaa locations
MGGCFSKKYRQEGANGGYRATRRNANQEYQKPPQHQPERPYQPQPQPQPQPQPRPQPQAHTVTXQPXQTQDQMQGPHLNNILGKPFEDIRKQYTLGKELGRGQFGVTYHCTENSTGNPYACKSILKRKLVRKNDREDMKREIQIMQHLSGQPNIVEFKGAYEDRHSVHLVMELCAGGELFDRIIARGYYSEKDAAEIIRQIANVVNICHFMGVMHRDLKPENFLLTSKDENAKLKATDFGLSVFIEEGKVYRDIVGSAYYVAPEVLRRSYGKEADVWSAGVILYILLSGVPPFWAETEKGIFNAILKGEIDFQSDPWPSISNSAKDLIRKMLTQEPRKRMTSAQVLEHPWLRMGEASDKPIDSAVLSRMKQFRAMNKLKKLALKVIAENLSEEEIKGLKAMFANIDTDNSGTITYEELKSGLARLGSKLTETEVKQLMEAADVDGNGTIDYIEFITATMHRHRLERDEHLFKAFQYFDKDHSGFITRDELESAMKEYGMGDEATIKEIIAEVDTDNDGRINYEEFCAMMRSGTQPQPKLF

SEQ ID NO: 5330 - protein, 434 aa, Bacillus anthracis str. A2012
MEGMKNLDNQHNQNHIMGTLQWFIFLLANSIALPIVVGGLFHLTTEEIFYLMQRTFFVVGISSFLQGWLGHRLPIADGPAGSWVGVFTVLAYATAGQDQLHSTLQILELGMIISGVILIGLGVTGFIGRILFLFTPIVTGTFLLLLCLQLSGVFLKGMLGITATASQIDGFTAIIAFSIFLFVIILSNFGKGFVKSYAVLIGLISGWILFLIAGKVTISSQVTHFVQLPQIFAWGLPKWNTGMAVSSFVMVCILVSNTVAAIIAINQATIQKGTIEQKQLKDGTWVGGISHIISSVFSTVGVVPLPATAGFIRLTKQKYIRSFLLACMLLVVMSLFPSIIRYLASLPSAVASAVLMASFVQLIGIGLNNIKQVELNERNVTILGVAVLFGSGVMFLPSGALQSLPSVMQYIFGNGLFVGTVVSILLEQIWRIGK

SEQ ID NO: 5331 - protein, 239 aa, Zea mays
MAAGCNCKAAIGCVDARAPVRASYVSLYKWPESDAEFVRSVAMARRQGGGGGGQESPGGGASAPSYSYHHYYYNGSGSMRSNNSGELAAAGYCSPRVVDSYSCRQMYLRSYTFSKRKETVPERTMACLGRVRDRGAAVFPLFHPQRHGGGSAAAAAASDAASVGSASHRTEDDGVLGLRRGSKQQQRRRRRKKNKKKGCAVVRRLHEASCGAVRAIFRRLLACTTSVDVADGVAAAPRS

SEQ ID NO: 5332 - protein, 602 aa, Kluyveromyces lactis NRRL Y-1140
MSHDPNQQQPHGGSGQGHHQRQLTNHAQGQHIGKYQIIKTLGEGSFGKVKLAYHISTGQKVALKIINKKVLAKSDMQGRIEREISYLRLLRHPHIIKLYDVIKSKDEIIMVIEYAGNELFDYIVQRDKMPEQEARRFFQQIISAVDYCHRHKIVHRDLKPENLLLDEHLNVKIADFGLSNIMTDGNFLKTSCGSPNYAAPEVISGKLYAGPEVDVWSSGVILYVMLCRRLPFDDESIPVLFKNISNGVYTIPNFLSQGAASLIKKMLIVNPVNRITVHEIMQDEWFKVDLPDYLVPAESTHQENSESKTEDGGPSVPLELIDDSLVQTLSNTMGYDVDEIYEALESDEDHPSLNEIRDAYQLIKENRNLINDIKVNKQQSNDLDTFLSQSPPTFEQSLHAPPGSKNRHSHRHSKRTQQRTYQYHYGNGSQDGDSTIAILPSSLPQIHRANMVAQGSQAAAKISPLSVKKSKTRWHFGIRSRSYPLDVMGEIYIALKNLGAEWAKPSEEDLWTIRVRWRYNIDMPDDEMKNKQIPDLMKMVIQLFQIETNNYLVDFKFDGWESSNGVVYSSRNDDEMSTFSAYPFLHLATRLIMELAVNSQGS

SEQ ID NO: 5333 - protein, 358 aa, Ammi majus
MASHDQEAFLAAMQIVNSSTVDGVLNALIELNVFDIIMKKVGLDGYLHPDEIALNLPAKNLEASDMLDRMLRLLATHSIIKCKLVKRSGGTHRLTRSYGLTSISQYFVQAKDGPCLAPYIRLIHHKEMQRSWSKVKDATIEGGVPFNKAHGGKNIFEYLEKDKDLAELLSQAMDKSIATSMNILLQMYKGLEGVQEVVDVGGAHGATLSCIVSMNPHLKGINFDLPHVVKNAPSLPGIVHVGGDMFESVPRGDVILLQRLLHDWTDEESVKILKTCHEALPDHGKVVIIEMMPAELPENDVQAKNISQVDIRMLIYTHGGRERTAEEFQMLGKEAGFASSKFICGADLYGVVELYKKM

SEQ ID NO: 5334 - protein, 372 aa, Streptomyces avermitilis MA-4680
MTDALKRLSKEGVAIWLDDLSRKRITSGNLAELIDQQHVVGVTTNPSIFQKAISQGDGYDQQVSDLAARRVTVEEAIRMITTADVRDAADILRPVFDATDGQDGRVSIEVDPRLAHNTKATVAEAKQLAWLVDRPNTLIKIPATKAGIPAITEVIGLGISVNVTLIFSLERYRMVMDAYLAGLEKAKERGLDLSKIHSVASFFVSRVDTEIDKRIDALGTPEAKAARGKAGLANARLAYEAYEAVFSTDRWLALDKAQANKQRPLWASTGVKDPAYKDTMYVEELVAPNTVNTMPEATLEATADHGEIRGNTIAGTYEQARADLDAVEKLGIAYDDVVQLLEEEGVDKFEASWNDLLKSTEAELQRLAPSEG

SEQ ID NO: 5335 - protein, 413 aa, Thermus thermophilus HB8
MTATSLWELAERARKRLSEIAKGNRDRALLAMADLLEARWEEVLRANREDLEEAERTGLPKAKLDRLALKEKDLKTLTEGLRQIARLPDPLGRIEGLAKRPNGLRVGRMRVPLGLIGFIYEARPGATVEAVSVALKAGNAMLLRGGKEAFRSNRALVALWHEALGEAGLPEEAVTLVPTTDREAVLEMCRLELLDLLIPRGGEELIRLVQREARVPVLAHAKGVNHLYVDKKADLSMALRLALNGKTQRPAVCNALETVLVHEKVAEAFLPRLEKAMREKGVELRACPRALPLLKEAVPAREDEWDREYLDLVLRVKVVSGLEEALAHIARYGSRHTEAICTEDPKAAWRFLEEVDASLVLWNASTRFNDGFELGLGAEIGISTSKLHAYGPMGPMELTTLKWVALGEGQERT

SEQ ID NO: 5336 - protein, 695 aa, Streptomyces avermitilis MA-4680
MSTKPTTTDLEWTELDQRAVDTARVLAADAVQKVGNGHPGTAMSLAPAAYTLFQKVMRHDPADPDWVGRDRFVLSAGHSSLTLYTELYLAGFGLELDDLKSFRTWGSRTPGHPEYGHTPGVETTTGPLGQGVANAVGMAMASRYERGLFDPDAAPGTSPFDHFIYAIAGDGCLQEGISHEASSLAGHQKLGNLVLLWDDNHISIEGDTETAVSEDTVKRYEAYGWHVQRVAPKPDGDLDPHALYDAIQAAKAVTDKPSFIAMRSIIAWPAPHAQNTEAAHGSALGEDEVAATKRVLGFDPEKSFEVAEEVLAHTREALDRGREAKAEWEKGFAAWRTAQPERAAEYERIAATELPAGWEEKLPVFEVGKGIATRAASGKVLQALGAVIPELWGGSADLAGSNNTTIDKNSSFLPADNPLPEADPYGRTIHFGIREHSMAAEMNGIALHGNTRIYGGTFLVFSDYMRNAVRLSALMHLPVTYVWTHDSIGLGEDGPTHQPVEHLASLRAIPGLNVVRPADANETAIAWREILKRYTKVFGKGAPHGLALTRQGVPTYEPNEDAAKGGYVLFEAEGGAPEVILIGTGSEVHVAVEAREQLQAAGVPTRVVSMPSVEWFEEQDQGYRDSVLPPSVRARVAVEAGIGLTWHRFVGDAGRIVSLEHFGASADGKVLFREFGFTPENVADAARESIAAAQR

SEQ ID NO: 5337 - protein, 559 aa, Bacillus halodurans C-125
MYQEWWRKAVVYQIYPKSFNDTTGNGVGDLEGIIQKLDYLKTLGVDVIWLTPIYASPQKDNGYDISDYYSIHPEYGTMEDFERLLTEVHDRKMKVIMDIVVNHTSTEHEWFKQSAQSKDNPYRDFYIWKDPVYGLEPNNWQSKFGGSAWKFDSKTDQYYLHLFDVSQADLNWENEEVRNRVYEMMDFWFTKGVDGFRLDVINLISKDQAFPNDDGSVPPGDGRRFYTDGPRAHEFMNEMNRKVFSKYDAMTVGEMSSTTLEHCIQYTRPENKELSMTFNFHHLKVDYPNGEKWAIGDMDFFALKEILSKWQVGMHKGGGWNALFWCNHDQPRVVSRYGNDGKYHEKSAKMLATTIHMMQGTPYIYQGEEFGMTDPKFDRIDQYRDVETLNYYDILKEQGLSEEEVMEIIKRKSRDNSRTPVQWDDSPHAGFTSGTPWIDVASNYRSINAKKALADKQSIFYHYKKLIELRKTYDIVTYGDYELLLPEDPRVFAYVRRYQDETLLVVNHFFAGEVTIQVPEDVTAEKHQVDVLLANYHDPSREFQQLVLRPYESVVYYMK

SEQ ID NO: 5338 - protein, 321 aa, Gloeobacter violaceus PCC 7421
MPLGRLMEGRWVIEEKDRDAEGKFNRTATTFRHKITRDGSSGFMAEPDRYHLYVSLACPWAHRTLILRKLKGLAAVIGVSIVDAEIRDNGWSFGQEPGSLPDSVNGARYLWEVYCKADSQYTGKVTVPVLWDKFTHTIVNNESREIIRMFDTEFAALAATDADFYPEDRRGQIDETIDAIYQPINNGVYRSGFATSQRAYEEAVGELFAALDHWEQVLSTRRYLCGERITEADWCFFTTLLRFDAVYHGHFKCNLRRIVDYPNLWNYLKDLYQQPGVAETCNLDHIKRHYYRSHTNINPTAIVPAGPLVDFAAPHGRERLG

SEQ ID NO: 5339 - protein, 331 aa, Alkalilimnicola ehrlichei MLHE-1
MRVLVTGGAGYIGSHVVRQLLAAGHEPVVYDNLSTGFAWAVGEAPLVRADLADTAQLAETLARHAFDAVLHFAAHTVVPESLSDPLRYYGNNTRNTWQLLQACHEAGVKRFVFSSTAAVYGMPETMPVAEDAPLAPINPYGASKMMSERMLMDLGAASDLRYVCLRYFNVAGAEPSGRLGQATPQATHLIKVACEAAVGRRDGVTVFGTDYATPDGTCVRDFIHVEDLARAHIQALSHLVDGGDSQVLNCGYGRGYSVLEVLEAVKRLSGADFPVTLGTRRAGDPAQVVADNRRILRTLDWSPRYADLDTIVAHALAWERDGLLARRGPRR

SEQ ID NO: 5340 - protein, 265 aa, Glycine max
  misc_feature (261)..(261): Xaa can be any naturally occurring amino acid
  unsure (1)..(265): unsure at all Xaa locations
LRIIKPCNHVLSLSFPIRRDDGSWEVIEGYRAQHSQHRTPCKGGIRYSTDVSVDEVKALASLMTYKCAVVDVPFGGAKAGVKINPKNYTDNELEKITRRFTMELAKKGFIGPGIDVPAPDMSTGEREMSWIADTYASTIGHYDINAHACVTGKPISQGGIHGRISATGRGVFHGIENFINEASYMSILGMTPGFGDKTFVVQGFGNVGLHSMRYLHRFGAKCVGVGESDGSIWNPDGIDPKELEDFKLQHGSILGFPKPRXYEGS

SEQ ID NO: 5341 - protein, 282 aa, Glycine max; identical to SEQ ID NO: 1058

SEQ ID NO: 5342 - protein, 373 aa, Gloeobacter violaceus PCC 7421
MADNPLVHLHDFGQSVWIDDLRRDMITTGELQRLIEAEGVRGLTSNPAIFEKAIVGSAAYDEQIRGERGQSVDAVYENLVVKDIQDAADLFRPLYESSEGADGYVSLEVSPYLARDTEGTIREAHHLWERVGRPNLMIKVPGTAEGIPAIEALIAAGINVNVTLLFARAAYAEAAEAYLRGLERRAGPLDRMASVASFFLSRIDTAVDDLLQAEIAATDAAGQLERLKSLQGSVAIANAKLAYRQFQQLFGGERFAKLATRGAKPQRLLWASTGTKNPDYRDVRYVEELVGPATVNTMPPATLKACADHCELRPSLEAGLEDAERTLAELAAVGIDLDKVTGELLADGLAKFTAPFDKLLASLRAKTEAVAAG

SEQ ID NO: 5343 - protein, 397 aa, Pisum sativum
MALSRLSSSSSSSNGSNLFNPFSAAFTLNRPISSDTTATLTIETSLPFTAHNCDPPSRSVTTSPSELLSFFRTMALMRRMEIAADSLYKANLIRGFCHLYDGQEAVAVGMEAGTTKKDCIITAYRDHCTFLGRGGTLLRVYAELMGRRDGCSKGKGGSMHFYKKDSGFYGGHGIVGAQVPLGCGLAFGQKYLKDESVTFALYGDGAANQGQLFEALNISALWDLPAILVCENNHYGMGTATWRSAKSPAYFKRGDYVPGLKVDGMDALAVKQACKFAKEHALKNGPIILEMDTYRYHGHSMSDPGSTYRTRDEISGVRQERDPIERVRKLLLSHDIATEKELKDTEKEVRKEVDEAIAKAKDSPMPDPSDLFSNVYVKGYGVEAFGVDRKEVRVTLP

SEQ ID NO: 5344 - protein, 608 aa, Staphylococcus aureus subsp. aureus MSSA476
MKWLKQLQSLHTKLVIVYVLLIIIGMQIIGLYFTNNLEKELLDNFKKNITQYAKQLEISIEKVYDEKGSVNAQKDIQNLLSEYANRQEIGEIRFIDKDQIIIATTKQSNRSLINQKANDSSVQKALSLGQSNDHLILKDYGGGKDRVWVYNIPVKVDKKVIGNIYIESKINDVYNQLNNINQIFIVGTAISLLITVILGFFIARTITKPITDMRNQTVEMSRGNYTQRVKIYGNDEIGELALAFNNLSKRVQEAQANTESEKRRLDSVITHMSDGIIATDRRGRIRIVNDMALKMLGMAKEDIIGYYMLSVLSLEDEFKLEEIQENNDSFLLDLNEEEGLIARVNFSTIVQETGFVTGYIAVLHDVTEQQQVERERREFVANVSHELRTPLTSMNSYIEALEEGAWKDEELAPQFLSVTREETERMIRLVNDLLQLSKMDNESDQINKEIIDFNMFINKIINRHEMSAKDTTFIRDIPKKTIFTEFDPDKMTQVFDNVITNAMKYSRGDKRVEFHVKQNPLYNRMTIRIKDNGIGIPINKVDKIFDRFYRVDKARTRKMGGTGLGLAISKEIVEAHNGRIWANSVEGQGTSIFITLPCEVIEDGDWDE

SEQ ID NO: 5345 - protein, 306 aa, Haemophilus influenzae 86-028NP
MKKTLTVLGSINADHVISVPYFAKPGETLTGQNYQIAYGGKGANQAVAAARLGAKVAFISCIGSDSIGKTMKNAFEQEGIDTTHINTVSQEMTGMAFIQVAKSSENSIVLASGANAHLGEMVVRQSEAQIAQSDCLLMQLETPLSGVELAAQIAKKNGVKVVLNPAPAQILSDELLSLIDIITPNETEAEILTGVAVADEQSAVKAASVFHDKGIETVMITLGAKGVFVSRKGKSRIIKGFCVQAIDTTAAGDTFNGGFVTALLEEKSFDEAIRFGQAAAAISVTKKGAQSSIPTRQETLEFLEHA

SEQ ID NO: 5346 - protein, 82 aa, Glycine max
MVLSHAASAGSSDDSVHSTFASRYVRASLPRFRMPENSIPKEAAYQIINDELMLDGNPRLNLASFVTTWMEPECNKLMMDSI

SEQ ID NO: 5347 - protein, 460 aa, Zea mays
MLEVSTLRGPTSSGSKAEQHCGGGGGFVGDHHVVFPTSGDCFAMVDDNLLDYIDFSCDVPFFDADGDILPDLEVDTTELLAEFSSTPPPDDLLAVAVFGADDQPAAAVAQEKPSSSLEQTCGDDKGVAVAAARRKLQTTTTTTTEEEDSSPAGSGANKSSASAEGHSSKKKSAGKNSNGGKRKVKVDWTPELHRRFVQAVEQLGIDKAVPSRILEIMGTDCLTRHNIASHLQKYRSHRKHLMAREAEAATWAQKRHMYAPPAPRTTTTTDAARPPWVVPTTIGFPPPRFCRPLHVWGHPPPHAAAAEAAAATPMLPVWPRHLAPPRHLAPWAHPTPVDPAFWHQQYSAARKWGPQAAAVTQGTPCVPLPRFPVPHPIYSRPAMVPPPPSTTKLAQLHLELQAHPSKESIDAAIGDVLVKPWLPLPLGLKPPSLDSVMSELHKQGVPKIPPAAATTTGATG

SEQ ID NO: 5348 - protein, 213 aa, Brucella melitensis 16M
MADLPDSLLAGYKTFMSEHFAHETARYRDLAEKGQSPETLVVACCDSRAAPETIFNAAPGEIFVLRNVANLIPPYEPDGEYHAASAALEFAVQSLKVKHIVVMGHGRCGGIKAALDTESAPLSPSDFIGKWMSLISPAAEAISGNALMTQSERHTALERISIRYSLANLRTFPCVDILEKKGKLTLHGAWFDISTGELWVMDHQTGDFKRPEL

SEQ ID NO: 5349 - protein, 387 aa, Azoarcus sp. EbN1
MRRLWLTFAQAVTISVAVLFVLTTLKPEWLKGTAPSSVVEILEAPGAASASAAVAPGSYAEAAQRSMPAVVHIYTTKDVARPRHPLLDDPIFRHFFGERQDNAPPQRASGLGSGVVASPDGFILTNNHVIEAADEIEVALNDGRKFPAKLVGRDPETDLAVLKLEGNGKLPAITFAATDAVEVGDVVLAIGNPFGVGQTVTMGIVSALGRSQLGINTFENYIQTDAAINPGNSGGALVDSHGNLVGINTAIYSRSGGSLGIGFAIPVSIARNVLEQIVSTGEVTRGWIGVEIQEITAELAESFGLPKVDGALIAGVLRGSPAERAGILPGDVLLSVDGTSVHDPRGMLETVAALPPGHEALFRLRRPTGEIELKVQIGRRPTPPAER

SEQ ID NO: 5350 - protein, 461 aa, Saccharophagus degradans 2-40
MDSADANGEVLPAYIKDTANPWPIQGAAAWWLHHSLAAFTNSIKNKGGVLSLFEGDPATLVPELISQNKIDAVYLSQGFEPYEVQLQANIHKWCKQHNIECKRFAGHLLLNPDTHLNKQGKPFQVFTPYYKAALATHTIPRAKPIPSNLAKVWAAKKLPKSVALNKLKLLPNLNWADQFNSQWQPGEEGAHKNLREAIEDKIASYTRDRDFPAVDGTSLLSAHLRFGEISPRQIWQQVATQMDGEQCAPFLRQLMWRDFSYALLHHWPHIPQQAFKQQFEKFPWQKASNKNVAKQLHAWQTGTTGYPIVDAGMRQLWQTGWMHNRVRMIVASFLTKHLRIHWHEGAKWFWDTLVDADLANNTAGWQWVAGCGADAAPYFRIFNPVLQGEKFDKQGEYIKTWVPELAALPAKFIHAPWLAPQDILQTAGISLGNNSTYPLPIVDHKYAREAALAAYQQLKGD

SEQ ID NO: 5351 - protein, 243 aa, Arabidopsis thaliana
MYGQCNIESDYALLESITRHLLGGGGENELRLNESTPSSCFTESWGGLPLKENDSEDMLVYGLLKDAFHFDTSSSDLSCLFDFPAVKVEPTENFTAMEEKPKKAIPVTETAVKAKHYRGVRQRPWGKFAAEIRDPAKNGARVWLGTFETAEDAALAYDIAAFRMRGSSALLNFPLRVNSGEPDPVRITSKRSSSSSSSSSSSTSSSENGKLKRRRKAENLTSEVVQVKCEVGDETRVDELLVS

SEQ ID NO: 5352 - protein, 220 aa, Triticum aestivum
  misc_feature (200)..(200): Xaa can be any naturally occurring amino acid
  unsure (1)..(220): unsure at all Xaa locations
PAGERSSPDSRAMSKRGRDVWDMELGGLDTARLLMLLAQQHQQHQHQRAVAGAAQAMGGGRVFECKTCNRQFPTFQALGGHRASHKRPRLQQHPQKPHAIDSIDDGAALCLGRRAPQAPPLPAKPRAHECPVCGLEFAVGQALGGHMRRHRVEAEAATNAPSGKAAEPEMVVASCDAGGICLDLNLTPSENCTKCRSAAXLSAAARQGVHKALAMLDCSL

SEQ ID NO: 5353 - protein, 178 aa, Oryza sativa (japonica cultivar-group)
MMMMDLGFLEGGAGMADAGHDESGSPPRSGGVREQDRFLPIANISRIMKKAVPANGKIAKDAKETLQECVSEFISFVTSEASDKCQKEKRKTINGEDLLFAMGTLGFEEYVDPLKIYLHKYREMEGDSKLSSKAGDGSVKKDTIGPHSGASSSSAQGMVGAYTQGMGYMQPQYHNGDT

SEQ ID NO: 5354 - protein, 415 aa, Triticum aestivum
MGGGGAAGDADGWADQDQGNGGSRGGGEAKRSEIYTYEAGWHIYGMNWSVRRDKKYRLAIASLLEQLVNRVEVVQLDESTGDIAPVLSFDHPFPPTKSMFVPDPQGLRPDLLATSADLLRIWRITDDDAAAPGAADSNNGSVRCNGVGSPAGQQPGVKLCCELNGNRNSDFCGPLTSFDWNDADPRRIGTSSIDTTCTIWDVEREVVDTQLIAHDKEVYDIAWGGAGVFASVSADGSVRVFDLRDKEHSTIIYESSSGGGSNSAATDGGAVLPTPLVRLGWNKQDPRYMATIIMDSPKVVVLDIRYPTLPVVELHRHHAPVNAIAWAPHSSCHICTAGDDSQALIWDLSSMGTGNNSGGNGNGNGNAAAAAAAEGGLDPILAYTAGAEVEQLQWSATQPDWVAIVFANKLQILRV

SEQ ID NO: 5355 - protein, 519 aa, Neurospora crassa
MATNGNVNHSDQYAAPSSTTEAPATASSTTPQTQNQTLPKDEVGWYFVEQYYTTLSKNPEKLHLFYGKKSQFVYGQEAEVSSVSYGRQGIQERIKGLDFQDCKVRISNVDSQGSGDNIVIQVIGETSNKGAEPKKFVQTFVLAQQPSGYFVLNDMLRYIKEEGEEEVEEPAQEAAAAPEEETPAEPEAPVEAAPEPVEEAKQTEPEAAELDASAVDRELEEAAEEETPAAPVEAVPEPVEEAKQPEPEAAPEQAAEPEKIVEEITEEEVKKPEEPKAPTPTPAPAAAPRAAAPPAAEPEKPKEPPKPKTWANLVAVAAGPKPVVPLTKAATPAVPAQTRAAAPAAAQQPAAAPQAAETAAAPKEQANEWQTAETKRQSRPQSTIASAEKETAMAYIKYVTEKVKEEDLKGLLSSFGELVYFDINRTKTQAGYNAAVAANPHTVNGENIVVEQRRPKSTAFGGSNYGSSNRGGAAGRGRGGFEGGRSGSQSGGRGGFGGQSRGRGGANRGRAPTAQTPTA

SEQ ID NO: 5356 - protein, 530 aa, Ammi majus
MITCEMGIYLQMQDIILFSLVFFSTLILWRIFSTYVIRKKTCSGPPEPAGRWPLIGHLHLLGGSKILHHILGDMADEYGPIFSLNLGINKTVVITSWEVAKECFTTQDRVFATRPKSVVGQVVGYNSRVMIFQQYGAYWREMRKLAIIELLSNRRLDMLKHVRESEVNLFIKELYEQWSANGNGSKVVVEMMKRFGDLTTNIVVRTVAGKKYSGTGVHGNEESRQFQKAMAEFMHLGGLLMVSDALPLLGWIDTVKGCKGKMKKTAEEIDHILGSCLKEHQQKRTNISNNHSEDDFIYVMLSAMDGNQFPGIDTDTAIKGTCLSLILGGYDTTSATLMWALSLLLNNRHVLKKAQDEMDQYVGRDRQVKESDVKNLTYLQAIVKETLRLYPAAPLSVQHKAMADCTVAGFNIPAGTRLVVNLWKMHRDPKVWSDPLEFQPERFLQKHINVDIWGQNFELLPFGSGRRSCPGITFAMQVLHLTLAQLLHGFELGTVLDSSIDMTESSGITDPRATPLEVTLTPRLPPAVYQ

SEQ ID NO: 5357 - protein, 1372 aa, Oryza sativa
MASLPPPRLLRSFAVSLLRFLIYYCLPPHFPPSKLVYQLTRQWIPEASERGREEGWERGRRGGGGGWRWRAAGGSTGRRRGGSCRRRSFSTISADQTPRKKTESNRRWKRKNRSRFVLNVPKEDLESFERILFLLEQAHWFYEDNSVEHNPSLKSLSFKDFTTLMFNSCAALRPYRAHLDDIYKDFTHYKFRVPVCGAIILDDTYEKCLLVKGWKSSASWSFPRGKRSKDEEDHTCAVREVLEETGCDVSKLLKLEDYIEVSMWQQRVRLYIITGVKGDTVFAPQTKKEISEISWHNIDELLPAGDDAISRGVNGMKLYMVAPFLQGLKAWIATHRHPQYQKSDTSARGTVWKAKNSSTGAAPVENPVITRTGSDPQTLDSRPEASGIWSRADAMAALVRPAVLPVCAMTGGGGNDKRSPPQQRSWWGGNKQRLPHQPRRQPGGNGGRGGGGGALDQVLGVLRRDGEFLQAAAGAPLRDIFWLRFLEKKKQQRRRKQPKPKPKPPEQQQQQEEAAAAIQAPSFPPPSYQPGLSCLDLMTADFEALKLYIGYSKHAIEQQFLKGKRQPQHQQTPKPKLQQQQQQQKKKQQQQEQQNQTLQPPAFPPPSYPPGLSCMELMMADIEALKLYINYYVAILTTPLPQHYDPEILSRYFTSRPHILAFRTIQIIFAFVSAAVKMQISKRTNLITDATYSCNSTGSKGFNASQYMVGQLLKETFLDLGPTFVKVGQSLSTRPDITGSEISEALAELHEKVPPFPRKDAMKIIEGEFELPVSHIFSYISDEPVAAASFGQVYQGRTVDGALVAIKVQRPNLLPSVLRDIYILRLGLSFVRKVAKRKSNIALYADELGKGLVGELDYNIEAANATKFLEYHSRYSFMLVPKVLKQLTRRRVLTMEWVSGENPTDLLSLSKGISSEIAESSEKQKIEATARLLDLVNKGVEASLVQLLETGLLHADPHPGNLRYTPEGRVGFLDFGLLCMMEKKHQHAMLASIVHIVNGDWASLVYDLTAMDVVPPRTNLRRVTMDLEDALGEVTFEDGIPDIKFSRVLGKIWSVAFKYHFRMPPYYTLVLRSLASLEGLAIAADGTFKTFQAAYPYVVRKLLSDNSVATRRLLHQGNGIDDNRVLTPIINTQAIFNKRKEFQWNKITVFLKLASARGNFRYNTGVLPERKGLDVAKLVEISDASSSLHLNRATPERALHTANLCLRLLLSKESIVIRRLVMTANAKSLARDLISKDASIYRVLLSRVLADVIFQWMVKATGFKRAGQLEPHPRVTAGKNDEDLGLSKEAPALVTFQTAVRDRRLKVIFSKFVRDIREDPILMVRVSWNMFAISVVSAAIGVHRFIVVLSEEFLSTLPPPVPPPRLVQIQSI

SEQ ID NO: 5358 - protein, 398 aa, Pyrococcus abyssi GE5
MVRASKRALSIEYAIRDVVLPARELEKKGIKVIRLNIGDPVKFDFQPPEHMKEAYCKAIKEGHNYYGDSEGLMELREAIVEREKKKNGVNITPDDVRVTAAVTEALQMIFGALLDPGDEILIPGPSYPPYTGLVKFYGGVPVEYRTIEEEGWQPDIDDLRKKITERTKAIAVINPNNPTGALYDKKTLEEIINIAGEHDIPVLSDEIYDLMTYEGKHISPASLTKDVPVIVMNGLSKVYFATGWRLGYMYFVDPEGKLSEVREAIDKLARIRLCPNTPAQFAAIAGLRGPMDYLEEYMKKLKERRDYIYKRLNEIPGISTTKPQGAFYIFPRIEEGPWKDDKEFVLDVLHNAHVLFVHGSGFGEYGRGHFRAVFLPPVEVLEEAMNRFEKFMREKLSS

SEQ ID NO: 5359 - protein, 426 aa, Helicobacter pylori 26695
MSVTLVNNENNERYEFETIESTRGPKAVDFSKLFETTGFFSYDPGYSSTAGCQSKISYVNGKKGELYYRGHRIEDLVAKYKYVDVCKLLLTGELPKNQDESLEFELELRHRSFVHESLLNMFSAFPSNAHPMAKLSSGVSILSTLYSTHQNMHTEEDYQTMARRIVAKIPTLAAICYRNEVGAPIIYPDIARSYVENILFMLRGYPYSRLKHTTQGEVEITPLEVEAFDKILTLHADHSQNASSTTVRNVASTGVHPYAAISAGISALWGHLHGGANEKVLLQLEEIGDVKNVDKYIARVKDKNDNFKLMGFGHRVYKSYDPRAKILKGLKDELHQKGVKMDERLSEIAAKVEEIALKDEYFIERNLYPNVDFYSGTILRALKIPVRFFTPVFVIGRTVGWCAQLLEHVKSPQARITRPRQVYVGD

SEQ ID NO: 5360 - protein, 483 aa, Desulfovibrio desulfuricans G20
MARQPHGGEGNAMKTAAAVTEKGLRRLRAVSAAGAALCLRIVVAVMFVCVAAAGSRAEHGPLPDSPRVTPVVRAVHAVAPAVVNITTARMAQGAELPGPFAESPLLRELLRLPQRQQPMQRHSLGSGVIIDGSRGLVLTNAHVISGATTIRARLLDGREFEADLLGAAPDFDIAVLRLQAAQSLPQVPMADSSDMMPGETVIAIGNPFGFGHTVTTGVVSALQRSIQTRQGVFTYLIQTDAAINPGNSGGPLINIAGELVGVNTAIQASAEGIGFAIPVNKARRVVDELLSSGRVRPVWLGVEGQDIDQRTGAWLGLRGTGGMLVTRVYADTPAQKAGIQPGDVILRMENDTVQDKDHYLQLLRNHTRGRQLGLQIFRQGELRRTAVVPVALGAQDALSMAAMRWGMRVRDARGQGVVIESVRPDSPAGRLGLQAGDAILQVGGLRTGSLQDFAEAFVRHRLSGAVLLVAARGGRAAYVRMIL

SEQ ID NO: 5361 - protein, 365 aa, Ammi majus
MNTTTELIPPTFQVNDDEEEACMFAMQLASASVLPMVLKSAIELNLLESIAKAGPGAYVSPSQLAAALPSSQPDTPVMLDRILRLLASYSVLNCKLRDLPDARVERLYGLAPVCKFLTKNSDGVSMAPLLLMNQDKILMESWYHLKDAVLDGGIPFNKAYGMTAFEYHGKDPRFNKVFNQGMSNHSTITMKKILQTYDGFGGLKTVVDVGGGTGATLNMIISKYPNLKGINFDLPHVVEDAPSYAGVEHVGGDMFVSVPKGDAIFMKWICHDWSDAHCLAFLKNCYKALPKDGKVILAECILPEAPDSKLTTKNVILIDVIMLAHNPGGKERTEKEFEAFGKQAGFKSFNKACCAYNTWVIEYYK

SEQ ID NO: 5362 - protein, 154 aa, Ashbya gossypii ATCC 10895
MLGFRQTATAIVRPVGTIGYARRCYHPKVIDHYTNPRNVGTLDKKLTNVGTGLVGAPACGDVMRLQIQVDDSTGVIENVKFKTFGCGSAIASSSYMTELVRGKTLADAEKIKNTEIARELSLPPVKLHCSMLAEDAIKAAIKDYRSKRKATELR

SEQ ID NO: 5363 - protein, 296 aa, Arabidopsis thaliana
MPKLLVIFNIIYPLQSLKKDTFNFWWSFQKWKYNKTMSGLRLDGKIAIITGGASGIGAEAVRLFTDHGAKVVIVDIQEELGQNLAVSIGLDKASFYRCNVTDETDVENAVKFTVEKHGKLDVLFSNAGVLEAFGSVLDLDLEAFDRTMAVNVRGAAAFIKHAARSMVASGTRGSIVCTTSIAAEIGGPGPHSYTASKHALLGLIRSACAGLGQYGIRVNGVAPYGVATGMTSAYNEEAVKMLEEYGEALGNLKGVVLKARHIAEAALFLASDDSVYISGQNLVVDGGFSVVKLMTT

SEQ ID NO: 5364 - protein, 433 aa, Mesorhizobium loti MAFF303099
MGGANQEATATLQFAGKTHEFKVRSGSVGPDVIDIASLYSTTGAFTYDPGFTSTASCESEITFIDGDAGILLHRGYPIDQLAEHGDFLEVCYLLLYGELPTKAQKDDFDYRVTRHTMVHEQMSRFFTGFRRDAHPMAVMCGVVGALSAFYHDSTDISDPYQRMVASMRLIAKMPTIAAMAYKYHIGQPFIYPKNDLGFAANFLHMCFAVPCEEYKINPVLARAMERIFILHADHEQNASTSTVRLAGSSGANPFACIAAGIACLWGPAHGGANEAALNMLGEIGHVDHIPEFIARAKDKNDPFRLMGFGHRVYKNYDPRAKIMQKTAHEVLGELGIKDDPLLDIAMELEKIALTDPYFIEKKLYPNVDFYSGITLKALGFPTTMFTVLFAVARTVGWIAQWKEMIEDPRQKIGRPRQLYTGAPERDYVPIAKR

SEQ ID NO: 5365 - protein, 280 aa, Corynebacterium glutamicum ATCC 13032
MSRYDDLFARLDTAGEGAFVPFIMLSDPSPEEAFQIISTAIEAGADALELGVPFSDPVADGPTVAESHLRALDGGATVDSALEQIKRVRAAYPEVPIGMLIYGNVPFTRGLDRFYQEFAEAGADSILLPDVPVREGAPFSAAAAAAGIDPIYIAPANASEKTLEGVSAASKGYIYAISRDGVTGTERESSTDGLSAVVDNIKKFDGAPILLGFGISSPQHVADAIAAGASGAITGSAITKIIASHCEGEHPNPSTIRDMDGLKKDLTEFISAMKAATKKV

SEQ ID NO: 5366 - protein, 524 aa, Ashbya gossypii ATCC 10895
MAFMFKPPEQRKRNEKSPRLSLPSTLIGSATPAGDEHASGAMGNSIGSDLHREQKLRGLGQSVQIAEQLSAGSTDTAGSDVLSQHAPSSASSQTSKVLPRRPVPPGMPALAFLSKHPYAQQVTGPLPTTSGEKAGSHSGATTLSAGPTRPPLPKLPYLHVEPKLPCEELPYSALHAGSSSSSNIHSPSRALQEMRLISAGSTPVEPVPPAATVPPCKDVDELEEEMWTHVHLKDQIEELGVLGEGAGGSVTKCKLRHGSKIFALKTITTLTTDQESQKQIFRELQFNKSCKSDYIVRYYGMFTDEEHSSIYIAMEYMGGRSLDAIYKHLLKHGGRVGEKVLGKIAESVLRGLSYLHQRKIIHRDIKPQNILLNEAGQVKLCDFGVSGEAVNSLATTFTGTSYYMAPERIQGQPYSVTSDVWSLGLTLLEVAQAHFPFDSGKFAANMPPIELLMLILTFTPQLKDEPEANIVWSKAFKSFISYCLKKESRERPSPRQMLRHPWIQGQMKKRVNMEKFIYKCWQAR

SEQ ID NO: 5367 - protein, 182 aa, Arabidopsis thaliana
MNPKKTKGKQKINIKKIEKDEGRSVTFSKRLNGIYTKISELSILCGVEVAFIGYSCSGKPYTFGSPSFQAVAERFLNGDASSSSSSSLVMNAHKQAKIQELCKKYNRLVEELKVDEVKVKKAAALAETRVVNKDVWWKVDPNDVKDHEKAKKMMEKYQELYDKLCEQAASRIKRGHDENNNK

SEQ ID NO: 5368 - protein, 326 aa, Escherichia coli O157:H7
MWKEPGTSCIHLEKTHLIIKLLRSIIDDIAPGTVIITETNVPHKDNIAYFGEGDDEAHMVYQFSLPPLVLHAVQKQNVEALCQWAQSLSLPSGKTTWFNFLASHDGIGLNPLRGLLPESEILALVEALQQEGALVNWKNNPDGTRSPYEINVTYMDALSRRESSDEERCARFILAHAILLSFPGVPAIYIQSILGSRNDYAGVEKLGYNRAINRKKYHSEEITRELNDEATLRHAVYHELSRLITLRRSHNEFHPDNNFTIDTVNSSVMRIQRSNAEGNCLTGLFNVSKNIQHVNITGLHGRDLISEVDILGNKITLRPWQVMWIK

SEQ ID NO: 5369 - protein, 398 aa, Polaromonas sp. JS666
MKVIDSIVTQAAGIAAVRRDIHAHPELCFEEVRTADVVAQKLTEWGIPMHRGMGTTGVVGIIKNGSSNRAIGLRADMDALPMQEFNTFEHASQHPGKMHACGHDGHTAMLLAAAQHFAKNRNFDGTVYLIFQPAEEGGGGAREMIKDGLFDKFPMDAVFGMHNWPGTQVGKFAASTGPVMASSNEFKITVRGKGGHAALPHNGIDPVPIACQMVQAFQTIISRNKKPVDAGVISVTMIHAGEATNVIPDSCELQGTVRTFTIEVLDMIEKRMKQIAEHICAAHDAECEFRFVRNYPPTINHAKETEFARKVMAEIVGADNVIEQEPTMGAEDFSYMLQAKPGCYAFIANGDGTHREMGHGGGPCMLHNPSYDFNDDLIPLGATFWVRLAESWLAKDAA

SEQ ID NO: 5370 - protein, 438 aa, Prochlorococcus marinus str. MIT 9313 [sequence omitted]

SEQ ID NO: 5371 - protein, 167 aa, Oryza sativa (japonica cultivar-group)
GRWSATRPGGGGGGGGGVREQDRFLPIANISRIMKKAIPANGKIAKDAKETVQECVSEFISFITSEASDKCQREKRKTINGDDLLWAMATLGFEDYIEPLKVYLQKYREMEGDSKLTAKAGDGSVKKDVLGSHGGSSSSAQGMGQQAAYNQGMGYMQPQYHNGDVSN

SEQ ID NO: 5372 - protein, 511 aa, Triticum aestivum
MTATPALIGLSAGNRLLSTSFGPPNDLLSDKVNCHMSSAAGDAHGSSSLQFAPPAASKLTVAAHRLKLSPHGRAQVMRALRQSAPALAPQPPPLLPADEFSLDAIILLQRSMLEKQWQLPFEEEDDDDGGGDGHHVEAIGSAEDDDGKGRSSSVVVARSGVSARQRRMSGRRRGRSKKGSGAVHLSISPELLQSRNRIYLRGTVSKELLTQKQVVHLSKKIKDGIWLQQQRSKLKEKLGNEPSYKQMAQSLRISTPELRSRMRESFLAREVLTMSNIRLVISIAQKYDKLGVELSDLIQGGLIGLLRGIEKFDASRGFRISTYVYWWIRQGVSRALADNSKTFRLPTYLHERLIAIRGAKYALEDQGVSPTTQNIAKLLNISEKKVHNATEAVNKALSLDQQAFPSLNGLPGDTLHSYIEDQNVANDPWHGFEEWYLKEEVNKLLNSNLTERERDIIQLYHGIGKQCHTWEDISRQFGLSRERVRQVGLIAMEKLKQRARRKKLDALLQDY

SEQ ID NO: 5373 - protein, 370 aa, Magnetospirillum magnetotacticum MS-1
MNQLAAAKRLIVKIGSSLLVDESTGQVRRGWLETVAADIAACKARGQEVIVVSSGAVAVGRRKLGLTPPLKLEEKQAAAATGQIRLAHAWQDALAHHSITVAQVLLTLDDSENRRRYLNARSTLETLLRLGAVPVINENDTVATAEIRVGDNDRLAARVAQMVSADALVLFSDIDGLYTNDPRKDPTARFIPEVHELTPEIEAMAGDPGSAYGSGGMVTKLVAARICLSAGCRMAITRGEPMHPLKTMEEGGRCTWFLPNSEPRTARKQWIFGSMKPTGTLVLDTGAARALAQGRSLLPAGITEIAGSFERGDCVLVKDADGKVLGRGLVAYSAEDARAIMGRKSGEIEAILGFRGRDELIHRDDLVMEG

SEQ ID NO: 5374 - protein, 346 aa, Arabidopsis thaliana
MSSTKDMSTVQNATPFNGVAPSTTVRVTIVQSSTVYNDTPATIDKAEKYIVEAASKGAELVLFPEGFIGGYPRGFRFGLAVGVHNEEGRDEFRKYHASAIHVPGPEVARLADVARKNHVYLVMGAIEKEGYTLYCTVLFFSPQGQFLGKHRKLMPTSLERCIWGQGDGSTIPVYDTPIGKLGAAICWENRMPLYRTALYAKGIELYCAPTADGSKEWQSSMLHIAIEGGCFVLSACQFCQRKHFPDHPDYLFTDWYDDKEHDSIVSQGGSVIISPLGQVLAGPNFESEGLVTADIDLGDIARAKLYFDSVGYYSRPDVLHLTVNEHPRKSVTFVTKVEKAEDDSNK

SEQ ID NO: 5375 - protein, 613 aa, Saccharophagus degradans 2-40
MSEQAKKQSRIKELINRGREQGYLTYDEVNDHLPDDISDPDQVEDIIQMINDMGIRVYEVAPDADELLMTDGDSSADEIAAAEAAAALAAVETEAGRTTDPVRMYMREMGTVELLTREGEIAIAKRIEEGLRELNHAIALWPEAVQQYVNEYDLVEKEERRLADVISGWLDPAEDVAPPVVAAETAEDTDSDDDDDDDDDTDTEDEEESTGIDPEYARERFDELKAALLKVEKAIAKHGFESKAAGKEMEALGEIFKYFKLPPRQFDPIYQGIRQILTRVRAEEREIMRLCTRLGGMPRKTFMKEFPGQETDEDWIPATIGKGRDYSDSLKPYAEDIIRAQRKLKQIQEESGLSLGHIKEINRRMSIGEARARRAKKEMVEANLRLVISIAKKYTNRGLQFLDLIQEGNIGLMKAVDKFEYRRGYKFSTYATWWIRQAITRSIADQARTIRIPVHMIETINKLNRISRQMLQEMGREPTPEELGERMEMPEDKVRKVLKIAKEPISMETPIGDDEDSHLGDFIEDTTIDSPVDSATIQGLTEATRSVLAGLTAREAKVLRMRFGIDMNTDHTLEEVGKQFDVTRERIRQIEAKALRKLRHPSRSDHLRGFLDD

SEQ ID NO: 5376 - protein, 82 aa, Triticum aestivum
MASPRRMATAPAVLLVLLLLVATEMGTVKVAEARTCESQSHNFKGACFSDTNCASVCHTENFPRGQCHQHHVERKCYCERDC

SEQ ID NO: 5377 - protein, 252 aa, Prunus caroliniana
AHYKSEADVGNAIAEAIRSGLVKREELFITSKASNHGHVVEACKNSLKKLQLDYLDLYLVHYPLATKHSGVGTTASLLDENKVLDIDVTVSLETTWHDMEKTVSLGLVRSIGLSNYELFLTRDCLSYAKIKPQVSQFETYPYFQRESLVKFCKKHGVTPMAHTPLGGATANVKSFGSISPLEDPVLLGLAKKYKKSVAQIALRWNIERDTPVIPKSSKVERLKENLEVLNFKLEKEDIELINTIDKKSRTTL

SEQ ID NO: 5378 - protein, 606 aa, Desulfovibrio desulfuricans G20
MMKHYSIRHRLFIGSIILLFLALIPPFIYVGGLLKDDVLTESRLRARNGLEMAAWLMEEQAPFSDTASMNAWAHRFGQRTGIRITYIENGRVVADSEIAYEQLPTLDSHRNRPEVKAALVNGEGMEVRYSTTLGKDLIYMARTITVPDSGLDGVLRIALPASVVNERLAELKEGLAAVFLLAMLASAGLAYLVTRSLVRSIEDLAATAHAIGQGDYARKIRDYPGTELRPLVDAINDMAKNTRRQMQMLTDQKGRLEAILDGITDGVMVLDEEGRIHSVNTALTDMFPQVAGMEGATPLEATMQPDLQKAVDAMLRSDTAHSGQPMPDTGRVCNVELSGGRYMEITLVPFADPAGTRKIVLAFHDVSEREQLEKVRRDFVANVSHELKTPLTSIKGYTEMLIESPPAGREQNSMFLQTILKNANHMIKMVNSLLVLARAQHKREQTAMSAVDAAAVIRQTVREMDPAAHEKNISIETQMPETPLMVTGDRDALCEVFRNLLDNAVKYSPNNSAVTVSARITEGRAAFCIKDSGPGIPEASKERIFERFYRLDRDGDTHKNGSAGLGLAICRRIVKSHGGEIWVESPLDSKTGSGAAFFVTLDTASA

SEQ ID NO: 5379 - protein, 219 aa, Hordeum vulgare subsp. vulgare
MGATEDSSSGSETTTSSSVEALASPPSPTATTASSKKKRARNDGRHPTYRGVRMRSWGKWVSEIREPRKKSRIWLGTFATAEMAARAHDVAALAIKGRAAHLNFPDLAHELPRPATAAPKDVQAAAALAASADFPASATATANAGAKNPDGPEPNAASASTPPDTAEDALFDLPDLLFDLRHGPPSCQVSCASTWDDDVAFAGPGAGVFRLEEPLQWEY

SEQ ID NO: 5380 - protein, 337 aa, Neurospora crassa
MDGRKHPSSFQQLEKLGEGTYATVFKGRNRQTGELVALKEIHLDSEEGTPSTAIREISLMKELKHENIVALHDVIHTENKLMLVFEYMDGDLKKFMDTNGERGALKPHVIKSFMHQLLKGIDFCHKNRVLHRDLKPQNLLINSKGALKLGDFGLARAFGIPVNTFSNEVVTLWYRAPDVLLGSRTYNTSIDIWSAGCIMAEMFTGRPLFPGTTNEDQIVRIFRIMGTPTERTWPGLTSFPEYKPNWQMYATQSLSSILPQIDRDGIDLLQRMLQLRPELRISAHDALQHHWFNDLVHQQHHHQAQQSMMQQPPMMQQQPMMQQHRGYGQPQPNYEGY

SEQ ID NO: 5381 - protein, 931 aa, Ashbya gossypii ATCC 10895
MTSIPHRHTYYGGGATPPAATGPLSGSRGHAAGRSKKKQVTFGPYIIGPTLGEGEFGKVKLGWSKARLDGDSRNVAIKLIRRDTVPKNSEKEIKIYRELNALKLLSHPNIVRLEEVLQNSKYIGIVLQYASGGEFYKYIQKKRRLKEPPACRLFAQLISGVHYIHYKGLAHRDLKLENLLLDEHENLIITDFGFVNEFHKNDLMRTSCGSPCYAAPELVVSSKPYSAQKADVWSCGVILYAMLAGYLPWDDDPENPEGEDIAKLYQYITHTSLKFPEYIKPIPRDLLKRILVSNPEVRLTVADIEQHAWLQPHAQFLMWSPSDWDAKAKAETNNLFRQPSAVHAGVLRPQSSCSISSANSKGDNRGSLIMDSTLNPQPVPPQEFQSHIIMKPTSPSNGLRKMSPVRRHARSNSAASIALQAVVDAERDYFNSPSIHSLHHDSLSQNTTPPSSAGRVPTYAITRSATHHNGISSSLMNRNSVIIEVSPQKGSVPPVMIPGNRESLNGQESGGIAMADMSQRPTIVKDKTSSHMVPQAGRKQRPTSYQPCSTTAFAQSPDLVSGAGALVPIMGKQQRVSTASNPTFVDVGRSGSTRRLPGPNNQLLETPFEADRQIDDNPVVDDATIKSDDMLPSTLEIVAYDNECGTSPGSNGQHRRYSAIVMSEIYEQEEGERISCELSSPNKMGSARPDCSTARISINTPNMGLQNRECIVSSSSPESDASSKQKSGKTDKKDKRFSLLSFYSFYNNSKSSIDSSTDAVQPTGLVLDVVKHPNISRTSSQKKNPAPAGNGTQAIPRRHNTLPREAQRTPVALSYVYASLDVTPNAGTPELADVPSPINLVKMAEQPHGTKQHDPSTPTRSATVHGKSQRLSNNTPKGPIYEDPKPKRKTNKVSLMVSSINPSQAPQPPRQKEPSTARKVLDFFKRRSLRI

SEQ ID NO: 5382 - protein, 403 aa, Streptomyces ambofaciens
MTASVVVTGLGVTAPNGLGLKDYWAATLGGKHGIGRITRFDPTGYPARLAGQIDGFEADRLLPSRLLPQTDRVTRLALVAADWALADAGADPAQLPEFDMGVITASAAGGFEFGQGELQALWSQGSQYVSAYQSFAWFYAVNSGQISIRNGMKGPAGVVVSEGAGGLDAVAQARRQIRKGTSLIVTGAVDASLCPWGWVAQLAGGRLSTSDEPDHAYLPFDRDARGFVPGEGGAILIAEDAAAARTRGARPYGEIAGYGATIDPRPGSGREPGLRKAIETALADARLSAADIDVVFADGAGDPAGDRIEADAISTVFGDRGVPVTVPKTMTGRLYSGGAPLDLAAAFLALRDGVIPPTVHIDPCADYPLDLVLGEPRPAPLRTALILARGHGGFNSAMAVRAV

SEQ ID NO: 5383 - protein, 221 aa, Bacillus anthracis str. A2012
MLKKAIAEFIGTFVLVLFGTGVAVIGGGIEGIGTLGIAMAFGLSIVAMAYSIGTISGCHINPAVSVAMFINKRMNAMELCYYVLAQILGGLLGAATLVTILQSAKTPLDNLGQNGFGTLGLSGAFLVEFILTFVFILVIVAVTGKKGSSSLAGLVIGFTLVLVHLLGIPLTGTSVNPARSIAPALFVGGEALSQLWVFIVAPILGGIVAAIVGKFILNTEK

SEQ ID NO: 5384 - protein, 423 aa, Streptomyces ambofaciens
MSRRRVVITGIEVIAPGGVGRENFWNLLSSGRTATRGITFFDPAPFRSRVAAEADFDPFAHGLSPQEVRRLDRAAQFAVVASRGAVADSGLDVAALDPHRVGVTVGSAVGATMGLDEEYRVVSDGGRLEAVDHTYAVPHLYDYMVPSSFAAEVAWAVGAEGPSTVVSTGCTSGIDSVGYAVELVREGSADVVIAGSSDAPISPITMACFDAIKATTPRHDEPECASRPFDKTRNGFVLGEGCAFFVLEELDSARKRGAHIYAEIAGYSTRSNAYHMTGLRPDGAEMAEAIDLALAEARLNPQAIDYVNAHGSGTKQNDRHETAAFKRSLGEHAFRTPVSSIKSMVGHSLGAIGSIEIAASALAMEYDVVPPTANLHTADPECDLDYVPLVARDQLIDAVLTVGSGFGGFQSAMVLASPERSLV

SEQ ID NO: 5385 - protein, 364 aa, Vigna mungo
MARYSLCALLLFAAVAAAAGANTDADDILIRQVVPEGEVEDHLLNAEHHFSNFKAKFGKTYATKEEHDHRFGVFKSNLRRARLHAQLDPSAVHGVTKFSDLTAAEFQRQFLGLKPLGLPANAQKAPILPTNNLPKDFDWRDKGAVTNVKDQGACGSCWSFSTTGALEGAHFLATGELVSLSEQQLVDCDHVCDPEEYGACDSGCNGGLMNNAFEYILGAGGVQREEDYPYAGRDSSCKFDKSKIAASVANYSVISLDEDQIAANLVKNGPLAVGINAVYMQTYIGGVSCPYICAKRLDHGVQIVGYGESGYAPIRFKEKPYWIIKNSWGESWGENGYYKICRGQNACGVDSMVSTVGAIHASRQ

SEQ ID NO: 5386 - protein, 229 aa, Bordetella pertussis Tohama I
MPARSHHRIFRSGWLRAAVLGANDGIVSTASLIAGVAAAQASYAAILTSGLAGLVAGALSMAAGEYVSVKSQADIEAADLRLEQSSLKRNSREELEELTGIYVERGLSPDLAGQVARQLTRHNALDAHARDELGISVHNRAQPVQAALASAASFAVGAALPLAIAMAAPLAQLMPVVIAGSVAGLGILGAVAARAGGAPVGPAAVRVVLLGAAAMALTAGVGALFGVAV

SEQ ID NO: 5387 - protein, 326 aa, Glycine max
  misc_feature (98)..(98): Xaa can be any naturally occurring amino acid
  unsure (1)..(326): unsure at all Xaa locations
MIGNFIDDIDCGSFFDHIDDLLEFPDDNAAPVAPPANFWSAESDSLPASYTVSSDNSVTDLSAELSVSYEDIMQLEWLSNFVEDSFSGGSMTMKKEEXNAPPPQEDIAPAQFQTASPVSVLESSSFCSGEKAGTEINISVPCGRARSKRPRPATFNPNPVMQLISPASSTGENVQHNATTTSKASSDSENFAESVIKAPKQASGEHKKKKKIKVTFPSGQERNAPSQAIRKCLHCEITKTPQWRAGPMGPKTLCNACGVRYKSGRLFPEYRPAASPTFCAAMHSNSHKKVLEMRNKTGTKSGFATVSAASPELIPNTNSSLTLEYM

SEQ ID NO: 5388 - protein, 383 aa, Pyrococcus abyssi GE5
MEFEDAFKEVYEMVKPKYKLFTAGPVACFPEVLEIMKVQMFSHRSKEYRKVHVDTVERLRDFLEVKKGEVLLVPSSGTGIMEASIRNGVTKGGKVLVTIIGAFGKRYKEVVETNGRKAVVLEYEPGKAVKPEDLDEALKKNPDVEAVTITYNETSTGVLNPLPELAKVAKEHDKLVFVDAVSAMGGADIKFDKWELDVVFSSSQKAFGVPPGLAIGAFSERFIEIAEKMPERGWYFDIPLYIKYLKEKESTPSTPPMPQVFGLNVVLRIIEKMGGKEKWLEMYEKRAKMVREGVKEIGLGILAEPGYESPTITAVLTPEGIKGDEVYEAMRKRGFELAKGYGSVREKTFRIGHMGYMKFEDIQEMLDNLKEVIEELKKQKGIN

SEQ ID NO: 5389 - protein, 447 aa, Kluyveromyces lactis NRRL Y-1140
MSVSESIAKTARAAGNILKTLSDEERSSILYKIHDGLKANAASIEAANKLDLEQAKSTNLSDSLVKRLDLFKGDKFETMLQGIVDVANLQDPVGKVNFAREIDENLTLYQITAPVGVLLVIFESRPEVIANITALSIKSGNAAILKGGKESLNTFKEMSRIVNDVVEQNEKTTHVPVGAVQLIETREDVSDLLQQDEYIDLVIPRGSNALVRQIKSSTKIPVLGHADGICSIYVDESADIGKAKRILVDAKTNYPAGCNAVETLLINPKLQHWWEVLNSLIENGVTLHVSKEVKKQYKEHNSTSDHIVDLDESKDFDKEFLSLDIAVAFVESTEAAVLHINTHSSKHTDAIVTENSENAEYFLKAVDSSSVYWNASTRFADGFRYGFGTEVGISTSKIHARGPVGLDGLVTYQYQLRGNGQIASDYLGAGGKKAFVHKDLDVKSISI

SEQ ID NO: 5390 - protein, 484 aa, Arabidopsis thaliana
MEIISLNVVPQCSVVTWSSKLATKRLVPNRSSLLFSGVKKSRLVIRSGNSDGYVVGENDDLGRIARRGESTSKVLIPGLPDESNGEIAARISHSHCEWKPKLRVHYEKAGCDNLDAPAVLFLPGFGVGSFHYEKQLTDLGRDYRVWAIDFLGQGLSLPTEDPTTMTEETSSSEDKEPFWGFGDKTEPWADQLVFSLDLWRDQVQYFVEEVIGEPVYIAGNSLGGYVALYFAATHPHLVKGVTLLNATPFWGFFPNPVRSPKLARLFPWPGAFPLPERVKKITELVWQKISDPESIAEILKQVYTDHSINVDKVFSRIVEVTQHPAAAASFASIMLAPGGELSFSEALSRCKENNVQICLMYGREDPWVRPLWGKKIKKEIPNAPYYEISPAGHCPHDEVPEVVNYLMRGWIKHLESGGFEALPLLEDTEEDWEESRIGREIEFPRDGWKKAVNLWLYGSNYTYWRGVRESFRSSFIRVFGGKSA

SEQ ID NO: 5391 - protein, 320 aa, Bordetella pertussis Tohama I
MPSQLEALRRHTVVVADTGDFEAMRALRPTDATTNPSLILKAVQQEAYRPLLVQTARAHQGASPAEITDRLLVAFGRQILDIVPGRVSTEVDARLSFDTRATVERARGLIALYQAAGVPRERVLIKIASTWEGIQAARVLQAEGIRCNLTLLFCLPQAAACADAGVQLISPFVGRIYDWHKKNAGAEWVEDARRGANDPGVQSVSRIYRYYKRFGIETEIMGASFRNVDQILALAGCDLLTISPELLTRLAQTEGEVPAALSPQAGHDDADAVRLDGGEVAFRTQLNEDAMASEKLSEGIRLFVADARKLDALIESHGAA

SEQ ID NO: 5392 - protein, 477 aa, Triticum aestivum
MESRRGGGGPAAAAAAAGDPRGPMPGFGAPQHTIPTNVNVMQPSRVADLGALAHSAGFRIEDLANFSTNNLFNLKPNTHAYTSDPLQFGNYGKSISPTDLATTAAAAAAVTAVDPQALLQQKGVQPNLVALRTHNNDNWGESSMADTSPRTDTSTDPDIDIDERNQMFEQGQLAAPTASDSSDKSRDKLDHKSLRRLAQNREAARKSRLRKKAYIQNLESSRLKLTQLEQELQRARQQGIFISSSGDQSQSASGNGAVAFDMEYARWLEEHNKHINELRAAANAHAGDDDLRKIVDSIMSQYDEFFRLKGVAAKADVFHVLSGMWKTPAERCFMWLGGFRSSELLKLLAGQLEPLTEQQLTGICNLQQSSQQAEDALSQGMEALQQSLAETLASGSLGPAGSSGNVASYMGQMAMAMGKLGTLENFLRQADNLRLQTLQQMQRILTTRQSARALLAISDYFSRLRALSSLWLARPRE

SEQ ID NO: 5393 - protein, 380 aa, Arabidopsis thaliana
MADDKEMPAAVVDGHDQVTGHIISTTIGGKNGEPKQTISYMAERVVGTGSFGIVFQAKCLETGETVAIKKVLQDRRYKNRELQLMRVMDHPNVVCLKHCFFSTTSKDELFLNLVMEYVPESLYRVLKHYSSANQRMPLVYVKLYMYQIFRGLAYIHNVAGVCHRDLKPQNLLVDPLTHQVKICDFGSAKQLVKGEANISYICSRFYRAPELIFGATEYTTSIDIWSAGCVLAELLLGQPLFPGENAVDQLVEIIKVLGTPTREEIRCMNPHYTDFRFPQIKAHPWHKIFHKRMPPEAIDFASRLLQYSPSLRCTALEACAHPFFDEHREPNARLPNGRPFPPLFNFKQEVAGSSPELVNKLIPDHIKRQLGLSFLNQSGT

SEQ ID NO: 5394 - protein, 129 aa, Neurospora crassa
MEGIKQTFQRCKAQNRAALVTYVTAGFPHPEQTPDILLAMEKGGADVIKLGVPFTDPIADGPTIQTANTIALQHGVTLQSTLQMVRDARQRGLKAPVMLMGYYNPLLSYGEERLLNDCKEAGVNGFIIV

SEQ ID NO: 5395 - protein, 372 aa, Bacillus subtilis subsp. subtilis str. 168
MTATRGLEGVVATTSSVSSIIDDTLTYVGYDIDDLTENASFEEIIYLLWHLRLPNKKELEELKQQLAKEAAVPQEIIEHFKSYSLENVHPMAALRTAISLLGLLDSEADTMNPEANYRKAIRLQAKVPGLVAAFSRIRKGLEPVEPREDYGIAENFLYTLNGEEPSPIEVEAFNKALILHADHELNASTFTARVCVATLSDIYSGITAAIGALKGPLHGGANEGVMKMLTEIGEVENAEPYIRAKLEKKEKIMGFGHRVYKHGDPRAKHLKEMSKRLTNLTGESKWYEMSIRIEDIVTSEKKLPPNVDFYSASVYHSLGIDHDLFTPIFAVSRMSGWLAHILEQYDNNRLIRPRADYTGPDKQKFVPIEERA

SEQ ID NO: 5396 - protein, 129 aa, Neurospora crassa
MEGIKQTFQRCKAQNRAALVTYVTAGFPHPEQTPDILLAMEKGGADVIELVVPFTDPIADGPTIQTANTIALQHGVTLQSTLQMVRDARQRGLKAPVMLMGYYNPLLSYGEERLLNDCKEAGVNGFIIV

SEQ ID NO: 5397 - protein, 263 aa, Triticum aestivum
  misc_feature (3)..(3): Xaa can be any naturally occurring amino acid
  misc_feature (5)..(6): Xaa can be any naturally occurring amino acid
  misc_feature (9)..(9): Xaa can be any naturally occurring amino acid
  misc_feature (15)..(17): Xaa can be any naturally occurring amino acid
  misc_feature (42)..(42): Xaa can be any naturally occurring amino acid
  unsure (1)..(263): unsure at all Xaa locations
FAXKXXKNXRPLVDXXXPKGSPPLHLVLRLREGMQIFVKTLXTGKTITLEVKSSDTIDNVKAKIQDKEGIPPDQQRLIFAGKQLKDGRTLADYNIQKESTLHLVLRLRGGMQIFVKTLTGKTITLEVESSDTIDNVKAKIQDKEGIPPDQQRLIFAGKQLEDGRTLADYNIQKESTLHLVLRLRGGMQIFVKTLTGKTITLEVESSDTIDNVKAKIQDKEGIPPDQQRLIFAGKQLEDGRTLADYNIQKESTLHLVLRLRGGQ

SEQ ID NO: 5398 - protein, 510 aa, Arabidopsis thaliana
MSNIDIEGILKELPNDGRTPKTKIVCTLGPASRSVTMIEKLLKAGMNVARFNFSHGSHEYHQETLDNLRTAMQNTGILAAVMLDTKGPEIRTGFLKDGNPIQLKEGQEITITTDYDIKGDEKTISMSYKKLPVDVKPGNTILCADGSISLAVVSCDPNPGTGICRCENTAMLGERKNVNLPGVVVDLPTLTDKDVEDILKWGVPNNIDMIALSFVRKGSDLVNVRKVLGSHSKSIMLMSKVENQEGVLNFDEILRETDAFMVARGDLGMEIPIEKIFLAQKMMIYKCNLAGKPVVTATQMLESMIKSPRPTRAEATDVANAVLDGTDCVMLSGESAAGAYPEIAVKTMAKICIEAESSLDYNTIFKEMIRATPLPMSTLESLASSAVRTANKAKAKLIIVLTRGGTTAKLVAKYRPAVPILSVVVPVFTSDTFNWSCSDESPARHSLIYRGLIPVLGEGSAKATDSESTEEIIESALKSATEKGLCNHGDAVVALHRIGAASVIKICVVK

SEQ ID NO: 5399 - protein, 468 aa, Idiomarina loihiensis L2TR
MREAIWFRSDLRILDNPAVFSACHGDEPPLAIFFVCHETWKSHDWAPIKVDFIWRNLECLQQDLAEKGIELQVQLVPKFSQVPGALRSFCRENKIARVHINAEYALDEKRRDAATNAVLSNDDIELVSHHGNLLVSPGEVRTQQGDYYKKFTPFNRRWRQVLSEKTYSEPLQIKSYSRVTAKGLPECPLGRKDSSDWSAGEQQVLGKLGQFVGHSVDDYQQARDLPAENGTSQLSAYLAQGVIGPQTAVRALHKFSPEFPFGLASGADTWLTELAWREFYQHLMYFVPRLSKGESFQSETDSIQWLEDDDAFQRWCDGRTGYPIVDAGMRQLTSTGWMHNRLRMITANFLVKDLLVDWRKGEAFFMQHLIDGSFPANNGGWQWSASVGTDAVPYFRVFNPVKQSEKFDPDGQYIRKWVEELKEVPTKYIHWPHSWLQQQSSNNYCDPMVEHKFARERFLTTFKQVKNG

SEQ ID NO: 5400 - protein, 530 aa, Triticum aestivum
MAAAPPPKADELQPHPPKEQLPSVSFCITSPPPWPEAVILGFQHFIVMLGTTVIIPSALVPQMGGGNEEKARVIQTLLFVAGINTLLQTFFGSRLPVVMGGSYTFVAPTISIILAGRYDNETDPHEKFLRTMRGTQGALIIASTIQIILGFSGLWRNVVKLLSPLSAVPLVSLVGFGLYELGFPAVAKCVEIGLPELILMVAFSQYLPHVLHSGKGVFGRFSVLFTVSIVWLYAYILTISGAYKNAKLKTQAHCRVDRSGLIGGAPWISVPYPFQWGAPTFDAGECFAMMMTSFIAIVESTGAFIAASRYASATMIPPSIVSRGIGWQGIGILLDSFFGTANGTSVAVENVGLLAVTHVGSRRVVQISAGFMIFFAVLGKFGALFASIPLPIFAGMYCVFFAYVGACGLSFLQFCNLNSFRTKFILGFSFFIGISVPQYFNEYASVSGHGPVHTGARWFNDMINVPFSNKPFVAGLVAYFLDNSMHLHQSAVRKDRGYHWWDKFRSFKKDARSEEFYSLPFNLNKFFPSV

SEQ ID NO: 5401 - protein, 471 aa, Rhodobacter sphaeroides 2.4.1
MMADAPLILWFRRDLRLADNPMLAEAAATGRPLIPLFILDPETEALGAAPKWRLGLGVEAFARALEGLGSRLVLRRGPALAVLEALVAETGAAGVHWSRLWEPDWRARDEGVKAGLRQAGIEAASHAGHTIFEPREVETGQGGFYRVYTPFWKAVKDRPVAASSPPPARLLSPAEWPVSERLACWDLGRAMHRGAAVVAPHLAVGEAAAAERLTRFLSGPLDRYAAERDRPDAPVTSRLSENLTYGEISARSLWHAGMRARAEGRAGAEKFLQELAWREFGWHLLYHTPEIARRNWRGDWDAFPWRGDNPDAERWRRGMTGEPFVDAAMRELFVTGTMHNRARLIAGSYLTKHLLTDWRVGQAWFEDCLIDWDPASNALGWQWVAGSGPDASPYFRIFNPATQAEKFDPESAYRQRFLAEIARRPGPEALAFFEAVPRSWGLRPDRCYPRPVVGLAEGRERALAAYGRRNN

SEQ ID NO: 5402 - protein, 708 aa, Oryza sativa
MEAMDDMAALTEDILLQIFSRVGSIKDLFKFAVTCRRWLRRFTDPAFLRGLCLDSGEGHRARLLGFFFQQTRFYRCEKMIKMRVTQQSSVCPPTFLPAPWSPLGLTDRTLTSFLATDDDTFNYAEPLAARCGIVLMRLVPRTALMIACSHLLGVCNPITGECHVLPPLNLSGLHRYLTSYAIITSTDSDLDGKQPPSSSSSGRSTFSQLYLVVQHKKDCNEYFYSYSAATCSWSAPTMCVDGRRFSLVGERSAVVHKGAAHWLFIDRVSSATQDDILYKLTAAVDTSEISLTRLPFGAGGSPLLCVSGDGKLSVACVFPIHMRVWTQQDDTPATWLRTVIRIPLAVPYPDYSHICQPREKWFNFNRGSMLVLYRSNGVFILDLEKKVMEKVMDCLLPLFSDKLNRTAVAYEMDLVEFFVLQLSGYIWKLSLLVITVTGLTPWQKAQNLNPKKEQPTTTALQKRGPLHIFLCNVSDPHGNASQPSNRKGTGRHTFIHVIDPRDKPLHQSAPTFTHYKLTAPVSSFHTAISQHISTHRSKAKPTDPLPLPEKKREASMAPKAEKKPAAKKPAEEEPAAEKAEKAPAGKKPKAEKRLPAGKGEKGSGEGKKAGRKKGKKSVETYKIYIFKVLKQVHPDIGISSKAMSIMNSFINDIFEKLAGESAKLARYNKKPTITSREIQTSVRLVLPGELAKHAVSEGTKAVTKFTSA

SEQ ID NO: 5403 - protein, 73 aa, Vicia sativa
KGKVDVADDVTLEYLGSVHVQKGVIDLHFMVFKKAMLKTIKMAVEDKWSEELDCAWGKAYDELAAAIKKAMGW

SEQ ID NO: 5404 - protein, 623 aa, Haemophilus influenzae 86-028NP
MEKNQQSTAEQYSEQIEQLMELGRTQGYLTFAEINDLLPEDAIDPEYYDKLLQTLQNDAGIPVLDEAPESDDMMLSDTIPDEDAVEEATQILSNVESEIGRTTDPVRMYMREMGTVDLLTREDEISIAKRIEGGIDEVQTSIAAYPEALNGLLKNYDDVEKGNFRLTDLITGFVDPNAEIEEHNGLDEDFSDEDDEEESSNADVEDNESESTSDSSDSDNSIDPEVAREKFQQLREQHSKTLAVIEKHGRSGKRAQDQIALLGEIFKQFRLVPKQFDLLVLSMKEMMKRVRYQERQLQKILVDIAGMPKDDFEKIITANGSNSEWVAKALKSSKPWAKRLIKYEDRIYEALNNLAITEENTKLTITQMRDICDAVARGEQKARRAKKEMVEANLRLVISIAKKYTNRGLQFLDLIQEGNIGLMKAVDKFEYRRGYKFSTYATWWIRQAITRSIADQARTIRIPVHMIETINKLNRISRQLLQEMGREATPEELAERMGMPEDKIRKVLKIAKEPISMETPIGDDDDSHLGDFIEDSTLELPLDSATAQSLKVATHEVLEGLTPREAKVLRMRFGIDMNTDHTLEEVGKQFDVTRERIRQIEAKALRKLRHPSRSETLRSFLDE

SEQ ID NO: 5405 - protein, 74 aa, Ananas comosus
NGKVIIVESILPVTPEATPSAQGVFHVDMIMLAHNPGGKERTEKEFEALSKEAGFAGFKPLYVYANSWAIEFPK

SEQ ID NO: 5406 - protein, 160 aa, Arabidopsis thaliana; identical to SEQ ID NO: 1271

SEQ ID NO: 5407 - protein, 398 aa, Sinorhizobium meliloti 1021
MHSETKSQALQGRRTIRMRTFEVKGSTKQSRSAIETVLRELRRSPLLALIFFVPVVILLERMAPKAHTLLFFVAIAAIVPLAALLSRATESVAAKTGDAVGGLLNATLGNLTELIITLAALQAGQYLLVKASIAGAIVTNSLFMFGGAFLIGGLKHHLQEFNRVNARFQAILLFLATIAILVPSLTSGLDRTPAAEFSQQLSLGLAILLIVVYGLGMVFSLKTHKELFASVGQAEAGEEPWPLSIGIVVLIVVTLLVAMVSEIFVGSVQAAAQHLGLTPAFVGFIVIALVGGAAEMTTAFSAARANRLDLSVGIALGSAAQIALFVAPVLVLVSYFIGPQPMSLEFWPGAVAMMLVATMAATLLSNGGHAAWYAGVMALAVYAIFALTLFLLPPGVTQ

SEQ ID NO: 5408 - protein, 423 aa, Streptomyces ambofaciens
MKRVVITGIGVVAPGGVGTKSFWDLLTIGRTATRPITLFDASAYRSRIAAEVDFDPAAHGFASADTERLDRITQFALVAAREAIADSGIGESVERAPLRCAVSLGSAIGCTTALATQYAILSDCGNTWDLDHTEAADFLYDYFVPSSLAAALARDCGAQGPVALVSSGCTSGLDAIGHGADLIREGSADMAVVGGAEAPIAPITMASFDRLRLTSSRNDDPATASRPFDRTRDGFVLGEGAAVLVLEEQEHARRRGAQPYAELSGLAAHSSAHHMTGLRPGAQEMAAAIRAALDQARLNPADIDYISAHGAGTRHNDRHETHAFKAGLGHHAHQVPVSSIKSMIGHALGAAGALDLTAGALAIRHGIVPPTANLHQPDPTCDLDYTPLFAREQRTSTVLSVASGFGGFHTAAVLTRPRLQEAA

SEQ ID NO: 5409 - protein, 296 aa, Triticum aestivum
  misc_feature (121)..(121): Xaa can be any naturally occurring amino acid
  misc_feature (128)..(128): Xaa can be any naturally occurring amino acid
  unsure (1)..(296): unsure at all Xaa locations
AYLGDTTEQVCTKKQAGTGPEFPGYRRPTRPSTAYQPWIWNSGNHEIEYRPDLGETSTFKPYLHRYSTPYLASKSSSPMWYAVRRASAHIIVLSSYSPFVKYTPQWMWLKGELKRVDREKXTPWLIVXLMHAPMYNSNDAHFMEGESMRPAFEKWFVKYKVDLVFAGHVHAYERSYRISNINYNVTSGNRYPVPDKSAPVYITVGDGGNQEGLAWRFSDPQPDYSAFREASYGHSTLQLINRTHAVYQWNRNDDGKHVPTDNVVFHNQYWASNTRRRRLKKKHLRYESLEGLMSML

SEQ ID NO: 5410 - protein, 479 aa, Candida albicans
MSGFRVLDLVKPFSPFLPEVIAPERKVQFQQRVMWTIITLLIFLVMSEIPLYGIASSDSSDPLFWLRMMLASNRGTLMELGISPIVSSGMLFQLLQGTKIIHVDMQNKNDRETFQTAQKLLAILLAVGQATVYVLTGMYGPPSSLGVGVCSLLILQLVFASTIVILLDELLQKGYGLGSGVSLFTATNTCEQVFWKAFAPTTSTSAKGTEFDGAVVAMFHLLGSRKDKKRALIESFYRPNLPNMFQLLATLLVFFAVVYLQGFRIELPMKSTRQRGPYGSYPIRLFYTSNIPIMLESALASNIFIISQLLFMRWPNNLFVKLLGTWDARAGSSQLYANGGLAYYIQPPFNFTDALLDPIKTTIYIAFVLGSCAVFSTTWIEISGTSPRDVAKQFKEQGLVIAGHRDTSAYKELKKIIHIAAAFGGATIGALSVVCDLMGTLGSGTSILLAVTTIYGYYELAVKEGGFNKSIVSGFSDGI

SEQ ID NO: 5411 - protein, 851 aa, Ashbya gossypii ATCC 10895
MIGSRVKQNNLKATIGASYNKLYGQFTASELREVGNYRIVKQVGEGSFGKVYLATHKLTHQKVVLKTGAKSDPNVVREVFYHRQFEYPFITKLYEVIVTETRVWMALEYCPGNELYDYLLLKQRIPLDETRRLFAQIVSAVFYAHSLQCVHRDLKLENILLDKNGYAMLTDFGFTRECATKTQLETVCGTTVYMAPELIKREAYDGYKVDTWSLGIILYTMLHGYMPFDEDDTVRTGLKIMHEEPAVLDEYTSPQAKDLIVRLLDKNAAQRPNLNEVLQHPFLQPYGALLLETVECLIKRQRRASLKFQSKTEKRLLKKLKQSGFDTNAIRAAVVKRSCDSLCSLWYLLLEKEKKRELSKYPRRSRSMLSVRKVFDSASGVSTQDVLDIDNTTSLRKIFSIRSEASSRGQLKEAEKEAAARRTRSASTSQNLNIPSEHSSPARAKTKSNIFQKVTKFFSRAKKTQLNNNDRGFGHRRSTSRHGRRYKPAFDTLKKPLHESQGAETSATAGGDYPTSLGDRHRLRGALTIEEPKLKFKSQSSSELSIQQSLLTSEGDSNVASMSRAASLGRPRPSSMLSQHSALSNDTFNSEYSDPQSVYKAPTGSSAKVSGSGNINGGSTGDSGSFSKSKVFAKRSVSIMSSASSASELSSKTDSFYDITTATSPTHLDIRATVNGTSRVESAFPRADSAAITPAWLTKRDKTSILRRRVNTRTLKRNKLIRGNSTGTQSVIQEESSFSDNDEQAPILAATEVVYARISNNPELDEDVPVQTDSSNSSHAELAIYPLTLNSDSKSGEFLAGRSLSDVSAWSQNGSSLAVTQSQATKKESHEDQLFDQDSSSLTEYQQEKPS

SEQ ID NO: 5412 - protein, 696 aa, Candida glabrata CBS138
MAVTVTVGEARPGETAPRRAAKVAEKALDRPPNMKCSTVYEFILECCEKHGGKNAIGWRDIIDVHEETKTIEKFNKKSGQMEKVDKNWLYYELSGYHYNTFTEVIEVMHSVGRGLVKLGMEPKSEDKLHIFAATSHKWMKMFLGAQSQGIPIVTAYDTLGEKGLIHSLKQTSSAAIFTDNQLLGKLINPLKVAEKIRYVIYYDNISAEDKRQGGKLYREAQEAVDKIKEVRPDIKLVSFDELLELGQKAKGEIEPHPPTRDDISCIMYTSGSTGDPKGVVLKHSNVVAGVGGATINVCDYVGDTDKLICFLPLAHIFEMAFELLSFHWGSCIGYANVKTLTSASVRNCKSDLEEFQPTIMVGVAAVWETVKKGILNQINELPRVTKGIFWAAYHSKLKMQKMGIPGGDTIGNIIFKKVRKATGGHLRYLLNGGSPISVNAQEFISNLICPMLIGYGLTETCASLCILNPGHFEYGVVGDLTGCVTVKLVDVEELGYFAKDNKGEIWVKGENVLPEYYKNEEETKESLTEDGWFKTGDIGMWTDTGSLKIIDRKKNLVKTMNGEYIALEKLESVYRSNSYVQNICVYADQNKVKPVGIIVPNHTPLVKLAKELGIMKKQETDIEPYLHNKKLQNAVFEDMIKTAKKQGLVGIELLQGAVFFDDEWTPQNGFVTSAQKLQRKKILKAVEKDVESVYAD

SEQ ID NO: 5413 - protein, 237 aa, Leuconostoc mesenteroides subsp. mesenteroides ATCC 8293
MAKLVLIRHGQSEWNALNLFNGWIDTKLSEKGIAQAKEAGDLLAAEGIQFDQAYTSVLTRAIQTLHLALEEAGQLFIPEAKSWRLNERHYGALQGQNKAEAAEKWGDEQVHIWRRSYDVLPPLLDSYDETMTVQGNTYPAFDRRYADVPEGELPLGENLKITLERVLPFWESDISKDLKAGKNVVIAAHGNSLRALVKHLENISDDDILNVEIANGQPLVYDLADDLSVVSKKTLTK

SEQ ID NO: 5414 - protein, 294 aa, Zea mays
MEQYEKVEKIGEGTYGVVYKALDKATNETIALKKIRLEQEDEGVPSTAIREISLLKEMNHGNIVRLHDVVHSEKRIYLVFEYLDLDLKKFMDSCPEFAKNPTLIKSYLYQILRGVAYCHSHRVLHRDLKPQNLLIDRRNNALKLADFGLARAFGIPVRTFTHEVVTLWYRAPEILLGARQYSTPVDVWSVGCIFAEMVNQKPLFPGDSEIDELFKIFRVLGTPNEQGWPGVSCLPDFKTAFPRWQAQDLATIVPNLEPAGLDLLSKMLRYEPSKRITARQALEHEYFKDLEMVQ

SEQ ID NO: 5415 - protein, 585 aa, Bacillus subtilis subsp. subtilis str. 168
MRKTKIVCTIGPASESIEMLTKLMESGMNVARLNFSHGDFEEHGARIKNIREASKKLGKNVGILLDTKGPEIRTHTMENGGIELETGKELIISMDEVVGTTDKISVTYEGLVHDVEQGSTILLDDGLIGLEVLDVDAAKREIKTKVLNNGTLKNKKGVNVPGVSVNLPGITEKDARDIVFGIEQGVDFIAPSFIRRSTDVLEIRELLEEHNAQDIQIIPKIENQEGVDNIDAILEVSDGLMVARGDLGVEIPAEEVPLVQKELIKKCNALGKPVITATQMLDSMQRNPRPTRAEASDVANAIFDGTDAIMLSGETAAGSYPVEAVQTMHNIASRSEEALNYKEILSKRRDQVGMTITDAIGQSVAHTAINLNAAAIVTPTESGHTARMIAKYRPQAPIVAVTVNDSISRKLALVSGVFAESGQNASSTDEMLEDAVQKSLNSGIVKHGDLIVITAGTVGESGTTNLMKVHTVGDIIAKGQGIGRKSAYGPVVVAQNAKEAEQKMTDGAVLVTKSTDRDMIASLEKASALITEEGGLTSHAAVVGLSLGIPVIVGLENATSILTDGQDITVDASRGAVYQGRASVL

SEQ ID NO: 5416 - protein, 517 aa, Oryza sativa (japonica cultivar-group)
MGIFKLNLLLKLQRQRQRRRRQIQARNGSVLIHPRDKINAPACQNNTHSWSGQAKCSDPTLPEDISCHIHSLMSMRDAARVACVSRAFARSWRCLPNLDFSEESLGINRSTCKKDEKLGDLTSKIDWILKNHSGIGIKKLIIQVGSVYSRDSSHLAHLDSWLQCAVKPGIEELIVNLSSMNAKYNFPCELLSSGTGDSLRYIYLASCNFHPTVRIGCLKSLTRLQLCMVNITENELRCLLSISLGLERLELRHCSTLKCLKVPCLQRLSYLDVMTCTGLQVIESKAPNLSSIRFEGDLYVQLSLGEPLQIKQLYRLCNDAAFYARTELPSSMPNLERLIIHSDTEMVNTPMVPSKFYHLKYLSIALGGQTYDYLSLVSFFDASPFLETFILNALRERTERATIFGDPSGLRMMPEHRHDKLKCVKIINFSSVKTLVELTCHIVESATALECLTLDTTSGSPRCSVNRLGKCFLMRRETLMEAHRALKAVQTYIELKVPSKVELNVLEPCSRCHALDL

SEQ ID NO: 5417 - protein, 425 aa, Ashbya gossypii ATCC 10895
MNEHSDDVYVRARLRNQFGYMTWVPEYVEDRISSKKGILQRYEDYQQKQAKAQEVKTDSLVKYDGAKDVPRNLLRIYRFEADTSALARYEEVVSQKPQWHAPWKLTRVINGHTGWVRCVCVDPVDNAWFATGSNDSTIRVWDLATGKLKVTLQGHIMTVRDICISARHPYMFSASQDKLVKCWDLERNTVVRDFHGTLSGVHSVDLHPSLDLIVSAGRDSVVRVWDIRSRSCVLTLAGHRGPINKVRCLPVDPQIVSCSTDATVKLWDLVAGKPMKTLTHHKRNVRDLAFNPTEFSFASACTDDIRSWKLVDGQLLTNFNSEALGIVNTLACNQDGVLFAGGDTGELSFFDYKTGHKFQKLETTAMPGSLESEKGVLASTFDRTGLRLLTCERDKSIKIWKHIDGATQDSHPGLPWNPSLVRQRF

SEQ ID NO: 5418 - protein, 149 aa, Triticum aestivum
  misc_feature (60)..(60): Xaa can be any naturally occurring amino acid
  misc_feature (77)..(77): Xaa can be any naturally occurring amino acid
  misc_feature (98)..(98): Xaa can be any naturally occurring amino acid
  unsure (1)..(149): unsure at all Xaa locations
MPVPLAPYPTPPVPFTPPAPNAGAQSQLVCSGCRNLLMYPAGATSVCCAVGSTVTAVPAXPGTEMAQLVCGGCHTLXLMFIRGATSVQCSCCHTVNLXAMGANQVAHVNCGSCPMLLMYQYGAKSLKCAVCSFVTSGGASSGAKQNPSN

SEQ ID NO: 5419 - protein, 471 aa, Citrus maxima
MASLRSATALSRLRSRAGQQSNLSNSVRWLQMQSSADLDLHSQLKEMIPEQQERLKKVKSDLGKAQLGNITIDVVIGGMRGMTGLLWETSLLDPDEGIRFRGLSIPECQKLLPAAKPDGEPLPEGLLWLLLTGKVPSKEQVDGLSKELRDRATVPDYVYKAIDALPVSAHPMTQFASGVMALQVQSEFQEAYEKGIHKSKSWEPTSEDSLNLIARVPVVAAYVYQRIYKDGKIIPKDDSLDYGGNFSHMLGFDDPKMLELMRLYVTIHSDHEGGNVSAHTGHLVASALSDPYLSFLAALNGLAGPLHGLANQEVLLWIKSVVDECGENVTTEQLKDYVWKTLNSGKVVPGFGHGVLRKTDPRYTCQREFALKHLPDDPLFQLVSKLYEVVPPILTKLGKVKNPWPNVDAHSGVLLNHFGLAEARYYTVLFGVSRSLGICSQLIWDRALGLPLERPKSVTLDWIEKNCKKAA

SEQ ID NO: 5420 - protein, 223 aa, Bacillus cereus ATCC 10987
MKILVVDDESSIRNLIRMQLEMEGYEVLTAADGREALERWNEGPDVLILDVMLPDTDGYELLRLFREKDRDIPVLMLTAKSQMNDKLLGLQLGADDYVTKPFNYAELILRVKNMTRRVKKKEVTVSHEVIGAGEITICPKERKVHVSGQEIQLTYREFNLCQLFVSNPQRVFMRDELLEKVWGFEYIGNTRAVDIMVQRLRKKLGNSGEYIKTIYGVGYKLDC

SEQ ID NO: 5421 - protein, 90 aa, Glycine max
ASIIMSFAPATGRVFAATAAKGAGGSKEKGLLDWILGGLQKEDQLLETDPILKKVEEKNGGTTSNTGRNKNSVAVPQKKKGGFGGLFAKN

SEQ ID NO: 5422 - protein, 478 aa, Rickettsia akari str. Hartford
MKFMNLLKNITGKNYINGEFVEFGKQISIINPSTLKEIATVPNLELSEINSAINNTVQTFASWSQSSFEERIAILRKWYNLVIENIDELSHILTLEQGKVLSESKKEILYGASFIDWYTYVIHNIHGTIKPGSSKAHKIVTQYEPVGPSAAITPWNFPNAMITRKVIPAIAAGCSVILKPSSLTPLSALILTKFASDAGLPAGVFNVITGDSDIIGQSFCEDFRLRKLSFTGSTNVGKILYQNAANTLKRLSLELGGNAPFIITADNKLEKVARDLVVAKTRNSGQSCTSPNRIFIEESIYEKFIEILKAKFTQLKAGDGFDKESDVGPLISSAAIEKIQKLLTDAQSKEAQLICGGKAVDNFIEPTIIIDCLDNMDIFRTEIFGPVVACYKFKDLDEVIERANNTEYGLQGYVYSNNISTAQMIATRLDFGMVSINNPLPGNAKAPFAGRKASGFGVVGSFEGIFEYLNTKYINLQN

SEQ ID NO: 5423 - protein, 330 aa, Bacillus cereus ATCC 10987
MNSILICGGAGYIGSHAVKRLVDEGLSVVVVDNLQTGHEDAITEGAKFYNGDLRDKAFLRDVFTQENIEAVMHFAADSLVGVSMEKPLQYYNNNVYGALCLLEVMDEFKVDKFIFSSTAATYGEVDVDLITEETMTNPTNTYGETKLAIEKMLHWYSQASNLRYKIFRYFNVAGATPNGIIGEDHRPETHLIPLVLQVALGQREKIMMFGDDYNTPDGTCIRDYIHVEDLVAAHFLGLKDLQNGGESDFYNLGNGNGFSVKEIVDAVREVTNHEIPAEVAPRRAGDPARLVASSQKAKEKLGWDPQYVNVKTIIEHAWNWHQKKPNGYDK

SEQ ID NO: 5424 - protein, 362 aa, Kluyveromyces lactis NRRL Y-1140
MVVHNPNNWHWVDKNCIDWAKKYFQEKLVGLTTGESTDELYAEITKLSSLEGDCEVNQRKGKVISLFDLKLNVGIAGHVGENKLEGSITVPEVAFDSDPEDYQFDISIFKETSKLFEIKPVIREKLIPQLRDIFSNFGKQLLLTHGNDIQVSSDKVTSKFTKANQQSSFSTSGSTKEDANKDSATGNTSTANASSSTKAAVTSSETQQKNSGNAAKYNTTKVHLESSFQVPAIELYNTFIDKRRIEAWSRSPIQPEANTGDFSGSTLQLNDAFKLFGGNITMKFLSGEPGKKIVFQWRLNDWKQGHYSELSLEFHESQEYHETKLVVNWSGIPVGEEDRVRGNFEEYYIRSIKVTFGFGAIL

SEQ ID NO: 5425 - protein, 338 aa, Bacillus cereus ATCC 10987
MAILVTGGVGYIGSHTCVELLNNDYEIIVVDNLSNSSIESINRVKELTGKQFKFYKEDLVNYEALNKIFEENTIEAVIHFAGLKAVGESVAKPLMYYHNNIISTLVLCEVMQKHNVKKMIFSSSATVYGIPETSPITEEFPLSATNPYGQTKLMIEQMMRDVAFADAEWSIALLRYFNPFGAHESGRIGEDPNGIPNNLMPYVTQVAVGKLKELSVFGNDYPTKDGTGVRDYIHVVDLANGHVKALAKVMNTTGVDAYNLGTGTGYSVLEMVEAFEKVSGKKVPYKITERRPGDVAVCFADASKAKRELGWEAKHGLEEMCADSWRWQLNNKNGYITK

SEQ ID NO: 5426 - protein, 129 aa, Neurospora crassa
MEGIKQTFQRCKAQNRAALVTYVTAGFPHPEQTPDILLAMEKGGADVIELGVPFTDPIADDPTIQTANTIALQHGVTLQSTLQMVRDARQRGLKAPVMLMGYYNPLLSYGEERLLNDCKEAGVNGFIIV

SEQ ID NO: 5427 - protein, 261 aa, Staphylococcus aureus
MKVQIYQLPIVFGDSSKNETQITQWFEKNMNAEVDVVVLPEMWNNGYDLEHLNEKADNNLGQSFSFIKHLAEKYKVDIVAGSVSNIRNNQIFNTAFSVNKSGQLINEYDKVHLVPMLREHEFLTAGEYVAEPFQLSDGTYVTQLICYDLRFPELLRYPARSGAKIAFYVAQWPMSRLQHWHSLLKARAIENNMFVIGTNSTGFDGNTEYAGHSIVINPNGDLVGELNESADILTVDLNLNEVEQQRENIPVFKSIKLDLYK

SEQ ID NO: 5428 - protein, 475 aa, Arabidopsis thaliana
MGGGFRVLHLVRPFLAFLPEVQSADRKIPFREKVIYTVISLFIFLVCSQLPLYGIHSTTGADPFYWMRVILASNRGTVMELGITPIVTSGLVMQLLAGSKIIEVDNNVREDRALLNGAQKLLGILIAIGEAVAYVLSGMYGPVGQLGFGNAILIILQLFFAGIIVICLDELLQKGYGLGSGISLFIATNICESIIWKAFSPTTINTGRGAEFEGAVIALFHMLITKSNKVAALRQAFYRQNLPNVTNLLATVLIFLIVIYFQGFRVVLPVRSKSARGQQGSYPIKLFYTSNMPIILQSALVSNLYFISQLLYRKFSGNFFVNLLGQWKESEYSGQSIPVSGLAYLITAPASFADMAAHPFHALFYIVFMLTACALFSKTWIEVSGSSARDVAKQLKEQQMVMPGHRESNLQKELNRYIPTAAAFGGVCIGALTVLADFMGAIGSGTGILLAVTIIYQYFETFEKEKASELGFFGF

SEQ ID NO: 5429 - protein, 131 aa, Neurospora crassa
MEGIKQTFQRCKAQNRAALVTYVTAGFPHPEQTPDILLAMEKGGADVIELGVPFTDPIADGPTIQTATANTIALQHGVTLQSTLQMVRDARQRGLKAPVMLMGYYNPLLSYGEERLLNDCKEAGVNGFIIV

SEQ ID NO: 5430 - protein, 217 aa, Brucella melitensis 16M
MKFFVDTADVKEIRELNDLGLVDGVTTNPSLILKSGRDIIEVTKEICNIVKGPVSAEVAATEYEQMMKEAAVIARIADNICIKLPVTLDGLKACKALTSEGHKVNMTLCFSANQALLAAKAGATFISPFIGRLDDTGINGMELIAEIRTIYDNYDFRTEILAASVRTVNHVKEAALIGADVVTAPPATLKALVKHPLTYKGLETFLADWAKTGQKIA

SEQ ID NO: 5431 - protein, 193 aa, Neurospora crassa
VNGFIIVDLPPEEAVSFRQLCTRGGLSYVPLIAPATSDARMRVLCQLADSFIHVVSRQGVTGASGTLNANLPELLARVKKYSGNKPAAVGFGVSTHDHFTQVGAIADGVVVGSMIITTIQKAAKGEEVKAVQEYCSYLCGRNFEQSAHELNMGEALEAAKEPVGTATVDGVITEADIDAQLAALHGTIPKRFG

SEQ ID NO: 5432 - protein, 193 aa, Neurospora crassa
VNGFIIVDLPPEEAVSFRQLCTRGGLSYVPLIAPATSDARMRVLCQLADSFIYVVSRQGVIGASGTLNANLPELLARVKKYSGNKPAAVGFGVSTHDHFTQVGAIADGVVVGSMIITTIQKAAKGEEVKAVQEYCSYLCGRNFEQSAHELNMGEALEAAKEPVGTATVDGVITEADIDAQLAALHGTIPKRFG

SEQ ID NO: 5433 - protein, 379 aa, Triticum aestivum
NKFVQKSRLVPVRNSRDIVDPRVRILSSRVPSLQPKQSTTQPPPEEHEEMGSGTGKVVCVTGGSGYIASWLVKFLLQRGYTVRATVRDTADPKKTLHLQALDGAKDRLHLFKASLLEEGSFDAAVAGCDCVFHTASPFYHNVKDPKAELLDPAVDGTLNVLRSCKKASIKRVIVTSSMAAVAYNGKPRTPDVVVDETWFSSAEVCEKNKQWYVLSKTLAEEAAWKYANDNGLEIITINPTMVIGPLLQPTLNTSTEAILKFINGLSSTYANFCFGWINVKDVALAHILAYEVPSANGRYCMVERVIHHSDLVKIIHEMYPEFPVPDKCADDAPFAPIYQVSKDKIRSLGMELTPLETSLKETIESLKEKGFVTSESSHL

SEQ ID NO: 5434 - protein, 545 aa, Campylobacter jejuni
MAKEIIFSDEARNKLYEGVKKLNDAVKVTMGPRGRNVLIQKSFGAPSITKDGVSVAKEVELKDSLENMGASLVREVASKTADQAGDGTTTATVLAHAIFKEGLRNITAGANPIEVKRGMDKACEAIVAELKKLSREVKDKKEIAQVATISANSDEKIGNLIADAMEKVGKDGVITVEEPKSINDELNVVEGMQFDRGYLSPYFITNAEKMTVELSSPYILLFDKKITNLKDLLPVLEQIQKTGKPLLIIAEDIEGEALATLVVNKLRGVLNISAVKAPGFGDRRKAMLEDIAILTGGEVISEELGRTLESATIQDLGQASSVIIDKDNTTIVNGAGEKANIDARVNQIKAQIAETTSDYDREKLQERLAKLSGGVAVIKVGATTETEMKEKKDRVDDALSATKAAVEEGIVIGGGAALIKAKAKIKLDLQGDEAIGAAIVERALRAPLRQIAENAGFDAGVVVNSVENAKDENTGFDAAKGEYVNMLESGIIDPVKVERVALLNAVSVASMLLTTEATISEIKEDKPTMPDMSGMGGMGGMGGMM

SEQ ID NO: 5435 - protein, 251 aa, Lactobacillus brevis
SNRLDGKVAIITGGTLGIGLAIATKFVEEGAKVMITDRHSDVGEKAAKSVGTPDQIQFFQHDSSDEDGWTKLFDATEKAFGPVSTLVNNAGIAVNKSVEETTTAEWRKLLAVNLDGVFFGTRLGIQRMKNKGLGASIINMSSIEGFVGDPSLGAYNASKGAVRIMSKSAALDCALKDYDVRVNTVHPGYIKTPLVDDLPGAEEAMSQRTKTPMGHIGEPNDIAYICVYLASNESKFATGSEFVVDGGYTAQ

SEQ ID NO: 5436 - protein, 96 aa, Haemophilus influenzae 86-028NP
MNIRPLHDRVIIKREEVETRSAGGIVLTGSAATKSTRAKVLAVGKGRILENGTVQPLDVKVGDTVIFNDGYGVKAEKIDGEEVLIISENDILAIVE

SEQ ID NO: 5437 - protein, 251 aa, Lactobacillus brevis
SNRLDGKVAIITGGTLGIGLAIATKFVEEGAKVMITGRHSDVGEKAAKSVGTPDQIQFFQHDSSDEDGWTKLFDATEKAFGPVSTLVNNAGIAVNKSVEETTTAEWRKLLAVNLDGVFFGTRLGIQRMKNKGLGASIINMSSIEGFVGDPSLGAYNASKGAVRIMSKSAALDCALKDYDVRVNTVHPGYIKTPLVDDLPGAEEAMSQRTKTPMGHIGEPNDIAYICVYLASNESKFATGSEFVVDGGYTAQ

SEQ ID NO: 5438 - protein, 330 aa, Helicobacter pylori 26695
MKRMLAEFEKIQAILMAFPHEFSDWAYCIKEARESFLNIIQTIAKHAKVLVCVHTNDIIGYETLKNLPGVEIARIDTNDTWARDFGAISVENHGVLECLDFGFNGWGLKYPSNLDNQVNFKLKSLGFLKHPLKTMPYILEGGSIESDGAGSVLTNTQCLLEKNRNPHLNQNGIENMLKKELGAKQVLWYSYGYLKGDDTDSHTDTLARFLDKDTIVYSTCEDENDEHYTALKKMQEELKTFKKLDGTPYKLIPLEIPKAIFDENQQRLPATYVNFLLCNNALIVPTYNDPKDALILETLKQHTPLEVIGVDCNTLIKQHGSLHCVTMQLY

SEQ ID NO: 5439 - protein, 307 aa, Petunia x hybrida
MDQYEKVEKIGEGTYGVVYKARDRVTNETIALKKIRLEQEDEGVPSTAIREISLLKEMQHANIVRLQDVVHTVKSDCILSFEYLDLDLKKHMDSSPEFSKDPRLVKMFLYQILRGIAYCHSHRVLHRVLHRDLKPQNLLIGRRTNALKLADFGLARAFGIPVRTFTHEVVTLWYRAPEILLGSRHYSTPVDVWSVGCIFAEMVTQRPLFPGDSEIDELFKIFRVMGTPNEDTWPGVTTLPDFKSALPKWPSKDLATIVPNLDGAGLDLLDKTVRLDPSKRITARNALEHEYFKDIGYVFRSKGSSRV

SEQ ID NO: 5440 - protein, 545 aa, Haemophilus influenzae 86-028NP
MAAKDVKFGNDARVKMLKGVNVLADAVKVTLGPKGRNVILDKSFGAPTITKDGVSVAREIELEDKFENMGAQMVKEVASKANDAAGDGTTTATVLAQAIVNEGLKAVAAGMNPMDLKRGIDKAVSAVVSELKNLSKPCETAKEIEQVGTISANSDSIVGQLISQAMEKVGKEGVITVEDGTGLEDELDVVEGMQFDRGYLSPYFINKPETATVELDNPYLLLVDKKISNIRELLPVLEGVAKAGKPLLIIAEDVEGEALATLVVNTMRGIVKVAAVKAPGFGDRRKAMLQDIAILTAGTVISEEIGMELEKATLEDLGQAKRVVINKDNTTIIDGIGDEAQIKGRVAQIRQQIEESTSDYDKEKLQERVAKLAGGVAVIKVGAATEVEMKEKKDRVDDALHATRAAVEEGIVAGGGVALVRAAAKVAASLKGDNEEQNVGIKLALRAMEAPLRQIVTNSGEEASVVASAVKNGEGNFGYNAGTEQYGDMIEMGILDPTKVTRSALQFAASVAGLMITTECMVTDLPKDDKADLGAAGMGGMGGMM

SEQ ID NO: 5441 - protein, 471 aa, Bacillus megaterium
TIKEMPQPKTFGELKNLPLLNTDKPVQALMKIADELGEIFKFEAPGRVTRYLSSQRLIKEACDESRFDKNLSQALKFVRDFAGDGLFTSWTHEKNWKKAHNILLPSFSQQAMKGYHAMMVDIAVQLVQKWERLNADEHIEVPEDMTRLTLDTIGLCGFNYRFNSFYRDQPHPFITSMVRALDEAMNKLQRANPDDPAYDENKRQFQEDIKVMNDLVDKIIADRKASGEQSDDLLTHMLNGKDPETGEPLDDENIRYQIITFLIEGHETTSGLLSFALYFLVKNPHVLQKAAEEAARVLVDPVPSYKQVKQLKYVGMVLNEALRLWPTAPAFSLYAKEDTVLGGEYPLEKGDELMVLIPQLHRDKTIWGDDVEEFRPERFENPSAIPQHAFKPFGNGQRACIGQQFALHEATLVLGMMLKHFDFEDHTNYELDIKETLTLKPEGFVVKAKSKKIPLGGIPSPSTEQSAKKVR

SEQ ID NO: 5442 - protein, 540 aa, Oryza sativa (japonica cultivar-group)
MTTVASLSLLPHLLIKPSFRCCSRKGVGRYGGIKVYAVLGDDGADYAKNNAWEALFHVDDPGPRVPIAKGKFLDVNQALEVVRFDIQYCDWRARQDLLTIMVLHNKVVEVLNPLAREFKSIGTLRKELAELQEELAKAHNQVHLSETRVSSALDKLAQMETLVNDRLLQDGGSSASTAECTSLAPSTSSASRVVNKKPPRRSLNVSGPVQPYNPSLKNFWYPVAFSSDLKDDTMVPIDCFEEQWVIFRGKDGRPGCVMNTCAHRACPLHLGSVNEGRIQCPYHGWEYSTDGKCEKMPSTKMLNVRIRSLPCFEQEGMVWIWPGNDPPKSTIPSLLPPSGFTIHAEIVMELPVEHGLLLDNLLDLAHAPFTHTSTFAKGWSVPSLVKFLTPSSGLQGYWDPYPIDMEFRPPCMVLSTIGISKPGKLEGKSTKQCSTHLHQLHICLPSSRNKTRLLYRMSLDFAPWIKHVPFMHILWSHFAEKVLNEDLRVVLGQQDGCQWRKCLELASIICKLGIRYRLWRDAIERGVDRLPFSNQSESGS

SEQ ID NO: 5443 - protein, 122 aa, Ananas comosus
KKAGVAHKIDFREGPALPVLDQLLEDKNHGSFDFVFVDADKDNYLNYHKRLLDLVKPGGLIAYDNTLWNGTVVAPPDAPLRKYVRYYRDFVLELNKALAVDPRVEICQLPVGDGVTLCRRIA

SEQ ID NO: 5444 - protein, 388 aa, Glycine max
MSWWWAGAIGAAKKKFEEEEPPRSFQSVGLVIGVTGIVGNSLAEILPLADTPAGPWKVYGVARRPRPPWNADHPVEYIQCDVSDPADAEAKLSALTDVTHVFFVSWTNRSTEAENCEVNGAMLQNVLRAVIPNAPNLRHVSLQTGGKHYIGPFEFIGKIESHEPPFAEDMPRLDAPNFYYTQEDILFEETAKKEGLTWSVHRPQVIFGFSPYSLMNMIGTLSVYAAICKHEGVPLRFPGTRGAWESYSCASDADLIAEQHIWAAVDPYARNEAFNCSNGDVFRWKHLWKVLAEQFGIEEYGFEEEGLSLSELMKDKGPVWDEIVSENQLLPTKLDEVADWWFVDLIFSGEGMLDSMNKAKEHGFLGFRNSKNSFISWIDKTKAYKIVP

SEQ ID NO: 5445 - protein, 320 aa, Arabidopsis thaliana
MNSNIFPPSKQQNELNNIQQSFSNLQSQCSNLLLNVSQTLNPLFNANTNNNKPNIFSALNSFRDQAKQALDSRISRFNSGKAPVWARISDDGGGARAQVTVPIRGSGKGLSADAIEERLAGVPVYALSNSNEEFVLVSGTSSGKSLGLLFCKEEDAETLLKEMKSMDPRMRKEGSKVVALALSKVFQLKVNGVAFRLIPESTQVKNALKFCMWIQRERKTAGIDDDDFHGVPVFQSKSLILRSENMSYRPVFFRKEDLEKSLIRASSQQNRLNPALKPGDIQVAVFEDIVKGMRESTTSNWDDIVFIPPGFEVSTEQTQE

SEQ ID NO: 5446 - protein, 79 aa, Glycine max
MSRSVPLVSTICVLLLLLVATEMMGPTMVAEARTCESQSHRFKGPCLSDTNCGSVCRTERFTGGHCRGFRRRCFCTKHC

SEQ ID NO: 5447 - protein, 149 aa, Arabidopsis thaliana
MLSQRVTGHWYGCVTLEDVPLLLEQHINKGEIVDRLWRGEMGLPEEDQKKTQEQRLQLNSEKISNREVTQESVNNSICCQSRAVPELNGSGCQQNGNSSYCLEEIHTEKNTSERVTSVKNASLRIGSSENGSSGGFKVCAVMSMWFETL

SEQ ID NO: 5448 - protein, 431 aa, Trichodesmium erythraeum IMS101
MVTEVSLIEIAKTTRQAAQKSAVLSTEAKNQAIEAVAQALEKATPKIITANQLDCRIAETDGIAKPLYNRLKMDEAKLNSAIEGLRNVATLRDPIGVVQIHRELDAGLILKRITCPLGVIGVVFEARPDAVIQISALAIKSGNGVILKGGKEATNSCLELVTAIRQGLSTTSVNPDGVQLLTTREETLELLKLDEYVDLIIPRGSNSFVKFVQENTQIPVLGHAEGICHVYVDKFADIQKAVKITIDAKTQYPAACNAAETLLVHTDVAAKFLSEVFPELEKRQVELRGDRATQQILSSVKEATDLDWATEYSDLVLSVKVVDSLDSAIAHINNYGSGHTDAIITEDGKAAEIFLAQIGSAGVFHNCSTRFSDGFRYGFGAEVGISTQKMPPRGPVGLEGLVTYKYQIVGDGHIAATYSGENAKPFTHQDF

SEQ ID NO: 5449 - protein, 416 aa, Bacillus subtilis subsp. subtilis str. 168
MSLDYWRNIEGSYPYQTTGNDILTLKEESNPVNLSTLEKQLIGIRRHLHQYPELSKEEFETTAFIKKCLKEKGIQIRPTALKTGVFADIAGESEGPAIALRADIDALPIEEKTGLPYASKHKGIMHACGHDFHTAALLGAAFLLKENQDSLKGKIRLLFQPAEEAGAGATKVIEDGQLDGIDAVIGLHNKPDIAVGTVGLKTGPLMAAVDRFKVEIEGKGAHAALPHNGFDPIIGASQLIVALQTIVSRNVNPLQSAILTVGKINGGSTWNVIPDTVVIEGTVRTFDSEVRNQVKQRFFAVTEQISAAFSLKANVKWHSGPPPLCNDEAITGLVRDAAHKAKLQVIDPAPSTAGEDFAYYLEHIPGSFAFFGTDGDHDWHHPAFTIDETAIIKASYFLYESAKRLLDSNEESKISD

SEQ ID NO: 5450 - protein, 578 aa, Oryza sativa (japonica cultivar-group)
MAASTTLALSHPKTLAAAAAAAPKAPTAPAAVSFPVSHAACAPLAARRRAVTAMVAAPPAVGAAMPSLDFDTSVFNKEKVSLAGHEEYIVRGGRNLFPLLPEAFKGIKQIGVIGWGSQGPAQAQNLRDSLAEAKSDIVVKIGLRKGSKSFDEARAAGFTEESGTLGDIWETVSGSDLVLLLISDAAQADNYEKIFSHMKPNSILGLSHGFLLGHLQSAGLDFPKNISVIAVCPKGMGPSVRRLYVQGKEINGAGINSSFAVHQDVDGRATDVALGWSVALGSPFTFATTLEQEYKSDIFGERGILLGAVHGIVEALFRRYTEQGMDEEMAYKNTVEGITGIISKTISKKGMLEVYNSLTEEGKKEFNKAYSASFYPCMDILYECYEDVASGSEIRSVVLAGRRFYEKEGLPAFPMGNIDQTRMWKVGEKVRSTRPENDLGPLHPFTAGVYVALMMAQIEVLRKKGHSYSEIINESVIESVDSLNPFMHARGVAFMVDNCSTTARLGSRKWAPRFDYILTQQAFVTVDKDAPINQDLISNFMSDPVHGAIEVCAELRPTVDISVPANADFVRPELRQSS

SEQ ID NO: 5451 - protein, 319 aa, Staphylococcus aureus
MRRLFSIGEALIDFIPNVTNANLKDVQTFTKQIGGAPCNVACTVQKLGQQAYMITQLGNDAFGDSIIETISSIGVDVSKVYRTNEANTALAFVSLTEAGERDFSFYRKPSADMLFEPSFVNDIDVNENDVVHFCSVDLVDSPMRDAHYQLITKTLNANGTVVFDPNVRLPLWDNAEDLRQTIHTFLPLAHIVKVSDEELEFITGIHDENEAIQSLFTGNVTVVIYTKGADGAAVYLKNGINHYHSGYKVKPVDTTGAGDAFIGAVISRILATDVLNLTQLFENEGEEILAFSNRVAAIVTTKYGAINSLPTLQEVEQAF

SEQ ID NO: 5452 - protein, 477 aa, Candida albicans SC5314
MSTDHHSHPVEGHQFKKIFNRLSGQPESYSRKQNYTFGKTLGAGSFGIVRYARDNSTDEEVAVKIILKKALKGNESMIIDEMQLLEQLNNPHIVGFRDWFESKDKFYLVTQLATGGELFDRIVQKGRFTEHDASLVVLQMLEALEYLHNKDIVHRDIKPENILYLTSKDDSPIVLADFGIAKRLQNPNEKLTSSAGSFGYAAPEVILGTGHGKPCDIWSLGVVTYTLLCGYSPFRSENVQDFINEVKHNNAVIFHADYWKDVSKDARRFIIKALQFNPDNRPTATELLNDPWLVSIAKEYKETDLLPNFKQGFDAKKKFRQAIELVKLNNRIKKLKEWQTDEDDDPTEINLFNEHGSVEQRANPSTNDGLTIPGTTSPRRGESPLNTWKKFNDVINSLDTNRSKASLSSFKSPYDLAHSNRGTDVSNSGATNVGKSDTASSAFVQLVHAATANKEKVANYTEDEEGKEKKQKDGDKN

SEQ ID NO: 5453 - protein, 193 aa, Neurospora crassa
VNGFIIVDLPPEEAVSFRQLCTRGGLSYVPLIAPATSDARMRVLCQLADSFIYVVSRQGVTGASGTLNANLPELLARVKKYSGNKPAAVDFGVSTHDHFTQVGAIADGVVVGSMIITTIQKAAKGEEVKAVQEYCSYLCGRNFEQSAHELNMGEALEAAKEPVGTATVDGVITEADIDAQLAALHGTIPKRFG

SEQ ID NO: 5454 - protein, 332 aa, Medicago sativa
MAKDPVRVLVTGAAGQIGYALVPMIARGVMLGPDQPVILHMLDIAPAAESLNGVKMELVDAAFPLLKGVVATTDVVEACTGVNIAVMVGGFPRKEGMERKDVMSKNVSIYKSQASALEKHAAANCKVLVVANPANTNALILKEFAPSIPERNISCLTRLDHNRALGQISERLNVQVSDVKNVIIWGNHSSTQYPDVNHATVNTPAGEKPVRQLVSDDAWLNGEFISTVQQRGAAIIKARKLSSALSAASAACDHIRDWVLGTPQGTFVSMGVYSDGSYNVPSGLIYSFPVTCANGEWKIVQGLSIDEFSRKKLDLTAEELTEEKNLAHSCLS

SEQ ID NO: 5455 - protein, 369 aa, Arabidopsis thaliana
MSERRIHYSQLKNDNLNQISPSSAPSPITLNHQLTDSSSSSSSGGNNRISPIILFIIVLLSVIFFICSILHLLVRYYLKKKRSNLSSSPNESNQNPEFSDSDTYQRQLQQLFHLHDSGLDQALIDALPVFLYKEIKGTKEPFDCAVCLCEFSEDDKLRLLPNCSHAFHIDCIDTWLLSNSTCPLCRGTLFSLGHQFEYPDFNFGFFAGDDGGGGVRVSPVQKPAENEIGKRVFSVRLGKFRSSNIVNNGEVVVGGGGETSSSSLDNRRCFSMGSYQYIVAESDLVVALCPNNEGLKNNKDVEGKKINMRSKGESFSVSKIWQWSNKRSKFPNNHPSETNLVVGGSSSSSSYVCSGSDGLSLNGRRFQGP

SEQ ID NO: 5456 - protein, 193 aa, Neurospora crassa
VNGFIIVDLPPEEAVSFRQLCTRGGLSYVPLIAPATSDARMRVLCQLADSFIYVVSRQGVTGASGTLNANLPELLARVKKYSGNKPAAVGFGVSTHDHFTQVGAIADGVVVGSMIITTIQKAAKGEEVKAKQEYCSYLCGRNFEQSAHELNMGEALEAAKEPVGTATVDGVITEADIDAQLAALHGTIPKRFG

SEQ ID NO: 5457 - protein, 179 aa, Triticum aestivum
SNFNNKYCMHKLPYMILVHIHSTYKEAEISSHGPWKPQRNSHRQRTRKRIQRTHTSNNPSTLGIDRRDHHGNILLFRRNTRGGCLDLLGDGVDGVDDPRDVPEEGEQEADPELMPAAELEEDAEGREDDGKDDVDAVGRARHGRRCSGGRRAFHSIGGWRGSSRAEQSRGGWEGRARIH

SEQ ID NO: 5458 - protein, 214 aa, Carboxydothermus hydrogenoformans Z-2901
MEIFLDTANIEEIKKGASLGIISGVTTNPSLIAREGRDLKEVVMEIVSLIDGPISAEVISLDYEGMVREAEELSKLHPNITIKIPMTWDGIRAVKTLSSMGIKTNVTLVFSANQALLAALAGATFVSPFVGRLDDTGHDGVYLIEEIKTIYENYNFKTKIIAASIRHPLHVTQVAKAGADIATVPFKVLTQMFAHPQTKEGIEKFLADWQAMKR

SEQ ID NO: 5459 - protein, 254 aa, Mesembryanthemum crystallinum
MATTNVEENKQTQEQQPKEIKHQEVGHKSLLQSDALFQYILETSVYPREPEPMKELRDITAKHPWNLMTTSADEGQFLNMLLKLINAKNTIEIGVYTGYSLLASALALPDDGKILAMDINRENYELGLPVIQKAGVAHKIDFREGPALPVLDLLIEDAKNHGSFDFAFVDADKDNYGNYHKRLIDLVKIGGVIGYDNTLWNGSVAAPADAPMRKYVRYYRDFVMEFNKAIAADPRVEICQLPVGDGITLCRRIS

SEQ ID NO: 5460 - protein, 505 aa, Schizosaccharomyces pombe
MFTDYPNDINCESPRMSDLDGFCQNAFSDLNSLNQQVFKANYAVRGALAILADEIQDDLLENPSSYPFSEIVYANIGNPQQMGQSPITFVRQVLSLCQYPTLLDHAEEKWFQNLFPTDVVQRSKMLLKESGSLGAYSASQGIPLVRRHVADFIRARDGFDCEPSDIYLTSGASHAARLIMTLIIARPTDGVMVPAPQYPLYGAQIDLMSGSMVSYSLSEENNWDIDFDQFKKSFDEASKKGINVRLCVVINPGNPTGACISENSMEKVLRFAKAKGIVLLADEVYQNNIYQNKFHSFRRKLGELREKEPDNHWDQVSLISVNSVSKGQFGECGQRGGYLDVVNIPEPAKDQILKLATIDICPPVAGQLLVDMLVNPPKPGDPSYDLFIKEVDEIHEALRLQCRQLYEGTKRMKRVSCLEPHGAMYLHPSVSLPEKLITTAKAQKIQPDEFYAIELLKRSGICVVPGSGFGQPEGDYHIRITFLAKGTEYIERFVKAHNEIMDLYE

SEQ ID NO: 5461 - protein, 275 aa, Prochlorococcus marinus str. MIT 9313
MADFLAPKSNTHATISSRFQRVQAEGRLALMPFLMAGDPDLETTAEVLLSLEQSGADMIELGIPYSDPLADGPVIQAAASRALASGTTPARVLQMLIDLRGKLSIPVILFTYTNPLFNRGMERFCDEAAEAGVAGLVVPDLPLEEAERLSPLASARGLDLVLLVAPTTPAERMARIAESSRGFTYLVSVTGVTGERSVMEDRVQSLVQQLKLSGSNPVAVGFGISGPQQVRQVRSWGADGAIVGSALVKRMAAAAPGLVAQEAGLFCKELRNAAG

SEQ ID NO: 5462 - protein, 244 aa, Zea mays
RNGLLKKAYELSILCDAEIALIVFSTRGRLYEYSSNSVRSTIERYKKASASTSGTAPVTDVNSLQYFQQEAAKLRQQIQTLQNSNRHLMGESTGNMTAKELKGLESRLERGIGRIRSKKHELLLAEIEYMQKREADLHNENMFLRAKVAEAERALEQEAAEDQTMMVPAAVRGATTELKALPASFDASGYYQYQQHQHVVAAASAASSSQYAEQPQGQQEYHHQTALHLGYHVKIDSAADKGFL

SEQ ID NO: 5463 - protein, 177 aa, Glycine max
MSPDHNPRNPFENSNSDKRKKFTENSGAHWDVFRRQDVPKLLEYLKRHSDEFSYNSECHEKMVHPILDQSFFLDNTHKMRLKEEFKIEPWTFEQHVGEAVIIPSGCPYQIRNPKCCVHVELEFVSPENVSECIQLIDEVRLLPEDHKAKGEKLEVKKMALYSMSTAIEEIRELTCKT

SEQ ID NO: 5464 - protein, 441 aa, Escherichia coli O157:H7
MTGKVMESLNQFVNSLAPKLSHWRRDFHHYAESGWVEFRTATLVAEELQQLGYSLALGREVVNENSRMGLPDELTLQREFERARQQGALAQWIAAFEGGFTGIVATLDTGRPGPVMAFRVDMDALDLSEEQDVSHRPYRDGFASCNAGMMHACGHDGHTTIGLGLAHTLKQFESGLHGVIKLIFQPAEEGTRGARAMVDAGVVDDVDYFTAVHIGTGVPAGTVVCGSDNFMATTKFDAHFTGTAAHAGAKPEDGYNALLAAAQATLALHAIAPHSEGASRVNVGVMQAGSGRNVVPASALLKVETRGASDVINQYVFDRAQQAIQGAATMYGVGVETRLMGAATASSPSPQWVAWLQSQAAQVAGVNQAIERVEAPAGSEDATLMMARVQQHQGQASYVVFGTQLAAGHHNEKFDFDEQVLAIAVETLARTALNFPWTRGI

SEQ ID NO: 5465 - protein, 127 aa, Oryza sativa
  misc_feature (12)..(12): Xaa can be any naturally occurring amino acid
  unsure (1)..(127): unsure at all Xaa locations
DARAAPRGPILXLEDYHLVEKLVNFDRKRIPERVEHAQMGSSKGFFQVTHDITHLNWAEFLRAPGVQTPVIVRFFTRIHDRGRPETLPKHCGLNIKVYTREGKLDLVGNNFPVLFIHDGMKFPDMVH

SEQ ID NO: 5466 - protein, 344 aa, Bacillus anthracis str. 'Ames Ancestor'
MGEKMLGIINATGSFPSLKKVTGHRSLAALPFGGRYRLIDFMLSNMVNSNIHSVAVFTSHKNRSLMDHVGSGKQWDLDRKRDGLFLFPPNCQCDQDEFGSFAHFRRHIDYFLRSREEYVVITNSHLVTALNFQAVLERHIHTAADITEVCHEGVSLQTYVLKKQLLLDLFEAYKDMEQYSLFDVVREKRGKSLHIATYEHTEYVAIIDSIESYYKHSLEILQPAIWKQVFKKEAPIFTKVKDEPPTRYVKGAAVKNTMIANGSIIEGEVENSVVSRSVKIGKGSIVRNSIIMQKSQIGDNCIIDGVIIDKDVKIGDGVVLKGNADEPYVVEKGSVQNSTINSYS

SEQ ID NO: 5467 - protein, 246 aa, Eucalyptus globulus
MATAGEESQTQAGRHQEVGHKSLLQSDALYQHILETSVYPREPEPMKELREITAKHPWNIMTTSADEGQFLNMLLKLINAKNTMEIGVFTGYSLLATALALPDDGKILAMDINRENYELGLPVIQKAGVADKIDFREGPALPILDQLIEDGKQGSFDFIFVDADKDNYLNYHKRLIELVKVGGLIGYDNTLWNGSVVAPPDAPLRKYVRYYRDFVLELNKALAADPRIEICMLPVGDGITLCRRIS

SEQ ID NO: 5468 - protein, 555 aa, Clostridium perfringens str. 13
MKDFKKSVVYQIYPKSFKDSNGDGLGDLRGVIEKLDYLKTLGVDYIWMTPFYVSPQKDNGYDIADYYKIDPRYGTMEDFEELVKEAKSRNIDIMLDMVFNHTSTEHEWFKRALKGEEKYKNYYIFKEGKKGEPPTNWISKFGGNAWEYVEELGEYYLHLFDVSQADLNWDNKELREEIYKVVNFWIDKGVKGFRLDVINLISKPEKFENDYEGDGRRFYTDGHRIHEYLKELNERTFGKDVEIVTVGEMSSTTIENCIKYSNPKEKELSMVFNFHHLKVDYKDGQKWSLMDFDFIELKKLFNNWQRGMIKGGGWNAVFWCNHDQPRVNSRFGDVKKYFNESSKMLATSIHMMSGTPYVYQGEEIGMTNPGFESIEEYRDVESINYFNILKEEGIDKKEIMEILKSKSRDNSRTPVQWNEEKNAGFTTGTPWINIANNYREINVERALENKDSVFYHYKKLIELRKNEDVIAYGDYIPLLEDHPKVYAYERNYNGEKLLVINNFYGEECLVDLSKEIEGLENYNKSILISNYKDSTLDLLNLKLRPYESIVYKLEK

SEQ ID NO: 5469 - protein, 453 aa, Prochlorococcus marinus str. MIT 9313
MEHPFDLIVLGAGSGGLAAAKRAASHGAKVAIVEGDRVGGTCVIRGCVPKKLLVYGSLYREQLEVAPSFGVELSDAQINAGVLLANVRQEVDRLNTLHIDLLAKNGVELVTGWGSFTSPNSVAVSRNGAIDASQELHGDHILIAVGGRPHRPDIPGAELGWVSDDMFMQSSFPDRVVVVGAGFIACEFACILHGLGVEVIQLVRGDHLLRGFDRELSTAVQDGMQEKGIDLRFGENPAALKGQPGDLVLSTQSGERFSCGGVLLATGRRPFLQGLNLDAAGVVLEGRRISVDANQSTNIPHIFAVGDVTDRINLTPVAIDEGRAFADSVFGQKPRQVNHDLVASAVFSQPELATVGLTEEQSIDRYGKDQVKVYRARFRSMAQALPKRGPRCLLKLIVARNTDRILGCHMVGEHAAEIIQMAAIALGMGATKADFDRTMALHPTVSEEFVTMT

SEQ ID NO: 5470 - protein, 347 aa, Oryza sativa
MEKYELLKDIGSGNFGVARLMRNRETKELVAMKYIPRGLKIDENVAREIINHRSLRHPNIIRFKEVVLTPTHLAIVMEYAAGGELFDRICSAGRFSEDEQICHRDLKLENTLLDGSPAPRLKICDFGYSKSSLLHSKPKSTVGTPAYIAPEVLSRREYDGKMADVWSCGVTLYVMLVGAYPFEDPDDPKNFRKTIGRIVSIQYKIPEYVHISQDCRQLLSRIFVANPAKRITIREIRNHPWFMKNLPRELTEAAQAKYYKKDNSARTFSDQTVDEIMKIVQEAKTPPPSSTPVAGFGWTEEEEQEDGKNPDDDEGDRDEEEGEEGDSEDEYTKQVKQAHASCDLQKS

SEQ ID NO: 5471 - protein, 879 aa, Oryza sativa
MGMVLGKITVETPKHEVLHTGAGYEVRKYPPCVVAEVTYDPAEMKGDRDGGFTVLGNYIGALGNPQNTKPEKIDMTAPVITSGEPESIAMTAPVITSGEPEPVAMTAPVITAEERSQGKGQMTMQFLLPSKYSKVEEAPRPTDERVVLRQVGERKYGVVRFSGLTGDKVVKEKAEWLKAALEKDGFTVKGPFVLARYNPPFTLPPLRTNEAGRRDRIWPILVSGAAPFRFNVGPTKRSDPYPQGCNPVYGFGRNPTSLTVAKPFNANWIESNTFVFYQASHRRREPAMAMAASPFLILPSLFPKPTILAARIHPSIFRGRHIRCSPNGAAVPESPEPAPRRGRRKSPSPSPPKAKTTRRRTKKNTQESDSEGEEEPPKRRGRRTRKSKQEAEQEAAEKEDEVRAASPGTEDSKRAVQDEDGEAEATGSDSEDGEDSPYDWPPLVCCFGAPRWEFVPTVRVSDRQMHPDIYSTWLHLQWEPPEFARAPGSAASNVAIALTRLGGRAAVLGKVGDDDFGRELVYRMNCERVQTRAIRFDDGAATATARMKVGFRDREDGSGGTRLVAETVKSAAEDSLSKAEINVDVLKEARVFHFNSEVLLTPSMESTLFRAIELSKKFGSKIFFDLNLPLPLWRSRDETKELINKAWNEADIIEVSRDELEFLLDHEYYQYKRANPPQYYLDGFHLTRNWPQYYHYTPEEIAPIWHDGIKLLLVTYGTLRIHYYTPKFHGCVIGTEDALITPYTTDRTGSGDAVVAAAIRKLTSCPEMYEDQDTLERNLRFAVAAGIISQWTIGAVRGFPTESAAQNLKEQNNAHDIQVYFMSAATEVVKGKVLPKQLTGFSVFSFSWKNVSATWRLPLLYSFEELCLPIDFHGRDASV

SEQ ID NO: 5472 - protein, 151 aa, Zea mays
MGILDHLSHLCSITETKEALKLRKKRPLQTVNIKVKMDCEGCERRVKSAVKSMRGVTSVAVNAKQSKCTVTGNVEPAKVLERVKATGKNAEMWPYVPYALTTYPYVGGAYDKKAPAGFVRSAPQAMADPGAPELKYMNMFNDDNVDACTVM

SEQ ID NO: 5473 - protein, 345 aa, Helicobacter hepaticus ATCC 51449
MPYLLLTGASGYIGSHTAYCLLKNTNYHILIVDDLSTGFKENIAYLQECFEERVSFVQSNINDISKMRTLLLHYKFEAVIHFAASLIVGESVLKPLEYYTNNTLNTTNLIALCIECGITKFIFSSTAAVYGEPHTSLIPIDENAPLLPINPYGSSKMMSERILYDTSLAFKNFNYVALRYFNVAGASMDNTPQILSNHKGLGQRSKNATHLIKVACECACGKRESMSIFGTDYPTKDGTCIRDYIHIDDLASAHLEALTFLQHTQTSNIFNVGYCKGYSVKEVIDVVKEISGMDFKVIESARREGDPIELSAKNEKILSLTQWKPKYNDLRVIVKSAYEWECSLK

SEQ ID NO: 5474 - protein, 710 aa, Oryza sativa
MAISTWSTRLLLSPSASASSHRPNPTRRLAFPSPISGPGRQAPRAYISAPASGPDAYPSPALDAAAAAADVAAAIASSDAVTWAGVWALLSPHRARIAVSLAALLACTTCTLSMPLFSGRFFETLIGRGSEPLWRLLSKIAVLYTLEPIFTIVFVINMTVIWEKVMARLRSQIFRRILIQKMVFFDRHKVGELTGLLTSDLGTLKSVITGTLCILFTLSTELAPVLGLLMVSVSVLVALFKRSTVPTFKSYGIVQARISDTASETFSAIRTVRSFGGEKRQISMFDNLALAFQNSGTKLGVLKSANESLTRVVVYVSLMALYVLGGSKVNAGKLSVGTMASFIGYTFTLTFAVQGAVNTLGDLRGTFASVERINSILSAEDIDDSLAYGLAKELEDSNGAVHENGTANKHYMSALKSSSSCSNLAWSGDIHLEGVHFSYPLRSDVEILNGLDLTIECGKITALVGPSGAGKSTVVQLLARYYEPTHGRITVAGEDIRVFDKREWSRVVSLVNQDPVLFSVSVGENIAYGLPDDVVSKDEIIKAAKAANAHEFIVSLPQGYDTLVGERGSLLSGGQRQRIAIARALLKNSPILILDEQVWLFLFSQANQWFGYMFVSRETQRTFKTCVRAKIQATSALDTTSERLVQEALNHLMKGRTSLVIAHRLSTVQNAHQIAVCSDGKIAELGTHAELVASGGRYASLVGTQRLAFE

SEQ ID NO: 5475 - protein, 230 aa, Arabidopsis thaliana
  misc_feature (17)..(17): Xaa can be any naturally occurring amino acid
  unsure (1)..(230): unsure at all Xaa locations
STHASDETAYENYHRIXVPEGKPLKCESREPLRVNTMFQHIQKMLSSATAVIAETGDSWFNCQKLKLPKGCGYEFQMQYGSIGWSVGATLGYAQASPEKRVLAFIGDGSFQVTVQDISTMLRNGQKTIIFLINNGGYTIEVEIHDGPYNVIKNWNYTGLVDAIHNGEGNCWTAKVRYEEELVEAITTATTEKKDCLCFIEVILHKDDTSKELLEWGSRVSAANSRPPNPQ

SEQ ID NO: 5476 - protein, 198 aa, Arabidopsis thaliana
MSSRDRGSPSSSSSSSSLPGIEKYNEKVKNQIQALVRVIKVARTYRDDNVPSLIEQGLYLGSVAAASNKNVLKSYNVTHILTVASSLRPAHPDDFVYKVVRVVDKEDTNLEMYFDECVDFIDEAKRQGGSVLVHCFVGKSRSVTIVVAYLMKKHGMTLAQALQHVKSKRPVASPNAGFIRQLQDLEKSMQVSDQFFSF

SEQ ID NO: 5477 - protein, 1301 aa, Alicyclobacillus acidocaldarius
MHVKWTGAASLATTIVMSAALPFAAFENTRSVGTERVLAATAADSTNASPPTGASAGGGTAGETYSNAVQIVSGNGFRAGNGATVVLAVNGLNLNPSSFKVVVSNSLNGVIDVTSDSVLTGPNSIALHLPAGDDGLGAGTYTVTVESGGDSVSTPSGQGLQVMPYTTADTIQWDGIYTSDGAMYVSDPNPSPGQEVTISLRAYSGNLTKVILNCWDTAQNKGFQVEMSPGRTFGPYQLWSATIPASNGGTIYYRFDIYDGTSFACLSGDGLHTSDDINNNFPLPVGTVTLSTLQANPGDTVTVSDPVGDFAGSQDQPNHTVIRFVNSSGETAATVNGTNASWNSVQFTVPQSLPNGLYRVEIDTVAKDADGVVNVELDRSAELIVGPLPAWMQAYAHDSFQAFYRSPFGAVSTGTPITLRLRAPLSVKSATLRLWGAADQSGEIDLPMQKLQMSGDELAQQTGVQDINDYTWWTVTIPAADVTTPGTMWYQFVTETDTGQVVYYDDNGAQLEGPGQVGLSSDGPSYQISVYERGFQTPDWLKHAVIYEIMPDRFYNGNIATEENPNTQKGIYVGADGTESLGPIQFHENWDSPPYDPNIPPLSDPKIASLRGNGQWNIDFFGGDLQGIEDKLDYLKSLGVNTLYLMPVFEAESNHKYDTADYFKIDPGFGTQQDWLNLVQAAHAKGFHIILDGVFEDTGSDSVYFNKFGNFHSNGAWQAYLKNQPSLSPYYSWYVWTGNTSNPYDSWFQIDTLPLTDTSNPAYQRFVYGSDNSVARVWIREGADGWRLDSADNGNFNTAWWGGFRQAVKSIDPNAAIIGEIWDNATNDNGTDWLTGSTFDSVMNYQFRNAVIDFFRGTYNDGNVQHHAVDAAGFNQELMRLYSEYPLQSFYSMMNLVDSQDTMRILTILENAPQPGDLSALQQDEYRPSPAAEQLGIERLKLVSDFQFSFPGDPTIFYGDEAGLTGYSDPLNRRTYPWDNQNLDLLNHYRKLGAIRNANPVLQTGDFTPLYAQGMVYAFARTIRNGRDVFGVPAEDATAIVAINNQNQAITVTIPTDGTVADGSTMLDELNNQWYKVQNGGITLTLQSYQGAILVTPSDAPMAYLQEEDSQNEIAWTPVQGAIGYRVWRQNPNGQWVPFGPVLPATDLSVTVERDAYAQTFAVQALFSASDHAQSPVSAPKTVSLAVDVPAVRLSQPIVSGRVVGDRAMVSITPVSGATQYVIYQRQGDGSYAPVATVSTSGDSAAIGEVPAQGPANSPHATIRVTVPVPAGFSSVTYRVAAQNEDGQAVTNPLTLSLSKK

SEQ ID NO: 5478 - protein, 174 aa, Hordeum vulgare subsp. vulgare
MAPTVMASSATSVAPFQGLKSTAGLPVSRRSNASSASVSNGGRIRCMQVWPIEGIKKFETLSYLPPLSTEALLKQVDYLIRSKWVPCLEFSKVGFIFREHNASPGYYDGRYWTMWKLPMFGCTDATQVLNEVEEVKKEYPDAYVRIIGFDNMRQVQCVSFIAFKPPGCQESGKA

SEQ ID NO: 5479 - protein, 482 aa, Candida albicans SC5314
MRTKQQQQQQQQSNSSSGVANNQKSYGYTTRTKSNSSVTNGGNVGATLTESRIITNINELLPGLNDISDAFEALPIDLIRYFTLLKEIDAKCINTIPQINHLINQYITNLHQDKNVTTTTTTTTTNDDNTIDLNKKLETRRLNLIKNKINEVIPCLEEKMHVTSVASDLLKKHMYRINQDYKLILLNNEIPQSIRIGPLNHPAMINDTHTTSSSSTTSTGNGTGGGGGTNNNHGGNNSVQSQRSESRREALAARKANKEDDRENNTATGGSGRKKKKEQNNNNNSTASGADGNNGSNGKKRNRDDKSNNTGSGNDLKKKKKSNNNDQLDNRRRGEDENGKGDGETSFNSGNNKNDPHGKLKTTTTGNLVGGSSTTATVSSSSTTSSSATTTTTSSTTTTKNSGSTGASTATATGASGAKGSSSSSSGNNEPTYCYCNQVSFGEMVGCDGDDCKREWFHLPCIGFKNPPKGKWYCDDCLKKLK

SEQ ID NO: 5480 - protein, 311 aa, Brassica napus
GPDSRVDPRVRVGIPQDYRHMEGFGVHTYTLVSKSGKVLFAKFHWKPTCGIKNLTDEEAKVVGGANHSHATKDLHDAIASGNYPEWKLFIQTMDPADEDKFDFDPLDVTKIWPEDILPLQPVGRLVLNRTIDNFFNETEQLAFNPGLVVPGIYYSDDKLLQCRIFAYGDTQRHRLGPNYLQLPVNAPKCAHHNNHHEGFMNFMHRDEEINYYPSKFDPVRCAEKVPIPTKSYTGIRTKCIIKKENNFKQPGDRYRSWAPDRQDRFVKRWVEILSEPRLTHEIRSIWISYWSQADRSLGQKLASRLNVRPSI

SEQ ID NO: 5481 - protein, 412 aa, Carboxydothermus hydrogenoformans Z-2901
MKRVVVTGLGLISPLGIGIKENWDNLMKGVSGVREVSSFDTTGFATRIAAEVRDFDPLKFIDKKEARRMDRFTQFAVAATKLAIEDAGLELSKINPERAGIFIGSGIGGIKTLEEQAAILREKGPDRVSPFFVPMMIANMAGGQIAITFGLTGPNETIVSACASGANAVGDAFRCLQRGEVDVAIAGGAEAAITPLSFAGFCSMKAMSTRNDEPEKASRPFDKDRDGFVMGEGAGILILETLEHALARGARIYGEIVGYGVTSDAYHITAPDPEGKGAARAMELALKDARLNPEDIDYINAHGTSTPLNDKVETLAIKKVFGDHAYKLMVSSTKSMTGHLLGAAGGIETIYSILAVFFNQVPPTLNCDEPEEGLDLDYVPNTGRDTVVKAALSNSLGFGGHNVSLIVKKFNG

SEQ ID NO: 5482 - protein, 1101 aa, Bradyrhizobium sp. BTAi1
MNLMSSLDAPNLQTATDGDGLWYKDAIIYQLHVKAFADSNNDGIGDFVGLTEKLDYLQDLGVTALWLLPFYPSPGRDDGYDIADYGSINPDFGTMKDFKRFIQEAQRRGLRVITELVVNHTSDQHHWFKRARRSPPGSSARNWYVWSDTDQKYLGTRIIFTDTEKSNWTWDPEAGQFYWHRFFSHQPDLNFDNPRVVSAIIQVMKRWLDAGVDGFRLDAIPYLCERDGTNNENLPETHAIIKRLRVELDNYAKDKLLLAEANQWPEDVQEYFGQGDECHMAYHFPLMPRIYMAIAQEDRFPITDILRQTPDIPATCQWALFLRNHDELTLEMVTDVERDYLWSTYANDPRARINVGIRRRLAPLMDNDRRKIELMNSLLMSFPGTPIIYYGDEIGMGDNIYLGDRNGVRTPMQWTPDRNGGFSRADPARLYAPMIMDPVYGYEAVNVEAQSRSLSSLLNATKKLISVRKSTPAFGRGTMSFIRPANRSVLAYVRQYKDEVILCVANLSRSAQATELDLSAFKDRVPIEMLGRSRFPAIGELPYMITLAPYGFYWFQLREREKSEPVVQRAVPEFETLVVPVGSTWVSLARTRSLFERDVLPGHLARTRWYPERSADAIHPTLTSAIPFCDIGDNRPWLIFFKAAERNDELRYLLPMWIDWVRFDRERYNPQAFAAVRQGAREGTVLDAATSPIFLALLLRNLRQSLTVEEDGLRLEFRPTSKFPDRPISESEQVRIIETDRCSSKAVVNNDYFIKIHRELEAGVHPEIDVGHFLTETVGFANVPPLLGSVEFIQDDERRTIGSVHGFIENQGDGWTVTLAYLDRYIDDQRVFTAQGDERQNEERSPYLRYMTQAGRRVGELHAALASRNDIADFAPEPTTADSLDHWIDRLRAQANRVLARLIERRDHFKDPERGLIDQVLARRGELSERLSHLIPHHVGGCDIRLHGDFHLGQILIVKDDIFIIDFDGDEEQPLAERRRKAPPAKDIAGFLRSIDCSVRVALDHALQAAPDDHSKLTTALADWRDQASAAFLAGYREIKAAQGLWPDDPHTAEALLSFFLLEKALGALEYDLAHRPDWLRVALGNLLRVLSVPAPASESS

SEQ ID NO: 5483 - protein, 758 aa, Nitrosomonas europaea ATCC 19718
MRTLTHNLGFPRIGAQRELKKALETYWKGQNDVDQLLATARAIRTGNWLLQQKAGIDLIPVGDFSLYDHILDMTTLLGAIPHRFGNTGDKISPDLYFAMARGTADQPAMEMTKWFNTNYHYIVPEFDDTTQFRLASDRLFQEIEDAKALGITAKAVLIGPLTYLYLGKEVTPGFQRLDLLPRLLPVYREILQKIASLGVEWVQIDEPILSLDLEQPWRDSFAEAYHTLHDGSCRLLLTTYFGTVDHHLTLLKNLPVDGLHIDVSSAPEQLESFLTEDFSGKTLSLGCIDGRNIWRADLSQKLETLSQAASRFAGELWIAPSCSLLHCPVDLALETKLEPEIKNWLAFSAQKLEEMTTLGRGLNQGRESVEAILTASDEARRSRTESSRIHNPIVHQRVDNLTERDSQRNHPFATRKHLQQQRFNLPLLPTTTIGSFPQTATIRQARAAFRKNELSHLEYLSAMRAEIREMIRKQEEIGLDVLVHGEPERNDMVEYFGEQLWGYAFTENGWVQSYGSRCVKPPILYGDVYRPEAMTVEWIKYAQSQTGKPVKGMLTGPVTMLMWSFVRDDQPRSTTALQLALAIRDEVADLENAGIGMIQIDEPAFREGLPLRKQDWKSYLDWAVKAFRVASSGVKDETQIHTHMCYSEFHDILPAIAELDADVITIETSRSRMELLDAFVKFSYPNEIGPGVYDIHSPRVPDASEMFELLKKASRYIDPTLLWVNPDCGLKTRNWPETQTALQKMVDCAKTLRSALQA

SEQ ID NO: 5484 - protein, 247 aa, Medicago sativa
MATNEDQKQTESGRHQEVGHKSLLQSDALYQYILETSVFPREHEAMKELREVTAKHPWNIMTTSADEGQFLSMLLKLINAKNTMEIGVYTGYSLLATALAIPEDGKILAMDINKENYELGLPVIKKAGVDHKIDFREGPALPVLDEMIKDEKNHGSYDFIFVDADKDNYLNYHKRLIDLVKVGGVIGYDNTLWNGSVVAPPDAPLRKYVRYYRDFVLELNKALAVDPRIEICMLPVGDGITICRRIK

SEQ ID NO: 5485 - protein, 547 aa, Zea mays
  misc_feature (132)..(132): Xaa can be any naturally occurring amino acid
  misc_feature (376)..(376): Xaa can be any naturally occurring amino acid
  unsure (1)..(547): unsure at all Xaa locations
MYTLPVRATTSSIVASLATPAPSSSSGSGSGRPRPRLIRNAPVFAAPATVVKRDGGQLRSQTRERSREKGRASTPAGGDKRGGERGQRRGGGEEEEDEQLPLPSEKKGGASEGEAVHRYPHLVTPSEPEALXQPPPPPSKASSKGMDPTVERLKSGFQKFKTEVYDKKPELFEPLKSGQSPRYMVFACSDSRVCPSVTLGLQPGEAFTVRNIASMVPPYDKIKYAGTGSAIEYAVCALKVQVIVVIGHSCCGGIRALLSLKDGAPDNFHFVEDWVRIGSPAKNKVKKEHASVPFDDQCSILEKEAVNVSLQNLKSYPFVKEGLVGAHYDFVKGQFVTWEPPQDAIERLTSGFQQFKVNVYDKKPELFGPLEAGQAXPKYMVFACSDSRVCPSVTLGLQPGEAFTVRNIAAMVPAYDKTKYTGIGSAIEYAVCALKVEVLVVIGHSCCGGIRALLSLQDGAPDTFHFVENWVKIGFPAKIKVKKDHASVPFDDQCSILEKEAVNLSLENLKTYPFVKDGLANGTLKLVGGHYNFVSGEFLTWDNKQPS

SEQ ID NO: 5486 - protein, 245 aa, Zinnia elegans
MATPTGETQPAKHQEVGHKSLLQSDALYQYILETSVYPREPQPMKELRRITAKHPWNLMTTSADEGQFLNLLLKLINAKNTMEIGVYTGYSLLSTALALPEDGKILALDINRENYEIGLPIIQKAGVAHKIDFREGPALPLLDQMLQDEKCHGSFDFIFVDADKDNYLNYHKRLIDLVKFGGVIGYDNTLWNGSLVAPADAPLRKYVRYYRDFVLELNKALAVDPRVEICQLPVGDGITLCRRIS

SEQ ID NO: 5487 - protein, 479 aa, Prochlorococcus marinus str. MIT 9313
MALHRSNPRSNDLEEHAIGETVDALVSPLPRTTFPQEYRPALTTFNLLKEELLLDGNSKQNLATFCQTYESQQVAELMALAVDKNLIDKDEYPQTAEIERRCVSMMADLWHAPGEAVGCSTIGSSEAAMLGGLAAKWRWREHRKAAGQSIDRPNMVCGSVQICWTKFARYWDVELREVEMTSGELCMSPERMLEQVDENTIVVVPTLGVTYHGLYEDVQAVSQALDELQQRKGLDIPIHVDAASGGFLAPFCAPDLAPWDFRLPRVKSINSSGHKFGLAPLGVGWVLWRESRDLPEGLVFHVSYLGGDMPTFQINFSRPAGQVISQYYDFVRLGRDGYQAIHGASYANAQYVAQELKKLGPFELINDGNPAGGIPTVVWTLRADQELGFNLYDLSDRLRLRGWQVPAYPFTGELAHQAFQRILVKRDFSREMADLLLTDIRNAITHFESHPVKISLNANEAASTNHLGRSMVECRDAHG

SEQ ID NO: 5488 - protein, 458 aa, Streptococcus agalactiae A909
MENHRYEDEGKFQRKMTSRHLFMLSLGGVIGTGLFLSSGYTIAQAGPLGAVLSYLIGAVVVYLVMLSLGELAVAMPVTGSFHTYATKFISPGTGFTVAWLYWICWTVALGTEFLGAAMLMQRWFPDVPAWAFASFFALVIFGLNALSVRFFAEAESFFSSIKVIAIIIFIILGLGAMFGLVSFEGQHKAILFTHLTANGDFPNGIVAVVSVMLAVNYAFSGTELIGIAAGETDNPKEAVPRAIKTTIGRLVVFFVLTIVVLASLLPMKEAGVSTAPFVDVFDKMGVPFAADIMNFVILTAILSAGNSGLYASSRMLWSLANEGMLSKSVVKINKHGVPMRALLLSMAGAVLSLFSSIYAADTVYLALVSIAGFAVVVVWLAIPVAQINFRKEFLKENRLEDLSYKTPFTPVLPYITIVLLLISIVGIAWDSSQRAGLYFGVPFIILCYIYHKLRYKTW

SEQ ID NO: 5489 - protein, 429 aa, Bradyrhizobium sp. BTAi1
MGPPSPELVRVADKAAMARTAADLLLARIAENAGRIAICLTGGSSPKQLYELLATQAYRDRIPWPRVHWFIGDERFVPAGDALHNMTMARHAFLDACAPAANIHPIPTDTGSPKRSANAYARELITFYGADQLDPARPLFDVVLLGIGPDGHVASLFPGYPAVEVRDRWVVGVDQAHVAPFVPRVSLTLPALASCRTMLFEVAGADKQPILTRVLAGEDLPANRARSTHETTFLIDAAAWPETAADRSPPGLPHALIVMGVSSSGKSTVGQALGRRLGWRFEDGDSFHPPANVAKMSAGQPLTDADRWPWLQAIADEIARCRAQGEPIIIACSALKKAYRKILVGDCGDVRLVYLEGDRELIGDRMGHRKGHFMPTGLLDSQFATLEPPGVDEHPVTVSVDAPVETIVDDILQQLHIGQDRPDCEWNGS

SEQ ID NO: 5490 - protein, 245 aa, Haemophilus influenzae 86-028NP
MGIFTYDIINGTAMNTITFPTAQHAVEKIAQEFVIYSQLNRPVHISLSGGSTPKLLFKTLAKLPYAEQINWKNLHFWWGDDRMVPPSDPESNYGEVQKLLFDHIQIPAENIHRICGENEPHFELKRFEEELSAVIPNGIFDWIILGMGTDGHTASLFPHQTNFDDENLAVIAKHPESGQIRISKTAKLIEQAKRITYLVTGESKADILKEIKTTPAENLPYPAAKIKAKNGVTEWYLDKAAARLL

SEQ ID NO: 5491 - protein, 405 aa, Oryza sativa (japonica cultivar-group)
MISLHSAPFTLLVKLPGRRRSGLTPPRCAVRGAGNVSSAAVREMAVAEGRRQHEYSIDARLRQLAPEKVSADDRLVDYETLLVARFLDILEDLHGGDFRQVVEDCLRLSGEYQSEGDPARLGELGGLLTSLDVGDAIMVASSFSHMLNLANLAEEIQMVYRKKAEASRRGDFVDEASAPTESDIDETFQRLVRGLGKSPREVFDALRSQTIDLVLTAHPTQSVRRSLLQKHASIRSCLTQLCGEGISDNEEQEIDEALQREILAAFKTDEIRRTPPTPQDEMRAGMSYFHDTIWNGVPKFLRRVDTALKNIGIDERLPYNAPLIQFSSWMGGDRDGNPRVTPEVTRDVCLLARMMAANMYFSKMADLMFELSMWRCNDELRARANELHRKSSRKYAKYYIGMMLD

SEQ ID NO: 5492 - protein, 241 aa, Stellaria longipes
MLTKTMGNFFTEVKDTGLLQSEQLHQYILDTSVFPRESEHLKELRKATESHPMSFMGTSPLAGQLLSFMLKTVKPKKTIEVGVFTGYSLLATALSIPDDGKITAVDIDREAYNVGLALIKKAGVESKISFIVSDAMTLLDDLLADGRYQGSYDFAFVDADKTNYVNYHERLIELVKVGGIIAYDNTLWGGTVALPESEVPDFMKNNWVCVTKLNEILGSDARIDIAHLPVGDGITFCRRVY

SEQ ID NO: 5493 - protein, 278 aa, Zea mays
MASAFSSRACALVALLMGLYAACAAAAARVDDGLELTWGDGRGSVSPDGQVLTLSLDHTSGSGFRSKDTFLFARADVQIKLVPNNSAGTVTTFYFVSEGPWDVHDEVDLEFLGNVSGQPYTLHTNVYAGGSGSREQQFHLWFDPTADFHTYSIEWTQQHILVLVDGTPVREFKNHADWGVPYPSSQGMRLYGSLWNAEDWATQGGRVKTDWSQAPFVAQYRNFTAAPPATAADGRYGQQMDAAAQQAMKWARDNYMVYDYCADTKRFPQGAPPECSMA

SEQ ID NO: 5494 - protein, 776 aa, Oryza sativa (japonica cultivar-group)
MFVLRYMYQANTITIKRPPLTASLCTPAATVSVSDLHKHQEPARFTSFLNAAIEDAALVSDIAARPEALRRLLSPPGEGAAAAAVGFPPVRMPTPTEAFSPTQERRRRPFAGTCRLLARAGPRRTRRHLHDDYTKPCFYRSQFVAQTPAAQEIGSDLFIALVEFWKKISPGEPYRIILGDVRDKLYNTCERARQILSKGISSIPEDQTYTNVEQFLEPLELCYRSLCDCGDKLIADGRLLDLMRQVSTFGLSLVKLDIRQESERHTDAMDAITTHLGIGSYREWPEERRQEWLVSELRGRRPLFGPDLPQSEEVADVLGAFRVIAELPADSFGAYIISMATAPSDVLAVELLQRECGVKKPLRVVPLFEKLADLQQARATMELLFSVDWYKERIDGKQEIMIGYSDSGKDAGRLSAAWQLYKAQEEIVGVAERHGVKLTIFHGRGGTVGRGGGPSHLAILSQPPNTVNGSLRVTVQGEVIEKSFGEENLCFRTLQRFTAATLEHGMNPPVSPKPEWRRLLDDMATVATDEYRSIVFQEPRFVEYFRAATPETEYGRMNIGSRPSKRKPGGGIESLRAIPWIFAWTQTRFHLPVWLGFGAAFRHAMQQSDAGGGLATLREMYDEWPFFRVTIDLLEMVFAKGDPGIAALYDELLVPDDLRPFGEQLRANYVETQRLLLQVAGHKDLLESDPYLRQRLMLRDSYITALNVCQAYTLKRIRDGGFRPETRPPLSKELLGSSAVAEKLVKLNPNSEYDPGLEDTLILTMKGIAAGMQNTG

SEQ ID NO: 5495 - protein, 398 aa, Pseudomonas putida
MSLFSAVELAPRDPILGLNEAFNADPRTDKVNLGVGVYCNEEGRIPLLRAVIEAETQRAAQHASRGYLPIDGIATYDQAVQKLIFGAESPLLAAGRVVTVQAVGGTGALKIGADFLKRLSPNAVVAISDPSWENHRALFETAGFPVQNYRYYDAPSNDVNRAGMLEDLNNLPSGSIVVLHACCHNPTGVDLGLDDWKNVLEVVKAKGHVPFLDMAYQGFGDGIAEDAFAVRLFAESGLEFFVSSSFSKSFSLYGERVGALSIVTGNKDESTRVLSQVKRVIRTTYSNPPTHGATIVATVLNSDELRQMWEAELGEMRQRIHGMRQQMVSLLAEYGAKRDFSFVGRQAGMFSYSGLTVEQVARLKNDFGIYALDTGRIAVAALNQSNIHVVTKAIVEVL

SEQ ID NO: 5496 - protein, 203 aa, Ananas comosus
VPGNSAGTVTTFYLSSQGSMHDEIDFEFLGNLSGDPYILHTNIYSQGKGNREQQFYLWFDPTKDFHTYSALWNPTHIVFFVDGTPIREFKNNERIGVPFPNSQMMKVYSSLWDGEDWATRGGLVKTDWSQAPFTAAFRGLSTDGCTSGIAACSKANNPYMWQQDLDSANQQKLKWVQKNYMVYNYCTDVKRFPQGLPPECSAN

SEQ ID NO: 5497 - protein, 388 aa, Thiobacillus denitrificans ATCC 25259
MNTYARQPVAFVRGEGAYLWDEAGKRYLDAVAGVAVNALGHAHPRLVKAIAEQAATLIHSSNLYRVLRQEELADKLCALSGMDRAFFCNSGCEANEAAIKLARLYGHGKGIELPTIIVVEKAFHGRTMATLTATGSRKIQAGFEPLLSGFARVPFNDIEAIRHVAEHNKSVVAVLIETVQGEGGINILPAEYLAELRTLCDAQGWLLMLDEVQTGIGRTGTWFGFQHAGVVPDVIALAKGLGGGVPIGACLARGAAAEVFTPGTHGSTFGGNPLACAAALATLETIEAEHLLDNARLRGDAIRAGLRGALDGVHGVLDIRGEGLMIGIELDRPCAELVGVARDAGVLINVTADSVIRLVPPLIYGADEVDLLVATVADVVRNYLQQAA

SEQ ID NO: 5498 - protein, 221 aa, Brassica napus
  misc_feature (160)..(160): Xaa can be any naturally occurring amino acid
  misc_feature (176)..(176): Xaa can be any naturally occurring amino acid
  misc_feature (192)..(192): Xaa can be any naturally occurring amino acid
  misc_feature (216)..(216): Xaa can be any naturally occurring amino acid
  unsure (1)..(221): unsure at all Xaa locations
STHASDKTEGYIQVFLDGGLNQQRMGICDAVAVAKILNATLVIPYLEVNPVWQDSSSFVDIFDVDHFINTLKDDIRIVRELPEELSWSTREYYGTAIRETRVKTAPVHASAKWYRENVSPVLQSFGIAAISPFSHRLSFDHLPAEIQRLRCKVNFQALRXVPHITSLGDALVSRLXNPLWRSSKDRKNVDHXGDMTNSHRRQEPGKFAVLHLCFDXDMAAH

SEQ ID NO: 5499 - protein, 218 aa, Legionella pneumophila str. Lens
MKHLSLTPELYEYLIDVSLREHPALTALRKETSSMELANMQVAPEQAQFMQMLIRLIGAKKVLELGTFTGYSALAMSLALPDDGQVITCDINEGWTKHAHPYWREAKQEHKIKLRLGPALDTLHSLLDEGGEHQFDFIFIDADKTNYLNYYELALKLVTPKGLIAIDNIFWDGKVIDPSDTTGQTREIKKLNQLIKNDSRVFVSLLAIADGMFLVQPI

SEQ ID NO: 5500 - protein, 353 aa, Arabidopsis thaliana
MDKYDVVKDLGAGNFGVARLLRHKDTKELVAMKYIERGRKIDENVAREIINHRSFKHPNIIRFKEVILTPTHLAIVMEYASGGELFDRICTAGRFSEAEARYFFQQLICGVDYCHSLQICHRDLKLENTLLDGAPAPLLKICDFGYSKSSILHSRPKSTVGTPAYIAPEVLSRREYDGKHADVWSCGVTLYVMLVGAYPFEDPNDPKNFRKTIQRIMAVQYKIPDYVHISQECKHLLSRIFVTNSAKRITLKEIKNHPWYLKNLPKELLESAQAAYYKRDTSFSLQSVEDIMKIVGEARNPAPSTSAVKSSGSGADEEEEEDVEAEVEEEEDDEDEYEKHVKEAQSCQESDKA

SEQ ID NO: 5501 - protein, 586 aa, Glycine max
MAAAMTSCSSAIAAASETLAKPASTRTFSATNLALQSSSSKLGFKSLRLRRCAAASGSALGARMVSVPAVKAPALLDFDTKVFKKEKINLAGHDEYIVKGGRDLFHLLPDAFKGIKQIGVIGWGSQGPAQAQNLRDSLAEAKSDIVVKIGLRKGSRSFAEARAAGFSEENGTLGDIWETVSGSDLVMLLISDSAQADNYEKILSHMKPNSILGLSHGFLLGHLQSLGLDFPKNISVIAVCPKGMGPSVRRLYVQGKEINGAGINASFAVHQDVDGRATDVALGWSVALGSPFTFATTLEQEYRSDIFGERGILLGAVHGVVESLFRRYTENGMNEDLAYKNTVESITGIISKTISTKGMLAVYNALSEDEKREFEKAYSASFYPCMEILYECYEDVASGSEIRSVVLAGRRFYEKEGLPAFPMGNIDQTRMWKVGERVRSTRPAGDQGPLYPFTAGVFVALMMAQIEILRKKGHSYSEIINESVIEAVDSLNPFMHARGVSFMVDNCSTTARLGSRKWAPRFDYILTQQAMVAVDNGTPINRDLISNFLSDPVHGAIKVCAELRPTVDISVPPDADFVRPELRSSN

SEQ ID NO: 5502 - protein, 623 aa, Psychrobacter arcticus 273-4
MCGLLGLIDYTKTTSEDIFSEMLSCLVKRGPDSEGIDLFYDDSCSVLLGHRRLAIQDLSNHGHQPMKYDNLVTIYNGEVYNFKEIQQQLLEKGYFFESDSDTEVILKAFHCWGIKSVDKFRGMFAFAIYDINKREITIFRDRVGVKPLYYSQTEDSFIFSSELKPFISFPNFDKSIDFEAVSSYLQFGYIHAPKSIFSSAKKLLPGHYLKFDIASKKLSIDCYWDVTDYFEDKTNVTDITAITDELESIIIESFNLRMISDVPVGTFLSGGVDSSLVTAILQKYSDIPINTFTIGFEDKNYDESIYAKAIADHLGTNHTEYICKKEDALEIIKELPKIFDEPFADSSAIPTTLVSKLAKEKVSVILSGDGGDELFCGYSSYTLMEKRFASISKIPFKNSIKKLSDFIPFPLVLLNGINENLYTKFMKFRNLLEHDDIANAFKVSNSVFCKDEIDKIISQEYFFNEDSISHVSTLEKMMISDFKGYLPDDLLVKVDRSTMSVSLEGREPLLDHKIIEFAARMPISLKKNKSILKDILKRYVPEELFLRKKQGFGIPINSWLRNDLKYLLDQYLNEDIIKEYGVFDPKYVTDLLRLFHAGKNDDRKIWTLLMFQMWFSEHLATSK

SEQ ID NO: 5503 - protein, 156 aa, Ananas comosus
MSLVRRSNIFDPFSLDLWEPFEGFPFGGALSFPRPSASFPAETASFAGARIDWKETPEAHVFKADLPGVKKEEVKVEVEEGNVLQISGERTREKEEKNDTWHRVERSSGKFLRRFRLPDNAKVDQVKAAMENGVLTVTVPKEDVKKPQVKSVQISG

SEQ ID NO: 5504 - protein, 156 aa, Oryza sativa
  misc_feature (9)..(9): Xaa can be any naturally occurring amino acid
  misc_feature (21)..(21): Xaa can be any naturally occurring amino acid
  misc_feature (40)..(40): Xaa can be any naturally occurring amino acid
  misc_feature (48)..(48): Xaa can be any naturally occurring amino acid
  misc_feature (57)..(57): Xaa can be any naturally occurring amino acid
  misc_feature (80)..(80): Xaa can be any naturally occurring amino acid
  misc_feature (88)..(88): Xaa can be any naturally occurring amino acid
  misc_feature (101)..(101): Xaa can be any naturally occurring amino acid
  misc_feature (110)..(110): Xaa can be any naturally occurring amino acid
  misc_feature (138)..(138): Xaa can be any naturally occurring amino acid
  misc_feature (146)..(146): Xaa can be any naturally occurring amino acid
  unsure (1)..(156): unsure at all Xaa locations
GMPVARRSXNSSFGNVSNGGXGIRCMQVWPIEGIKKFETXSYLPPLTXEDLLKQIEXYLLRSKWVPCLEFSKVGFVYREXPQVPGYYXGRYWTMWKLPMFXGCTDATQVXLKELEEAKKGLPDAFVRIIGFDNVRQVXLISFIAYXPPGCQESGGN

SEQ ID NO: 5505 - protein, 651 aa, Psychrobacter arcticus 273-4
MCGVNGFFNAHTTIPVQNVIAQMNAAIDHRGPDAGDAWLDENIGLVLGHQRLAIQDLSPAGAQPMHSACGRYVLAFNGEIYNHLQLREQLMIEGHAPAWRGHSDTETMLACFVAWGIEKTLQAMVGMFAIVLWDRQQKVLTLARDRMGEKPLYWGWQGQSLYFSSELKGLKAHPSFKTDINRDAITLLLRHNCIPAPYSIYQGIEKLRPGHWVQLPLSDIQQAKTAQSKAYWRFNDIVEAGLADPFTGSPEQAVDALESALMQSIGGQMQSDVPLGAFLSGGIDSSTVVALMQAQSSRPVKTFTIGFDDAGYNEATHAKAIAKHIGTEHTEMYMRPEDALAVIPKLSSIYCEPFSDSSQIPTFLVNQLAHQHVTVALSGDGGDELFGGYNRYLMAQQVWSKSRKLPRPMRQLAAVSLTALSPKSWDTLVNTLSPVIPKRLNLRTPGDKAHKLAGVLNIDSEQAFYQNLTSHWQDPAQLVIGAQEPATLISDSSCWPTTDSFQHAMMAMDAQTYMTDDILVKVDRAAMANSLETRVPMLDHRIAELAWRMPLDYKIRNGEGKWLLKQVLYRHVPRELIERPKMGFGIPLHDWLRGSLRDWAEALLDRNLLQQQGYFNPAPIRKIWNEHLSGVFNHQHQLWDILMFQAWLETQ

SEQ ID NO: 5506 - protein, 304 aa, Hordeum vulgare subsp. vulgare
MANFQITPSAAFVEITELNFSNLYLFHTPLGSNQNQSVIIDSNATTGLGSTVVNNWSICDGPSPGATVVARAQGLHIYAGNWENTFSITFEIERFKGSTLQVMGISVEEGEWAIVGGTGQFAMANGVIHKKFHEQRSDGNIIELTIHGFCPVLKSESLLTKLGPWGGNGGGDKDILEAVPRRLESITVSSGSIIDSIKFSYVDQTGQKHNAGPWGGSGGNQNTFVLGASEFVKEVSGTFGIYDKDRHNIITSLKFITNVKTYGPFGEAKGTPFTIAVQKNSSIVGFFARSGIYLDALGVYVRPL

SEQ ID NO: 5507 - protein, 324 aa, Zea mays
MAENPAPSSPLVTSPDAAAPPLPAEFTKLTFRSLYIRRTGPGSREMTVDGRPSDQLGRRFVSDFPIYDGRGSGAHLVARLQGVTVQIGSSHQLVSIVFEAERLKGSTLLTNGVITDGSDEWAIYGGTGVFAMATGVIRRRFLAGSNDGNSDELTSIEVFCPAFGSAQQQPNKQDSVSVTKIGVWGGGGGSAQDITTTEPPQRLHSLSVRTGFAVDSIEFTYTDRGGQRRTAGRWGGLGGNLRTIDLGDAEVVREVSGTYGMFEGATTLTSIRILTSSRTWGPWGIEDGTRFCITAPIGSSIVGFYGRSTSRLVAAIGVYLRQQL

SEQ ID NO: 5508 - protein, 304 aa, Hordeum vulgare subsp. vulgare
MATFQITPCAAFVEITELNFSNLYLFHTSLGSNQNQSVIIDSNATTGLGSTVVNNWSICDGPSPDATVVARAQGLHIYAGNWQNTFSITFEIERFKGSTLQVMGISVEEGEWAIVGGTGQFAMANGVIHKKLHEQRSDGNIIELTIHGFCPVLKSESLLTKLGPWGGNGGGDKDILEAVPRRLESITVSSGSIVDSIKFSYVDQTGQKHNAGPWGGSGGNQNTFVLGASEFMKEVSGTFGIYDKDRHNIITSLKFITNVKTYGPFGEAKGTPFTIPAQKNSSIVGFFGRSGIYLDALGVYVRPL

SEQ ID NO: 5509 - protein, 154 aa, Lupinus luteus
MGVLTDVQVALVKSSFEEFNANIPKNTHRFFTLVLEIAPGAKDLFSFLKGSSEVPQNNPDLQAHAGKVFKLTYEAAIQLQVNGAVASDATLKSLGSVHVSKGVVDAHFPVVKEAILKTIKEVVGDKWSEELNTAWTIAYDELAIIIKKEMKDAA

SEQ ID NO: 5510 - protein, 520 aa, Mesorhizobium loti MAFF303099
MQWSPETLRHILATELPDAQVIVVSNREPYIHNREGDDIQLVVPASGLVSALEPITRACAGTWIAYGGGSADKLVVDKNDRIEVPPDNPSYTLRRVWLSEEEQQGYYLGFANEGLWPLCHIAFTRPIFRASDWEAYEAVNRKFADTVVAEARNERPIVLVQDYHFALLPRMIRERLPEAIIITFWHIPWPNSEVFSICPWREKILDGLLGSSIVGFHTQFHCNNFIDSVDRFLESRIEREDSAISYGGQISLVHAYPISIEWPPAQLGKLPDVAQCRRQVREKFGLAENVKLCVGVERLDYTKGILDRFNALDELLTLHPEWIGKVAFLQIAAPSRGTLPAYQQLYEECLRHAEDLNQRYGREGYTPVLMITEHHSQQQVYEIYRAADVCMVTSLHDGMNLVAKEFVAAREDEQGVLLLSMFAGASKELLDALIVNPYDAAMMGDALLQALTMSQEEQSQRMRRMREIVRDNNVYRWAGSMLLDAARLRKRDAVDRAVSAAPAAPANVISLLDRRRVAAL

SEQ ID NO: 5511 - protein, 274 aa, Hordeum vulgare subsp. vulgare
SSEAAGPDGTLVRRYTTGPLCRWLTKDRGDGTLSPFAVFVVDPDHLFPWHHIAEAVTAGGPSAFERTQKWPYYEYMGKNQRLGTLFDNAMAQHSVILVTKMLERFKGFDGVQRLVDVGGGTGSTLGMITSKYKHMTGINYDLPHVIAQGLPLPGVEHVAGDMYESIPTGDAVLLQWITLMLNDDEFVKILSNCHNALPKDGKVIVVDGILPENPDSSLTARDAFTLDIIMFVLFKGAKQRTEKEFARLAKQAGFTGGIKKTYIFFNFYALEFTK

SEQ ID NO: 5512 - protein, 406 aa, Pyrococcus furiosus DSM 3638
AHHHHHHGSIRASKRALSVEYAIRDVVLPARELEKKGIKVIRLNIGDPVKFDFQPPEHMKEAYCKAIKEGHNYYGDSEGLPELRKAIVEREKRKNGVDITPDDVRVTAAVTEALQLIFGALLDPGDEILVPGPSYPPYTGLVKFYGGKPVEYRTIEEEDWQPDIDDIRKKITDRTKAIAVINPNNPTGALYDKKTLEEILNIAGEYEIPVISDEIYDLMTYEGEHISPGSLTKDVPVIVMNGLSKVYFATGWRLGYMYFVDPENKLSEVREAIDRLARIRLCPNTPAQFAAIAGLTGPMDYLKEYMKKLKERRDYIYKRLNEIPGISTTKPQGAFYIFPKIEVGPWKNDKEFVLDVLHNAHVLFVHGSGFGEYGAGHFRAVFLPPIEILEEAMDRFEKFMKERLKE

SEQ ID NO: 5513 - protein, 420 aa, Methanothermobacter thermautotrophicus str. Delta H
MKSEELFRRASNVLPGGVSSPVRRFDPHPFFAAGGSGCLLESVDGESYIDYCLAYGPLILGHAHPRVVEAVNEQIKRGTTYGVPTEGEIELAEAIIERVPCAEMVRFTNSGTEATMAAVRLARAFTGRDRIVKFEGSYHGAHDYVLVRPGSGAATAPDSPGIPVDTVRNTLTVPFNHEEAMAELIEGAGEDIACILVEPVMGNIGCIEPENGYLQFLRDITRENDIILIFDEVITGFRLAPGGAQEYYRVEPDLVTLGKIVGGGFPMGALAGRREIMENISPAGNVYQAGTFNGNPVSVTAGRETLRLLDGRMYSDLERKGSTLRAGLRDLLSDLDLEYQVTGPASMFQLYFTGEEVRNYGDAKKSDTVLFMEYFHGLLERGVFIPPSQFECCFISAAHESEHIEATLEAAEEVLSGLKN

SEQ ID NO: 5514 - protein, 676 aa, Oryza sativa
  misc_feature (245)..(245): Xaa can be any naturally occurring amino acid
  misc_feature (439)..(439): Xaa can be any naturally occurring amino acid
  misc_feature (470)..(470): Xaa can be any naturally occurring amino acid
  unsure (1)..(676): unsure at all Xaa locations
MRRDDAGGGGFGDLFDSVRRSIAFRTSTAPETPGPLGGGGGIGVRISSCLRKSRGMGLLGLISKSPSPPRRLLPPAPEFSGGGGGGGRGGGGGEESPQIRWRKGELIGSGAFGQVYLGMNLDTGELLAVKQVLIGSNNATREKAQAHIRELEEEVKLLKNLSHPNIVKRYLGTVREEDTLNILLEFVPGGSIQSLLGKLGSFPEAVIRKYTKQILQGLEYLHNNAIIHRDIKGANILVDNKGCIXLADFGASKQVAKLATITAAKTMKGTPHWMAPEVIVGSGHNFSADIWSVGCTVIEMATGKPPWSQQYQEVALLFHVGTTKSHPPIPEHLSPEAKDFLLKCLQKEPELRSTASDLLKHPFVTGESENLQPLNCAAQQETCVNELPAHDVSSGLGLNHSVNWPTISSNRSSKIKPLWEGSCDEDDMCEFADKDDCPXAVGSSYNPMSEPFDNWESKFDASPEQTSHQXMEFGGLAKHAESSMTENDFTFPCEGSCEDDDVLTESKIKAFLDEKALDLKKLQTPLYEEFYNTVNAGNSQVADHTSNGIFSNSPKLPPRGKSPTSKMRGGAAAASTCDNSNNTRPESCSNQLSEDTVQSSRILREIASPQLDELGNKIHSDVQDSPSVSFAERQSPRVGGRVGELERERVMRLASCGKTPSPNRAPNGKRERHPAH

SEQ ID NO: 5515 - protein, 545 aa, Sinorhizobium meliloti 1021
MAAKEVKFGRSAREKMLRGVDILADAVKVTLGPKGRNVVIDKSFGAPRITKDGVTVAKEIELEDKFENMGAQMVREVASKTNDIAGDGTTTATVLAQAIVREGAKAVAAGMNPMDLKRGIDLAVAEVVKDLLAKAKKINTSDEVAQVGTISANGEKQIGLDIAEAMQKVGNEGVITVEEAKTAETELEVVEGMQFDRGYLSPYFVTNPEKMVADLEDAFILLHEKKLSNLQAMLPVLEAVVQTGKPLLIIAEDVEGEALATLVVNKLRGGLKIAAVKAPGFGDRRKAMLEDIAILTGGTVISEDLGIKLESVTLDMLGRAKKVSITKENTTIVDGAGQKSDIEGRVAQIKAQIEETTSDYDREKLQERLAKLAGGVAVIRVGGATEVEVKEKKDRIDDALNATRAAVQEGIVPGGGVALLRSSVKITVKGENDDQDAGVNIVRRALQSPARQIVENAGDEASIVVGKILEKNTDDFGYNAQTGEYGDMIAMGIIDPVKVVRTALQDAASVASLLITTEAMIAELPKKDAPAMPGGMGGMGGMDMM

SEQ ID NO: 5516 - protein, 676 aa, Arabidopsis thaliana
MSWTGGDWLCGACQHANFKKRESCQKCGYPKFGGVDVSTYLYNRTEVMAGDWYCGALNCGSHNYASRTSCYRCGMIKVEYTEQYYGAQMVAYGNDGAACPPGWKTGDWVCPRVGCGVHNYASRAECFKCKTTRDYGAWRLNGRERANEESLVLIIPFNKCFYFLTCMTLSYVDLKSIESLDSCKLTIFYKDNESDYESSTVGPDSSRRTSWLSSSFTASPSCSSISHLSNHGLNSYNQSKPHKANQVAWEAMARLRRCCGRAVGLEHFRLLKRLGSGDIGSVYLCQIRGSPETAFYAMKVVDKEAVAVKKKLGRAEMEKKILGMLDHPFCPTLYAAFEASHYSFLVMEYCPGGDLYAVRLRQPSKRFTISSTRFYAAETLVALEYLHMMGIVYRDLKPENVLIREDGHVMLSDFDLSFKCDVVPQFLSDNDRDRGHQEDDDDISIRRKCSTPSCTTTPLNPVISCFSPTSSRRRKKNVVTTTIHENAADISGGCPSIFAEPINARSKSFVGTHEYLAPEVISGQGHGSAVDWWTYGIFLYEMIFGRTPFKGDNNEKTLVNILKAPLTFPKVIVNSPKEYEDMVNAQDLIIKLLVKNPKKRLGSLKGSIEIKRHEFFEGVNWALIRSIKPPWVPKEETSHKTKGDNRSVNYYLPPRFMMSRKERNEPYHVSNYFDYF

SEQ ID NO: 5517 - protein, 462 aa, Oceanobacillus iheyensis HTE831
MVKMQEWIEVTNPATGEVIDRVERGGKVEAREAVDKASEAFNDWSKRTAYERSELLMNWNALITKHQDELAEIMTMEQGKPIKEALGEVQYANNFVSWYAEEGKRLYGETIPASKADKRILVQRQPVGVIAAITPWNFPAAMITRKVAPALAVGCTAVVKPASATPRTAIRLAELAEEAGIPKGVLQVVTGSSGDISDAWMQDSRVRKISFTGSTEVGKILMKKSAETVKKVSLELGGHAPLIVMKDADIEKAAEGATASKFRNAGQTCVCTNRIYVHESIKDEFIKAFERKVRELRVGNGLEEGIDIGPLIDHDALEKVETHIRDAAHKGASIVYGGDKVGDDSLFYKPTILSNVTDNMLCMTEETFGPVAPVTTFSTEEEAVKRANHSPYGLAAYLFTENLATAIRISEQLEYGIVGINDGVPSTAQAPFGGFKESGIGREGGHHGMEEYVEVKYISIQL

SEQ ID NO: 5518 - protein, 948 aa, Bradyrhizobium sp. BTAi1
MNPVKALEQHGQAVWLDFLARGFVAKGDLKRLIDEDGVKGVTSNPAIFEKAIGSSDEYDAPIAKALKGGDRSPTQLFEAVAVEDIQNAADVLRPVYDSFNGNDGFVSLEVSPYLAMDAKGTIAEAEQLWKAVDRRNLMIKVPATEACLPAIQHLISRGISVNITLLFAQEVYRQVAEAYLAGLEAYVADGGDPSHVASVASFFVSRIDSVVDKQLDEKIAQANDPTEKERLTALKGKIAIANAKMAYQDYKRLFSGARWERLAAKGAKPQRLLWASTGTKNKDYSDVLYVEELIGPNTVNTVPPATLDAFRDHGKVRDSLEEDVEAAQAALEALAKTGISLDEITAELVIDGVKQFADAADKLYGAVAHKRAVVLGERLGQQSIAVAADLDKKVQAATEDWRKTAKIRRLWHKDSSVWTGKDEHKWLGWLTCVEKADIADYEDYAQRVKGQKFSDAVVLGMGGSSLGPEVLARTFPRKAGFPRLHVLDSTDPAQVRAMEKAIDISKTVFIVSSKSGGTTEPNAMKDYFFARVSEAIGANKAGHRFIAVTDPGSSLEKAAKAQGFARVFHGEPSIGGRYSVLSPFGLVPAATAGIDVRKLVTNAQAMVRSCGPDVPPLQNPGVQLGLAMGLAGLDGRDKVTIFASPRIADFGAWAEQLIAESTGKEGKGLIPIDGEPIGDPADYGSDRFFIDIRVEGDDIPDHDAKLAALEDAGHPVVRIVISSIDQLGQEFFRWEMATAVAGAALGINPFDQPDVESAKIKTRELTAAFEQTGALPAEEPVISVKGCELYTDAQNAESLREHGADGTLASWLKAHLGRASDGDYIALLGYIEHNGANTDALQRIRLKLRDAKHLATCAEFGPRFLHSTGQAYKGGPDSGVFLQITADDAQDLPIPGQKASFGVIKAAQARGDFDVLTERGRRALRVHLKGNLKSGLKMLDSAITEALS

SEQ ID NO: 5519 - protein, 158 aa, Zea mays
VSLSVARRGEADRYIQMEGLQRSSSTFRRSGSSGLVWDERFLTEGAEAKAAGEGGTDEAQPEMRRSRSTGGVGMMLRRGGDDKKQQQQKKKKQQGQKKDEERDPQVFRTKEVAPDVDPPSPRVSGCILCAIFGGSSSGPGAAARRGRAKPKRRQRSAV

SEQ ID NO: 5520 - protein, 98 aa, Sinorhizobium meliloti 1021
MASTDFRPLHDRVVVRRVESEEKTKGGVIIPDTAKEKPQEGEIVAVGSGARDESGKVVPLDVKAGDRILFGKWSGTEVKINGEDLLIMKEADIMGVIG

SEQ ID NO: 5521 - protein, 1168 aa, Mycobacterium tuberculosis CDC1551
MSINDQRLTRRVEDLYASDAQFAAASPNEAITQAIDQPGVALPQLIRMVMEGYADRPALGQRALRFVTDPDSGRTMVELLPRFETITYRELWARAGTLATALSAEPAIRPGDRVCVLGFNSVDYTTIDIALIRLGAVSVPLQTSAPVTGLRPIVTETEPTMIATSIDNLGDAVEVLAGHAPARLVVFDYHGKVDTHREAVEAARARLAGSVTIDTLAELIERGRALPATPIADSADDALALLIYTSGSTGAPKGAMYRESQVMSFWRKSSGWFEPSGYPSITLNFMPMSHVGGRQVLYGTLSNGGTAYFVAKSDLSTLFEDLALVRPTELCFVPRIWDMVFAEFHSEVDRRLVDGADRAALEAQVKAELRENVLGGRFVMALTGSAPISAEMTAWVESLLADVHLVEGYGSTEAGMVLNDGMVRRPAVIDYKLVDVPELGYFGTDQPYPRGELLVKTQTMFPGYYQRPDVTAEVFDPDGFYRTGDIMAKVGPDQFVYLDRRNNVLKLSQGEFIAVSKLEAVFGDSPLVRQIFIYGNSARAYPLAVVVPSGDALSRHGIENLKPVISESLQEVARAAGLQSYEIPRDFIIETTPFTLENGLLTGIRKLARPQLKKFYGERLERLYTELADSQSNELRELRQSGPDAPVLPTLCRAAAALLGSTAADVRPDAHFADLGGDSLSALSLANLLHEIFGVDVPVGVIVSPASDLRALADHIEAARTGVRRPSFASIHGRSATEVHASDLTLDKFIDAATLAAAPNLPAPSAQVRTVLLTGATGFLGRYLALEWLDRMDLVNGKLICLVRARSDEEAQARLDATFDSGDPYLVRHYRELGAGRLEVLAGDKGEADLGLDRVTWQRLADTVDLIVDPAALVNHVLPYSQLFGPNAAGTAELLRLALTGKRKPYIYTSTIAVGEQIRPEAFTEDADIRAISPTRRIDDSYANGYANSKWAGEVLLREAHEQCGLPVTVFRCDMILADTSYTGQLNLPDMFTRLMLSLAATGIAPGSFYELDAHGNRQRAHYDGLPVEFVAEAICTLGTHSPDRFVTYHVMNPYDDGIGLDEFVDWLNSPTSGSGCTIQRIADYGEWLQRFETSLRALPDRQRHASLLPLLHNYREPAKPICGSIAPTDQFRAAVQEAKIGPDKDIPHLTAAIIAKYISNLRLLGLL

SEQ ID NO: 5522 - protein, 359 aa, Triticum aestivum
  misc_feature (132)..(132): Xaa can be any naturally occurring amino acid
  unsure (1)..(359): unsure at all Xaa locations
MRGSLWLLLLLLSHQISKYFRPYLIISLGGHTGATWFPGSADGLSDYRDNIPASGSQIQNGGPAVTSDVVAKQNEWWAEIMNDDWRDILDATAADPQSKSMVQPSNSAASQPAVNQPASSHGGEICNVASPXNSNSAAKQRMRWTPELHECFVDSVNKLGGSEKATPKGVLKLMKVDGLTIYHVKSHLQKYRTARYKPDLMEGTAEKRTTTEELTLDLKSSMDLTEALRLQMEVQKRLHEQLETQRKLQLRIEEQGKYLQMMFEKQSKSNTEKVQDLSSGATTTLSSEPSHPATRNRGDDAADDVNRTGENPVSAEIGETLMHAGGNQEMAESESSDPLANTNDGSKAPQEKRRRVHDS

SEQ ID NO: 5523 - protein, 167 aa, Oryza sativa
MAGEAAAAERWVGAAVDFSEGSRAALRWAADNLLRAGDHLILLHVLKDPDYEQGETLLWEATGSPLIPLSDFSEPTIAKKYGAKPDAETLDMLNTVARQKEVVVVFKVLWGDPREKLCQAINEIPMSCLVIGSRGLGKLKRVLLGSVSDYVVNNATCPVTVVKTADG

SEQ ID NO: 5524 - protein, 344 aa, Sulfolobus solfataricus P2
MEAVILHGGQGTRLRPLTHTGPKQLIKVAGKPISQWVLEQIRDSGIKDILLILGDNTPTRVVDYYGDGSKFGVNITYVYQGKARGLADAVYRVKDLVSEKFLVYLGDNLVFYDLRKFLSFKGSASILLAKVDNPNRFGVAVINENKVIRLVEKPKEKISDLALVGVYGFTDEIFEVIEKLKPSWRGELEITDAIQGLINEGKEVNYEIIQGWWKDTGTPKDILEANSFLLDRYAERKIEGEVENSTIDGRVILEKGAVVKNSVIRGPAYIGKDTKIINSYIGPFTSIGDLSEISGSEIEYSVILDNVRIKGVSLMDSLIGNNSTVEKGTKWQKLIIGENSSVII

SEQ ID NO: 5525 - protein, 327 aa, Arabidopsis thaliana
  misc_feature (231)..(231): Xaa can be any naturally occurring amino acid
  unsure (1)..(327): unsure at all Xaa locations
MALLLLSHCSILSFQPPLSSSSSFHSSHIQSLSKPVFASPSPIRNSISSSVSSSSSSVSSSNSIPQVVVTRERGKNNQIIKALEKNGISSLELPLIQHARGPDFDRLASVLNDKSFDWIIITSPEAGSVFLEAWKTASSPEVQIGVVGAGTARVFEEAMKSADGLLHVAFTPSKATGKVLASELPEKVGKRSSVLYPASLKAGNDIVEGLSKRGFEVVRLNTYTTTSPIKXVPVQSVDTVLLQQALSAPVLSVASPSAVRAWLHLIQNEEQWSNYVACIGETTASAARRLGLKNVYYPEKPGLEGWVESIMEALGAHADSSNPSSRN

SEQ ID NO: 5526 - protein, 446 aa, Glycine max
MSSLTFTTEVASSFLGLAYHNPKPFTLSLQTTLLPLLRRTTTHSRSLTFPLRPSRRFFVTSATTAPPQSEDSDVSTVIPPDNRIPATIITGFLGSGKTTLLNHILTAEHGKKIAVIENEFGEIDIDGSLVAAKTAGAEDIMMLNNGCLCCTVRGDLVRMISELVAKKKGKFDHIVIETTGLANPAPIIQTFYAEENIFNDVKLDGVVTLVDAKHAGFHLDEVKPKGVVNEAVEQIAYADRIIVNKTDLVGESDIASLVQRIRKINSLANLKRTEYGKVNLDYVLGIGGFDLERIENAINDEGAKEDHDHSHDHEHEHHDHDHHHHDHDHSHDHKHEHHDHHSHDHSHDPGVSSVSIVCEGSLDLEKANMWLGTLLLDHSEDIYRMKGLLSVQGMNERFVFQGVHDMFQGSPERLWGPDEPRINKIVFIGKKLDAKELEKGFKACLL

SEQ ID NO: 5527 - protein, 428 aa, Streptomyces collinus
MTAGHRRAVITGVGAVAPGGIGRDAYWDLLTAGRTATRRISLFDPAGFRSQVAAECDFDPLAAGLTPQEARRMDRAGQFAVVAAREAVADSGVELPGTDPERVGISIGSAVGCTMGLEEEYAVLSDGGRDWLVDHSYGVPHLYGYMVPSTLAVEVARQAGAEGPVALISTGCTSGLDAIGHGVQLIEEGSADIVLAGATDAPLSPITSACFDAIKATTANNDDPEHASRPFDGQRDGFVLGEGSAVMVIEELESARRRGATVYAEILGFAGRSNAFHMTGLKPDGREMAEAVRVALHRARLDPGAIDYINAHGSGTKQNDRHETAAFKRSLGQRAHEVPVSSIKSMIGHSLGAIGSLEIAACALALRHQVVPPTANLSTPDPECDLDYVPVTAREHRMDRVLSVGSGFGGFQTAMVLGRPHLAHGEAA

SEQ ID NO: 5528 - protein, 382 aa, Helicobacter hepaticus ATCC 51449
MGETIKNTKVGGLAGITAGQSAICTVGTGHGLNYRGYDIYDLARECEFEEVAYLLLKEKLPNANELAAFKKELIAARDLPKALKDTLKLLPKNAHPMDIMRTTCSMLGCLEPETYDIVKMSFPMQNQIAIRLLGIFPSALTFWHHYHHNGKEISTQSNQDSIAGHFLELLHQKPPKELWIKAMHASLILYAEHEFNASTFTARVITATMSDVYSGVTGAIGALRGPLHGGANEAAMELIAEYKTPQEAEKGILDKLARKDKIMGFGHRVYVKADPRNVVIKEWSKKLSEDVGDTKGLYPISEAIEKVMWEQKKLFPNLDFYSASAYHFMGIPTPYFTPIFIFSRTAGWLAHIFEQRANNKLIRPSSEYIGPDKKAFVPLHNR

SEQ ID NO: 5529 - protein, 151 aa, Lupinus luteus
LTESQAALVKSSWEEFNANIPKHTHRFFILVLEIAPAAKDLFSFLKGTSEVPQNNPELQAHAGKVFKLVYEAAIQLQVTGVVVTDATLKNLGSVHVSKGVADAHFPVVKEAILKTIKEVVGAKWSEELNSAWTIAYDELAIVIKKEMNDAA

SEQ ID NO: 5530 - protein, 422 aa, Streptomyces collinus
MSASGISPGRRGRSVVTGLGVVAPTGIGAVRHWESVLSGKSGLGRITRFDPTGYPVRVAGEVPGFHAGEQVPGRLVPQTDRFTHFALAAAEDALADAAADPATLPEYEMAVVTASSSGGTEFGQHEMENLYQKGSSWVGAYQSIAWFYAATTGQVSIRHGMRGPCGVICGEQAGGLDALGQSRRLLDTGSRLVLSGGTDASLCPYGLVAQLSTGRLSTEDDPARAYLPFDAAASGFVPGEGGAILVVENAEGAHARGVPAYGELLGYAAGFDPTADGTTTGHSVLVSVVRRALADAGLAPGDVDVVFADASGTPAEDLAEARAITEVFGPGGVPVTAPKTLTGRLYAGGAALDVATALLALSAGVVPHTAGLGRPAPGCEIDLVLDRPRQTDPRTALVLARGHGGFTSALVLGAGDRGAPGK

SEQ ID NO: 5531 - protein, 383 aa, Thiobacillus denitrificans ATCC 25259
MTVALGALVVVALFKPDLLQWRAQTPNLTIQQARPQGGGTVTVAPNESFALAAQKVIPSVVNVFTQQKVRNPAHPAMQDPIFRYFFGDRLDARPREVSNLGSGVIVTTNGYILTNHHVVDAADQIEVALADGKTVPARVIGADPETDLAVLKIDAEKLPAITFANADSLKVGDWVLAVGNPFGVGQTVTAGIVSALGRTRLGINTFENFIQTDAAINPGNSGGALVDSAGNLVGVNSAIYSRTGGSQGIGFAIPVSIARQVMEQIIKSGSVTRGWVGVEVQDLTPELAESFNLPDVNGALIAGVLKGGPADTGGVRPGDILLAVNGRRVTDSASLLNLIAELTPGQSARLTVARKQRSLDLKVEVGRRPLQRALPMPPEPALE

SEQ ID NO: 5532 - protein, 143 aa, Psychrobacter arcticus 273-4
MANERTLSIIKPDAVAGNNIGAIYDRFEKSGLKIVAAKMMQLDDEKAGGFYAEHAERPFYNDLKSFMMSGPVLVSVLEGENAIAKHREIMGATNPKDAAEGTIRADFASSIDENAVHGSDSAESAAREISYFFNEEEVCARTR

SEQ ID NO: 5533 - protein, 260 aa, Triticum aestivum
  misc_feature (22)..(22): Xaa can be any naturally occurring amino acid
  misc_feature (140)..(140): Xaa can be any naturally occurring amino acid
  misc_feature (153)..(153): Xaa can be any naturally occurring amino acid
  misc_feature (166)..(166): Xaa can be any naturally occurring amino acid
  misc_feature (211)..(211): Xaa can be any naturally occurring amino acid
  unsure (1)..(260): unsure at all Xaa locations
MTPSLSTRPSKNAMLLWVLDPXGRDTTILNQALNGDITDLTAATEVICSRTPLQLQIMKQTYRARFGCYLEHDITERTYGDHQKLLLAYLGVPRYEGPEVDPAAAARDARDLYRAGERRPGTDERAFIRVFTERTWAHLXSVAGAYHHLYARXSLEKAVKSETSGXPFQFGLLTILRCADTPARYFAKALHKAMKGLGTSDTTLIRVVVTXAEVDMQYIKAEYHKKYKALARRRHHSETPATTHFSLLSAHATHYTRHFR

SEQ ID NO: 5534 - protein, 347 aa, Leuconostoc mesenteroides subsp. mesenteroides ATCC 8293
MTTKMFYDKDIDTTPLENKKIAVIGYGAQGHAQANNLRDSGFDVIMGLRPGKSFDSAKKDGFEVYSAAEATAQADVVMMETPDELQAAVWEKEVEPNLKAGSYLGFSHGFNIVYGLIKPNADINVMIIAPKGPGNIERRQFVEGGGIPSLYGVHQDPTGDTAEVAKAYAKGIGSGRAGILETTFEEETTEDLFGEQAVLCGGLTQLIEAGFNTLVEAGYSPELAYFETSHEMKMIVDLIFEGGFEKMRHDCSNTCEYGEMLNGPRIITEESKQGMRDVLKDIQDGTYAKKWLAEYNSGLKDLEKMRTEYKSGLYEQTGKKVRAMMPWISDADKYSTAADTEQFSAAK

SEQ ID NO: 5535 - protein, 239 aa, Prochlorococcus marinus str. MIT 9313
MFPSWLTPKASKEAAIPSGTQQHAVLGTRLNDPLTTDQEDALFACGCFWGAEKGFWKLPGIITTAVGYAGGHQEQPTYQEVCSGRSGHTEIVRVVWNKSVIDYSDLLKLFWECHDPTQGNRQGNDRGSQYRSAIYTTTIQQIELAQASRDSFQQLLSKAGFGAITTEIKADQQFHYAESYHQQYLAKPGSRPYCSAMPTQVALNDFPGANFKLPVSVWQEYDWSVSHCVLRSGNEKIKL

SEQ ID NO: 5536 - protein, 458 aa, Bacillus anthracis str. 'Ames Ancestor'
MYSMEQVVNLAKHRGFVFPGSEIYGGLANTWDYGPLGIELKNNVKKAWWKKFIQESPYNVGLDAAILMNPKTWIASGHVGNFNDPMIDCKKCKARHRADKLIEDALDAKGIEMVVDGLTFDQMADLMKEHEVKCPDCGSEEFTEIRQFNLMFKTFQGVTESSTNEIFLRPETAQGIFVNFKNVQRSMRKKLPFGIGQIGKSFRNEITPGNFTFRTREFEQMELEFFCKPGEDLEWFAFWRETCKNWLLSLGMTEESMRLRDHGEEELSHYSNATTDIEFKFPFGWGELWGVASRTDFDLKRHMEHSNEDFNYIDPQTNERYVPYCIEPSLGADRVTLAFLCDAYEEEQLENDSRTVLRFHPALAPYKAAILPLSKKLSEGATEVFAELAKDFMVDFDETGSIGKRYRRQDEIGTPFCITYDFDSVEDKAVTVRDRDTMEQVRMPISELKGFLEKKIQF

SEQ ID NO: 5537 - protein, 431 aa, Zea mays
  misc_feature (244)..(244): Xaa can be any naturally occurring amino acid
  misc_feature (257)..(257): Xaa can be any naturally occurring amino acid
  unsure (1)..(431): unsure at all Xaa locations
MVMKEAAEEHDGRRDVTVTVEPALPVQQHRLPLSNLDLLLPPLDVSLFFCYLHPAPTAIALKEALAKTLVAYYPLAGEVVANGDGEPELLCSGRGVDFTETAAAGVELREVRLGAVDEGVEKLVPVKKTGVTMAVKLSKFTCGGAVVGCTFDHRVCDAYSFNMFLVAWAAAARGSSAPPPPDPCFRRSLVAPRDTPHRRAPSTDALINRLFSPRSAAPPPSPAAAGSVNRIYRIAAEDIAALKXSAGPGRTKMEAAXCCMGVVVDGRTRMFPDGAMKAYFGNVLTIPYGVIGSEDLRCMALADVADDVHRWVAEAATGDHFRGLVDWVEALRPKPAAARAYLGGTGGNEAMACIVSSGMSFPVGKADFGTGLPAFASYHFPWPAGAGYVMPMPSARGNGDWVVYVHVAPEVAKVMEESTVFQALVNSYAFE

SEQ ID NO: 5538 - protein, 213 aa, Geobacillus kaustophilus HTA426
MKFFIDTANLEEIKHAHELGILAGVTTNPSLVAKENVSFHDRLREITSIVSGSVSAEVISTDAAGMIAEGEELAKIAPNITIKVPMTPEGLKAVKAFSEKGIQTNVTLVFTANQALLAARAGATYVSPFLGRLDDIGHNGLELISTIAEIFNIHGIETEIIAASIRHPHHVTEAALRGAHIATVPYKVLMQLFNHPLTDQGIEKFLADWNRQK

SEQ ID NO: 5539 - protein, 162 aa, Bradyrhizobium sp. BTAi1
MASPTASIYDFTAASLTGEEVPLKRFAGQVLLIVNTASACGFTPQYRGLEALHRAYADRGFAVLGFPCNQFGAQEPGTAEEIGAFCSTKYDVTFPLFAKIDVNGAEAHPLYKFLKGEKTGLLGSAIKWNFTKFLVDRQGNVVSRHAPTTTPEALKKEIEALL

SEQ ID NO: 5540 - protein, 531 aa, Geobacillus kaustophilus HTA426
MTKYIFVTGGVVSSLGKGITAASLGRLLKNRGLNVTIQKFDPYINVDPGTMSPYQHGEVFVTDDGAETDLDLGHYERFIDINLNKYSNVTTGKIYSAVIRKERRGDYLGGTVQVIPHITNEIKERVFRAGRETNADVVITEIGGTVGDIESLPFLEAIRQIKSDVGRENVMYIHCTLVPYIKAAGEMKTKPTQHSVKELRSLGIQPNVIVVRTEMPMPQEMKEKIALFCDIDPKAVIEARDADTLYAVPLMLQEQKLDQIVCEHLRLNCREADMTEWKALVEKVRNLSKTTKIALVGKYVELPDAYISVVEALRHAGYAFDTDIDIQWINAEHVTRDNVADLLKDADGILVPGGFGDRGVEGKIEAIRYAREQRVPFLGICLGMQLASIEFARHVVGLSGAHSSEFDPNTPHPIIDLLPEQKDVEDLGGTLRLGLYPCKLQEGTLAYAAYGDEVIYERHRHRYEFNNQYRPIMEEHGFVFSGTSPDGRLVEVIELKDHPWFVAAQFHPEFTSRPTRPQPLFREFVRASLKE

SEQ ID NO: 5541 - protein, 580 aa, Gibberella zeae
MKVVLVSGGVISGVGKGIIASSAGLLLKTLGLRVTAIKTDPYINTDAGLLNPLEHGECFVLDDGGETDLDLGNYERYLGIQLSRDSNITTGKIYKQVIEKERRGDYLGKTVQVVPHITDAIQDWIERVAKIPVDASGEAPDVCIIELGGTIGDLESGPFVEALSQLRHRLGRDNFLSISVSYVPIINGEEKTKPTQHAIRQVRSAGLIPDVIACRCERELDQATITKIARSCQVEDEQVIGVRNMDTIYQVPLLLEQEGLLKLLQKGLALDKCQVTPPMAQKGQALWDLWKKTVVPDRHLEPVNIILVGKYVSLDDSYLSVHKALEHSAMRCNRKLNLVSVDSEHLEPEMQEKDPRKFHEAWAHVVRAQGIIVPGGFGTRGIQGMVDVAKWARERKLPYLGICLGMQTAVIEYARNVMGLKGATSEEFSATAEHRVVIFMPEGSKEQMGGTMRLGSRTSHFKPGTEWSKLRGLYGGVDVVEERHRHRYEVNPDYIEDLEKAGLSLTSMDDQGVRVETIELKDHPFFVGLQAHPEYKSKTLAPAPSLLGLVAASSGCLDEIIEAAHKKQSSSNGVSDVTNF

SEQ ID NO: 5542 - protein, 144 aa, Brassica napus
MAGGGAPAPKADEPQPHPPKDQLPNISFCITSPPPWPEAILLGFQHYLVMLGTTVLIPTALVPQMGGGYEEKAKVVQTILFVAGINTLLQTLFGTRLPAVIGASYTFVPTTISIILSGRFSDTSNPIDRFERIMRATQGALIVA

SEQ ID NO: 5543 - protein, 320 aa, Escherichia coli
  misc_feature (1)..(1): Xaa can be any naturally occurring amino acid
  misc_feature (44)..(44): Xaa can be any naturally occurring amino acid
  misc_feature (172)..(172): Xaa can be any naturally occurring amino acid
  misc_feature (204)..(204): Xaa can be any naturally occurring amino acid
  misc_feature (278)..(278): Xaa can be any naturally occurring amino acid
  misc_feature (295)..(295): Xaa can be any naturally occurring amino acid
  unsure (1)..(320): unsure at all Xaa locations
XTPASYNLAVRRAAPAVVNVYNRGLNTNSHNQLEIRTLGSGVIXDQRGYIITNKHVINDADQIIVALQDGRVFEALLVGSDSLTDLAVLKINATGGLPTIPINARRVPHIGDVVLAIGNPYNLGQTITQGIISATGRIGLNPTGRQNFLQTDASINHGNSGGALVNSLGELXGINTLSFDKSNDGETPEGIGFAIPFQLATKIXDKLIRDGRVIRGYIGIGGREIAPLHAQGGGIDQLQGIVVNEVSPDGPAANAGIQVNDLIISVDNKPAISALETXDQVAEIRPGSVIPVVVXRDDKQLTLQVTIQEYPATNHHHHHH

SEQ ID NO: 5544 - protein, 218 aa, Brassica napus
VDPRVRKAGTFVLFLLGLTFLSDARSFLHPTLSEEVTKNENVCTLCEEYVTSALTYLEKNETQTQILEDLHESTHASGGFEQQCITLVDYYLPLFFLHLESFQPHYFCKRMNLCGHVVALVEEARQDTCGVCHRTVSEILIKLQDPVDPRVRIELLLKGCKSFKNYEYEKKCKKLVFEYGPLILVNAEEFLVKNDICTLLRACPNKQTVLRLPGLADS

SEQ ID NO: 5545 - protein, 202 aa, Arabidopsis thaliana
MPTKKMTATLSEKKGVILLGDAFNMRHPAIASGMMVLLSDILILRRLLQPLSNLGNAQKISQVIKSFYDIRKPMSATVNTLGNAFSQVLVASTDEAKEAMRQGCYDYLSSGGFRTSGMMALLGGMNPRPISLIYHLCAITLSSIGHLLSPFPSPLRIWHSLRLFGLAMKMLVPHLKAEGVSQMLFPVNAAAYSKSYMAATAL

SEQ ID NO: 5546 - protein, 423 aa, Rhodospirillum rubrum
MDQITEFQLDINRALKETLALVLAGGRGSRLRDLTNRESKPAVPFGGKYRIIDFPLSNCMNSGIRRMCVITQYRAHTLIHHIQRGWGFLRAEIGEFVELWPAQQQTDKESWYLGTADAVHQNLDLIRMHDPRFVLILAGDHIYKQDYSKLLAHHIARGSDCTVACVDVPREEATGYGCVEVDNDDNIVHFLEKPANPPGIPGRPDRAFASMGIYIFNADFLYEILESDALNEASQHDFGRDIIPSQVGKARIVAHRFSQSCVYSVGRREPYWRDVGTVDAYWSANIDLVSVTPALDLYDADWPIWTYQMQRPPAKFVFDTDERRGMAKDSLVSAGCIVSGGAVTGSLLFNDVRVNSYSSVIDTVILPMGDIGRHARLTKCILDTGCRIPEGLVIGEDPILDAKRFHVTEQGITLVTPDRLALL

SEQ ID NO: 5547 - protein, 383 aa, Bifidobacterium longum NCC2705
MSEHIDIDHELITIRHYLHAHPERSFREFGTSIYLTDQLKAHGIEILHNPLETGVVGLIQGEAGPGPRIGLRADIDGLPIVEDSGLEFSSVNEGVMHGCGHDLHMTGLLGAAFWLAEHRDKFAGSIKILFQPSEETGQGARAMIDAGLVDDVEAIIGTHNNPNYAPGQLAIGVEPMMAGCVKFRVTLHAQGTHAGYPYKGTGPIEALASIILSLQTIVSRNVTPFHPLVLSVTEVHGGHVWNVVPAEAGFQGTVRYFHKSDGNLVGRRFKEVVEHTAEAYGISADVVWDDFQDPLVSDPGLAKAVAADVNDYAQLEPIRQSMAGEDFCEFAKVTLPVFAFVGSNGQEGCADWHSPHFVGLDESIPTFVNFYVNTALRVLNELK

SEQ ID NO: 5548 - protein, 439 aa, Rubrobacter xylanophilus DSM 9941
MSGLQEARLRLARDRSARLMERAVRRMPGGVNSPVRAFRSVGGDPLFMERGEGPRIFDADGNAYIDYVMSYGPLLLGHAPPEVVGAVERAARRGTTFGAPTRLEVELAELVCEAVPSVEVVRMVNSGTEATMSAVRLARGYTGREKILKFDGNYHGHGDALLVSAGSGVATLGLPDSPGVTPGAARDTAVLPYNDLEAVRELFEERGEEFAAVILEPVAGNMGCIPPEEGFLEGLREITAACGALLIFDEVMTGFRVSRGGAQERYGVVPDLTCLGKVIGGGLPVGAYGGRREIMERVAPAGPVYQAGTLSGNPLAMSAGLATLRRTGEPGFYERLEELGARWERGMREAASGSAVPVTVNRVGSMVSLFFASGPVRDFASAAASDAELFKDFFWHMLSRGVYLAPSQYEAGFISLAHSEEEIDRTVEAAAEWFAGRRA

SEQ ID NO: 5549 - protein, 306 aa, Thiomicrospira crunogena XCL-2
MFLYLSSPLCQQHSNGWGHPENAQRVVRIEQALTDARLLSNTLHKSILPATEIDVLRVHSSPFWETLKKHLPENGFVKIDEDTSLSPGSLESALAASGAMLTAIDAIMHREAKQAFCNIRPPGHHAERNRPMGFCLINHIAIGAAYALEKYALERIVIVDFDVHHGNGTEDYVRHEARVGYVSSFQEGIFPFTDPISDLDNMRKLPLPAQSDGKEFMTAWQQNGFEFIRKFNPQLILVSAGFDAHKNDPLASLNLTEQDFYHWTQQLMMLANDICDGRVISILEGGYELNALADSAVAHVKALQGA

SEQ ID NO: 5550 - protein, 346 aa, Chlamydia muridarum Nigg
MKYSLQIEDLHIEGFEQVLKISCESVQLVAVIAIHQTKVGPALGGIRAFNYSQFDDGLQDALRLSKAMTYKALLSSTGTGGGKSVIFLPEGLSSPTEGMLRAFGQAVDSLQGKYIAAEDVGISVQDMTIIHEETPYVCGLASISGDPSIYTAHGVFLCIQETVDYLWNEGIKGKRVAVQGLGSVGRKLVHELFFAGADLIVYDTRKHLLDEVVTLYGAQVDENIISVDCDVLCPCALGGVINACSVDQLRCRAIVGAANNQLENTSIGKELAIREILYAPDYLANAGGLLNVASSVGQTYAPKEVLKKVESLPKTLRRLYEKSIQESIDTGTLANTIVEERLAAYS

SEQ ID NO: 5551 - protein, 583 aa, Carboxydothermus hydrogenoformans Z-2901
MKRTKIVCTIGPASNDVGILKEMIISGMNVARINFAHGSHEEHRERIEKVRRASLEVGIPVAILIDTKGPEIRIGKVENGKIVLKEGDLVVFDPDIAEGQGLRVPVNYPGLARDVNVGGTILLDDGLIELKIEDIQGNKVIARVITGGELSNNKGVNLPGVKVNLPALTEKDRKDIDFGIEIGADFIAHSFVRKAADVLALRRYLEEKGADMEIIAKIENQEGVENIDEIIKVADGIMVARGDLGVEIPTEDVPLVQKEIIEKCNKNGKPVITATQMLDSMIRNKRPTRAEATDVANAIFDGTDAVMLSGETAAGKYPVEAVKTMARIAEKAEEKLLTLRKLNKPTTKSFKTVTDAISHASVTTAEELDAGAIITPTSSGYTARMVSRYRPAVPIIAATPDMKVLRKLTLVWGVFPLLVKTSDSTDEMLSKAIEASLESGLLKPGDLVVLTAGVPVGVKGTTNLLKVHVAGNVLAKGVGIGTRPITGTARVCRTAREAIERIQPGDILVTEATDRDFVSAIEKAAGLVVEAGGLTSHAAIAGLEFGIPVIVGVDGATSIIKDGEKLTLDPQRGLVYHGSAKVL

SEQ ID NO: 5552 - protein, 863 aa, Zea mays
MSFGGMFDGAGSGVFSYDATGGGTGMHNPGRLVPAPPLPKPGGFGATGLSLGLQTNMEGAQLGDLGRMGLIGGGGSGSGGDGDSLGRGREDEIDSRSGSDNVDGASGDEIDPDNSNPRRKKKRYHRHTPQQIQELEAVFKECPHPDEKQRMELSKRLNLESRQVKFWFQNRRTQMKTQIERHENALLRQENDKLRAENMTIREAMRNPICANCGGAAVLGEVSLEEQHLRIENARLKDELDRVCALAGKFLGRPISSGSSMSSSLQGCSGLELAVGSNNGYGPGPLGASALQPLPDLLGAGLPGPVGSAAMRLPMGIGALDVALHGAAADGIDRTVLLELALAAMEELMKVAQMDEPLWLRSPDGSGLEALNLDEYHRAFARVFGPSPAGYVTEATREAGVAITSSVDLVDSLMDAARWSEMFPCIVARASTTDIISSGMGGTRSGSIQLMHAELQVLSPLVPIREVVFLRFCKQHAKGLWAVVDVSVDAILRPDGGHHHAQNGGGAGYMGCRLLPTGCIVQDMNNGYSKVTWVVHAEYDEAVVHQLYRPLLQSGQALGARRWLASLQRQCQYLAILCSNSLPARDHAAITPVGRRSMLKLAQRMTDNFCAGVCASAAQKWRRLDEWRSGEGGDAAGNGGSAAAGEGEEKVRMMARHSVGAPGDPPGVVLSATTSVRLPATSPQRVFDYLRDEQRRGEWDILANGEAMQEMDHIAKGQHHGNAVSLLRPNATSGNQNNMLILQETCTDPSGSLVVYAPVDVQSMHVVMNGGDSAYVSLLPSGFAILPDGHCQSPNTAHQGSPSCGGSSSSSSTGSLVTVAFQILVNNLPTAKLTVESVETVSNLLSCTIQKIKSALQASIVTP

SEQ ID NO: 5553 - protein, 355 aa, Chlorobaculum tepidum
  misc_feature (8)..(8): Xaa can be any naturally occurring amino acid
  misc_feature (62)..(62): Xaa can be any naturally occurring amino acid
  misc_feature (116)..(116): Xaa can be any naturally occurring amino acid
  misc_feature (148)..(148): Xaa can be any naturally occurring amino acid
  misc_feature (153)..(153): Xaa can be any naturally occurring amino acid
  misc_feature (221)..(221): Xaa can be any naturally occurring amino acid
  misc_feature (256)..(256): Xaa can be any naturally occurring amino acid
  misc_feature (271)..(271): Xaa can be any naturally occurring amino acid
  misc_feature (347)..(347): Xaa can be any naturally occurring amino acid
  unsure (1)..(355): unsure at all Xaa locations
MSEPTYFXPPEWAPHASTWLSWPHKLESWPGKFEPVPAVFAELAYQLSRSETVNINVLDDAXEAQARELLKERDPEGKYAERIVFHRIPTNDAWCRDHGPNYVIRTQDGRRDKVIXNWEYNAWGGKYEPYDDDNAVPERVAKAQGLPXVSTGXVLEGGAIDVNGAGLLLTTTACLLNPNRNPSLGKAEIEAQLRRYLGIEKVLWLGDGIAGDDTDGHVDDXARFVNENTVVIAVEEDPEDENYKPLRENYELLKTXTGLDGKPLNIVKLPXPEPVYYDGERLPASYANFYIANTVVLVPTYRCPRDQQAIDILQQCFPKREVVGIDCSDLIWGLGAIHCVTHEEPAXLEHHHHHH

SEQ ID NO: 5554 - protein, 271 aa, Zea mays
MGRRACCAKEGVKRGAWTAKEDDTLAAYVKAHGEGKWREVPQKAGLRRCGKSCRLRWLNYLRPNIKRGNISYDEEDLIVRLHKLLGNRWSLIAGRLPGRTDNEIKNYWNSTLGRRAGAGAGAGGSRVVFAPDTGSHATPPAAGSREMTGGQKGAAPRADLGSPGSAAVVWAPKAARCTGGLFFHRRDTHTPHAGGTETPTPMMAGGGGGEARSSDDCSSAASVSPLVGSSQHDPCFSGDGDGDWMDDVRALASFLESDEEWLRCHTAEQLV

SEQ ID NO: 5555 - protein, 368 aa, Oceanobacillus iheyensis HTE831
MKTDEKFVPGLDGVIASETAISFLDVEKEKIIINGHDLIELSLKQDYLDILYLLLEGDLPKKVEITKTEKLLKDHYEVPQAVLDILKLLPKETHPMDGMRTALSVLAGYDKNIEDRSASANKDRAYQLLGQLPTITVNSYRILNNQEVVQPATELSYSANFLYMITGKEPSDLQVEIFDRLLLLYSEHEMPNSTFTARVISSTNSDMYGALTGAISSLKGNLHGGANEAVMYMLNEVETADEFEQLLYKKLENKEKIMGFGHRVYMKKMDPRALITKEALKKLCEKDNDYTLLEMCEAGEEVMKKEKGLYPNLDYYAAPVYWKLGIPISLYTPIFFSARTAGLAAHIVEQHSNNRIFRPRVKYIGKDY

SEQ ID NO: 5556 - protein, 478 aa, Brucella melitensis 16M
MKRNRKVKILATLGPASGEEAVIRKLFEAGADVFRINMSHADHDLMRTLVKRIRNVEKELGRPIGILADLQGPKLRVGKFKDGKVDLVPGQTFTLDNNEALGDETRVFLPHPEILEAVEPGHRLLIDDGKLHLVAEACDGKSIRCKVVSGTRISDRKGVSLPDTTLGVGALTEKDRCDLDAVLKEEIDWVALSFIQRPEDLAEVRKVSRGKVGLMSKIEKPQAVTRLDEIIELSDALMVARGDLGVEVPLENVPGIQKQITRKARRAGKPVVVATQMLESMITAPVPTRAEVSDVATAVFEGADAIMLSAESASGQYPVEAVATMNRIAEQVEREPTYSTIIDAQRAMPEPTGADAISLAARQIAETLKLSAIVTYTASGTTGLRAARERPRTPIIALSPVVDTARKLSLVWGLHCVITDDAHDLEDMVNHACEIVFHEEFGKAGDRVIITAGVPFGTPGATNMLRIAYIGADGKSGI

SEQ ID NO: 5557 - protein, 250 aa, Hordeum vulgare subsp. vulgare
MAKSYPVVSAEYLEAVEKARQKLRALIAEKNCSPLMLRLAWHSAGTFDVSSKTGGPFGTMKKPAEQAHAANAGLDIAVRMLEPIKEEIPTISYADLYQLAGVVAVEVSGGPVIPFHPGREDKPQPPPEGRLPDATKGSDHLRQVFGKQMGLSDQDIVALSGGHTLGRCHKERSGFEGPWTRNPLKFDNSYFTELLSGDKEGLLQLPSDKTLLTDPVFRPLVEKYAADEKAFFEDYKEAHLRLSELGYAEA

SEQ ID NO: 5558 - protein, 305 aa, Saccharomyces cerevisiae
MSSNDSNDTDKQHTRLDPTGVDDAYIPPEQPETKHHRFKISRDTLRDHFIAAVGEFCGTFMFLWCAYVICNVANHDVALVAAPDGSHPGQLIMIAIGFGFSVMFSIWCFAGVSGGALNPAMSLSLCLARAVSPTRCVVMWVSQIVAGMAAGGAASAMTPGEVLFANSLGLGCSRTRGLFLEMFGTAILCLTVLMTAVEKRETNFMAALPIGISLFIAHVALTAYTGTGVNPARSLGAAVAARYFPHYHWIYWIGTLLGSILAWSVWQLLQILDYTTYVTAEKAASTKEKAQKKGETSSSSAVAEV

SEQ ID NO: 5559 - protein, 356 aa, Raphanus sativus
MSLLTDLINLDLSDNTEKIIAEYIWVGGSGMDMRSKARTLSGPVTDPSQLPKWNYDGSSTGQAPGEDSEVILYPQAIFKDPFRRGNHILVMCDTYTPAGEPIPTNKRHAAAQIFSHPDVVAEVPWYGIEQEYTLLQKDVKWPVGWPIGGFPGPQGPYYCSVGADKSFGRDIVDAHYKACLYAGINISGINGEVMPGQWEFQVGPSVGISAADEVWIARYILERITEIAGVVVSFDPKPIPGDWNGAGAHTNYSTKSMREEGGYEIIKKAIDKLGLRHKEHISAYGEGNERRLTGHHETADINTFKWGVANRGASIRVGRDTEKEGKGYFEDRRPASNMDPYIVTSMVAETTILWNP

SEQ ID NO: 5560 - protein, 226 aa, Vibrio fischeri ES114
MKLLIIEDETKTGEYLKKGLTESGYTVDLSQDGADGLYNATTNQYDLIILDVMLPKLNGWQILQTLRNCENDTPIIMLTAKDQIDDRVKGFELGANDYLIKPFAFAELKARVENALRAKSVISQPSSNELVLHDLKLDLLKRTATRNQDNITLTAKEFSLLELFMRKQGEVLSRTTIASLIWDMNFDSDTNVIDVAVKRLRSKIDKPYDTPLIHTVRGMGYKMDEC

SEQ ID NO: 5561 - protein, 328 aa, Vibrio vulnificus YJ016
MNNKVPANIITGFLGVGKTTTILNLLKEKPANEKWAVLVNEFGEIGIDGAMMTDSGALIKEVPGGCMCCTAGVPMSVGINTLLRQKPDRLLIEPTGLGHPKQVIATLTSAQYEPYVDLKATIALVDPRNLSDEKYLNNQNFNDQLDSADVVIGSKVDLCTSHDIDVFNDWVTDQSPSKVFSKLIHDGQLPVEVLDIERVYGSASTHIEPHHHHHAEMEPQFELPPGRAFVRKENKGQGYYSCGWLIGAEYRFEFEALFSMFSALTAERVKAVVNTDQGCYAFNVANGVVSVNQMSLEGFESRIEVIDSQLMPWDELETILLKLANIHG

SEQ ID NO: 5562 - protein, 521 aa, Solanum tuberosum
MAASIGALKSTPSSNNCINERRNDSTRAVSSRNLSFSSSHLAGDKLMPVSSLRSQGVRFNVRRSPLIVSPKAVSDSQNSQTCLDPDASRSVLGIILGGGAGTRLYPLTKKRAKPAVPLGANYRLIDIPVSNCLNSNISKIYVLTQFNSASLNRHLSRAYASNMGGYKNEGFVEVLAAQQSPENPNWFQGTADAVRQYLWLFEEHNVLEYLILAGDHLYRMDYEKFIQAHRETDADITVAALPMDEKRATAFGLMKIDEEGRIIEFAEKPQGEQLQAMKVDTTILGLDDKRAKEMPFIASMGIYVISKDVMLNLLRDKFPGANDFGSEVIPGATSLGMRVQAYLYDGYWEDIGTIEAFYNANLGITKKPVPDFSFYDRSAPIYTQPRYLPPSKMLDADVTDSVIGEGCVIKNCKIHHSVVGLRSCISEGAIIEDSLLMGADYYETDVDRKLLAAKGSVPIGIGKNCHIKRAIIDKNARIGDNVKIINKDDVQEAARETDGYFIKSGIVTVIKDALIPSGIII

SEQ ID NO: 5563 - protein, 448 aa, Solanum tuberosum
MREILHIQGGQCGNQIGAKFWEVVCAEHGIDSTGRYAGDSDLQLERINVYYNEATCGRFVPRAVLWNRKPGTMDSIRSGPYGQIFRPDNFVFGQSGAGNNWAKGHYTEGAELIDAVLDVVRKEAENCDCLQGFQVCHSLGGGTGSGMGTLLISKIREEYPDRMMLTFSVFPSPKLSDTVVEPYNATLSVHQLVENADECMVLDNEALYDICFRTLKLTTPSFGDLNHLISATMSGVTCCLRFPGQLNSDLRKLAVNLIPFPRLHFFMVGFAPLTSRGSQQYRALTVPELTQQMWDAKNMMCAADPRHGRYLTASAMFRGKMSTKEVDEQMLNVQNKNSSYFVEWIPNNVKSTVCDIPPTGLKMASTFIGNSTSIQEMFRRVSEPFTAMFRKKAFLHWYTGEGMDEMEFTEAESYMNDLVSEYQQYQDATADEEGEYYEDEDEEDVNEN

SEQ ID NO: 5564 - protein, 170 aa, Oryza sativa
  misc_feature (28)..(28): Xaa can be any naturally occurring amino acid
  unsure (1)..(170): unsure at all Xaa locations
MNVDKLKKMAGAVRTGGKGSVRSFVLVXRKKKAVHKTTTTDDKRLQSTLKRVGVNTIPGIEEVNIFKDDVVIQFLNPKVQASIGANTWVVSGTPQTKKLQDLLPSIINQLGPDNLDNLRRLAEQFQKQAPGASGEEAGASAGAAQGDDDDVPELVPGETFEEAAEEKKES

SEQ ID NO: 5565 - protein, 229 aa, Solanum tuberosum
MAAILARKSLSALRSRQLVLAGQAWQGTNTPNGTLLGTRSFATKHSFSTDKDDEEREQLAKELSKDWNSVFERSINTLFLTEMVRGLMLTLKYFFEKKVTINYPFEKGPLSPRFRGEHALRRYATGEERCIACKLCEAICPAQAITIEAEEREDGSRRTTRYDIDMTKCIYCGFCQEACPVDAIVEGPNFEFATETHEELLYDKEKLLENGDRWETEIAENLRSESLYR

SEQ ID NO: 5566 - protein, 264 aa, Helicobacter hepaticus ATCC 51449
MQKPRIVLKIGSSNLCNGKIIDKTQIKALAQIISELKMRFDVILVSSGAVASGHTTLHIDRNTLQNKQALASIGQPLLMESYREALKDYAIPTAQLLLVWRDFDSRKNTTFAKDTIDTLLAHNALPIINENDTIATDEMVFGDNDRLGAYVTYYFGAKLLIILSDIDGYFDKNPHQYDDAQILPIVHSIPSQALEQTHSPHGDFATGGIVTKLIAADFLLQRKCMMFLSHGRKLDVLRDFLLHNKQSSGTLFCPADSQGIKTLI

SEQ ID NO: 5567 - protein, 536 aa, Arabidopsis thaliana
MNAAVFSPSALSLPISFSKTRSSFLSRKKGVKGEFRVFAVFGDESGLVEKKSQWRPLFDVEDPRSKAPPYKGKFLDVNQAIEVARFDIQYLDWRARQDLLTIMILHDKVVDVLNPLAREYKSIGTVKKELAGLQEELSKAHQQVHISEARVSTALDKLAHMEELVNDRLLPGRVVTELDKPSSSTTASAVELDREKTNTGAKSLNVSGPVPPYSPHLKNFWYPVAFTADLKHDTMVPIECFEQPWVIFRGEDGKPGCVRNTCAHRACPLDLGTVNEGRIQCPYHGWEYSTDGECKKMPSTKLLKVKIKSLPCLEQEGMIWIWPGDEPPAPILPSLQPPSGFLIHAELVMDLPVEHGLLLDNLLDLAHAPFTHTSTFAKGWSVPSLVKFLTPTSGLQGYWDPYPIDMEFKPPCIVLSTIGISKPGKLEGKSTQQCATHLHQLHVCLPSSKNKTRLLYRMSLDFAPILKNLPFMEHLWRHFAEQVLNEDLRLVLGQQERMLNGANIWNLPVAYDKLGVRYRLWRNAVDRGDDKLPFSG

SEQ ID NO: 5568 - protein, 260 aa, Legionella pneumophila str. Lens
MKLKNKVAIVTGAASGIGKEIALVYAKEGAKVAIADLNLDQASHVAEEIKSSGGQAMAVAMNVTDEAQVNQGVDKVADHFGGVDVLVSNAGIQIIESVDKLAFSDWKRMLAIHLDGAFLTTKACLKYMYTSGNGGSIIYMGSVHSKEASVLKAPYVTAKHGLLGLCKVVAKEGGTHKVRANVICPGFVRTPLVDKQIPEQAKELGISEEDVIKKVMLKETVDGEFTTTDDVAQTALFFASFESNALTGQSLVVSHGWFME

SEQ ID NO: 5569 - protein, 258 aa, Zea mays
  misc_feature (43)..(43): Xaa can be any naturally occurring amino acid
  unsure (1)..(258): unsure at all Xaa locations
MDSGGVVRSAHTHNQISPKSTRRHLRFKMQIFVKTLTGKTITXLEVESSDTIDNVKAKIQDKEGIPPDQQRLIFAGKQLEDGRTLADYNIQKESTLHLVLRLRGGMQIFVKTLTGKTITLEVESSDTIDNVKAKIQDKEGIPPDQQRLIFAGKQLEDGRTLADYNIQKESTLHLVLRLRGGMQIFVKTLTGKTITLEVESSDTIDNVKAKIQDKEGIPPDQQRLIFAGKQLEDGRTLADYNIQKESTLHLVLRLRGGQ

SEQ ID NO: 5570 - protein, 339 aa, Leifsonia xyli subsp. xyli str. CTCB07
MTTSTVRSGLIGAGGIARARLEGYLANPGSITFAAVADPVRESAESRAGDTGAAIYADYTTMLAEADIDAVDICLPHHLHKDAIVAAARAGKHILCEKPLCLTREEAVEVAAAVEEAGVTLMCAHNQLFLPAVAKAKELIDDGTIGRVYEVRTTDSFHNDFDPANMDWRAHASTSGGGELIDTGYHPTYLLLHLAGGVPVEATAMLATHRLSFMEGEDSATVLVRFDNGVIGTAVTSWAYQPADGTEKFSAVGELGSLTSDGTTLRYRRHGDAEPTVLELGTVNPFAEELGHFARSVLDGTRPLHTQKEGIDVLGIILAAYESARTRTVAPIPSLTAAR

SEQ ID NO: 5571 - protein, 254 aa, Desulfotalea psychrophila LSv54
MTLEKILREKKKDKDILLMTHIVLGYPSFAANREVIEQMVKNGVDCIEMQIPFSEPMADGPVILKANQESLARGTRVAQCFDFAREMTRKHQIPFLFMTYYNIVFKYGEERFFQDAKEAGIKGLIVPDLPPEMGEDYFAYAEQYQLAPIIIYAPTSTPERMKTLAGSATGFIYCAARRGVTGNNSALDENFDNYLSNCRAATTLPLAVGFGIKSKADVQALIGKADMAVIGSQTIRLVDENGPKAVGPFVASLR

SEQ ID NO: 5572 - protein, 681 aa, Leptospira interrogans serovar Copenhageni str. Fiocruz L1-130
MAENLAQLFRESAEKYRDLPAFFSKDSKKNYYPTTYSQLYEQGIQLAEALIELGVQQKQKVGLLADNRIEWIIADYGVILTGAANVPRGTDITDSEIVYILNHSEVEVVFIENDKMLEKFNRNKSQLTNVKTLIMMDPTSNSPGVLKMQELIEKGKALRAGGSKKAEERITAIDPEDLFTLIYTSGTTGLPKGVMLKHSNMMHQVNYVSPMLDIKAGARLLSILPIWHVFERVVEYVCIGLGAATYYTNVRDLRQDLATVKPTFMGSAPRLWENIYNGIYTRINDPAQTPALRRGLFKLAYFFSRKKNQALRFLKGIEVDYTGRNPIVSFFYGILMFFQFLLTGPFTLTVLAGALGAYFAGTELYFLTSPFYTVAGLALVLNSFTLDKVVLAKIRAATGGQLEASISGGGALPRHVDEFFGNIGINVLEGYGMTETSPVISVRTFEKLIIGSVGVIVPKTRLQIRNDNNAVLTEIDESGNITQGKMGLKGVVFIKGPQVMKGYFKNEEATSKAISDGWMNTGDMGMINFKKTLTLTGRAKDTVVLLGGENVEPVPIENKLQESAYISQCMVIGQDQKNLGAIVVPDFEKLQEWAKENGINESNNEKLIENPKIYDLYRKEIKALNNTKNGFKSFEQVTPFILISKPFEVGDELNNMMKMKRHVITEKYSDKIKKIYSTNQD

SEQ ID NO: 5573 - protein, 417 aa, Escherichia coli O157:H7 EDL933 [sequence omitted]

SEQ ID NO: 5574 - protein, 658 aa, Escherichia coli
MSDDMSMGLPSSAGEHGVLRSMQEVAMSSQEASKMLRTYNIAWWGNNYYDVNELGHISVCPDPDVPEARVDLAQLVKTREAQGQRLPALFCFPQILQHRLRSINAAFKRARESYGYNGDYFLVYPIKVNQHRRVIESLIHSGEPLGLEAGSKAELMAVLAHAGMTRSVIVCNGYKDREYIRLALIGEKMGHKVYLVIEKMSEIAIVLDEAERLNVVPRLGVRARLRSQGSGKWQSSGGEKSKFGLAATQVLQLVETLREAGRLDSLQLLHFHLGSQMANIRDIATGVRESARFYVELHKLGVNIQCFDVGGGLGVDYEGTRSQSDCSVNYGLNEYANNIIWAIGDACEENGLPHPTVITESGRAVTAHHTVLVSNIIGVERNEYTVPTAPAEDAPRALQSMWETWQEMHEPGTRRSLREWLHDSQMDLHDIHIGYSSGIFSLQERAWAEQLYLSMCHEVQKQLDPQNRAHRPIIDELQERMADKMYVNFSLFQSMPDAWGIDQLFPVLPLEGLDQVPERRAVLLDITCDSDGAIDHYIDGDGIATTMPMPEYDPENPPMLGFFMVGAYQEILGNMHNLFGDTEAVDVFVFPDGSVEVELSDEGDTVADMLQYVQLDPKTLLTQFRDQVKKTDLDAELQQQFLEEFEAGLYGYTYLEDE

SEQ ID NO: 5575 - protein, 334 aa, Oryza sativa (japonica cultivar-group)
MTKTIGGTTKINPIYLTGKIKKLPKKNLTKPTKGQNGNPKKLSINVDSRQSAWPRHSTQTSAKQSAPRTRKERRGHIAAAAARMLAVFDPTVAKCPEGLRSPPVAGGAVAAGGAGALMKGFAGAHADAVTVSLGPAGALAYSAANQSPLVPRLFGAVNDIFCLFQGHIENIASLKQHYGLSKTATEVTILIEAYRTLRDRGPLPASQVVRDLSGKFTFILYDTLSKSTFVAADADGSIPFFWGVDSENHLVFSDNVDLLKASCGNSFAPFPKGCFYTTSGGLQSFEHPLNELKPVPRVDSQGQMCGSNYKVDSEAKKDSGIPRVGSAADWSNHF

SEQ ID NO: 5576 - protein, 232 aa, Citrus natsudaidai
MAKGHKSKLQSDALRQYILETSVYPREPESMKELREVTAKHPWNLMRTSADEGQFLNMSLKLINAKNTMEIGVYTDYSLLATALAIPDDGKILAMDINRENYEIGLPKIEKAGVAHRIQFREGPALPVLDQLVEDKKNHGTYDFIFVDADKDNYINYHKRIIDLVKVGGLIGYDNTLWNGSVVGPPDAPMRKYLRYCRDFVLELIKALAVDPRIEICMLPVGDGITLSRRIT

SEQ ID NO: 5577 - protein, 103 aa, Zea mays
MAGLQRSSETFRRSGSSGLVWDDNKSFSGEIKPAEEDGGAGAARAVERSRSTGHGHAGYRATGRVPPALDPPSPRVAVCGFCRLFGGGKGKDGGNAKAKGRRH

SEQ ID NO: 5578 - protein, 144 aa, Physalis longifolia
DTQEWNPATDKYTDVKYDITTVMDAKPLLKEALQAAVGLPVDRNIPLIGFIGRLEEQKGSDILVAAIHKFIGLBVQIVVLGTGKKKFEQEIEQLEVLYPDKAKGVAKFNVPLAHMITAGADFMLLPSRFEPCGLIQLHAMRYGT

SEQ ID NO: 5579 - protein, 144 aa, Physalis peruviana
  misc_feature (44)..(44): Xaa can be any naturally occurring amino acid
  misc_feature (77)..(77): Xaa can be any naturally occurring amino acid
  misc_feature (130)..(137): Xaa can be any naturally occurring amino acid
  unsure (1)..(144): unsure at all Xaa locations
DTQEWNPATDKYTDVKYDITTVMDAKPLLKEALQAAVGLPVDRXIPVIGFIGRLEEQKGSDILVAAIHKFIGLDVQXVVLGTGKKKFEQEIEQLEVLYPDKAKGVAKFNVPLAHMITAGADFMLVPSRFXXXXXXXXHAMRYGT

SEQ ID NO: 5580 - protein, 358 aa, Streptococcus suis 89/1591
MTEKTIVFKVGTSSLTQENGSLDRIKIARITNQLAQLHQKGYQIVLVTSGSIAAGFRRLGFEKRPTKIAEKQASAAVGQGLLIEEYTQNLMKDGIVSAQILLTQDDFADARRYQNASQALQVLLKQRVIPIINENDTIAIEEIKVGDNDTLSAQVASLLKADLLVLLTDVDGLYTANPNSDPNAKHLPVITEITEDLFAMAAGAGSSNGTGGMTTKLQAAQIATKSGVPVFICSSKEDTALLQAVTQANRGTLFLADDHAMNQRKQWMAFYARTDAAVEVDAGAVDAMLHQGRSLLATGVKALEGDFEVGQVVEVYSQADHRLIGKGRVKLSSKDLQDQLANGRAEGVFIHRNDWVSL

SEQ ID NO: 5581 - protein, 412 aa, Streptococcus suis 89/1591
MTTTQALLDSLLAHKASINLATTEQKNQALSAMADQLVAQTEAILAGNAIDMEHAQGKISQVMQDRLLLTAERIEAMADGIRALIGLPDPVGLILEESARTDGLNICKKSIPFGLVGMIYESRPNVTSDAAALAIKSGNAVILRGGKEAFHSAQAIVTALKAGLEEVGLSPKVIELVQDTSRASATELMTAKGKIDLLVPRGGAGLIQAVVENATVPVIETGTGICHVYVDKDADLDKALQIMVNAKTSRPSVCNAAEVLLVHEEIASQFLPRLEEALAGQVELRADSQAQALLNQATPAGEQDFDTEFLDFILAVKVVSSVEEAISHIDQHSTGHSEAIVTENSQTAEYFTLYVDSAAVYVNASTRFTDGGEFGLGCELGISTQKMHARGPMGLREMTTYKYIITGDGHIR

SEQ ID NO: 5582 - protein, 405 aa, Schizosaccharomyces pombe
MGFGKKKVSYFYDEDVGNYHYGPQHPMKPHRVRMVHNLVVNYNLYEKLNVITPVRATRNDMTRCHTDEYIEFLWRVTPDTMEKFQPHQLKFNVGDDCPVFDGLYEFCSISAGGSIGAAQELNSGNAEIAINWAGGLHHAKKREASGFCYVNDIALAALELLKYHQRVLYIDIDVHHGDGVEEFFYTTDRVMTCSFHKFGEYFPGTGHIKDTGIGTGKNYAVNVPLRDGIDDESYESVFKPVISHIMQWFRPEAVILQCGTDSLAGDRLGCFNLSMKGHSMCVDFVKSFNLPMICVGGGGYTVRNVARVWTYETGLLAGEELDENLPYNDYLQYYGPDYKLNVLSNNMENHNTRQYLDSITSEIIENLRNLSFAPSVQMHKTPGDFTFENAEKQNIAKEEIMDERV

SEQ ID NO: 5583 - protein, 289 aa, Triticum aestivum
WDAEIECSYGWTECVGIADRSAYDLKAHSEKSGVPLVAHEKFSKPREVEKLVIVPSKKDLGLAFKGNQKMVVEALEAMSEKEAMDMKAALESNGETNFQVCTLGKEVVITKKMVSISMEKKLEHQRVFTPSVVEPSFGIGRIIYCLFEHSFYTRPSKSEEEQLNVFRFPPIVAPIKCTVFPLVKNQEFDDAAKVLDKELTAAGISHIIDTTGISIGRRYARTDEIGVPFAVTVDSATEVTIRERDSKQQVRVGIDEVASVVKELTEGQSTWTDISFKYPSHIGPQGDQE

SEQ ID NO: 5584 - protein, 581 aa, Pisum sativum
MAAVTSSCSTAISASSKTLAKPVAASFAPTNLSFSKLSPQSIRARRSITVGSALGATKVSAPPATHPVSLDFETSVFKKERVNLAGHEEYIVRGGRDLFHLLPDAFKGIKQIGVIGWGSQGPAQAQNLRDSLVEAKSDIVVKVGLRKGSSSFNEAREAGFSEEKGTLGDIWETISGSDLVLLLISDSAQADNYEKIFSHLKPNSILGLSHGFLLGHLQSIGLDFPKNFSVIAVCPKGMGPSVRRLYVQGKEINGAGINSSFGVHQDVDGRATNVALGWSVALGSPFTFATTLEQEYKSDIFGERGILLGAVHGIVESLFRRYTENGMSEDLAYKNTVESITGVISKTISTQGMLAVYNALSEDGKKEFEKAYSASFYPCMEILYECYEDVASGSEIRSVVLAGRRFYEKEGLPAFPMGKIDQTRMWKVGERVRSTRPAGDLGPLYPFTAGVFVAMMMAQIEVLRKKGHSYSEIINESVIESVDSLNPFMHARGVSFMVDNCSTTARLGSRKWAPRFDYILTQQALVAVDSGAPINQDLISNFVSDPVHGAIQVCAELRPTLDISVPAAADFVRPELRQCSN

SEQ ID NO: 5585 - protein, 473 aa, Pseudomonas fluorescens Pf-5
MPVGNQLPHGETAQGGPLKRELGERHIRLMALGACIGVGLFLGSAKAIEMAGPAIMLSYIIGGLAILVIMRALGEMAVHNPVAGSFSRYAQDYLGPLAGFLTGWNYWFLWLVTCVAEITAVAVYMGIWFPDVPRWIWALAALVSMGSINLIAVKAFGEFEFWFALIKIVTIIAMVVGGIGIIAFGFGNDGVALGISNLWSHGGFMPNGVTGVLMSLQMVMFAYLGVEMIGLTAGEARNPQKTIPNAIGSVFWRILLFYVGALFVILSIYPWNEIGTQGSPFVMTFERLGIKTAAGIINFVVITAALSSCNGGIFSTGRMLYSLAQNGQAPAGFAKTSNNGVPRRALLLSIFALLLGVLLNYLVPEKVFVWVTSIATFGAIWTWVMILLAQLKFRKGLSPAERAGLKYRMWLYPISSYLALAFLVLVVGLMAYFPDTRVALYVGPAFLVLLTVLFYLFKLQPTNVQQGSARSAS

SEQ ID NO: 5586 - protein, 345 aa, Moorella thermoacetica ATCC 39073
MKALVFEGPNELKLRDVPLPEPGEDEILVKVAACLICGTDLRIFRGAKTRGVRIPSILGHEFAGVVEATGVNVKEFHVGDRVGVAPVIPCHTCFYCKNGLENVCANRTALGYEYEGAFAEYVCIPAPAVKGGNVYHLPSNISLEEAALAEPLACCLNGHHNSKVKLGDVVVILGAGPIGLMHLQLAKSSGASYVIISEPNEHRRAIAKEFGADRVVDPQTEDLNSIVKNVTDGLGADIIFLAIGIPALAQDALTLVKKGGTINFFAGFSVGDKAALDVNLIHYNEIKITGTSAARRDDYRKALDLIAKGKVKASKMITHRFPLDKAEEAFRIAGSSQGIKVAIIP

SEQ ID NO: 5587 - protein, 286 aa, Mycobacterium bovis AF2122/97
MSIDFTPDPQLYPFESRWFDSSRGRIHYVDEGTGPPILLCHGNPTWSFLYRDIIVALRDRFRCVAPDYLGFGLSERPSGFGYQIDEHARVIGEFVDHLGLDRYLSMGQDWGGPISMAVAVERADRVRGVVLGNTWFWPADTLAMKAFSRVMSSPPVQYAILRRNFFVERLIPAGTEHRPSSAVMAHYRAVQPNAAARRGVAEMPKQILAARPLLARLAREVPATLGTKPTLLIWGMKDVAFRPKTIIPRLSATFPDHVLVELPNAKHFIQEDAPDRIAAAIIERFG

SEQ ID NO: 5588 - protein, 553 aa, Psychrobacter arcticus 273-4
MLLSHRARLLELWRIAATYRIDTHFSVEEAPQLQPLVRLIRMHPAAWGKKHQPNAIKYSLEDMGTLFLKLGQLLSTRRDLVPPEIIAQLIQLQDKVKSFDSDVAIAQIQDSKHGLGQSIGTLFARFDVKPLAAASIAQVHTAALHDGREVVVKVVRPDIRTTIIADFELLRELANWASARIEVARAIHVIDIVEDYRQVMLNELDLTLEADNTTQMRNNFLGSALMYVPEIYDAAKNVMVMERIQGVPISQIEIFDQLGYDRAALAEKGLTIFFTQVFRDNFFHADMHPGNVFVETPPVNTLTANMAAVDLGHEPRYIGLDCAIMGTLSKDDQLIVARMLLSVMNNNFTAMVDIVSRAGWIPPNTDKHALMRDMKRTVGPMLQKSINDIDFAGVLMQILDIARRHHMSIPPQLMLLLKTLVHVEGLGRDLYPDLDIWSLAKPILSSWIKEQLDPMRNLQQLRQQLPEILLSTIDIPKLLDQGLQSLASQGSRQDSQLREIQQIRADMLNDRRRDWLALAGFVIFIAIATQVIGWLSPIFYLLAILAVVWRILA

SEQ ID NO: 5589 - protein, 216 aa, Leifsonia xyli subsp. xyli str. CTCB07
MAEPIPFSQALRERTRTVHEESEGASFMQDLMSGKGSREDYIHLLAQHWFIYDALETAAGWMAGDPIAALFITPKLTRLPAIEADLEFLLGEDWRDRVHPLPSTLHYTARIRDVGSSWPGGFVAHHYTRYLGDLSGGQIIRTLLQRQYGFETNGVGFYLFAEIAKPKVFKDIYRAQLDAVDWTEEERDRVIAEVGLAFRFNTELFDDLAAAKAAAA

SEQ ID NO: 5590 - protein, 222 aa, Yersinia pseudotuberculosis IP 32953
MNQIQCVMFDCDGTLVDSEVLCCQAYVLMFAHYNIHLSLEEVIKRFKGVKLYEIVGIVCKEYGLDQPIKVLEKLYREEVARLFDAELQPIAGVKALLEQIVLPVCVVSNGPVSKMQHSLGLTGLLPFFEDRLYSSYDIQRWKPDPALIYHAAEHMQVAAEHCILIEDSAAGAQAGIAAGIPVFYYCADPHNQPINHPLVTTFTDIQQLPDLWKERGWHITRD

SEQ ID NO: 5591 - protein, 1238 aa, Bordetella bronchiseptica
MPAPHRLYPRSLICLAQALLAWALLAWAPAQASQELTLVGKAAVPDVEITLDGDDWRWLARKRVLTLGVYAPDIPPFDVTYDERYEGLTADYMAIIAHNLGVQAKVLRYPTREQAVGALESGQIDLIGTVNGIEGRLQSLRLSVPYAADHPVLVMPIGARRAPPADLAGQRLAVDANYLPRETLQQAYPQATLHYFPSSEQALAAVAYGQADVFIGDALTTSHLVSQSYFNDVRVVAPAQIVTGGESFGVRADNTRLLRVVNAVLEAIPASERRSLIYRWGLGSSISLDFARPAYSAREQQWMANHPVVKVAVLNLFAPFTLFRTDEQFGGISAAVLQLLQLRTGLDFQIIGVDTVEELIAKLRSGEADMAGALFVNAARESVLSFSRPYVRNGLVIVTRQDPAAPADADHLDGRTIAMVRNSAAIPLLQQRYPQAKVVTADNPTEAMLLVADGQADAVVQTQISASYYVNRYFAGKLRIASALDLPPAEIALATARGQTELISILNKALYSISNDELASIVSRWRGSDGDPRTWYAYRNEIYLLIGLGLLSALLFLSWIVYLRRQIRQRKRAERALNDQLEFMRVLIDGTPNPIYVRDKEGRMLLCNDAYLDTFGVTADAVLGKTIPEANVVGDPALAREMHEFLLTRMAAEREPRFEDRDVTLHGRTRHVYQWTVPYGDSLGELKGIIGGWIDITERAELLRELHDAKESADAANRAKTTFLATMSHEIRTPMNAIIGMLELALLRPADQEPDRQSIQVAYDSARSLLELIGDILDIAKIEAGKFDLAPVRTALRALPEGAIRVFDGLARQKGIELVLKTDIVGVDDVLIDPLRMKQVLSNLVGNAIKFTTEGQVVLTVTARPDGEAAHVQFSVSDTGCGISEADQRQLFKPFSQVGGSAEAGPAPGTGLGLSISRRLVELMGGTLVMRSAPGVGTTVSVDLRLTMVEKSAQATPPAAAAQATPSKPQVSLRVLVVDDHKPNLMLLRQQLDYLGQRVVAADSGEASLALWHEHAFDVVITDCNMPGINGYELARRIRAAEAAPGYGRTRCILFGFTASAQMDEAHACRAAGMDDCLFKPIGVDALRQRLNEAAARAALPTPPSPQAAAPATHDATPAAFSAESILALTQNDEALIRQLLEEVIRTNRADVDQLQKLHQQADWPKVSDMAHRLAGGARVVDAKAMIDTALALEKKAQGQAGPSPEIDGMVRTLAAQSAALETQLRAWLEQRPHQGQP

SEQ ID NO: 5592 - protein, 399 aa, Rhodococcus globerulus
MVDTRLPVTVLSGFLGAGKTTLLNEILRNREGRRVAVIVNDMSEINIDSAEVEREISLSRSEEKLVEMTNGCICCTLREDLLSEISALAADGRFDYLLIESSGISEPLPVAETFTFIDTDGHALADVARLDTMVTVVDGHSFLRDYTAGGRVEADAPEDERDIADLLVDQIEFADVILVSKADLVSHQHLVELTAVLRSLNASAAIVPMTLGRIPLDTILDTGLFSLEKAAQAPGWLQELQGEHIPETEEYGISSVVYRERAPFHPQRLHDFLSSEWTNGKLLRAKGYYWNAGRFTEIGSISQAGHLIRHGYVGRWWKFLPRDEWPADDYRRDGILDKWEEPVGDCRQELVFIGQSIDPSRLHRELDACLLTTAEIELGPDVWTTWSDPLGVGYTDQTV

SEQ ID NO: 5593 - protein, 398 aa, Oceanobacillus iheyensis HTE831
MTITSTNIIEETNYYGAHNYHPLPIVVSEANGVWVKDPEGNSYMDMLSAYSAVNQGHRHPKIIEALKNQADKVTLTSRAFHNELLGPWTKRMAKLTKKDKVLPMNTGVEAVETAIKAARRWAYQVKGVTENQAEIIAADGNFHGRTLNAISLSNDPDATKNYGPFVPGINKVSYGDINAIEKAITENTAAIILEPIQGEAGIIIPPEGYLKKVRELCSEKNILFIADEVQTGFARTGKMFACEWENVEPDIYVMGKALGGGVFPVSAIAANNEIMDVFTPGSHGSTFGGNPLACAVSMAAIDVIEEENLVNKSLESGKYFADKLRAVNFEGIKEVRARGLFIGMEFHQPVREICEKLKDKGILCKETHVNTIRFAPPLVITKDEMDWAIQRIEEVLTN

SEQ ID NO: 5594 - protein, 185 aa, Arabidopsis thaliana
MAATLTGSGIALGFSCSAKFSKRASSSSNRRCIKMSVSVEEKTKKFTLQKSEEAFNAAKNLMPGGVNSPVRAFKSVGGQPVVMDSAKGSRIRDIDGNEYIDYVGSWGPAIIGHADDEVLAALAETMKKGTSFGAPCLLENVLAEMVISAVPSIEMVRFVNSGTEACMGVLRLARAFTGKQKFIKF

SEQ ID NO: 5595 - protein, 599 aa, Chromobacterium violaceum ATCC 12472
MSNLIELKVPDIGGHNNVDVIEVFVKPGDVIEKEASLITLETDKATMEVPAEAAGTVKEVRVTVGSKVSEGDLVVILEAAGAAAAAPAEVKPVETTGVASATTQAGFAPQAAPVAASHSGGADIECDVMVLGGGPGGYSAAFRAADLGLKVVIVERYATLGGVCLNVGCIPSKALLHNAAVIDEVSHLAANGIKFGKPEVDIDMLRGYKEKVIAKLTGGLGGMAKARKVEIVRGNGHFIDPHHIEVSLTTGKGREESGEKKIVKFKNAIIAAGSRVVKLPFIPNDPRVVDSTGALELKGVADRMLIIGGGIIGLEMGTVYSTLGARLDVVEMLDGLMQGADRDLVKVWQKWNAHRFDNIMLNTKTVAVEPKEDGVWVTFEGEQAPKEPQRYDLVLYATGRAPNGKLIGAENAGIAVTDRGFIQVDKQQRTNVPHIFAIGDIVGQPMLAHKGVHEGHVAAENCAGMKSYFDARVIPGVAYTDPEVAWVGVTEDEAKKQGLKIEKGVFPWAASGRAIANGRDEGFTKLIFDAESHQIIGGGIVGPHAGDMIGEVCLAIEMGCDATDIGKTIHPHPTMGESIGMAAEVAHGTCTDLPPQRKK

SEQ ID NO: 5596 - protein, 193 aa, Exophiala dermatitidis
MVVATIKCVVVGDGAVGKTCLLISYTTNKFPSEYVPTVFDNYAVTVMIGDEPYTLGLFDTAGQEDYDRLRPLSYPQTDVFLVCFSVTSPASFENVREKWFPEVHHHCPGVPCLIVGTQTDLRDDPQVREKLAKQKMQPVRKEDGERMAKELGAVKYVECSALTQYKLKDVFDEAIVAALEPPPKKSSKKCTIL

SEQ ID NO: 5597 - protein, 295 aa, Zea mays
  misc_feature (95)..(95): Xaa can be any naturally occurring amino acid
  unsure (1)..(295): unsure at all Xaa locations
MRSFAPVFLSAVVAWLELAGTAQGGNFYQDTEMTWGDGRGKVVDGGRGLDLTLDRTSGSGFQSKSEYLFGKIDMQIKLVPGNSAGTVTTFYLSSXQGDAHDEIDFEFLGNVSGEPYTLHTNVFTRGQGQREQQFRLWFDPTTAFHTYSILWNPQHVIFAVDGTPVRDFKNHEARGVAFPRTQPMRLYASLWNADDWATQGGRVKADWSKAPFVASFRGFSADACVWDGGRQRCPEGTMEAAAVAGAGSGRGWWNQQLSDMSYRRMRWVQRKFMIYNYCADAKRFPQGVPAECKLR

SEQ ID NO: 5598 - protein, 338 aa, Sordaria macrospora
MVVKVGINGFGRIGRIVFRNAIEHDDIQIVAVNDPFIEPKYGEYMLRYDSTHGNFKGTIAVEGSDLVVNGKKVKFYTERDPSAIPWSETGADYIVESTGVFTTTEKASAHLKGGAKKVIISAPSADAPMYVMGVNNESYDGSANVISNASCTTNCLAPLAKVIHDNFTIVEGLMTTVHSYTATQKTVDGPSSKDWRGGRTAAQNIIPSSTGAAKAVGKVIPDLNGKLTGMSMRVPTANVSVVDLTVRIEKGASYDEIKEVVKKASEGPLAGILAYTEDEVVSSDMNGNPASSIFDAKAGISLNKNFVKLVSWYDNEWGYSRRVLDLISYVAKVDASKA

SEQ ID NO: 5599 - protein, 173 aa, Glycine max
MANQGAKKRKEENARHMARLRQIIIACNVIYVLLRMLVFHSSFTWKHWIGLIVTSLAYVIPYQQLAKMATPAYAEDGELLDGGFDMSTGGVCGYLHDVIYITCFVQVMSIVSGKFWYTYLVIPAFGAYQSFGFIKGFLPGGSEESFEDEKTRKKREKMEKKASRPKFAKTRTR

SEQ ID NO: 5600 - protein, 507 aa, ASPERGILLUS NIDULANS FGSC A4
MYSSIHTTAPGPEYDSPTPTEYTSLLPKPTDDLFPDSLSSRDAEVTDHDSRKAILAEFLLLLKSSVPVILAYALQNSLQTVSVLIVGRISPEHLATSAFSLMFAMITAWMIALGGTTALDTLASSSFTGSDKRNLGILLQRGFFVLGLFYLPVAVLWIFSEKVFLLLGQDADLSKDSAQFLTALIPGGLGYVYFELMKKYLQAQGIMRPGTYVLLLTSPLNAALTYTFCYKLGLDLLGAPLALGISYWLSFALLVLYAILVRGSECWGGWSREALTNLGTFSRLAILGVVHVGTEWWAFEIVALAAGRLGTIPLAAQSVIMTADQVLNTIPFGVGVATSARVGNLLGAKDAKGARRAANVAAWLSMILGLVVLVAFMGTKDHFAKIFNSDPRVVSLTSAVLPFVALFQIADGLNGSCGGSLRGMGRQHVGAAVNIVSYYCGALPLGVYLAFHGWGLKGLWVGQCVALYLVGALEWVIVAASDFDKEVRKAFKRMDEAAYAEEEEGRL

SEQ ID NO: 5601 - protein, 325 aa, Pseudomonas syringae pv. tomato str. DC3000
MTELQPIPVTVLTGFLGAGKTTLLRHLLKAEHGLKIAVIENEFSDAGIDSQLLGTDPVQIMTLSNGCVCCTIHTDLTKALYLLLERLDSGEIAFDRLVIECTGLADPAPVAQTFFIDEELRERYILDGIITLVDAAHADTHLTQTIAQAQIGFADRLLVSKRDLVDDAAFDALSARLTRINRRAPIRIVEHGKIDLAELLDVRGFNLNADLGGSMTLRPLAPAGKSSDRITSLVLRSDKPLNLDRLSEFMNELLEDHGKQLLRYKGVLNIEDEPRKMVFQGVLKLYGFDWDTEWAEGELRESVIVFIADELPEEKIRAGFAAVVG

SEQ ID NO: 5602 - protein, 75 aa, Saccharomyces cerevisiae
MTISSAHPETEPKWWKEATFYQIYPASFKDSNDDGWGDMKGIASKLEYIKELGADAIWISPFYDSPQDDMGYDIA

SEQ ID NO: 5603 - protein, 546 aa, Psychrobacter arcticus 273-4
MMADDKTKSTQAERLVQLRRDKGMTAEQLAQAMTAAGAKVSRGAISNWERGTNGIVSSKLPTLARILGCSEGYLLRGELESDSKSDVDLKNIASDNTNVYVESDEQAHSASQITHTTTIPSTPRKISPNNLMSGPFMNTIKKSDKLQNVCYDIRGPLLQTANKMEAEGKRILKLNIGNPAPFGLEAPHEILRDVAMNLPEATGYSDSQGIFSARKAVLQYYQSKGLLSAVDVRDVYLGNGVSELIVMTLQALMNDGDEVLIPMPDYPLWTAATNLAGGTAVHYRCNEEDNWHPDIEDIKSKITSKTKGIVVINPNNPTGALYSDEVLLQIIEVAKEHDLIIMADEIYDRILYDDMEHTPMSTLTDEVLVLSYNGLSKSHRIAGFRAGWMMISGRKEHAADFIEGLDMLASMRLCSNVQGQYAIQTAMGGYQSMKDLTSKKGRLYKQRELAVTRLNAIKGISCTMPQGAFYCFPKMDPEIYPIKDDMQFMMDLLLEENVLMVQGTGFNWDKHDHFRLVFLPNLHDLEDAMDRLDRFFAKKRKQFGTD

SEQ ID NO: 5604 - protein, 141 aa, Psychrobacter arcticus 273-4
MQYNQLSKEEISQLTDADWKERLSSDEYHVMREKGTERPFTGVYNDINDKGIYRCKGCGANLFESDNKFDAGCGWPSFDQGIDNSAIDEHVDDSLGMRRTEVTCSHCSAHLGHVFPDGPSETTGMRYCINSVAIDLDKSDE

SEQ ID NO: 5605 - protein, 255 aa, Bacillus cereus ATCC 14579
MIKAVIFDLDGTLLDRDSSLKLFIKEQYKRHINKLKHIPEEQYVSRFIELDNKGYVWKDKVYQQLLQEHSISDLTWEQLLEDYINNFQHHCIPFSNMEHVLKELKDKGILLGMITNGFTDFQLLNIQALGIEKYMDTILVSEQEGIKKPQAEIFMRALERLGVTPEESVYIGDHPENDVIGARNVGMNAIWKKDAFWENPFTDEYIIDDLKELLLLIDTIKKNKYLSIKLTTITKRRKFYEFSRRKVSIYSNFSI

SEQ ID NO: 5606 - protein, 490 aa, Sinorhizobium meliloti 1021
MTISETLLVKLKDPSLAVDKGLIGAEWLDRSDSGKTFDVSNPATGEVIAILPDMSRSETARAIDAAHAAQRAWAEKTGKERAAVLRNLYDLVVANADDLATILTMEMGKPLTEAKGEILYGASYVEWFGEEAKRVYGDTIPGHQPDKRIIVLKQPIGVVAAITPWNFPNAMLARKLAPAAAAGCAVVSKPAAETPLSALALALLAERAGLPAGVFNVILSTDSAEVGKEMCANDKVRKLTFTGSTNVGKILMRQGADQIMKLGLELGGNAPFIVFDDADLDAAVEGAMVAKYRNNGQTCVCANRIFVQAGIYDAFAARLTAKVSEMTIGDGFEPDVDAGPLISEKALAKVEEHIRDAVTKGADLVLGGNARGGLFFEPTVLTGATMDMKIAGEETFGPVAPLFKFETENEVVSMANKTEFGLASYFYSKDVSKVFRVAEALEYGMVGINTGLISTEVAPFGGVKQSGQGREGSKYGIDDYVETKYLCLSI

SEQ ID NO: 5607 - protein, 509 aa, Bifidobacterium longum NCC2705
MSRLALVDWVSANGAIAPRTKLNKNRQAFMRKAKIVDTIGPSTEDYDNLLKLVEAGMDVARLNRSHGTPEDHLKVYNNVRKASEATGRNVAALVDLQGPKIRCGWFKKNADGEDKVQLQLGQEFVITTDDVEGDEHITSTTFKGLPGDCHPGDPILIDDGKVRLEVTKVEGNNVYTKVVVAGPVSSHKGINLPGVAVSLPALTEKDEADLRWAIRTGADIIAMSFVRFATDIDRAHEIMDEEGRRIPIIAKIEKPQALENLEEIVKTFDGVMAARGDMAVECPLEEVPLATKRIIELARQYAKPVIVATEVLGSMVNSPVPTRAEASDCANAILDGSDATMTSNETAVGKYPDVTVATMARISGYATDHGFDRIPELKNLDMSSTGAVSSAAVDLADKLNAKAIVAYTQTGATVHRVSRERPAAPIYGLTSNEHTYHWLALSWGTEAFLLKEDYHDKSRKDLMVYTDKVLKDAGKVADGDKIVILSSAQGDHQPGRTDSIYVHTVGACD

SEQ ID NO: 5608 - protein, 301 aa, Rubrobacter xylanophilus DSM 9941
MAGVFVMGSINQDFVLRVERRPGPGETVTDAELSLHPGGKGANQSAAAALLGAEVAFLGRVGDDGLGEPLVRNLREKGVDAGLVERVAGRSTGAAFITVTPDGENAITVAPGANRALLPPDVEAARERIAASRVLVAQMEIPRETVFRGVEVASEAGTRVLLNLAPPFEVPGELLGLLDPLVVNEHEAAFLLGEPVEGVEGALAAAPELLGLGARSAVITLGPAGAVFALEGRAEHASAPRVRAVDTTGAGDAFVGALAARLAAGEALGEAVAYAVRAGAAAVTREGAQGALPTPEVVEGL

SEQ ID NO: 5609 - protein, 224 aa, Brassica napus
  misc_feature (18)..(18): Xaa can be any naturally occurring amino acid
  unsure (1)..(224): unsure at all Xaa locations
LSLLKDEFPDVRLNIISXKLDQVNQVIGIDLLSQSLLPAIVELAEDRHWRVRLAIIEYVPLLASQLGIGFFDDKLGALCMQWLQDKVYSIREAGANNLKRLAEEFGSEWAMQHLVPQVLEMVNNPHYLHRMMALRAISLMAPVMGSEITCSKFLPVVVEASKDRVPNIKFNVAKLLQSLIPIVDQSVVDKTIRQCLVDLSEDPDVDVRYFANQALQSINGAAVA

SEQ ID NO: 5610 - protein, 214 aa, Leptospira interrogans serovar Copenhageni str. Fiocruz L1-130
MELYLDTANVDEIKEIASYGLVDGVTTNPSLIAKSGRSFKEVIKEICSIVSGPVSAEVLSTKFDGMMKEALELVEIAENVVIKVPLIPEGLKTVVELTKRNIPTNVTLCFSAPQALLAAKAGATFISPFIGRVDDTSWDGMELISEIREIYDNYGYDTRILAASIRGPIHLKESALRGADCATMPHSAFLQLFKHPLTDIGLEKFLEDSKKLKW

SEQ ID NO: 5611 - protein, 97 aa, Staphylococcus aureus
DIVSHAEGFIYTVTMNATTGQNGAFHPELKRKIESIKAIANVPVVAGFGIRTPQHVADIKEVADGIVIGSEIVKRFKSNTREEIIKYLQSIQQTLNN

SEQ ID NO: 5612 - protein, 477 aa, Bacillus cereus G9241
MKIVLRKESNIPYYKQIYMQIVERVQNGMLSHGDSLPSLRSMAEDLQISLLTVRKAYKELEKKEYIRIEQGKGAYIHKHVKKDFKPIPYKWQQTKTINVMRSQYAMNQHRKYYDFSQAILYPRLLPNPFLADEMHKILNKDQMILATYGPVQGDCELRVEIANYLNEHQKLVTDPSQLLITSGAQQGIDLIAQTLLKPGDIVLVESPCYSAALDIFINKGAQIIPVSLDNLGVRSDLIDDICQSKNPVLLYTNPTFQNPTGTVMSKERRMELIELAELYKFFIIEDDSFGEIYFEGATVPPPIKNFDTNGHVIYIKGFSKTLAPGLRIASLIADGPIFEWLYAVKGSMDIGSPLLTQKALLPFLRAERMKNHLEKLRTALQIRRNITIDMLSPLKEMHFEIPNGGFNLWITLPDSIDPFTLLQKANEVDVSFLPGTACLLNPETNNNHLRISYSMLNEKDMIIGLERLHDTMRKFML

SEQ ID NO: 5613 - protein, 545 aa, Borrelia burgdorferi
  misc_feature (200)..(200): Xaa can be any naturally occurring amino acid
  unsure (1)..(545): unsure at all Xaa locations
MAKDIYFNEDARKSLLSGVEKLSNAVKVTLGPKGRNVLIDKKFGSPTVTKDGVSVAREIELENPFENMGAQLLKEVAIKTNDVAGDGTTTATVLAYAIAREGLKNVSSGINPIGIKKGIDHAVSLAAEKIRQSAKKITTKEEIAQVASISANNDSYIGEKIAEAMDKVGKDGVITVEESKTFDTTISYVEGMQFDRGYLXPYFSTNKENMSVSFDDAFILIYEKKISSIKELLPVLEKVLGTNKPLLIIAEDIEGDALAALVLNSVRGALKVCAIKSPGFGDRRKAMLEDIAVLTGGVLISEELGLTLETVEIEQLGQAKTIKVDKDNTTIINTGNKEQIKERSELIKKQIEDSTSEYDKEKLQERLAKLVGGVAVINVGAVTEVELKEKKHRVEDALSATRAAVEEGVVPGGGSTLIEVAMYLDTIDTSKLSYEEKQGFEIVKRSLEEPMRQIISNAGFEGSIYIHQIKTEKKGLGFDASSFKWVNMIESGIIDPAKVTRSALQNAASIAGLLLTTECAITDIKEEKNTSGGGGYPMDPGMGMM

SEQ ID NO: 5614 - protein, 359 aa, Oryza sativa (japonica cultivar-group)
MAGDGLPRIAVVGAGIFARTQYIPRLREIAHLVLLKTIWSRTKESAEAAAELARDFAPEIQPRWGDAGLEEIMGDASISAVAVVLAGQVQVDLSLKMLKAGKHVIQEKPASGSTMEAETALSVYNSFPNQFPYKPIWALAENYRFEPAFVESRKLMSDIGDMMNIQVIVEGSMNSSNPYFNSSWRRNFVGGFILDMGVHFIAGLRMMVGSEIATVSSISRHVDKALPPPDNICSLFQLENGCAGVFVFAVNSRTPKILWRVDGTRGTVQIERGIASGKHGYQVLFTNENGQCQTTFYPFCGVNEELKAFVHDIVQANKDGDHKAEPRSSYVEGARDVAVLEAMLESSAKQGTMVQVKKF

SEQ ID NO: 5615 - protein, 339 aa, Bacillus pseudofirmus
DQVLKKDGTPYKVFTPYYKAWAKERKRTPAVIKRDVLLGSVHKGTAPDREAETLFNNLIKKCSYDWSAIGEEHAIKRLQMFTKKRLSGYKANRDFPSITGTSRLSPYIKTGAVSSRSIYYHILNAEADSYSAETFLKELAWRDFYRMVHFYEPDCKDREIMEGYRELNWSHDQDDLTSWKRGETGFPIVDAGMRQLLNEGWMHNRLRMITASFLTKDLLIDWRLGERYFERMLIDYDPSSNIGGWQWAASVGTDAVPYFRIFNPVTQSKRFDENGTYIRTYIPELNHVPDHYIHEPWKMSEEEQVKYKCRLDEDYPLPIVDHSKQRKKALSFFKGDDEE

SEQ ID NO: 5616 - protein, 467 aa, Oryza sativa (japonica cultivar-group)
MGGSREEDRQHHNHLPSELPLGFRSSSPTTMIASSSMSKESSNYDMADFDQASLFLYLDSHDQQSIQEQRQTLNIFPSQPMHVADPAHEAKSAGVAMAMLPNGNQLQVLPSHPSKKPDQQGGQKINSSVPTNPPGPNLPLPNSAKDNKNSSLIKKEGSSSGKGATTSNDPEREGRRTLDPKTLRRLAQNREAARKSRLRKKAYIQQLESSRIRLSQLEQQVHVARVQGAMLGAGDQHQGLPSGPSAASLFDLEYGRWVEEHSKLIFQLRAALNEQMADSQLQVFVNGAMAQHDELLSLKGAIARADIFHLLCGVWATPAERCFLWLGGFRPSEAIKVMLKQVEPLSEGQLMSIYELQQAAKGTEDALSHAMDGLQQSLSDTVAAPDVAAAGGFMGHMSLAMNKISAMEDIVRQADGLRQQTLHKLQHMLTIRQAARCFVAISDYFHRLRALSTLWVARPRPEEGPAM

SEQ ID NO: 5617 - protein, 602 aa, Oryza sativa; identical to SEQ ID NO: 1154

SEQ ID NO: 5618 - protein, 87 aa, Hordeum vulgare subsp. vulgare
MASKWVRPEVYPLFAATGVAIGICAFSLLRNITGNPEVRVSKMGRAAGVLENHEEGRRYAEHGLRAYVQDKTPEIMPGINKFFTSPK

SEQ ID NO: 5619 - protein, 541 aa, Debaryomyces hansenii CBS767
MDYSQRLSQLDSLPVLKHVSVGQTIGQGTFAVVKVASIRNNPLKLVAIKYIHRAISHSKGIDDNRIGLELSIHKECSGHPNMIKLHMFGTDNTWIYMVMELAESGDLFDKIEPDIGIDEELANFYFTQLINAVDFMHQKGVAHRDIKPENILLDKDGNLKLADFGLATIFKRKGSQKRLSYEKCGSPPYMAPEIIGDDGYDATMSDIWACGIVLFVLLSGQIPWQEPNYKHDEEYTKYVDFDGRILDTPWNQFSQTVRPLLRSIIKPDVGRRFTMDQIRLHPWVNQENSFMDSNKLCNDSEGLAERLLSNLQVGLSDEDIKTTLSETSQEQERNLLNNKKFISNSQPTNDIAVMIDDEFDIPVIPATQDPVTHKDSPFINDITDAHEEMLAIVSKDPTILQFKNTPQYRMSQLSTTQKNLLAFKNMPFKTAERMTRFFSILPIESLVPIIRDSLHRIGVSTTSIDNYSMEELTEQNHIYINVNIIAEKSKMPLRGYIKILKCDIRLPLRKVEFIKSKGDPLEWRHFFKKVTILSRDAVYID

SEQ ID NO: 5620 - protein, 313 aa, Glycine max
MAKSIKFFELNTGAKIPSLGLGTWQAEPGVVAEALTTAIQVGYRHIDCASAYKNQAEIGSALKKLFDDGVVKREDLWITSKLWCSDHAPEDVPKALDKTLQELQLDYLDLYLIHWPVRMKSGTFGLNKEYLEQPDIPNTWRAMEALYDSDKARAIGVSNFSSKKLQDLLDIARVVPAVNQVELHPGWQQPKLRAFCESKEIHLSGYSPLGSPAALKSDILKNPVVTEIAERLGKTPAQVALRWGLQAGHSVLPKSTNESRIKGNFDIFDWSIPQDLMTKISEIKQERLVKASFFVHETYGAYRSIEDFWDGEL

SEQ ID NO: 5621 - protein, 144 aa, Physalis cinerascens
DTQEWNPATDKYTDVKYDITTVMDAKPLLKEALQAAVGLPVDRNIPVIGFIGRLEEQKGSDILVAAIHKFIGLDVQIVVLGTGKKEFEQEIEQLEVLYPDKAKGVAKFNVPLAHMIIAGADFMLVPSRFEPCGLIQLHAMRYGT

SEQ ID NO: 5622 - protein, 162 aa, Debaryomyces hansenii CBS767
MDKTSFYDFKPLDVYGEVYDFSQLKGKVVVIVNVASLCGFTLQYKDLEYLYKTYKERGFVVLGFPCNQFGSQEPYTEREILQICEKKFGVTFPIMDKIEVNGECEDPLYGYLKNEQRTSLGFKGIKWNFEKFLISRSGRVVKRYDSTVAPLNFEKAIVELLE

SEQ ID NO: 5623 - protein, 964 aa, Brassica juncea
MPHGKLEKMASMDVHLRQLVPGKVSEDDKLVEYDALLLDRFLDILQELHGEDLRETVQELYEHSAEYEGKHEPKKLEELGNVLTSLDPGDSIVIAKAFSHMLNLANLAEEVQIAYRRRIKKLKKGDFVDESSATTESDLEETFKKLVGDLNKSPEEIFDALKNQTVDLVLTAHPPQSVRRSLLQKHGRIRDCLAQLYAKDITPDDKQELDEALQREIQAAFRTDEIKRTPPTPQDEMRAGMSYFHETIWKGVPKFLRRVDTALKNIGIEERVPYNAPLIQFSSWMGGDRDGNPRVTPEVTRDVCLLARMMAATMYFNQIEDLMFELSMWRCNDELRVRADELHVNRRKDAAKHYIEFWKSIPTTEPYRVVLGDVRDKLYHTRERARQLLSNGTSDVPEEATFNNLEDFLEPLELCYRSLCSCGDRPIADGSLLDFLRQVSTFGLSLVRLDIRQESDRHTDVLDAITTHLDIGSYREWSEERRQEWLLSELSGKRPLFGSDLPKTEEIADVLDTFHVIAELPSDSFGAYIISMATAPSDVLAVELLQRECHVKRPLRVVPLFEKLADLEAAPAAVARLFSVDWYKNRINGKQEVMIGYSDSGKDAGRLSAAWQLYKAQEELVKVAKEYGVKLTMFHGRGGTVGRGGGPTHLAILSQPPDTINGSLRVTVQGEVIEQSFGEEHLCFRTLQRFTAATLEHGMRPPVSPKPEWRALLDEMADVATEEYRSVVFQEPRFVEYFRLATPELEYGRMNIGSRPSKRKPSGGIESLRAIPWIFAWTQTRFHLPVWLGFGGAIRHVVEKDVKNLHMLQDMYKNWPFFRVTIDLIEMVFAKGDPGIAALYDKLLVSEELWPFGDKLRANFEETKKLVLQTAGHKDLLEGDPYLKQRLRLRNSYITTLNVCQAYTLKRIRDPSYHVTLRPHISKEIAESSKELIELNPTSEYAPGLEDTLILTMKGVAAGLQNTG

SEQ ID NO: 5624 - protein, 460 aa, Geobacillus kaustophilus HTA426
MAVTMEEIVAHAKHRGFVFPGSEIYGGLANTWDYGPLGVELKNNIKRAWWKKFVQESPYNVGLDAAILMNPRTWEASGHLGNFNDPMVDCKQCKARHRADKLIEKALEEKGIEMIVDGLPLAKMDELIKEYDIACPECGSRDFTNVRQFNLMFKTYQGVTESSANEIYLRPETAQGIFVNFKNVQRTMRKKLPFGIAQIGKSFRNEITPGNFTFRTREFEQMELEFFCKPGEELQWFDYWKQFCKDWLLSLGMKEDNIRLRDHAKEELSHYSNATTDIEYHFPFGWGELWGIASRTDYDLKRHMEYSGEDFHYLDQETNERYIPYCIEPSLGADRVTLAFMIDAYDEEELEDGTTRTVMHLHPALAPYKAAVLPLSKKLADGAHRIYEELVKHFMVDYDETGSIGKRYRRQDEIGTPFCITYDFESEQDGQVTVRDRDTMEQVRLPIGELKAFLEEKIAF

SEQ ID NO: 5625 - protein, 482 aa, Salmonella enterica subsp. enterica serovar Paratyphi A str.
MQLNDSTLFRQQAFIDGDWRDARGGDVIPVSNPANGKPLGNVPKMGAEETRDAINAANRALPAWRALTAKERANILRRWFNLMMEHQDDLARLMTLEQGKPLAEAKGEISYAASFIEWFAEEGKRIYGDTIPGHQTDKRLLVIKQPIGVTAAITPWNFPSAMITRKAGPALAAGCTMVLKPASQTPFSALALAELAQRAGIPAGVFNVVTGSAGDIGGELTSNPLVRKLSFTGSTEIGRQLMEQCAKDIKKVSLELGGNAPFIVFDDADLDKAVEGALASKFRNAGQTCVCANRLYVQDGVYDRFAEKLNQAVNKLAVGDGLQADVAIGPLIDEKAVAKVQEHIADALEKGARVITGGEAHKLGGNFFQPTILVDVPDNAKVAKEETFGPLAPLFRFSDEADVIRQANDTEFGLAAYFYARDLSRVFRVGEALEYGIVGINTGIISNEVAPFGGIKASGLGREGSKYGIEDYLEIKYMCIGL

SEQ ID NO: 5626 - protein, 285 aa, Geobacter sulfurreducens PCA
MWDYTEKVREHFLNPRNVGEIPDADAVGEVGSLACGDALKLYIKLDEAKEKIVDAKFQTFGCASAIASSSALTEIIKGKTLDEALATTNQEIAEFLGGLPEEKMHCSVMGQEALEVAIAKFRGGPVPTHHDHGHEEAEGEIVCKCFGLTDVFLRKVIETNKLTTAEQVTHFTKAGGACGGCIPKIKEIINEVLGAKPAEEHKRPEKLTNLRKMQLIQETLEKEIRPQLWADGGDLELIDISGSEVQIAFRKACAGCAASGNTAKFVEMKLRELVAEDITVTEVEG

SEQ ID NO: 5627 - protein, 398 aa, Geobacillus kaustophilus HTA426
MNQTAISQRKLLGIAGLGWLFDAMDVGMLSFLMAALQKDWNLTASQVGWIGSVNSIGMAVGALVFGLLADRIGRKNVFIVTLLLFSIGSGLSALTTTLAAFLALRFLIGMGLGGELPVASTLVSEAVPAKDRGRVVVLLESFWAGGWLLAALISYFVIPAYGWRTALWLAAIPALYAIYLRLRLPDSPRFAAAQKEETVWSNIVKVWSAPHRKETVMLWLLWFCVVFSYYGMFLWLPSVMVMKGFSLIKSFEYVLIMTLAQLPGYFSAAWLIERAGRKFVLVTYLLGTALSAYFFGTAESLVGLMASGIFLSFFNLGAWGALYAYTPEQYPTSIRATGAGMAAAFGRIGGIFGPLLVGSLVAQGVSVTMIFTLFCLAVLVAVLSVAVLGKETKQQELA

SEQ ID NO: 5628 - protein, 383 aa, Arabidopsis thaliana
MEESRESPAEHGYYMPAEWDSHAQTWIGWPERQDNWRHNALPAQRVFADVAKAISKFEPVTVCASPAQWENARKQLPEDIRVVEMSMNDSWFRDSGPTFIVRKRPVKLSSLNRNIAGIDWNFNAWGGANDGCYNDWSHDLLVSRKILALERIPRFQHSMILEGGSIHVDGEGTCLVTEECLLNKNRNPHMSKEQIEEELKKYLGVQSFIWLPRGLYGDEDTNGHIDNMCCFARPGVVLLSWTDDETDPQYERSVEALSVLSNSIDARGRKIQVIKLYIPEPLYMTEEESSGITQDGEAIPRLAGTRLAASYVNFYIANGGIIAPQFGDPIRDKEAIRVLSDTFPHHSVVGIENAREIVLAGGNIHCITQQQPAEPTSVAENGH

SEQ ID NO: 5629 - protein, 403 aa, Fusarium proliferatum
ILQKGMPWEDGVPGVTQCPIPPKKSFTYQFLADLYGTSWYHSHYSAQVAAGLFGPLVIYGPREKKDYDIDIGPVMLSDWYHKEYFDLVEEIMKPGGNGVVLSDSNLINGKMNFNCSSVAPGDKTPCKSNAGISKFRFKRGKVHRLRLINPSAEAIQRFSIDGHTMKVIANDFVPVQPYDTKVVTLGVGQRTDVLVRANGKLDSYWMRSNISAICSLGRAPAALAAIYYDNANQKKAPKSQAWDIPDPETCANDDLSITKPVMKLPLPPADKTIELDISSFKNASNVTLWTLGGVAARTNYNSPTLLLSKLGNHTFEPEWNVINTGKAKSVRVVVNNKTPVAHPMHLHGFNMYVLHEGPGSWDGTIINRHNPQRRDVVQIRGNGHLVIQFDAGENPGVWPFHCH

SEQ ID NO: 5630 - protein, 582 aa, Moorella thermoacetica ATCC 39073
MRHTKIVCTMGPASERVEVIKAMIRAGMNVARFNFSHGSHAEHGARMAAVRQAAAELGARVALMLDNKGPEIRLGEIQGEVTLKDGDQVTLTTEPIIGDARRLPVSFAGLPGDVRPGQIILLDDGLVELEVLATTATEIHCRVRHGDVISSHKGVNVPGAEISLPPFTEQDIKDLEFGLQQGIDFIALSFVRTAGDVLAVRRELEKRNARVAIIAKIENHAGVNNIHEILEVADGVMVARGDLGVEIPVEEVPLVQKKIIEACNLAGKPVITATQMLESMIHNPRPTRAEASDVANAIFDGTDAIMLSGETATGRYPVEAVATMARIARRAERGLPYGDLLTKKGLAAERTATDAISHASCTIAYELDAAAIITPTASGSTARRVAKYRPRAPILATSPNEKVLNQLCLVWGVEPLLVEPTSGTDEMVNAAVAAAILSGRVKQGDLVVITAGVPAGVPGTTNLLKVHIVGEVLVRGRGIGKEVTSGPVRLVKTAADAVARVKKGDILVTTETGPEFLPAMERAAAVITETGGLSSHAAVTGLSLGIPVVVGAKGATEKLTDDLVVTIDVVRGLVYRGQTRVL

SEQ ID NO: 5631 - protein, 411 aa, Fusarium proliferatum
VHWHGILQKGMPWEDGVPGVTQCPIPPKKSFTYQFLADLYGTSWYHSHYSAQVAAGLFGPLVIYGPREKKDYDIDIGPVMLSDWYHKEYFDLVEEIMKPGGNGVVLSDSNLINGKMNFNCSSVAPGDKTPCKSNAGISKFRFKRGKVHRLRLINPSAEAIQRFSIDGHTMKVIANDFVPVQPYDTKVVTLGVGQRTDVLVRANGKLDSYWMRSNISAICSLGRAPAALAAIYYDNANQKKAPKSQAWDIPDPETCANDDLSITKPVMKLPLPPADKTIELDISSFKNASNVTLWTLGGVAARTNYNSPTLLLSKLGNHTFEPEWNVINTGKAKSVRVVVNNKTPVAHPMHLHGFNMYVLHEGPGSWDGTIINRHNPQRRDVVQIRGNGHLVIQFDAGENPGVWPFHCHIDS

SEQ ID NO: 5632 - protein, 379 aa, Leifsonia xyli subsp. xyli str. CTCB07
MVATNDTPRPANTVQLLTSDGRFQPSEPAGEYLPYLERLDENDYRRFYRDMVRVRAFDHEAANLQRQGQLGLWVPSHGQEGAQVGSAYAARPQDNIFPSYREHVIGMIRGIDPVGIMGLLRGVTHGGWDPTDPAVENFHLYTLVIGSHTLHATGYAMGVKFDGKVGTGNPEADEAVICYFGDGATSQGDVSEALVFAASYQTPQVFFLQNNQWAISVPVKTQSRTPLYLRSSGFGIPGVQIDGNDVLAAYAVTAKHLDDARGGEGPSMIEALTYRMGAHTSSDDPTKYRTDDEVRHWAERDPILRFRAFLEQQGLGQTFFDSADEEAADLAADVRRRTLELTPPPADSMFEHVYSEPHPVMEEQRRWLAEYEASFGGDV

SEQ ID NO: 5633 - protein, 549 aa, Pseudomonas fluorescens Pf-5
MQDWQRSVIYQIYPKSFHSHQGQATGDLLGVVDKLDYLHWLGVDCLWLTPFLRSPQRDNGYDISDYYAIDPSYGSMADCELLIAEAGKRGIKLMLDIVVNHTSIEHAWFQQARSSLDNPYRDFYIWRDEPNNWESKFGGSAWEYEAQTGQYYLHLFDHTQADLNWDNPQVRAEVFKMMRFWRDKGVGGFRLDVINLISKPADFPEDQSDGRRFYTDGPNVHEYLQEMHREVFAGHDLVNVGEMSSTRLEHCIRYSNPGSKELSMTFNFHHLKVDYPNQQKWLRADFDFLELKRILSDWQCGMQAGGGWNALFWCNHDQPRVVSRFGDDGEHRVVSAKMLATALHLLQGTPFVYQGEELGMTNPHFQRIEQYRDVETLNIYRLKREAGEEPQAIMAAIQQKSRDNGRTPMQWNAGANAGFSSGTPWIEVAANAGQINVQAQLDDPQSVLHHYRQLIALRREQGLIQHGVYRQLLPEHPQVWAYVREGQGERLLVVNNFYGSPCEVELPQEVVEPGMQQRLLISNYPGDGARSRHLRLRPYESFVLHLTDC

SEQ ID NO: 5634 - protein, 480 aa, Thermococcus kodakarensis KOD1
MRIEDVYIWDINAKWLGISPVQLMENAGAGVARTIEERFGKGLKVAVFSGTGNNGGDGFVATRHLSFENDVTLFLVGDEAKIRSEEAKHNWEILKKLDFVKIRILKDSSYIKSLDLSEFDVIVDALLGAGTKGEPREPIRSAIEKINEYSGKAKIVSVDLPSGYPSDIRVKCDFAVTFQWDKEEYGGFERVIVKIGYPKELYHLVGPGDAKFALRKKGEHKGQNGKLLVIGGSEDYFGAPYLAAKAASYLVDLVYLAMPEYSARRINDPNVILRPFERRNFRKEDVEDVLAIADGVDAVVIGPGIGQRAETKEFVVEFLRWCEKPVVIDADALKAVAEDLDVLKGKNFVLTPHAGEFRILFGEKPEGSLEEKAKLVVEKAKGVGGTVLLKGAYDIISDGKGWKYNKTGNRGMTTGGTGDVLAGLVGALLALGNSPLRAASAGAFLNGLAGDMVKEEMGENFTALDVAEKVPQAVKWVLEF

SEQ ID NO: 5635 - protein, 468 aa, Ralstonia metallidurans CH34
MNSASTTVPTDLTNERLPSGRLLALGLQHVLVMYAGTVAVPLIVGGALKLPKDQLAFLINADLFAAGLATLIQAFGFWKFGIRMPVMMGVTFASVAPMIAIGNDPNVGLLGIYGAVIASGIFGILIAPMMGRMLGLFPPVVTGTVITLIGVSLMRVGINWAGGGQPTTRAVIDGVAKEVPNLAYGDLSNLAIAGLVLAVILLLSKYGRGLVANCAVLLGIIIGTLVAMALGKVSFEGLNEASYVAVITPLHFGIPKFELTAILSMCIVMLITLVESTGMFLALSDITGRKLSRDDLTAGLRADGLGTVIGGIFNTFPYTSFSQNVGLVTVTGVRSRYVAAAGGLILIAFGLFPKMAHVVASVPQFVLGGAGIVMFGMVAATGIRILGSCDFNRNRHNLFIVAISIGFGMIPTLSPTLFQYLPKWTDPFTHSGIVLGTIVAVALNLFFNGIQSAEEAMRNAAANSHGTE

SEQ ID NO: 5636 - protein, 241 aa, Petroselinum crispum
MASNGESKHSEVGHKSLLQSDALYQYILETSVYPREPEAMKELREVTAKHPWNLMTTSADEGQFLNMLLKLINAKNTMEIGVYTGYSLLATALALPDDGKILAMDINRENYEIGLPIIEKAGVGHKIDFREGPALPVLDHMLEDGKYHGTFDFVFVDADKDNYINYHKRLIDLVKIGGLIGYDNTLWNGSVAQPADAPMRKYVRYYRDFVIELNKALAADPRIEICMLPVGDGVTLCRRIS

SEQ ID NO: 5637 - protein, 589 aa, Xanthomonas campestris pv. campestris str. ATCC 33913
MKTINENAPQVSSWQTYRRLLAFAKPYRLLLVAALIAALIEAAGTTGFLALMKPITDETFIYKNAEVSRWLPVQIILLFVIRGAAGYITDMAMGKSARSIARDLRVKVMSKYLRLPGSRFDSEPVPSMLIRLGSDSDQVAQAAVDAVKVMIQQSLQVIGALALMLWHSWQVTLTILVLAPVLAWVMDKVARRYRRISHSIQESGAHLLQAADQTLSSHQEVKIYGAQQSEMERYSGLADRNLRLAMKVESTRGISTATVQMIGAIGLSALLFVAGAQALAGRLTAGDFVVLMTSMLTIIPGLKQLTNVQNMVQRGLASAERLFSVLDSPDEPDQGQVPLTRAKGLIEFRDVTARYPGQANPALADVSFVAQPGTVTAIVGRSGSGKSSLIKLIPRFYEAESGQILLDGHPVQAYALADLRRQIALVGQQVMLFDGSIAENVAYGEMRQCDAGQLERAIQGANAMEFVAQLPEGLQSHVGTKGGRLSGGQRQRLAIARAMLKDAPILILDEATAALDNESERLVQDALHKLMPDRTTLVIAHRLSTIEHADQVLVMDQGRIVERGTHQELLALGGLYSHLHGMQFRERQA

SEQ ID NO: 5638 - protein, 545 aa, Borrelia burgdorferi
MAKDIYFNEDARKSLLSGVEKLSNAVKVTLGPKGRNVLIDKKFGSPTVTKDGVSVAREIELENPFENMGAQLLKEVAIKTNDVAGDGTTTATVLAYAIAREGLKNVSSGINPIGIKKGIDHAVNLAAEKIRQSAKKITTKEEIAQVASISANNDSYIGEKIAEAMDKVGKDGVITVEESKTFDTTISYVEGMQFDRGYLSPYFSTNKENMSVNFDDAFILIYEKKISSIKELLPVLEKVLGTNKPLLIIAEDIEGDALAALVLNSVRGALKVCAIKSPGFGDRRKAMLEDIAVLTGGVLISEELGLTLETVEIEQLGQAKTIKVDKDNTTIINTGNKEQIKERSELIKKQIEDSTSEYDKEKLQERLAKLVGGVAVINVGAVTEVELKEKKHRVEDALSATRAAVEEGVVPGGGSTLIEVAMYLDTIDTSKLSYEEKQGFEIVKRSLEEPMRQIISNAGFEGSIYIHQIKTEKKGLGFDASSFKWVNMIESGIIDPAKVTRSALQNAASIAGLLLTTECAITDIKEEKNTSGGGGYPMDPGMGMM

SEQ ID NO: 5639 - protein, 3515 aa, Angiococcus disciformis
MTPSGDEALQSSIALVGMAGRFPGAPDVESFWRNLVAGVESISFFSEEELRQAGVSEQIRRRPEYVPAKGVLEDLELFDAGFFGYSPREASHLDPQQRLLLECSWEALEDAGLRPDQLPGWVGVYVGAGDTSYRFQLLRGHGDPLSGSKDVAGFFGNYPDFLATRVAYKLNLRGPALGIHTACSTSLVSINMACSALRGFECDMALAGGVSLRLPARSGYLYEEGGVASKDGHCRPFDARATGTVTGDGVGVVVLKRLEDALKARDPIHAVIRGWALNNDGASRAGFTAPSVEGQSEVIALAHAAAGISARDITYVEAHGTGTPLGDPIEVAALTRAFRAHTADTAFCTLGAVKSNIGHLDAAAGVAGVIKTVQALRHRLIPPTLHFERPNPALHLEQSPFFVNTQPLPWESPRGPRLAGVSSFGIGGTNAHTLFEEAPPPPASGPTRPNQVLLLSARSTSALEHIAGRLAAHLRRHPDLELADVAFTLQVGRARFPYRRALTCRTLAEAMERLEAPEPRPPEPLAHEGERPPLVMLFPGQGTPLVGTARALHESEPTFRQAVEQCARLLRQTLGLDVREVLFPSAEQEEQARRLAAQTRVAQPALFTLEYALAQTWLGWGLQPQALAGHSLGELVAACLAGVFSLEDALQLVAARGQLMQGCPPGAMLAVPLPEAELAALLGSELCIAAVNGPRACVASGPLPAVEALTAALESRGVSSRRLETSHAFHSASMEACQGPLTTLLRRMRLQAPRLPCVSGLTGRWLTGEEATEPTYWARQLREPVRFSEALETLWSLKEPVLLEVGPGTTLTALARRHPTRPARTQEVASLPVQPDTAVPCIEEAVGELWQAGLELDWSALHAAPRHRAHLPPYPFERQRYWIEPEAAPQPRAQQPTPASLVPPEQPSREALEDWFYVPTWEQAPATSGGGQPLAGPVLAFMDSSGLAEQVLAALWPADSGALLTRVEPAGHYEQLSEHAFRLRPESEEDWDALFQALQSQGRLPRRILHAWALTAEPGPCTPDGEAVLEQGFFSLLRLARALGRHAPERPVQLEVLSSFVHAVGPREPLEPLKATLLGACAVLPLEYPHVQCRTIDVRPGSEPREVLVRSLAAELAAPMGESPVAWRDGQRYVRRATRQRLEASRPLRSLRERGVYLVAGGLGGIGLVLARALAQRARARLALLTHSPFPPREQWEQWLEEAPAHPEPAWRSEADPSERRRTQHRIRCLLELEQLGAEVQVYTADVAEEAAVRSVVEQVHARWGKIHGVLHAAATFDDGVIQLRTHEQSSRALRTKVRGSMVLHEVLASEGLDWFALCSSLASALGSFGQADYCAANAFQDAYAHHLRRQGFTGALALDWGTWRDTGAAMRLVARTRRGGHEKPPTPLTHPLFDCEQREPGGTHWLGLTLRGGEDWVVDEHRLQGVPTLPGVAYLELARAACAQALGAEAVELAELLLLEPLTVPRGESRQVRVVLQPEGQAHALRVESRSEEARGWNEHARGRVRAVPRLAERIQPELLRAACEHEQPVPGEPQEQGPVHAGARWHGLFQWVRRGPRQALAQLALPEPFHGDLERFELHPALMDMATSFAIPGGVPWLAFGYERVLIHGPLPPQVLSHVSLPEESQAGAQQLRLQVRLLDLEGWERVRIDGYLLRPLKPSDASVEPAAPNVEVAVGTPGLLESLGLRRCTRPAPGPRQVEIEVEAAGLNFLDVLGALGMMPALEAEESVLGRECSGRIAAVGEGVSGLRVGDEVLAVAPGCFRSYVLVDESQVVRRPASLGLAEGAAQMVPFATAYFALHTVGRLRRGERILIHAAAGGLGLAAVQLASRTGAEILATAGSEQKREYLRSLGIAHVLDSRSTSFVSEVRERTGGRGVDVVLNSLAGELLLAGLSVLAPHGRFLELGKRDLYADQQVGLRTLARGQTFAAIDFGPHHPDFRAVLEEVATQLTQGQLEPLPTRLFPARQVAEAFSFMARALHIGRVAVSMQGATALPASMTRGSRPAPVAVPPWEDPRLAGGISSEEGAEAFLRALEQGAPQLIISPQDFSSLLRGLGGSQGVREKERLVTGRAAAAEPQALPPSSLEQLIEQVWRKHLGVERVQPTDSFFQLGGDSLLGIQVAADLRRHLGVELPTATLFSHPTLAALAAALRARQGEAAAPTAPAPALVPDPAARFEPFPLTDVQEAYWVGRRSAFELGGVAAHGYFEIESPGLEVERFIQCWRQLLQRHDMLRMVVLPDGRQQVLEQVPEYTPEVVELRGLSPQEAESRRLQLRERMAHQVLRSDRWPLFELVLCRYEGGVRIHMSMDALMLDAWSSAVLRQDFAQLYHEPGRPLEPLAITFRDYVLAERRLREGEAHERARAYWWARLDTLPPPPELPLVKEPSQLEHARFTHREARLEPHRWARLQERARAHGLTPSAACMAAFAEVLARWSRHPRFTLNLTLFQRLPLHPQVDELVGDFTSLVLLEVEAHAASTFAERASRLQAQLWRDLEHGSVSAVQLIRELVRTGRRSPGAIMPVVFTSILSLDARRGPQGSLSFFEGELVYSISQTPQVWLDHGVHEEEGALVLAWDSVEALFPPGMVDDMFHAYQRLLGALAEEEQAWEGELPELLPPAQRELLARYNATQAPRPSGRLEEGFFTQARLHPELPALLAPERTLSYGELARRAQALAARLRELEVQPQELVAIAMHKGWEQATAVLGVLQAAAAYLPLDPEQPPLRLHQLLEEGPARVVLTQSSLLHTVPWPPGVQVIAVDELEPATEAPPLPPRGTPEHLAYVIYTSGSTGKPKGVAIEHRAALNTVVDLNTRFGVGPEDRVLGLSALTFDLSVYDVLGLLGAGGALVLPAAEAEKDPAHWWERLVAGRVTVWNSTPALMLLLVEYAEQRGLKLPAALRLVMLSGDWIPVALPDRIRALGRDVQVVSLGGATEASIWSIAYPIGQVAPQWKSIPYGMPLANQRFHVLDGRLEARPWWVPGELYIGGEGLAREYWRDEPLTATRFIRHPRTGERLYRTGDQGRMLPEGSIEFLGREDLQVKVQGFRVELGEIEAALAQHPALSASVVVARGEPRGVRRLVAYAVPRSGQTPAAGELRRYLAERLPAYMVPSAFVLLESLPRSRNGKIARDQLPEPQQTQGLAAQAAAADPLVERLAALVKEALRLERVEPQDSLLDLGADSVALIRLINRLEAELQFRPRLADIYENPTVQGLATLHQEKTKSQGEGGAPRLTAPRSTLLPAEEWGRFKANRPGLRRFPDGTPEVALPGSGLAPAPEELTALERRRSVRTYSLEPVSHEQLGRLLAPLREWEVQGSRRYLYASAGGLYPVQLYLHLKPGRARGLEPGTWYYDPSTHRLVLLSAGAGLDRRIHDPHQNQAIFDSAAFSLFLIARMGAVEPVYAEHALHFATLEAGLMTQLLDLGAAPSGLGLCHIGDLDFAQARGLFHLEEEHVLLHSLVGGVLPTRGQEAASVPAEGGTEARQLAQLLQQVKTLTPEAARALLEARRGSKGRPHE

SEQ ID NO: 5640 - protein, 464 aa, Thiobacillus denitrificans ATCC 25259
MLRAALAMTSFVFVLAAPVAEAVDVADLVEKQGPAVVNISTTKLVKRGAEGFPFAVPEDPEMQEFFRRFFPGVPGRAPGAPAQEFPAHGAGSGFIVSSDGYILTNAHVVKGADEVVVKLTDKRKFIAKVVGSDPRTDVAVIRITARNLPAVRLGDPEKLRVGEAVAAIGSPFGFENSVTAGIVSAKGRSLPSESYVPFIQTDVAVNPGNSGGPLFNMRGEVVGINSQIYSQSGGYQGVAFAIPIDIAMEVVDQLKAGGKVSRGWLGVMIQEVSADLAESFGLDRPRGALVSQVQDGSPAARAGVQTADVILSFNGKPVENSGDLPRIVGSTKPGSKIPMQVWRRGKMQTLQVVLAELPSEEQVAGAGKSGKSYSRGGLALSELNPEQRRELKIDHGLLVEEVTGDAARAGIRVGDIVLAVNNARIATVDAFRQAIAAIPKGKSAALLVRRGEGSLYIPLKISGE

SEQ ID NO: 5641 - protein, 604 aa, Yarrowia lipolytica CLIB122
MSSYDSHLLGSSAETAPIAISETPQKKKGGHFNRTPNSAGAAFGSLGRSGVRVSYNYSDEDDDDETNDDSEFDDASSMYSTQAERATQEQEELLKKARPQANYGGTSNGNNNNNNSYGGTTTHARTREERRAVYKAFDAAVRKGEIQTTASTETKTILKYSAPLTMTFLMQYSLTVASVFSVGHLGKNELAACSLASMTSAITGFAVVHGVATCLDTLCAQAYGRKDYKMVGVHFLRCTIFLWIIAVPIILLWAVFGRQLLHLLLDDPELIHFAALYLEVLACGFPAYILFENLKHYLQSQGDFNAGTYILLICAPINISLNYLLVWNEHFGLGYVGAPIAVVFTDWLMATMLSLYVVFINGRKCWCGFRPDNLFTGWGRMIRLAIPGIIMVEAEWLAFEIVTFAASRFGTDALACQSVLVSVCGIIYQIPFAIGIAASTRIANLVGANLTAAARISARMAAVISLVFGVLNMAFMLGLRDTIGKMFTNDEAVLQLVRETMPFAALFQVNDSLGVISGGILRAQGRQRIGGYLNLFFYYVVGLPAGVIFAFHWGYGIEGFWIGLTIGVFFVSILQLYFVWKSNWREIVKDALRDGKTQAATTHA

SEQ ID NO: 5642 - protein, 2837 aa, Angiococcus disciformis
MSHDTQLEGAVAVVAMAGRFPQAPTLEDYWRIIHEGVDAFTQLTDEQLLASGVGPSLLRQPGYVRRAALLDRMDQFDAAFFGFSPREAEVLDPQHRLFLECAHEALERAGHGSERARGRVGVFASASLNSYYLHSLHGNARLREVLGDFQLAIANDKDFLPTRVSYKLGLRGPSVAVQTACSSSLVAVHLACQSLLNGECALALAGGSSLSVPQAQGYLYQEGGIASPDGYCRPFDAAAAGTNRGNGVGVVLLKLLEEALADGDTIHAVIRGSAVNNDGAHKIGYTAPSVEGQASVISEALEVAAVSADSIGYVEAHGTATALGDPIEVQALTRAFRKHTERRGYCALGSVKANIGHLDAAAGIASLIKAVLVLERRQLPPCPHFTSPNPRIDFERSPFYVSGRGQPWEPVDGPRRAGVSSFGIGGTNVHVVLEEAPPRPAPRRAARPYQLLPLSARTERAREEVEARLREHLRQQPQEPLEEVAHTLQVGRRHMAWRTALVSSSPAQAVELLERRRPEALLRGQSAAQARSVAFLLPGQGSQYVGMGAALHESEAPFREQVDLCAGKLQGVLGLDVRRLLYPGPREREWAQERLRETRVCQPVLFTVEYALARLLEAWGIRPTALLGHSLGEYVAACLAGVFSLEEALEVVAARGQLMGSMPPGGMLAVGLPAQEVEPLLPAALALAAHNSPQACVVAGPTEPLAELRARLEQRGIACTPLAVSHAFHSPMMEPAVAPFVARLRRMHLRPPSLPFISNVTGTWIEAEEATSPEYWGRHLLQPVRFAQGLERLCEGVQPRLLLEVGPGHTLGRLAARQSSGPVQVVSTLGSSREESSEVERLLTAIGRLWVEGAEVDWAGLHRGERRRRAVLPTYPFEHQRYWVETAPQPSPPERPGTPAESPVTSSFYVPGWSRAALPSAAPSRRVGRLLLLAEAHGWSQGLAERLRARGHSVTLVEPGERLERLTPEHWRLPPGRREDFQRLLEDSGELPSRVLHLWLLGSSQSPQERGFYTLLALAQALGAHGTRPAVELTVVTDQLYAVAEGEPIQPLKALLQGPASVLPQELPGCTCRLVDMALPPGGVAEELLERLVAEVESTASERSVAYRGAARWVREFVPVPLPPPEPSQLPLRQRGVYLIVGGLGGVGLALAEHLARRVSARLVLTGRSPTPPRESWSAWLGTPTRLRLSQELEWLRGAAEQIEHQRPLHSLADSPGLEESLRLLCASYLYHFLFPLQAPLRLGEPRAMQALRERLGLQPGFERLFSFMIGTLEQAKLIRVGEGMLEGQVEPAHVPTPRALHERLLEGYPEVSGLLELLEHCVRHYPEVLRGSLPALSVLYPSGRSEEDSARSGVEWSSMGQCVALLRHFLARHAERTQGRTLRILEVGGGSGVVLQALLPLLRHHPVEYHFTDIGPSFVRAMEGVGRRQGLTFLHTSVLDISRPPPEQGHPPGSYDLVIALNVVHATPRVPQSLAHLESLLVPGGHLCLVETVKQQPWVDMIWGLAEGWWSYEDELRTRSPLLEVGDWEHALRDVGFAEVEVLPAAVEQRSRWDNVLLIAQRPGESGLQPVGGRAAMQERIRRLRAIEEAGGEVLPLVADVTDRERMGEVLAEVKRRHGALHGVIHAALVLEDGLMQLKTRESAGRVLASKVEGTLVLDELLRDEPLDFFVLCSSLSALLGALGQADYAAASAFLDAYAHSQRGRTDRRTISMDWDRWLEVGAAMRLGLGLAAGALGLQRTAPGEYTVRWQAERCWWLDEHRLEGRATLPGVAYLELVRAALVQELGEAPVELEQLVLLSLLEAPAGEEVEVRFHLRPEDEGYALEIRSRAGGLANGGWRSHAMGRVRMLPRGSARPTHPLRELEERLGLTQAPREHEPAQGPRELAPALGRRWSSLSWHRAWKGEEGLALIELPEELAEDLRQWPLHPALLDAATGFAPLPPGAWLPLSYGNTRIHGPLPRQLYSHIRRLEPASAQAGVVRLEVRLMDGEGRELLCVEEFVLRRVEVDSLARPQPAGKAPRQAVLPRPGALDSLRLQPLERLPPQEGEVEVQVLAAGLNFKDALLALGALPVELANGAPLALGVECAGIISAVGPGVRGLRVGEAVVAAAAGAFASHVRVPQEQVFPKPAGLSFEQAAMVPVTLFTAWYALEELARLRAGEHVLIHAAATGVGLAGVKLALRRGATVYATAGSEPKRELLRSLGVTLAMDSRAPGFDDQLLQHTQGRGVDVVLNSLSGEFLSRSLGVLARHGRFVELGVRDMLSGGTLPLAPFERGLTFLAAQIDPGMKGYRELMGEALRQIERGELEPLPYTAWPLERVAEALQLVSKGRHVGKVVLTPEEPLSRPPALPSSSRPVQPRAGVAIVGLRSAEGCEAFERILAAGLPQVAVSTRELRARMAEIERLRVSSWEPALPSVPRGSPARTERSKPYVAPRTERERALAALWQDLLGVSEVGLDDDFFELKGDSLLAIQLMGRLRKELEVELPLSSFLARPTLRTLLSAMPAPATDEPASATGAIPAAAPQPSPAVSSEPARKWRHLVPIQPQGESPPFFWAAPLMGTVFPYFTLARCLAPTHPFYALQPPGLQEGQEPMDKVEELAALYVRELRELQPRGPYRLGGWSFGCVVAYEVALQLEAAGEQVALLSLLDFPAPSGQRASLWATARFFSGSVLRGLAPYTLDYLYLAARAPLNPDAASRLSSSLTRGWERLRKGGLVQELLDHAAMARVVPEDSRLLLLREPGIAPMLRLTRAHQRAMLSYRPRGRLRQRIVLFRTSEQAWSFARDLGWGALSASGVDVREAPGDHMTLLRPPHVERVAEQLRALLSSAPLPTRR

SEQ ID NO: 5643 - protein, 354 aa, Xanthomonas campestris pv. campestris str. ATCC 33913
MRKGAALIVGVTGISGYNLANVLLADGWTVYGLARRPLSHEGVIPVAADLLDAEATKTALQGLPITHVFFCTWTRRDTERENVEANGAMMRHLCDGLSEAPLQHMALVTGTKHYLGAFENYGSGKAETPFRESEPRQPGENFYYTLEDLLFQHAEQHGFGWSVHRSHTMVGIANGSNAMNMGVTLAVYASLCKHTGQPFVFPGSQAQWNSLSDVTDAGLLGRQLAWAGLSPAARNQAFNTVNGDVFRWRWMWGEIAKFFGLEAAPCPQTPEPLEARLSDTAPAQWAELAAKHGLVEPDVNRLASWWHTDADLGREIECVNDMTKSRELGFLDFYDSRAAFLELFTRLRAQRIIP

SEQ ID NO: 5644 - protein, 279 aa, Oryza sativa (japonica cultivar-group)
MLIQWLKLVDDVAKLGDFFMAYVQQLENSRLKLTQLEQELQRARQQGIFISSSVDQTHSMSGNGALAFDMEYARWLEEHNRQINELRSAVNAHAGDNELRGVVDKIMSHYEEIFKQKGNAAKADVFHVLSGMWKTPAERCFLWLGGFRPSELLKLEPLTEQQLSGIANLQQSSQQAEDALSQGMEALQQSLAETLAGSLGSSGSTGNVANYMGQMAMAMGKLGTLENFLRQADNLRQQTLQQMQRILTTRQSARALLVISDYSSRLRALSSLWLARPKE

SEQ ID NO: 5645 - protein, 330 aa, Pectobacterium carotovorum
MSQSTLKVNELHEDTDFEENGLDVFDDKALAEEDTNDNDSAEDELLSQGVPQRVLDATQLYLGEIGYSPLLTAEEEVYFARRALRGDVPSRRRMIESNLRLVVKIARRYNNRGLALLDLIEEGNLGLIRAVEKFDPERGFRFSTYATWWIRQTIERAIMNQTRTIRLPIHIVKELNVYLRTARELSHKLDHEPSAEEIAEQLDKPVDDVNRMLALNERITSVDTPLGGDSEKALLDILADEKDNGPEDTTQDNDMKQNIVKWLFELNAKQREVLARRFGLLGYEAATLEDVGREIGLTRERVRQIQVEGLRRLREILQVQGLSIEELFRE

SEQ ID NO: 5646 - protein, 964 aa, Brassica juncea
MPHGKLEKMASMDVHLRQLVPGKVSEDDKLVEYDALLLDRFLDILQELHGEDLRETVQELYEHSAEYEGKHEPKKLEELGNVLTSLDPGDSIVIAKAFSHMLNLANLAEEVQIAYRRRIKKLKKGDFVDESSATTESDLEETFKKLVGDLNKSPEEIFDALKNQTVDLVLTAHPTQSVRRSLLQKHGRIRDCLAQLYAKDITPDDKQELDEALQREIQAAFRTDEIKRTPPTPQDEMRAGMSYFHETIWKGVPKFLRRVDTALKNIGIEERVPYNAPLIQFSSWMGGDRDGNPRVTPEVTRDVCLLARMMAATMYFNQIEDLMFELSMWRCNDELRVRADELHVNRRKDAAKHYIEFWKSIPPTEPYRVVLGDVRDKLYHTRERARQLLSNGTSDVPEEATFNNLEEFLEPLELCYRSLCSCGDRPIADGSLLDFLRQVSTFGLSLVRLDIRQESDRHTDVLDAITTHLEIGSYREWSEERRQEWLLSELSGKRPLFGSDLPKTEEIADVLDTFHVIAELPSDSFGAYIISMATAPSDVLAVELLQRECHVKRPLRVVPLFEKLADLEAAPAAVARLFSVDWYKNRINGKQEVMIGYSDSGKDAGRLSAAWQLYKAQEELVKVAKEYGVKLTMFHGRGGTVGRRGGPTHLAILSQPPDTINGSLRVTVQGEVIEQSFGEEHLCFRTLQRFTAATLEHGMRPPVSPKPEWRELLDEMAVVATEEYRSVVFQEPRFVEYFRLATPELEYGRMNIGSRPSKRKPSGGIESLRAIPWIFAWTQTRFHLPVWLGFGAAIRHVVEKDVKNLHMLQDMYQHWPFFRITIDLIEMVFAKGDPGIAALYDKLLVSEELWPFGEKLRANFEETKKLVLQTAGHKDLLEGDPYLKQRLRLRNSYITTLNVCQAYTLKRIRDPSYNVTLRPHISKEIAESSKELIELNPTSEYAPGLEDTLILTMKGVAAGLQNTG

SEQ ID NO: 5647 - protein, 194 aa, Triticum aestivum
  misc_feature (175)..(175): Xaa can be any naturally occurring amino acid
  misc_feature (188)..(188): Xaa can be any naturally occurring amino acid
  unsure (1)..(194): unsure at all Xaa locations
MMGRKALDYEELNENVKKVQYAVRGELYLRASELQKEGKRIIFTNVGNPHALGQKPLTFPRQVVALCQAPFLLDDPNVGLIFPADAIARAKHYLSLAPGGLGAYSDSRGIPGVRQEVAEFIQRRDGYPSDPELIYLTDGASKGVMQMLNAIIRNERDGILVPVPQYPLYSAAISXLGGSLVPYYLEEXEANWGT

SEQ ID NO: 5648 - protein, 446 aa, Salmonella enterica subsp. enterica serovar Paratyphi A str.
MLSIAGVIGASLFVGSSVAIAEAGPAVLLAYLFAGLLVVMIMRMLAEMAVATPDTGSFSTYADKAIGPWAGYTIGWLYWWFWVLVIPLEANIAAIILNSWIPGIPVWLFSLVITLALTGSNLLSVKNYGEFEFWLALCKVIAILAFIALGATAISGFYPYAEVSGISRLWDHGGFMPNGFGAVLSAMLITMFSFMGAEIVTIAAAESDTLDKHIVRATNSVIWRISIFYLCSIFVVVALIPWNMPGLKSVGSYRSVLELLHIPHAKFIMDCVILLSVTSCLNSALYTASRMLYSLSRRGDAPAIMGKTNRSKTPWVAVLLSTGAAFLTVIVNYYAPAKVFKFLIDSSGAIALLVYLVIAISQLRMRKILLAQGGEIKLKMWLYPWLTWLVIGFICFVLVVMLFRPAQQLEVISTGLLGLGIIGTVPIMSRWKKLIRWQKAPLQNLR

SEQ ID NO: 5649 - protein, 377 aa, Nitrosomonas europaea ATCC 19718
MQRLWLIFTQTVTVLLAVFFVVSTLRPELLPWTPRGKLATIREATRANVEQALSAGGFHTAAEVAMPSVVNIFTSKEVRAPSHPFMDDPFFQRFFGDRFGPRTERSLGSGVIVSPEGYILTNHHVVEAASEIQVALMDGRNAEARIIGSDPESDLAVLKIDLGELPSITFGESEKARVGDIVLAIGNPFGVGQTMTMGIIGALGRSQVGINTFENFIQTDAAINPGNSGGALTDTSGNLIGINTAIYSRSGGSLGIGFAIPVDAAKQIMQQIIETGGVVRGWLGVSMQDLTPELAESFGLKKAGGALIAGVLKNGPADDAGIKPGDVLVAVNGKPIFNSSEMLNMVASLAPGKSATLTILRHGGQQDIQVRIGKRPS

SEQ ID NO: 5650 - protein, 423 aa, Oryza sativa (japonica cultivar-group)
MASRRQWGAGAGAVDVPAQERKGEAAKIARRPKTTTVVAQQPPRIRRALADVSNLVNGRAALPVVNRQKAAAAAADKCRKPIKQRNENNKAAKPEVIVISSDSEKHKKNPAQRAASRRAPIQTLTSILTKCSRASDGVISPKKELIYDIDASDSHNELAVVDYVEDIYRFYRNTENTYRPLCTYMVSQTEINERMRAILTDWLIEVHYRLMLMPETLYLTVYIIDQYLSLENVPRKELQLVGVSAMLIACKYEETWAPLVKDFLVISDNSFSRQQVLSTEKSILNKLQWNLTVPTMYMFILRYLKAALGDEELEHMTFFYAELALVQYSMLFFAPSVIAAAAVYAARCTLGLSPLWSDLLEYHTGLAEPQLLECARRLVSLHAAAPESRQKVVYKKYASPKLGAVSLHSPAKKLLPPPSPVAA

SEQ ID NO: 5651 - protein, 681 aa, Debaryomyces hansenii CBS767
MSDANDTSGNLSPGFENLNIRTPKAVNTESTQSPQRVSHSQINGDIQARILAFQQKRTKPVNGGHGALNPISKSTSHLSEAPDKPLPPLPPLPTLPTMLLQQRSYSLGDTSDPGLIPSPMETENIQNTNHSVNRSMGQSMSQVMGQGISRTSSLKKQEPQQLPFELLKKPSLSQRRGMKLNLSEMSSPTSASSPDDTSPIGDGKESLVFLNAPKGSVLDNNAMNTTGDLTRRVSERKNKPNFKLNLANTGGPGVSGMNPQSTSNSNSNSTISSLNSSGSSSTMATNNETNQSKKPQLQGLFANYSKYVDIKSGSLNFAGKASLHSKGIDFLSGLLFRISLEELEFLEELGHGNYGVVLKVLHKPTGVLMAMKEVRLELDETKFTQILMELEILHKCDSPYIVDFYGAFFVEGAVYMCMEYMDGGSLDKIYGKDDGVNDEACLAYITECVIRGLKELKDEHNIIHRDVKPTNILVNSLGKVKLCDFGVSGNLVASLAKTNIGCQSYMAPERIKSLSPTDNTYSVQSDIWSLGLSILEIAAGHYPYPSETYGNIFSQLSAIVDGDPPRLDPKAFSKDAQLFIKSCLNKNPDLRPSYATLLKHPWLVNHRDIDPHMDKFVTKKLEELEEQKNKKNLSRSNSVNSSTTTAKPPKESVRSLLKGKVQAPALHRGGLMNSNRNSVNR

SEQ ID NO: 5652 - protein, 263 aa, Zea mays
MTKKLISISTMAGKQGCKEQSNDRRIQASIQGDAKSVVVGFGGRLVTREQEQEDAIIVAALRHVVSGYSTPPPEVVVTVAGGEACGTCGIDGCLGCDFFGAPELAQEAVSCGTGQVATTASVGGGAAAAALRPRRRRNRNMYRGVRQRPWGKWAAEIRDPRRAARVWLGTFDTAEEAARAYDCAAVEFRGPRAKLNFPGHEALFQGHGDTAAAADTETLTPSPGEWQLGGGAGDELWEGLQDLMKQDEVDRWLAPVFGAASSF

SEQ ID NO: 5653 - protein, 287 aa, Oryza sativa (japonica cultivar-group)
MGAFLAAPLPPFPLPPPAPANGGAQQQQQQQQHQPSWVDEFLDFSATKRGAHRRSVSDSVAFLDPVSDDNAGVGAHDFDRLDDDQLMSMFSDDLQPPPPQQQPAAPAASASSPSDHNSMNDEKQDKGETDEAQSECDGATPGQPASPATVDPKRVKRILANRQSAQRSRVRKLQYISELERSVTSLQTEVSALSPRVAFLDHQRSLLTLGNSHLKQRIAALAQDKIFKDAHQEALKKEIERLRQIYHQQSLKNAESQPADAAPVRGRDNADLIGSEGAAAAAPCPHS

SEQ ID NO: 5654 - protein, 278 aa, Solanum tuberosum
MLAAEVHLGTKNCDFQMERYVFKRRNDGIYIINAGKTWDKLHMAARVIVSIENPQDIIVQSARPYGQRAVLKFAQYTGAHAIAGRHTPGTFTNQLQTSYSEPRLLILTDPRTDHQPIKEAALGNIPTIAFCDTDSPMRYVDIGIPANNKGKHSIGVLFWILARMVLQMRGTISAGPKWDVMVDLFFYREPEEAKDQQEEEVPAIADYAEYGGAALGGDWTSSQIPDAQWAADGATSVPVATSGWSGEAVAEGGWDAAAPPPAPVGVPEVTPTPAPGLE

SEQ ID NO: 5655 - protein, 334 aa, Debaryomyces hansenii CBS767
MSSGAILVTGGTGFVGTYCVIQLLEQGYGVHTSVRDLKKEAKLREVIKANSNLDDETINKKLKVFEADVTRDEGWAEAFQGVDHVLHVASPFPLTEPEDPNDLIIPAKEGTLRILRFATSFPSVNRVVLTSSFAAVGYGHAERSKPFDENDFTNLDGTNVTYVKSKTVAEIEAWKFVKSDANTHAQSPIALTVLNPAYIFGPPLKKSPDNSSSLKIIDLLLNGAFADGCKNMYLSAIDVRDVANIHVQALQTPESEGNRFILNTGENVSLLEVANILAENLPAEYTKNLPTKELEGTKDTKKPSTNEKAKRVFNWEPIPFKDALLASAKGLLNI

SEQ ID NO: 5656 - protein, 314 aa, Yersinia pestis KIM
MTSKNIAVIGECMIELSQKGTDLSRGFGGDTLNTAVYIARQVSAPDLNVHYVTALGTDSFSEEMLTAWQQENIQTDLIQRMDNKLPGLYFIETDESGERTFYYWRNDAAARFWLTSPAADDICQRLETFDYLYLSGISLAILDSASRQRLLKLLRACRAKGGKVIFDNNYRPRLWQSKEETQEAYRDMLACTDIAFLTLDDEDMLWGEKPLEQVIDRTQALGVSEIIIKRGADSCIVWVKEGSEAQQYDVPAVKLPKEDVVDTTAAGDSFSAGYLAVRLTGGNAHDAAVRGHLTASTVIQYRGAIIPLAAMPTA

SEQ ID NO: 5657 - protein, 398 aa, Fusarium proliferatum
MYQNGTNFMDGPAMVTQCNIPTGASITYNFTVDQVGTYWYHSHTRSQYPDGLRQALIIQDPKNPYEGEYHEERVITLSDWYHDEMPVLMKQFVSYKNPTGAEPVPNSALMNDTQNMTLPVEPGKTYLLRLVNVGAFASQYFWIEGHTMKIVEVDGVWTKPAETDMIYIASAQRYAVLVTMKNETGVNYPMMASMDTTLFDTIPDGLNWNVTGWLEYDTDKKLPAAAVLNDFEPYDDFKLVPTDGEKLLEKADHTISLDLTMNNLGDGANYAFFNDISYVSPKVPTLYTVLSAGENATNPTVYGTDTNSFVLKHGEIVEIILNNDDSGRHPFHLHGQNFQVVHRSEENAGHYNASWTNITYPSVPMRRDTLLVYPQGNFVIRFPATNPGVWLFHCHIAC

SEQ ID NO: 5658 - protein, 321 aa, Burkholderia sp. 383
MKPRIVAYKPLPDDVLAYLREHADVVQADGTAALADALGDADGAIGASLKVTPQMLDRAPRLKAWSTISVGYDNFDVADLTRRGIVLAHTPDVLTESTADTVFSLILASARRVVELAEWVKAGNWHHSIGPDLYGTDVQGKTLGIVGLGRIGGAVARRAALGFRMQVLYANRSAHAEAETQYGARRVTLDELLAQSDFVCLQVPLSPETHHLIGAAEFAKMKRGAILINASRGPVVDEAALIDALRAGTIRGAGLDVFEKEPLAADSPLLQMKNVVALPHIGSATHETRHAMARCAAENLVGALAGTLRTNLVNPDALAQV

SEQ ID NO: 5659 - protein, 405 aa, Fusarium proliferatum
ASVHWHGMYQNGTNFMDGPAMVTQCNIPTGASITYNFTVDQVGTYWYHSHTRSQYPDGLRQALIIQDPKNPYEGEYHEERVITLSDWYHDEMPVLMKQFVSYKNPTGAEPVPNSALMNDTQNMTLPVEPGKTYLLRLVNVGAFASQYFWIEGHTMKIVEVDGVWTKPAETDMIYIASAQRYAVLVTMKNETGVNYPMMASMDTTLFDTIPDGLNWNVTGWLEYDTDKKLPAAAVLNDFEPYDDFKLVPTDGEKLLEKADHTISLDLTMNNLGDGANYAFFNDISYVSPKVPTLYTVLSAGENATNPTVYGTDTNSFVLKHGEIVEIILNNDDSGRHPFHLHGQNFQVVHRSEENAGHYNASWTNITYPSVPMRRDTLLVYPQGNFVIRFPATNPGVWLFHCHIAC

SEQ ID NO: 5660 - protein, 330 aa, Burkholderia sp. 383
MKAALDVVTYGEAMAMFVATEPGHLAHATQFAKRIAGADLNVAIGLSRLGFRVGWMSRVGRDSFGGYVLDTLAREGIDASCVTVDPRYPTGFQLKSRNDDGSDPTVEYFRKGSAASHLSCDDYVADYVLGARHLHLTGVAPAISATSCELAFKLAREMRAAGKTISFDPNLRPTLWPSADVMAKTLNAIASLADWVLPGIAEGRQLTGHDTPADIAGFYLAQGARGVVIKLGAEGAYYRTADGHDGTVTGERVQNVVDTVGAGDGFAVGVVSALLEGKTIEQAVARGNRIGALAIQVIGDSEGLPTRAALDRCENVSNRADRLEETFTAQ

SEQ ID NO: 5661 - protein, 152 aa, Brassica napus
  misc_feature (141)..(141): Xaa can be any naturally occurring amino acid
  unsure (1)..(152): unsure at all Xaa locations
MASVPEIKIVRSESLGHRSEVSSPEAKLGMRVEDLWDEQKPQLSPDEKLNACFESIPVSAFPLSSDSQEDIEIRSDTSLAEAVETLSKLKVLSAPVVDVDAPEDASWIDRYIGIVEFPGIVVWLLHQLDPTSPRSPAVAGXNGTSHDFTAHG

SEQ ID NO: 5662 - protein, 586 aa, Moorella thermoacetica ATCC 39073
MLHHRPGIRFCQPLAPDRLLLRLKIGRREQQSCQVIYEDRGLKTAPMHAYARTPRYLYYQAEISLSRPWRCRYFFRLREGDGDDRYIFAGGTGQQGRPFTYQWTPADIFTVPDWIYDAVSYQIFPDRFYNGNPANDPPGTRPWSEAPTRENFFGGDLEGIQAKIPYLKFLGVNVLWLNPIFAASSNHRYNTRDYLAVDPALGDTDTLRRLVASLHGAGIRIILDGVFNHTGTDFFAFKDVVARGAGSPYKDWYYFYDFPVRSEPRANYACWWDIPSLPKLNVRNPEVRNYLLHVATYWLWDAGTDGWRLDVPNEIEPPFWREFYQQVKGTNPEAYIVGEIWRDARFWLNGRYFDGVMNYLFRDLVLAYFARRLFPISTLDMLLGLVRLRYPEAANFALLNLLGSHDTARIITAFQEGLAGVPGHSGSYAEAVAHLRPALILQLTYPGAPLIYYGDEVGLTGGPDPDCRRTMPWEPRDWDRDLLNFYRCLIRLRHQLRPLRRGFFQPLFTDDQAEVYAYARRLEGEKVIIILNASDLPQTVTLAAAVAGLAEDSTWRDGLSNRLLEVKGGQISLPLDANSGAVLYQE

SEQ ID NO: 5663 - protein, 440 aa, Leifsonia xyli subsp. xyli str. CTCB07
MTEQGSPRQQGNNLDPWYTHYAQRTSGLAASEVRALFAVASRPEVVSLAGGMPYVDALPEDLVIGAMDRVMRERGPVALQYGSGQGVPALREQILDVMALEGISGSADDVIVTTGSQHALELFSKLFIDPGDVVLAEGPSYVTAMVIFRSYQAEVDHIPMDEHGLIPEALREHIARLKAAGRRVKFLYTVPSFHNPAGVTLSWERRLEILEIARQNDILVLEDNPYGLLYFNEGPPAAMRSVEQEGVVYLGTFSKTLAPGFRVGWALAPHAIREKLILANEAAVLSPSSFSQLVISEYLSDADWRGQIDTFRSVYRERKETMISALEEHLPELTWTNPRGGFYVWLTLPPHLDSKAMLPRAVTELVAYTPGTAFFADGSGTQNIRLSFCYPTPENIRVGIRRLANVINGEQDLLDTFAGTGPLTATRPGKPNANPPTDLQ

SEQ ID NO: 5664 - protein, 596 aa, Xanthomonas campestris pv. campestris str. ATCC 33913
MSAYKITEHKYDMVVVGAGGAGLRATFGLAQKGLQTVCLTKVFPTRSHTVAAQGGISAALGNMGEDDWRYHFYDTIKGSDWLGDQDAIEYMCREAIPAIIELEHYGVPFSRTEEGKIYQRPFGGMTTKYGEGPSAQRTCAAADRTGHAMLHTLYQQSLAHNARFMIEYFALDLIFDEEGVCRGVLALDMAEGSLHLFRAHGVVLATGGYGRAYFSATSAHTCTGDGGGLVMRAGLPMQDMEFVQFHPTGIYGAGCLITEGVRGEGGILRNSNGERFMERYAPHYKDLASRDVVSRSMTIEIREGRGVGEHKDHILLDLTHLGPEVINDKLPGIAESAHIFAGVDVAKQPIPVLPTVHYNMGGIPTNYHGEVVRKQGDNPDAVVPGLYAIGEAACVSVHGANRLGSNSLLDLVVFGRAVANRCAETVKTNQPHKPLPSDACDKALGLLDKLRHANGSTPTSVIRDNMQRTMQSDAAVFRTSKTLKEGVDKMAEIFATFEDVKVSDRSLVWNSDLIETYELNNLLLNAVATINSAEQRKESRGAHAHEDFPDRDDVNWQKHTLVTVDDKGQCDFEYRQVHMYTLSKEVDVVPPKPRVY

SEQ ID NO: 5665 - protein, 139 aa, Yarrowia lipolytica CLIB122
MAPKVAEKKPSLAGKAPAGKAPAEKKEAGKKTTTATGEKKKRTKARKETYSSYIYKVLKQTHPDTGISTRAMSIMNSFVNDIFERVATEASKLATYTKKSTITSREIQTAVRLILPGELAKHATGDGTRAVAKYSTFDN

SEQ ID NO: 5666 - protein, 225 aa, Mycobacterium avium subsp. paratuberculosis
MRQRILVVDDDASLAEMLTIVLRGEGFDTAVIGDGTQALTAVRELRPDLVLLDLMLPGMNGIDVCRVLRADSGVPIVMLTAKTDTVDVVLGLESGADDYIMKPFKPKELVARVRARLRRNDDEPAEMLSIADVEIDVPAHKVTRNGEQISLTPLEFDLLVALARKPRQVFTRDVLLEQVWGYRHPADTRLVNVHVQRLRAKVEKDPENPTVVLTVRGVGYKAGPS

SEQ ID NO: 5667 - protein, 411 aa, Streptococcus suis 89/1591
MTKLNRVVVTGYGLTSPIGNTPEEFWDSLKAGKIGIGKITKFDTSEYSVHNAAELKDFPFDKYFVKKDTNRYDNYSLYALYAAKEAIANAQLDTETVDSDRFGVILSTGIGGILEIEEQVARMNEKGPKRIRPMALPKALPNMAAGNIAMQVGANGVCKCIITACASSNDALGEAFREIKFGFQDVMLAGGAEAAITPFAIGGFQALTAMSTTEDPERASIPFDKDRNGFVMGEGSAVLVLESLEHAEARGATILAEIVGYGNTCDAYHMTSPHPEGLGAIKAMKLAISEAGLEPADIDYINAHGTSTPANEKGESQAIVSVFGKNTPVSSTKSFTGHLLGAAGAVEAAAVIEAMRHSYAPKTAGTTELSEDIEADVIYGQGRDMEIRHAISNTFGFGGHNSVIAFKRWEA

SEQ ID NO: 5668 - protein, 410 aa, Zea mays
  misc_feature (200)..(200): Xaa can be any naturally occurring amino acid
  misc_feature (231)..(231): Xaa can be any naturally occurring amino acid
  unsure (1)..(410): unsure at all Xaa locations
LGTSRPAGAKSAKLQNFNLEVDLPAMMAQKDKAVAGLTKGIEGLFKRNKVTYVKGFGKLSSPSEVSVDLIDGGSTIVKGKNIIIATGSDVKSLPGITIDEKKVVSSTGALCLSEIPKKLVVIGAGYIGLEMGSVWNRLGSEVTVVEFAPDIVPSMDGEVRKQFQRMLEKQKFKFMLKTKVVGCDTSGDGVKLTLEPAAGXQQTILEADVVLVSAGRSPFTSGIGLETLGVXETDKAGRILVDKRFMTGVRGVYAIGDAIPGPMLAHKAEEDGVACVEFIAGKEGHVDYGTVPGVVYTHPEVASVGKTEEQVKALGIAYNVGKFPLLANSRAKAIDDAEGVVKVIAEKETDKILGVHIMAPNAGEIIHEAVVALQYGASSEDVARTCHAHPTVSEALKEACLQTFDKAIHI

SEQ ID NO: 5669 - protein, 304 aa, Mesorhizobium sp. BNC1
MKTDFQHRHLLSIGECMVEFAPNGAGGYAMNFAGDTFNAAWYARRLLPGGFEVSYLTAVGRDDISAEMLAFMRDQGIDTSFVARDDERTVGLYVVQLQDGEPRFTYWRDRSAARRLAHDAAALSGLSAEMVIHFSGITLAILPPENRQRLLDSLAAARAAGATISFDTNMRPRLWRGNAELRYWTMRAADVADIVLPSFGEESQAFGDAHPEDTAERYAAAGAATVVVKNGAGPVLAVDGPVRLRLNPVPAVPVDSTAAGDSFAGAFLAALMQGKALDNAVRDAMSVAARVVQSRGALVPVGVD

SEQ ID NO: 5670 - protein, 112 aa, Zea mays
DLFKWKQLWPILADHFGLEWAGYEGEENRFKLEEAMAGKEAVWAEIVRENDLIATELDEITNWWFVDAMFAVETQLLDSMNKSKEHGFLGFRNTVSSFNTWIEKLKVFKIVP

SEQ ID NO: 5671 - protein, 614 aa, Ustilago maydis 521
MTSASTSSQGAPSTDPVTAAQQQHIEDLCKAGPVMEGASLIVVSNRLPVTIKVDPSVPGGYTFTLSSGGLVSALSGCKKTMNFTWIGWPGLSVPPKDEEYIEKRLREEYSCQPVWISDEIADRHYNGFSNSILWPLFHYHPGEMNFDETNWLAYREANLRFAEKIRSIVRQGDMVWVQDYHLMLLPLMLRTLIEGSEQQGATSQRELEHVRHGVDGTLQLQDDDLLAAPSAYDSLRGNGRINTPPADDGEGEGDDQGDYQGRDAALRSNSSATGRGLGTSDGSSGRGSIKIGFFLHTPFPSSEIYRILPVRREILLGILHCDLIGFHTYDYARHFLSSCTRILGLPTMPNGAEFEGRYVHVGTYPIGIEPSQFEDGLERESVKERIKSLQRRFEGVKIIVGVDRLDYIKGVPQKLHALETFLQDHPEWIGKVVLVQVAVPSRQDVEEYQNLRATVNEAVGRINGRFGTVESMPIHFLHRSVSFDELCALYAISDACLVTSTRDGMNLVSYEYIACQQQRAGVMILSEFAGAAQSLNGSLICNPWDAFAVSDAIHEALTMPANVRRENFEKLSRYVKKHTASWWGLSFVNDLKRIKVEGEAESPSAGVPSLPSRP

SEQ ID NO: 5672 - protein, 367 aa, Malus x domestica
MGKGGQSCNGVVRDAKPVEQENMAVWLVDVNTIKILPFKLPAIGPNDVRIRIKAVVICGSDVHYLKTMKCADFEVKEPMVIGHECAGIVDTVGSEVKHLVPGDRVGEPGISCARCQQCKGGRYNLCPDMKFFATPPVHGSLANQIVHPADLCFKLPENVSLEEGAMCEPLSVGVHACRRANVGPETSVLIIGAGPIGLVSVLAARAFGAPRIVIVDMDDKRLAMAKSLGADEAVKVSTKMEDLDDRVAEIKKAMISEVDVTFDCVGFNKTMSTGLNATRPGGKVCLVGMGHGVMTVPLTPAAAREVDVVGVFRYQNTWPLCLEFLRSGKIDVKPLITHRFGFTEKEVEEAFATSARGGNAIKVMFKL

SEQ ID NO: 5673 - protein, 482 aa, Gentiana scabra var. buergeri
MDQLHVFFFPFLANGHILPTIDMAKLFSSRGVKATLITTHNNSAIFLKAISRSKILGFDISVLTIKFPSAEFGLPEGYETADQARSIDMMDEFFRACILLQEPLEELLKEHRPQALVADLFFYWANDAAAKFGIPRLLFHGSSSFAMISAESVRRNKPYKNLSSDSDPFVVPDIPDKIILTKSQVPTPDETEENNTHITEMWKNISESENDCYGVIVNSFYELEPDYVDYCKNVLGRRAWHIGPLLLCNNEGEDVAQRGKKSDIDAHECLNWLDSKNPYSVVYVCFGSMANFNAAQLHELAMGLEESGQEFIWVVRTCVDEKDESKWFPDGFEKRVQENNKGLIIKGWAPQVLILEHEAVGAFVSHCGWNSTLEGICGGVAMVTWPLFAEQFYNEKLMTDILRTGVPVGSLQWSRVTTSAVVVKREAISKAVRRLMAEEEGVDIRNRAKALKEKAKKAVEEGGSSYSDLSALLDELSSYPHN

SEQ ID NO: 5674 - protein, 165 aa, Picea rubens
MARSAAMTMVLFLLAGFLVSSMAQAPSASPTKSPTTPAPTTTAAPPTTTAAPPTTTATPPVSTPPPVASPPPVATPPPVATPPPVATPVATPPSPALVPSPAVATPPPAATPIVTPTASTPAVTPSAAPIASPAVSPSSTSGASVASTLEKTAILAAALAGVFFL

SEQ ID NO: 5675 - protein, 165 aa, Arabidopsis thaliana
MQPSTNIFSLHGCPPSYLSHIPTSSPFCGQNPNPFFSFETGVNTSQFMSLISSNNSTSDEAEENHKEIINERKQKRKISNRESARRSRMRKQRQVDELWSQVMWLRDENHQLLRKLNCVLESQEKVIEENVQLKEETTELKQMISDMQLQNQSPFSCIRDDDDVV

SEQ ID NO: 5676 - protein, 688 aa, Oryza sativa (japonica cultivar-group)
MEAFMASADLPAFPWGAASTPPPPPPPPHHHHQQQQQQVLPPPAAAPAAAAFNQDTLQQRLQSIIEGSRETWTYAIFWQSSIDVSTGASLLGWGDGYYKGCDDDKRKQRSSTPAAAAEQEHRKRVLRELNSLIAGAGAAPDEAVEEEVTDTEWFFLVSMTQSFPNGLGLPGQALFAAQPTWIATGLSSAPCDRARQAYTFGLRTMVCLPLATGVLELGSTDVIFQTGDSIPRIRALFNLSAAAASSWPPHPDAASADPSVLWLADAPPMDMKDSISAADISVSKPPPPPPHQIQHFENGSTSTLTENPSPSVHAPTPSQPAAPPQRQQQQQQSSQAQQGPFRRELNFSDFASNGGAAAPPFFKPETGEILNFGNDSSSGRRNPSPAPPAATASLTTAPGSLFSQHTPTLTAAANDAKSNNQKRSMEATSRASNTNNHPAATANEGMLSFSSAPTTRPSTGTGAPAKSESDHSDLEASVREVESSRVVAPPPEAEKRPRKRGRKPANGREEPLNHVEAERQRREKLNQRFYALRAVVPNVSKMDKASLLGDAISYINELRGKLTALETDKETLQSQMESLKKERDARPPAPSGGGGDGGARCHAVEIEAKILGLEAMIRVQCHKRNHPAARLMTALRELDLDVYHASVSVVKDLMIQQVAVKMASRVYSQDQLNAALYTRIAEPGTAAR

SEQ ID NO: 5677 - protein, 482 aa, Gentiana scabra var. buergeri
MDQLHVFFFPFLANGHILPTIDMAKLFSSRGVKATLITTHNNSAIFLKAISRSKILGFDISVLTIKFPSAEFGLPEGYETADQARSIDLMDEFFRACILLQEPLEELLKEHRPQALVADLFFYWANDAAAKFGIPRLLFHGSSSFAMISAESVRRNKPYKNLSSDSDPFVVPDIPDKIILTKSQVPTPDDTEENNTHITEMWKNISESENDCYGVIVNSFYELEPDYVDYCKNVLGRRAWHIGPLLLCNNEGEDVAQRGEKSDIDAHEYLNWLDSKNPYSVVYVCFGSMANFNAAQLHELAMGLEESGQEFIWVVRTCVDEKDESKWFPDGFEKRVQENNKGLIIKGWAPQVLILEHEAVGAFVSHCGWNSTLEGICGGVAMVTWPLFAEQFYNEKLMTDILRTGVPVGSLQWSRVTTSAVVVKREAISKAVRRLMAEEEGVDIRNRAKALKEKAKKAVEEGGSSYSDLSALLDELSSYPHN

SEQ ID NO: 5678 - protein, 205 aa, Vibrio vulnificus YJ016
MKLYETEMTPSCRRVTLFLAEIGASVERVQLNVREGDNLTPEFLQKSVNGKVPMLELDDGTTLCESVAICRYFDEIHPNEMALFGRDALEKAQVEMWHRVVEFQGLYAAFQAFRNITAIYQDRETCVEAWGVESKKRVEAFLPVLEKRLSESPYVATEHFTIVDITAFIFVTFAVKGLELAVFEQFSHIEKWYEQISNRSAFQPL

SEQ ID NO: 5679 - protein, 432 aa, Burkholderia vietnamiensis G4
MSRFSDEAFGAGHDHIFLGAAHEQNERRTWTVIVLCAAMMVAEIVGGSIFGSLALVADGLHMSTHAGAMLIAAFAYTYARKHASDPRFVFGTGKLGDLAGFTSAIVLAMIALLIAYEAVSRMLAPVPIHFGEAIPIAVLGLVVNIASAWLLSGDHHGHGHHHGHAHGHHHDHGHEHEHAHHHDAEAHRIVDGQHAFAVSVFEDGVPPVFRIAPATHDAALVDAAAVSITTLRPDGSRHTFAMQSRDGYLESIETIPEPHAFTAIVRLNGREHALTFAESEHEHGASAAARDHNIRSAYIHVLADAAVSVLTIAGLLLARAFGWLWMDPLAGIVGALVIANWSYGLMRDTGSILLDMNPDRRLADSVRAALESTGDRIRDLHVWRLGPGHMSAVVSVLTDDPQRDARYYHRVLQRFGSLSHVTVEVVPVPRGQ

SEQ ID NO: 5680 - protein, 182 aa, Brassica napus
  misc_feature (11)..(11): Xaa can be any naturally occurring amino acid
  misc_feature (171)..(171): Xaa can be any naturally occurring amino acid
  unsure (1)..(182): unsure at all Xaa locations
MAETLKEDSIXFREVWNDNLLEEFALIREIVDKFTYVAMDTEFPGVVLKPVETFKHNNDLNYRTLKENVDLLKLIQVGLTFSDEDGNLPTCGADDKFCVWQFNFREFNIGEDIYASESIELLRQCGIDFKKNLERGIDVARFGELMMSSGIVLNDSISWGTFHGGYDFGYXLVKLLTCKELP

SEQ ID NO: 5681 - protein, 457 aa, Helianthus annuus
MQIFVKTLTGKTITLEVESSDTIDNVKAKIQDKEGIPPDQQRLIFAGKQLEDGRTLADYNIQKESTLHLVLRLRGGMQIFVKTLTGKTITLEVESSDTIDNVKAKIQDKEGIPPDQQRLIFAGKQLEDGRTLADYNIQKESTLHLVLRLRGGMQIFVKTLTGKTITLEVESSDTIDNVKAKIQDKEGIPPDQQRLIFAGKQLEDGRTLADYNIQKESTLHLVLRLRGGMQIFVKTLTGKTITLEVESSDTIDNVKAKIQDKEGIPPDQQRLIFAGKQLEDGRTLADYNIQKESTLHLVLRLRGGMQIFVKTLTGKTITLEVESSDTIDNVKAKIQDKEGIPPDQQRLIFAGKQLEDGRTLADYNIQKESTLHLVLRLRGGMQIFVKTLTGKTITLEVESSDTIDNVKAKIQDKEGIPPDQQRLIFAGKQLEDGRTLADYNIQKESTLHLVLRLRGGN

SEQ ID NO: 5682 - protein, 1356 aa, Podospora anserina
MRLLERDDAGEIRPTKDLPSGKIPPYAILSHTWGPDEEEVSYKDLKDGRAVSKLGYNKIRFCADQAWRDGRKFFWVDTCCIDKSNSTELQEAINSMFRWYRDAAKCYVYLTDVSTDKRDADGDPSWKWAFQKCKWFTRGWTLQELIAPTSVEFFSREKARIGDRNSLERMIHDVTGIPLEALRGSPLSDFSVHDRMAWMKQRNTTREEDMAYSLFGIFDVHLPLIYGEGKEKALERLREKIGKDDGCLADLRVTDPRHDKKRIEAAKGGLLKDSYCWVLSNVQFQQWHDGDDQRLLWINGDPGKGKTMLLCGIIDELKKSTPPGLLSFFFCQATDSRINNATAVLRGLIYLLVSQQPALISHVRRPYDHAGKKMFEGPNVWIVLCEIFTSILQDPGLRMTYLIIDALDECVTDLPQLLELITRTSCTSSPIKWIVSSRNWPDIEEQLETATQKARLSLELNAESISTAVNAFIQNRIDQLAPKTKHDANMIGKIRDYLHSHANGTFLWVALVCQALADPKVKKRHILAKLQTFPRGLDSLYARMLEQIGHSEDAELCKQILAVAAAVRRPISLDELASLVEMPDDVSDDPESLEEIVKLCGSFLIIRERTVYFVHQSAKDFLLGTASDKASNKASQEAFELVFPTGIEDVSYIIFWRSLNVMSQKLRRDIYCLNAPGFLIDNVRVPDPDPLAMVRYSCIYWIDHLRDLVSSTSSKWVHLLQDDGDIHRFLTTKYLYWLEALSLLRALPEGINAIRQLESLLGHTIRGRLIAIVRDGYRFALSYRMIIEKAPLQAYTSALVFAPTDSMIKKIFKKEEPGWISTISVVEAEWNACTQTLEGHGSSVLSVAFSPDGQRVASGSDDKTIKIWDTASGTGTQTLEGHGGSVWSVAFSPDGQRVASGSDDKTIKIWDAASGTCTQTLEGHGSSVLSVAFSPDGQRVASGSGDKTIKIWDTASGTGTQTLEGHGGSVWSVAFSPDGQRVASGSGDKTIKIWDTASGTCTQTLEGHGNSVWSVAFSPDGQRVASGSDDKTIKIWDTASGTCTQTLEGHGGWVWSVAFSPDGQRVASGSIDGTIKIWDAASGTCTQTLEGHGDWVQSVAFSPDGQRVASGSDDHTIKIWDAASGTCTQTLEGHGDSVWSVAFSPDGQRVASGSIDGTIKIWDAASGTCTQTLEGHGGWVHSVAFSPDGQRVASGSIDGTIKIWDAASGTCTQTLEGHGGWVHSVAFSPDGQRVASGSSDNTIKIWDTASGTCTQTLNVGSTATCLSFDYTNAYINTNIGRIQIATATMESLNQLSSPVCYSYGLGQDYRWITCNNQNVLWLPPEYHTSAFTMQGRKIVLGCYSGRIIIFLFSRDV

SEQ ID NO: 5683 - protein, 549 aa, Wolbachia endosymbiont of Drosophila melanogaster
MTNVVVSGEQLQEAFREVAAIVDSTVAITAGPRGKTVGINKPYGAPEITKDGYKVMKGIKPEKPLNAAIASIFAQSCSQCNDKVGDGTTTCSILTSNMIMEASKSIAAGNDRVGIKNGIQKAKDVILKEIASMSRTISLEKIDEVAQVAIISANGDKDIGNSIADSVKKVGKEGVITVEESKGSKELEVELTTGMQFDRGYLSPYFITNNEKMIVELDNPYLLITEKKLNIIQPLLPILEAIVKSGKPLVIIAEDIEGEALSTLVINKLRGGLKVAAVKAPGFGDRRKEMLEDIATLTGAKYVIKDELGIKMEDLTLDDLGTAKNVKITKDNTTVVSENSDSDSVKARIEQIKSQIETSTSDYDKEKLRERLAKLSGGVAVLKVGGATEVEVKERRDRVEDALHATRAAIEEGIVPGGGVALLYASSVLDKLKGASDEEQIGINIIKKVLSAPIRRLVKNAGLESAVIIDYLIKQNDKELIYNVEAMNYANAFTAGVIDPAKVVRIAFETAVSVASVLITTESMIVDVPSKENASSPMGAGEMSGMGGF

SEQ ID NO: 5684 - protein, 96 aa, Wolbachia endosymbiont of Drosophila melanogaster
MSSISLNVLDDSVLIKPISEEKQGGIVLPSSAEKKPTKGEVIAIGEGSRNSSGERVTLTVKAGDKVFYRQWAGTEIEHNNEKLIVMKESDILAVIK

SEQ ID NO: 5685 - protein, 530 aa, Agaricus bisporus
PVDGIRSQIEWNTTLNVSDAPVPTETTKYHRKTAIIATIGPKINTVEKLTDVRLAGVNIVRMNFSHGTHEYHQSVIDNTRQMIKNDPHGRPVAIALDTKGPEIRTGQTRDGNDYPIKAGDEFIVTTDPKYSDICDNKVLFVDYANLASVTAPGKLIYIDDGIISLLILSIDGMNLHVRALNNGTLSSRKGVNLPKTDVDLPPLSEKDKDDLRFGIRNGVDMIFASFIRRGEDVRQIREVLGPDGASIKIIVKIENEQGVANFDEILKEADGVMVARGDLGIEIPASQVFLAQKMMIAKCNIVGKPVIVATQMLESMTYNPRPTRAEVSDVANAVLDGSDCVMLSGETAKGSYPVQSVLMMAETCLLAETAICYPPLYDDLRAVQARPTETAETVAIAAVAAAAEQDAKALLVLSTSGETARLVSKYRPKIPIITVTRNEQTARQIHLHRGCYPFWYPEPRGVQNHQWQTDVDNRIRFGLRNALALNVIQPGASIIAVQGWKGGLGHTNTLRILTVPTDPADLELQPLGSL

SEQ ID NO: 5686 - protein, 1356 aa, Podospora anserina
MRLLERDDAGEIRPTKDLPSGKIPPYAILSHTWGPDEEEVSYKDLKDGRAVSKLGYNKIRFCADQAWRDGRKFFWVDTCCIDKSNSTELQEAINSMFRWYRDAAKCYVYLTDVSTDKRDADGDPSWKWAFQKCKWFTRGWTLQELIAPTSVEFFSREKARIGDRNSLERMIHDVTGIPLEALRGSPLSDFSVHDRMAWMKQRNTTREEDMAYSLFGIFDVHLPLIYGEGKEKALERLREKIGKDDGCLADLRVTDPRHDKKRIEAAKGGLLKDSYCWVLSNVQFQQWHDGDDQRLLWINGDPGKGKTMLLCGIIDELKKSTPPGLLSFFFCQATDSRINNATAVLRGLIYLLVSQQPALISHVRRPYDHAGKKMFEGPNVWIVLCEIFTSILQDPGLRMTYLIIDALDECVTDLPQLLELITRTSCTSSPIKWIVSSRNWPDIEEQLETATQKARLSLELNAESISTAVNAFIQNRIDQLAPKTKHDANMIGKIRDYLHSHANGTFLWVALVCQALADPKVKKRHILAKLQTFPRGLDSLYARMLEQIGHSEDAELCKQILAVAAAVRRPISLDELASLVEMPDDVSDDPESLEEIVKLCGSFLIIRERTVYFVHQSAKDFLLGTASDKASNKASQEAFELVFPTGIEDVSYIIFWRSLNVMSQKLRRDIYCLNAPGFLIDNVRVPDPDPLAMVRYSCIYWIDHLRDLVSSTSSKWVHLLQDDGDIHRFLTTKYLYWLEALSLLRALPEGINAIRQLESLLGHTIRGRLIAIVRDGYRFALSYRMIIEKAPLQAYTSALVFAPTDSMIKKIFKKEEPGWISTISVVEAEWNACTQTLEGHGSSVLSVAFSPDGQRVASGSDDKTIKIWDTASGTGTQTLEGHGGSVWSVAFSPDGQRVASGSDDKTIKIWDAASGTCTQTLEGHGSSVLSVAFSPDGQRVASGSGDKTIKIWDTASGTGTQTLEGHGGSVWSVAFSPDGQRVASGSGDKTIKIWDTASGTCTQTLEGHGNSVWSVAFSPDGQRVASGSDDKTIKIWDTASGTCTQTLEGHGGWVQSVAFSPDGQRVASGSNDHTIKIWDAASGTCTQTLEGHGDSVWSVAFSPDGQRVASGSDDHTIKIWDAASGTCTQTLEGHGDSVWSVAFSPDGQRVASGSIDGTIKIWDAASGTCTQTLEGHGGWVHSVAFSPDGQRVASGSIDGTIKIWDAASGTCTQTLEGHGGWVHSVAFSPDGQRVASGSSDNTIKIWDTASGTCTQTLNVGSTATCLSFDYTNAYINTNIGRIQIATATMESLNQLSSPVCYSYGLGQDYRWITCNNQNVLWLPPEYHTSAFTMQGRKIVLGCYSGRIIIFLFSRDV

SEQ ID NO: 5687 - protein, 1356 aa, Podospora anserina
MRLLERDDAGEIRPTKDLPSGKIPPYAILSHTWGPDEEEVSYKDLKDGRAVSKLGYNKIRFCADQAWRDGRKFFWVDTCCIDKSNSTELQEAINSMFRWYRDAAKCYVYLTDVSTDKRDADGDPSWKWAFQKCKWFTRGWTLQELIAPTSVEFFSREKARIGDRNSLERMIHDVTGIPLEALRGSPLSDFSVHDRMAWMKQRNTTREEDMAYSLFGIFDVHLPLIYGEGKEKALERLREKIGKDDGCLADLRVTDPRHDKKRIEAAKGGLLKDSYCWVLSNVQFQQWHDGDDQRLLWINGDPGKGKTMLLCGIIDELKKSTPPGLLSFFFCQATDSRINNATAVLRGLIYLLVSQQPALISHVRRPYDHAGKKMFEGPNVWIVLCEIFTSILQDPGLRMTYLIIDALDECVTDLPQLLELITRTSCTSSPIKWIVSSRNWPDIEEQLETATQKARLSLELNAESISTAVNAFIQNRIDQLAPKTKHDANMIGKIRDYLHSHANGTFLWVALVCQALADPKVKKRHILAKLQTFPRGLDSLYARMLEQIGHSEDAELCKQILAVAAAVRRPISLDELASLVEMPDDVSDDPESLEEIVKLCGSFLIIRERTVYFVHQSAKDFLLGAASDKASNKASQEAFELVFPTGIEDVSYIIFWRSLNVMSQKLRRDIYCLNAPGFLIDNVRVPDPDPLAMVRYSCIYWIDHLRDLVSSTSSKWVHLLQDDGDIHRFLTTKYLYWLEALSLLRALPEGINAIRQLESLLGHTIRGRLIAIVRDGYRFALSYRMIIEKAPLQAYTSALVFAPTDSMIKKIFKKEEPGWISTISVVEAEWNACTQTLEGHGSSVLSVAFSPDGQRVASGSDDKTIKIWDAASGTGTQTLEGHGGSVWSVAFSPDGQRVASGSDDKTIKIWDAASGTCTQTLEGHGSSVLSVAFSPDGQRVASGSGDKTIKIWDTASGTGTQTLEGHGGSVWSVAFSPDGQRVASGSGDKTIKIWDTASGTCTQTLEGHGNSVWSVAFSPDGQRVASGSDDKTIKIWDTASGTCTQTLEGHGGWVWSVAFSPDGQRVASGSIDGTIKIWDAASGTCTQTLEGHGDWVQSVAFSPDGQRVASGSDDHTIKIWDAASGTCTQTLEGHGDSVWSVAFSPDGQRVASGSIDGTIKIWDAASGTCTQTLEGHGGWVHSVAFSPDGQRVASGSIDGTIKIWDAASGTCTQTLEGHGGWVHSVAFSPDGQRVASGSSDNTIKIWDTASGTCTQTLNVGSTATCLSFDYTNAYINTNIGRIQIATATMESLNQLSSPVCYSYGLGQDYRWITCNNQNVLWLPPEYHTSAFTMQGRKIVFGCYSGRIIIFLFSRDV

SEQ ID NO: 5688 - protein, 82 aa, Atropa belladonna
MSCCGGNCGCESRASKCGTGCGGCKMYPDMSYSESTTSETLVLGVGPEKTSFRAMEFGESPVAENGCKCGSDCKCDPCTCSK

SEQ ID NO: 5689 - protein, 83 aa, Glycine max
  misc_feature (6)..(6): Xaa can be any naturally occurring amino acid
  misc_feature (15)..(15): Xaa can be any naturally occurring amino acid
  misc_feature (17)..(17): Xaa can be any naturally occurring amino acid
  misc_feature (34)..(34): Xaa can be any naturally occurring amino acid
  misc_feature (44)..(44): Xaa can be any naturally occurring amino acid
  misc_feature (55)..(55): Xaa can be any naturally occurring amino acid
  unsure (1)..(83): unsure at all Xaa locations
AIGMRXQAYLYDGYXVXIGTIEAFYNANLGITFXPVPDFFWGDXSFFFYTQPLYXPTSKRRDADVTDSVIGEGCVIKNCKIHQ

SEQ ID NO: 5690 - protein, 363 aa, Vanilla planifolia
SDSGKDAGRLSAAWQLYKGQEDLIKVAKKYGVKLTMFHGRGGTVGRGGGPTHLAILSQPPDTIHGSLRVTVQGEVIEQSFGEEHLCFRTLQRFTAATLEHGMHPPISPKPEWRTLLDEMAVVATEEYRSIVFQEPRFVEYGRLATPELEYGRMNIGSRPSKRKPSGGIESLRAIPWIFAWTQTRFHLPVWLGFGTAFKHVSPKDIKNLRILQEMYNEWPFFRVTIDLVEMVFAKGNPGIASLYGKLLVSSELWSFGERLRANYQETKDLLLQVAGHKVFLKESLSEAEVGLRDSYITTLNVCQAYTLKRIRDPNFHVKVRPHISKEISDASKPAAELVKLNPTSEYAPGLEDTLILTMKGIAA

SEQ ID NO: 5691 - protein, 546 aa, Xanthomonas oryzae pv. oryzae KACC10331
MAAKDIRFGEDARTRMVRGVNVLANAVKATLGPKGRNVVLEKSFGAPTITKDGVSVAKEIELADKFENMGAQMVKEVASKTNDNAGDGTTTATVLAQALIREGAKAVAAGMNPMDLKRGIDQAVKAAVVELKNISKPTTDDKAIAQVGTISANSDESIGNIIAEAMKKVGKEGVITVEEGSGLENELDVVEGMQFDRGYLSPYFINNQQSQSADLDDPFILLHDKKISNVRDLLPVLEGVAKAGKPLLIVAEEVEGEALATLVVNTIRGIVKVVAVKAPGFGDRRKAMLEDMAVLTGGTVISEEVGLALEKATIKDLGRAKKVQVSKENTTIIDGAGDSAAIESRVGQIKTQIEDTSSDYDREKLQERVAKLAGGVAVIKVGASTEIEMKEKKARVEDALHATRAAVEEGVVPGGGVALVRALVAVGNLTGANEDQTHGIQIALRAMEAPLREIVANAGEEPSVILNKVKEGTGNYGYNAANGEFGDMVEFGILDPTKVTRSALQNAASIAGLMITTEAMVADAPKKDEPAMPAGGGMGGMGGMDF

SEQ ID NO: 5692 - protein, 565 aa, Acer pseudoplatanus
MGLMYRFLGFMFLGCLLFCKAEGAIRHYDFVVKESNFSRLCSTKSMLTVNDSFPGPEIHVHKGDTVFVNVHNQGTYGITIHWHGVKMPRNPWSDGPEYVTQCPIPAGTNFTQEINFSTEEGTLWWHAHSDWSRATVHGAIIIYPAHGTTYPYPKPYGEQTIVLASWYKADVMEVYEEAVASGAEFNTSDAFTINGQPGALFDCSTGTTFRLPVKKGETYLLRIINAILNEEMFFGIAQHNLRVVGTDGFYTKPINTEYIMITPGQTMDVLVTANQPASYYYMAASPFSDSEAAFDNATTTAILQYIGNQSAPSPIPLPTLPGTNDTTAASNFTTKFRSLASSDHPISVPKNITKHILMTVSVNLIFCPNDSCSGTPDGDRLGASLNNQSFVFPSTDILEAYTRNNFSEFTTDFPLEPPIYFNFTGDVNVTVYTGQGTKVIELEYGEVVELVYQGTNVGNAQNHPMHLHGFSFYLVGTGLGNFNNQTDPDNYNLIDPPEVNTIQLPKKGWAAIRFVADNPGVWFLHCHFERHTTWGMAVAIIVKNGGTTSTSMRPRPAYMPPCPNS

SEQ ID NO: 5693 - protein, 134 aa, Xanthomonas oryzae pv. oryzae KACC10331
MPAPASSGFFRALCWQSSYASANIADNFQTNHTLKRVFSMSIKPLHDRVVVKPIEADEVSAGGIVIPDSAKEKSTKGEVVAIGAGKPLDNGSLRAPVVKVGDKVIYGQYAGSSYKSEGVEYKVLREDDILAVIG

SEQ ID NO: 5694 - protein, 553 aa, Synechococcus sp. CC9605
MTPALTWWSGTVIYQLIVRSYSDGNGDGTGDFKGLAARLPYLRWLGVNTLWLTPIYPSPLRDGGYDITDFTGIHPDLGDLSSFHRFLTAAHSQGMRVILDLVLNHTSDLHPWFQRARWAPKGSPERDVYVWSDDPKRYAEAPVLFRHFEASNWEWDPVAEQYYLHRFLRHQPDLNYENPWVQDTMLEVVDFWLDRGVDGFRLDAVPFLFESEGTRCEGLPETHAFLTRLRERVDAHGRDVLLLGEAIQPVEEAAPYLADDELHGAFNFVLTAHLFAAIASGRTQQLGECLMQAEQAVSGPRWALPLRNHDELWLGDGHLVSDEVIQTIRVGLPQGQGHWLNWGINRRLAPLLNGDPRSNRLLHGLLYSLPGMPCLYYGDELGMGDWPGLRDRDPNRTPMAWTPARNGGFSTAPDPLLVLPPITAPGYDYRVVNVEVQKQLPGSLLNWHRRMLTCRRLLPALRHGSFRLLYSPHPGVLVYLRCTEAMTVLVAANVTAAGASLSLDLSEWTGERTREVMWGCEFPPAAAEWFVNLPPYGFNWWLIGEVEPAATAA

SEQ ID NO: 5695 - protein, 363 aa, Zea mays
MEDDDDCPPLAVELPPRVPSPPEQSPSDASPVGVTVITGYLGAGKSTLVNYILNEQHGKRIAVILNEFGEEIGVERAMINEGQGGALIEEWVELANGCVCCSVKHSLVQALEQLVQRKDRMDHILLETTGLADPAPLVSVLWLDDQLESSIVLDSIITVIDAKNFRVQIDEHKNSSSFPEAFHQIAFADVVILNKIDLVEDSLEDLEKHIRDVNALVTVVRSVRCQVDLNEVFNRQAYGAKNSSHLQELLDYSKSVPPSRRHDNSISTLCIYEQDSVNLAKVESWLEDLLWEKKSSMDIYRCKGILYIHDSDQVHTLQAVREVYEVVPARKWSETESRMNKIVVIGRNLDINVLQDSFSGCKS

SEQ ID NO: 5696 - protein, 1287 aa, Anabaena variabilis ATCC 29413
MLEFNHLRLHNMHGSLVAKIASAIATLVSSSILIGWLLDVELLKIFFWGSSGIMTPNTALCFALCGISVWLLVTKPSGTSHSSQSHKPYQKLSRAFSVSNTIIAALAICEYLCGWESGIDKLFLGDVFTTINTPHMGLNTAINFLLIGIALELLTYPRNNRSYWYAQILTLFTTVISLEVFVCYAYKVNFFYTINPNFTSMSLQTALLFIVLCIGILSGQSEKGLMKIVFSDSYGGLIARRLLLAAITVPLFLGWLILKGQRAGRYGPDFAVSVFAVILIVIFVIIIWQNAVVIELLSQQRDRAQESLKAYEEKLKSLVNANIIGIAFADIYGGIQQANEAFLMMVGYSQEDLLTGRLNWKNLTPPEYFYLDEQGIAEAQANPKGACTTYEKEYIRQDGSRIPVLIGYVLLGEEREESVAFILDLSERQQAQQKILQLNKDLQRRVVELQTLLDMIPIGIGIAEDAECQNIKINPAFAKQLQLSTDVNASLSAPPNQRPTTFKIFHEGRELLPAELPMQYSAVHGVEVLDYEVDVVHENGEIIKLLEYVAPLFDEDGKTRGCIGAFVDITQRKQAEELLRNEQKWLEDVLNLMPRPLLFIEPETARVTFANRAADELAGGKFPRGVPAEEYHTVYHFTDINGNPIPNEQMPGVRVARGERLEGLELDWHTNDEVLSLLIFADTLPAMHGYPATCVVVFQDVTQIKQAEKALSLGYQRLKLLFSTANDLLSSQEPVALIDSCFQKLAQQIGLDVYLNYLVEDNSQSIRLASYHGICPELAQKIKFLKFGEAICGTTAQERHSIALENVQQSTDPKTQLIRSMGIHAYYSYPLIAQGRLLGTLSFGSRSRTSFTENQKGMMQAVCDQIAIAMERMELINSLQRQTEQLTEANRMKDEFLAILSHELRSPLNAILGWAQLLQARRLSEAQTAKGLETIERNAKAQTQLIEDLLDISRMIRGKLRLNVRTCNLIPIIETTIENINLAAQAKEIDLTFFLENPATENLPFQVSGDPERLQQVIWNLLTNAIKFTPSGGKVEVRLTKNPGCEQNELITNSYAQIQVIDTGIGINSSFLPYVFDRFRQADSSITRSHGGLGLGLAIVRHLVELHGGTVHVHSPGEEQGSTFTVKLPLLSENKATTIEPISPRGEHFTPLPLCPSLLGVRVLVVDDESDSRDFVSTVLEQCQAQVRSVPTAKEALQIISQWKPDVLVSDIGMPEEDGYSLIRKLRSLPPEQGGNIPATALTAYARAEDRTRAIQEGFQLHLPKPIEPTELATVVASLIKRGQRRD

SEQ ID NO: 5697 - protein, 459 aa, Bacillus cereus G9241
MSKLVVIGGGPAGYVAAITAAQNGKDVTLIDEADLGGTCLNVGCMPTKSLLESAEVHDIVRKANHYGITLNNGSISIDWKQIQARKSQIVTQLVQGIQYLMKKNKIQVIQGKAKFETDHRVRVTNGNKEDIVDGDQFIIAAGSEPTALPFAPFDGKWILNSSHAMSLENIPKSLLIVGGGVIGCEFASIYSRLGTKVTIVEMAPQLLPGEDEDIAHILRGKLENDGVEIFTGAALKGLNNYKKQASFEYEGSIQEVNPEFVLVSVGRKPRVQQLDLEKAGIQYSNKGISVNEHMQTNVSHIYAAGDVIGGIQLAHVAFHEGTTAALHASGEDVKVNYHAVPRCIYTAPEIASVGLTEKDAREQYGDIQIGEFPFTANGKALIIGEQTGKVKVIVEPKYQEIVGISIIGPHATELIGQGTVMIHTEVTADIMRDYIAAHPTLSEAIHEALLQAVGHAVHA

SEQ ID NO: 5698 - protein, 441 aa, Glycine max; identical to SEQ ID NO: 953

SEQ ID NO: 5699 - protein, 332 aa, Bacillus cereus G9241
MLKTTESKGNEITKEQARWMYEKMLEIRKFEDKVHELFAQGVLPGFVHLYAGEEAVAVGVCAHLTDSDSITSTHRGHGHCIAKGCDLNGMMAELFGKATGLCKGKGGSMHIADLDKGMLGANGIVGGGFPLACGSALTAKYKGTKDVSVCFFGDGANNEGTFHEGVNLAAIWKLPVIFIAENNGYGEATTFEYASSCDSIADRAKAYNIPGVQVDGKDLLAVYKAAEEAVERARNGDGPTIIECMTYRNYGHFEGEAQTYKTSEEKEEHLNEKDAIVNFRKHLIHEALLTESEIVDMEKAVDEAVQRSIEFSENSPYPGDEELLKDVYVSYK

SEQ ID NO: 5700 - protein, 345 aa, Mesorhizobium sp. BNC1
MQDATKLGLGVVGLGMVAATHARALQDLCDLIAVRGVFARDPRRRADFAGVFGFPAAESVEELIRRDDVDAILVLTPPNARMEIVEAAFNAGKHVLLEKPIERDSAAAGRIVEMCCAAGVTLGVTFQHRFREASQALKGLIDGGSLGAVCAVRVSVPWWRDQSYYDVPGRGTYARDGGGVLISQAIHTLDLMIWLLGLPEAVTAMAATTGLHRMEAEDFVAGALRWPGGAVGSLTATTAAFPGRNEYIVVDFERASACLEGGELVVRHHDSRTEIIGTAGGSGGGVDPMAFTHEWHRSAIEDFARAIAGGRAPVVSGESALQVHRLIDALLASASEGRQVLLNPH

SEQ ID NO: 5701 - protein, 321 aa, Triticum aestivum
  misc_feature (101)..(101): Xaa can be any naturally occurring amino acid
  misc_feature (231)..(231): Xaa can be any naturally occurring amino acid
  misc_feature (260)..(260): Xaa can be any naturally occurring amino acid
  misc_feature (267)..(267): Xaa can be any naturally occurring amino acid
  misc_feature (273)..(273): Xaa can be any naturally occurring amino acid
  misc_feature (284)..(284): Xaa can be any naturally occurring amino acid
  misc_feature (290)..(290): Xaa can be any naturally occurring amino acid
  unsure (1)..(321): unsure at all Xaa locations
MLCLCVQASVCIKITALCPIALLEKTSDLLRWQHKNPSVHLPWKQHAFPILSDSSPLYLTPSEPAALTAEEERELQLAHDRLLAVGARCAEHGIPLLVDAXEYASVQPSIDYFTFVGALACNGGGRPIVHGTVQAYLRDARDRLEAMVRAAEEERVCLGVKIVRGAYLTREARLAESLGVPSPIHGSIQDTHDCYNGCAAFLLKRVRRGSASVMLATHNVESGQLAAAKAXDWASARATGTAFAQLMGMADGSPWGPATXFQSNNYXPYGPVXNHPYLNQAAQXKKDVSXSAFDGTAPGKTGKKSTRDGRIRHGVTETREL

SEQ ID NO: 5702 - protein, 400 aa, Nitrosomonas europaea ATCC 19718
MTRQVQDAYIVAATRSPVGKAPRGMFKNVRPDDLLVHVLQAVLKQCEGLDPAAIEDVIVGCAMPEAEQGINVARVALLLAGLPVSVPGVTINRFCASGLQAVAMAADRIRLGEADVIIAGGTESMSMVPMMGNKVAMNPALFKPGSEQVAIAYGMGITAEKVAEQWKVSREEQDAFALESHHRAIRAIEQGEFRDEISPYPVQENRPDLNTHEIQNTAIVRDTDEGPRADTSAEALARLRPVFAAQGSVTAGNSSQMSDGAGAVMVVSEAALQRFNLTPIGRFIGYTVAGVPPEIMGVGPVKAIPKVLEQTGIQQDALDWIELNEAFAAQSLAVINDLGLDRAKVNPLGGAIALGHPLGATGAIRVATLLSGLRRHKLKYGMVTMCIGGGMGAAGVFEAL

SEQ ID NO: 5703 - protein, 405 aa, Solibacter usitatus Ellin6076
MNPSESTLLRAARWLAFGSGTAIMVGIAPSQIFLALAFAALLACGEPLRLPRIKLPLGLFLLGTIISLAFSDNPAAGLPQIRKFYVFLELLVIFSLLRSVEMVRLLFLSWAGIGAVTAVRGFVQFASKVQEAHRLGRNFYDFYVGERITGFTSHWNTYSAEEMFAFIMLVAFLLFAPGTRKRLWLWLICGALILIAIVLGETRGIWIALAVAGLYLVWFWKRWMVIAAPAVALLGIALAPSAMQERFTSIFKPKSVDSNQFRVVTWRTGLRMVKAHPWLGLGPEEPHLQFEKYVPEDIPRPLPSGWYGHLHNIYLHYAAERGIPTMLVLLWMLLQILYDFWRGLRILPPGPSNRRFLLHGGIAAVLATMAEGFVELNLGDSEVLTMFLVIVACGYLALEKDLAFD

SEQ ID NO: 5704 - protein, 408 aa, Haemophilus ducreyi 35000HP
MSNQTISTPKQVFVGLQMLFVAFGALVLMPLITGLDPNTALLTAGIGTLLFQFCTKRQVPIFLASSFAFIAPIQYGIQQWGIPTTMGGLVFTGFVYLALSSLVKWKGANILEKLFPPVVVGPVIIIIGLGLAPTAVDMALGKNTAIDPNVALFISMVTLITTLVVAVFAKGLMKLVPIMFGIIVGYILSICYGIVDFNPVHNAAWFSLPSLTTPEFKLEAILYLLPIALAPAVEHVGGIMAISSVTGKDFINKPGLHRTLLGDGVATSAAAMLGGPPNTTYAEVTGAVMLTKNFNPKIMTYAAIWAIAISFCGKVGAFLQTIPGVVMGGIMMLVFGSIAAVGMSTLIRAKVDMSEARNLCIVSVVMTFGIGGMLINVGEFSLKGISLCAISAIIMNLVLPKEAAKKTD

SEQ ID NO: 5705 - protein, 155 aa, Anabaena variabilis ATCC 29413
MAITRWEPFREIERLEPFREIDTLQRQINRLFDRLMPTNGGEKVGFAFVPAAELEEKDDAIHLKLEVPGLEANDIHVEATPESISITGERKSETKMEENGITRSEFRYGKFQRVIPLPSLIQNDKVQAEYKNGILRLTVPKAESERNKVVKVNIG

SEQ ID NO: 5706 - protein, 1438 aa, Debaryomyces hansenii CBS767
MVNSSNGSNPLSASSTDLNSAQQQYTNVNNPVSNANHSHRHTAGPKGRRPSLLRNDSSSNSVYTPSNTAGDGSTPMHSSHLKWGSSGTGNNNASSTAINDSHNSTNANSTSLLTPSSNKRQTSHNNSGNNTLSSTGGRARSRSITQTLSHNLQNNNKQYLSQEKAYLKKMKNQFVDDYYTKGITGAEMKEVNNNDEDEDEDEDETNPNGHSDLLADMDDDKYQIDYNLAFTLLKNGKNAININPNRNITQLNADSADDPAVIERLEWQSMLTSVLTGDVVRSEKTKIINNNSPENEQSSFLHATYKENLWFGIHAKLFNRTEDDQRKIIEYRRTLADALFDEVLNFEVNHDDPESNPPRNQVAYILDKYDKCCDLWRTLEDMKNEKPVCRTAEFQDRIDALTAWLSITDAMQRESDSLKVWIGNDEMDITKSRSESGSAPSSEATTPTNTKKIFNEDNKSLAERLMKEKDVYSIFQKRIFFPLAPWMIKSKDTYLRLGHIFETLKLPDYIHDLIQLCLIPMKLIKEIINVRLVYAKKLENPTLMMIDQMIDDFKSYITIALEVKLGIVEYCRPDVGQIWVLSDLFDSENQEFDKVVLKCVKYFFALLNKKLLDSSRSPTNFRTFKEPEELEETWNYLKWLGNLIDGGSVVVAEHITVLTLKLIHRLLAYFNNQIGTPPAKSAGSSDLIRWYSSTTENFGQLRRKLARFTGEISRDFTNSLVFDLSSTPSNRTKNILEVLKSTNHFLVYTGTIETQGTYFFASAELMGNEQEILRIINGSYIGSDPNEANLDFSDLLKMLQLHEDGETDQHPDLVDHLIPNESSDFGYVLALCPPKPIVWEGHIVTIHLENVPITDIKVGQILMITKLPYGSLHMVKEKFLDTVNDFILVGGMMKQVEQRCSLAKVHHELTKINRVFFKMSLSVLDSVKKVRANCKELAAESSCQELINSYFIYARDFGKNSVKNLDSSRKSTVIMKLIQLSIEWVSFVCDDCIPTDRRTFRSCVLALEFAMDMTRGFNVLVLNDEQFYKLKLKVARCMSLLISHFDIMGARSSEAEKKKLLKWSSQRHRIENSADDACIIQAYREDVMREIEEIENYRKDLQEQLLSIGRVLDVTDLEYQFVTLLASSFSSVSIRWQKGRFIGGGTFGHVYAAVNLDTGGVMAVKEIRFHDSQSVKNIVPSIKDEMTILEMLNHPNVVQYFGVEVHRHKVYIFMEFCEGGSLAGLLTHGRIEDEMVIQVYTLQMLEGLAYLHQSGVARRDIKPENILLDHNGVIKFVDFGAAKVIATSGRTLGGGSGGANQGRSMNGTNLNSMTGTPMYMSPEVITGASGSGNGVVDIWSLGCCVLEMATGRRPWTNLDNEWAIMYHIAAGHKPQLPSADQLSEPGRKFISRCLEHDPSNRPGAVELLNDPWIVAIRQAAFVSSDSVSTPSSEVGSDM

SEQ ID NO: 5707 - protein, 460 aa, Yersinia pestis KIM
MTGYLMETTLMTKHYDYLAIGGGSGGIASINRAAMYGKKCALIEAKQLGGTCVNVGCVPKKVMWHAAQIAEAIHLYGPDYGFDTTVNHFDWKKLIANRTAYIDRIHQSYERGLGNNKVDVIQGFARFVDAHTVEVNGETITADHILIATGGRPSHPDIPGAEYGIDSDGFFELDEMPKRVAVVGAGYIAVEIAGVLNGLGTETHLFVRKHAPLRTFDPLIVETLLEVMNTEGPKLHTESVPKAVIKNADGSLTLQLENGTEVTVDHLIWAIGREPATDNLNLSVTGVKTNDKGYIEVDKFQNTNVKGIYAVGDNTGVVELTPVAVAAGRRLSERLFNNKPDEHLDYSNIPTVVFSHPPIGTIGLTEPQAREKFGDDQVKVYTSSFTAMYSAVTQHRQPCRMKLVCVGAEEKIVGIHGIGFGMDEILQGFAVAMKMGATKKDFDNTVAIHPTAAEEFVTMR

SEQ ID NO: 5708 - protein, 286 aa, Glycine max
MAAFRWKSFEENEDRPAKPRHFGVTEIQSPHCTLFSHNLLQDIFESMGDYVDGLKFSGGSHSMMPKATIKQIIDMAHQHDVYVSTGDWAEHMISKSPSGFKEYVEECKQLGFDTIELNVGSLEIPEETFLRFVRLVKSGGLKAKPHFQVKFNESDIPKGGDRAYGAYIPPVPRSFELVEDVNLLIRRAERCLEAGADMIMIDADDVSKHADNMRADIIAKIIGRLGIEKTMFEASNQRISEWFIKQYGPKVNLFIDHSNVVDVECLRGRNLGRNLASFLGASDFLF

SEQ ID NO: 5709 - protein, 449 aa, Agrobacterium tumefaciens str. C58
MQGRGDADPYRMARSCVKGRNMSTNYLSAASVRTKNPAGVIATCGLMIMFDGYDLVVYGAVAPALLKESTWALNPAMVGRAAALTLVGMLLGALFAGTMADRIGRRKVVLLSLAGFSAMMIASAMTPNFLAFEITRFFAGLGLGALLPTVTALVLEFSPPQRRAQANSLSFLGYLIGGIISGILGMLLLESYGWRPLMLIGGLPLILLPIFMRFLPESPEWLASKGRQAEADGICDSYGLQRIVPHAKMQKGGVGALFSEGRLASTLNAWGIHFCSLLLTFGMVNWLPTIMNKMGYDISSALSFSVMLNVGAAIGILIGGRFADKGNVKVVVAILFAVGAASIFALTANKGPLLYVFVALAGAGTIGTQILANVLVGRLYPVHIRGTGLGFSLAVGRLGGIAGPMIGGLVLQRGLAPEWNFYIFGSVAVVGLMLTVLTLLYRTSGDARV

SEQ ID NO: 5710 - protein, 462 aa, Geobacillus kaustophilus HTA426
MEQKQPQLHRGLEERHISLMSLGAAIGVGLFLGSASAIEMAGPAILLGYAVSGAIMFFIMRALGEMAVEHPVAGSFSRYAYQYLGPLAGYLTGWNYWFLWVVTCIAEITAVGIYMQFWFPDTPRWAWALAALVLMTFINFLAVKAYGEFEFWFALIKIVTIVAMIIIGLGMILFGIGNGGVATGISNLWKHGGFFPHGISGVLMSLQMVMFAYLGIEMIGVTAGEVKNPQKSLTKAINSVFWRILIFYVGALFVIMSIYPWNEIGEKGSPFVLTFEKIGIHAAAGIINFVVLTAALSSCNSGIFSTSRMLFNLAEQQEAPSAFGRLTKRGIPGAALIATALVMLVGVYLNYVSEKVFQWVTSIATFGAIWTWAVILLSQLKFRKQLSAEQAQRLTFKLPLYPYSSYVSLAFLIGVAALMAYFPDTRIALIIGPAWLLLLTAVYFAKGMHRRQHGQAEEKQAG

SEQ ID NO: 5711 - protein, 1376 aa, Podospora anserina
MRLLERNDTGDFSLTDDIPDDQVPPYAILSHTWGDEEIIFKDIKDGICKKKRGYSKIQFCGDQAGRDGLKFFWVDTCCIDKSDSTEVQRALNSMFQWYRNAAKCYVYLTDVSTCQHYTDGNSGWWELTFRKSRWFTRGWTLQEAHSPVIVEFFSKEGERLGDKKSLEQQIHDITEIPLEALPGNTLSDFSIEERLSWVGKRNTTQKEDKAYSLFGIFDITMPLLYGEGEDRAFGRLREEISKHDRCLSSLHSSSPRLDKKRIEEAKGGLLTGAYRWVFANPDFCLWRERSESRLLWINGDPGKGKTMLLCGIINELQGAIVEDGHCRNLAYFFCQATDSRINNAIAVLRGLIYLLAHQQPRLISHVRKYTDAGKSLSDANAWFALSDILVGMLGDPNVKPTCLVVDALDECVIDLPKLLDFIVCISSDRIKWLLTSRNETIIEKKLKSNNARTRLSLELKENAMEVSHAVDVYIDDKLSGLEALQDDALLKDQVRDILHNKANDTFLWVALVVQELSMDGVESWHVLQIVEEVPPGLDGMYKRMLDEIERNKRDSEFCWRILSVVTVAYRPLYLDEIGGLSGLPEQIVRSTENIQKIVAKCGSFLTVRDNQIYLVHQSAKDYLSDQASPLLFPSGVAVTHHDISDRSLKLLSGKLQRDRYGLCIPGFSIDHVRVPDPDPLATVRYSCVYWVDHLCNWQSSDDSKHPNIFQDGGIVDSFLRQHYLHWLEALSLCKSMPQGILSLAKLESILQHKSITSQLLSLVTDMHRFVIYWRWVVENYPLQVYASALVFSPARSITRGLFTQEERKWITSRPIVEDNWNACRQTLEGHSGSVNSVTFSPDSKWVASGLDDSTIKIWEAATGSCTQTLEGHGGWVLSVAFSPDSKWVASGSADSTIKIWEAATGSCTQTLEGHGGWVYSVAFSPDSKWVVSGSADSTIKIWEAATGSCTQTLEGHGGWVWSVAFSPDSKWVASGSADSTIKIWEAATGSCTQTLEGHGGPVNSVAFSPDSKWVASGSDDHTIKIWEAATGSCTQTLEGHGGPVNSVTFSPDSKWVASGSDDHTIKIWEAATGSCTQTLEGHGGWVYSVAFSPDSKWVVSGSADSTIKIWEAATGSCTQTLEGHGGSVNSVAFSPDSKWVASGSTDRTIKIWEAATGSCTQTLEGHGGWAWSVAFSPDSKWVASGSADSTIKIWEAATGSCTQTLEGHGGPVNSVAFSPDSKWVASGSDDHTIKIWEAATGSCTQTLEGHGRSVKSVAFSPDSKWVASGSTDRTIKIWEAATGSCTQTLEGHGGSVKSVASSLDSKLIASGSNDTNPPHYQRYGIDMSKRWITKGSENWLWLPLEYQSQCFAAAASTIAICCSSGRVLTMKFTTDS

SEQ ID NO: 5712 - protein, 288 aa, Gossypium hirsutum
MAFPVVDTEYLKEIDKARRDLRALIALKNCAPIMLRLAWHDAGTYDVSTKTGGPNGSIRNEEEFTHGANSGLKIAIDFCEEVKAKHPKITYADLYQLAGVVAVEVTGGPTIDFVPGRKDSNICPREGRLPDAKRGAPHLRDIFYRMGLSDKDIVALSGGHTLGRAHPERSGFDGPWTNEPLKFDNSYFLELLKGESEGLLKLPTDKALLDDPEFRKYVELYAKDEDAFFRDYAESHKKLSELGFTPTSARSKVMVKDSTVLAQGAVGVAVAAAVVILSYFYEVRKRMK

SEQ ID NO: 5713 - protein, 206 aa, Zea mays
MDDPVERLKDGFHKFKTEVYDKKPELFEPLKAGQAPKYMVFACSDSRVCPSVTLGLQPGEAFTVRNIAAMVPAYDKTKYTGIGSAIEYAVCALKVEVLVVIGHSCCGGIRALLSLQDGAPDTFHFVENWVKIGFPAKIKVKKHHASVPFDDQCSILEKEAVNLSLENLKTYPFVKDGLANGTLKLVGGHYNFVSGEFLTWDNKQPS

SEQ ID NO: 5714 - protein, 448 aa, Yersinia pestis KIM
MMNGLVSLESFLESLQRRDANQPEYLQAVREVFTSLWPFLEQNPHYREQSLLERLVEPERVIQFRVAWTDDKGHVQVNRAWRVQFSSAIGPYKGGMRFHPSVNLSILKFLGFEQTFKNALTTLPMGGGKGGSDFNPKGKSQAEVMRFCQALMTELYRHLGPDTDVPAGDIGVGGREVAFMAGMMKKLSNNTACVFTGKGLSFGGSLIRPEATGYGLVYFTDAMLKRHGLGFEGRKVSVSGAGNVAQYTIEKAMELGAKVVTASDSGGTVVDEVGFTPEKLAHLAEIKNKRYGTIEDYARERNLVYLAGQQPWSVPVDIALPCATQNELDLPAALQLIANGVKAVAEGANMPTTIQATDAFLEAGVLFAPGKAANAGGVATSGLEMAQNAARMSWKSEKVDVRLHHIMLDIHQSCVEYGGEGKQTHYVHGANIAGFVKVADAMLAQGVL

SEQ ID NO: 5715 - protein, 255 aa, Arabidopsis thaliana
MAVSLLSKLRCITVDVTGTLIAYKGELGDYYCMAAKAIGLPCPDYKRVHEGFKLAYTDMAQKYPCFGFHAKMPNIVWWKTCVRDSFVKAGYEYDEETFEKIFRRIYSTFGSAAPYSVFQDSQPFLRWARRKGLIVGLVSNAEYRYQEVILPSFGLSKAEWDFGVFSGIEGIEKPDPRIFTLALERAGNNIAPEEVLHIGDSMRKDYVPAKSIGMHALLVDRFKTEAAKDWIEAGAIVLPDLVAVQQLLESDKLKC

SEQ ID NO: 5716 - protein, 415 aa, Hygrophoropsis aurantiaca
HVDSGKSTTTGHLIYKCGGIDKRTIEKFEKEAAELGKGSFKYAWVLDKLKAERERGITIDIALWKFETPKFMVTVIDAPGHRDFIKNMITGTSQADCAILIIAGGTGEFEAGISKDGQTREHALLAFTLGVRQLIVAVNKMDTTKWSEDRFNEIIKETSTFIKKVGYNPKAVAFVPISGWHGDNMLEESPNMPWYKGWSRETKAGVVKGKTLLDAIDAIEPPVRPSDKPLRLPLQDVYKIGGIGTVPVGRVETGIIKAGMVVTFAPTNVTTEVKSVEMHHEQLVEGVPGDNVGFNIKNVSVKDIRRGNVASDSKNDPAKEAASFNAQVIVLNHPGQIGAGYAPVLDCHTAHIACKFAELIEKIDRRTGKALEAAPKFVKSGDACIVKLIPSKPMCVESYNEYPPLGRFAVRDMRQ

SEQ ID NO: 5717 - protein, 566 aa, ASPERGILLUS NIDULANS FGSC A4
MFSGSSSPPKDKSDTIPRSGPINTPSLSIQTEGTVGSQAKSPPPTSFFGRRASEEQSPGGDKKRRSSTVSKAASFFANAKNSLSLSSPRTESALSSSLPESSLHRYGNMDPALNVPQGSLNNSAGESSPTPRSSFRVGVTEDRNKKCRRTMEDTHAYLYNFLGNPVPSAQNDDSDQSSHPSDASPKTGELTPIVETDNGYFAIFDGHAGTFAAQWCGKKLHLILEDVMRKNINAPVPELLDQTFTSVDQQLEKLPVKNSGCTAVVALLRWEDRIPTPSSVTGSSAIGPAAVAATKAGADSKADDTPTQEAAATPVPAIPPKLREKAIRQRVLYTANVGDARVILCRNGKALRLSYDHKGSDENEGRRIANAGGLILNNRVNGVLAVTRALGDAYIKDLVTGHPYTTETVIQPDLDEFIILACDGLWDVCSDQEAVDLIRNVSDAQEASKILVDHALARFSTDNLSCMVIRLYADRHREVASQAVDLAGWESRSSRGLSETDKIVEGARKSMANTGIADESETLKKVHDEAEECTPEEVPESILSASPNAPAATLNQPNKPGSSDST

SEQ ID NO: 5718 - protein, 419 aa, Strobilomyces floccopus
RIGHVGSGKSTTTGHLIYKCGGIDKRTIEKFEKEAAELGKGSFKYAWVLDKLKAERERGITIDIALWKFETPKFMVTVIDAPGHRDFIKNMITGTSQADCAILIIAGGTGEFEAGISKDGQTREHALLAFTLGVRQLIVAVNKMDTTKWSEDRFNEIVKETSTFIKKVGYNPKAVAFVPISGWHGDNMLEESANMPWYKGWTKEVKGGAVKGKTLLDAIDAIEPPVRPSDKPLRLPLQDVYKIGGIGTVPVGRVETGVIKAGMVVTFAPTNVTTEVKSVEMHHEQLEQGVPGDNVGFNVKNVSVKDIRRGNVASDSKNDPAKEAASFNAQVIVLNHPGQIGAGYAPVLDCHTAHIACKFAELIEKIDRRSGKSLEQSPKSVKSGDACIVKLVPSKPMCVESYNEYPPLGRFAVRDMRQT

SEQ ID NO: 5719 - protein, 458 aa, Candida albicans SC5314
MGKEKTHVNVVVIGHVDSGKSTTTGHLIYKCGGIDKRTIEKFEKEAAELGKGSFKYACVLDKLKAERERGITIDIALWKFETPKYHVTVIDAPGHRDFIKNMITGTSQADCAILIIAGGTGEFEAGISKDGQTREHALLAYTLGVKQLIVAVNKMDSVKWDKNRFEEIIKETSNFVKKVGYNPKTVPFVPISGWNGDNMIEPSTNCPWYKGWEKETKSGKVTGKTLLEAIDAIEPPTRPTDKPLRLPLQDVYKIGGIGTVPVGRVETGIIKAGMVVTFAPAGVTTEVKSVEMHHEQLAEGVPGDNVGFNVKNVSVKEIRRGNVCGDSKNDPPKGCDSFNAQVIVLNHPGQISAGYSPVLDCHTAHIACKFDTLVEKIDRRTGKKLEENPKFVKSGDAAIVKMVPTKPMCVEAFTDYPPLGRFAVRDMRQTVAVGVIKSVEKSDKAGKVTKAAQKAAKK

SEQ ID NO: 5720 - protein, 141 aa, Pseudomonas fluorescens Pf-5
MAVQRTFSIIKPDAVAKNVIGKIVSRFEEAGLRVVASKMKQLSKAEAEGFYAEHSERGFFGELVAFMTSGPVVVQVLEGENAIVRNRELMGATNPKEAAAGTIRADFAESIDANAVHGSDSEAAAAREIAYFFAATEVTAR

SEQ ID NO: 5721 - protein, 421 aa, Suillus pictus
RIGHVDSGKSTTTGHLIYKCGGIDKRTIEKFEKEAAELGKGSFKYAWVLDKLKAERERGITIDIALWKFETPKYMVTVIDAPGHRDFIKNMITGTSQADCAILIIAGGTGEFEAGISKDGQTREHALLAFTLGVRQLIVAVNKMDTTKWSEDRFNEIIKETSTFIKKVGYNPKAVAFVPISGWHGDNMLEESPNMPWYKGWTKETKGGVVKGKTLLDAIDAIEPPLRPSDKPLRLPLQDVYKIGGIGTVPVGRVETGVIKAGMVVTFAPSNVTTEVKSVEMHHEQLVEGLPGDNVGFNVKNVSVKDIRRGNVASDSKNDPAKEAASFNAQVIVLNHPGQIGAGYAPVLDCHTAHIACKFAELIEKIDRRSGKSLEASPKFVKSGDACIVKLVPSKPMCVESYNEYPPLGRFAVRDMRQTVA

SEQ ID NO: 5722 - protein, 226 aa, Moorella thermoacetica ATCC 39073
MIIVLSGEQGERVATGVKLYREGLAPRLLMTGGPVKWNVAAADIMADQAKFLGVPEKDIVLEKWAISTYENSLYSLMALGPGDRSGGPGYPYVISMPPGYRRQGILGRAVRDYIHVDDLAAAHVLALEALEQGSPTAAYNLGSGRGYSVLEVIRTAEKVTGKKVPCRVGPRRPGDQAVLVASAEKAMAELGWRPRYTELEDIIATAWQWHCRRPRGYSQGYSPAGR

SEQ ID NO: 5723 - protein, 421 aa, Gluconobacter oxydans 621H
MWGLSFAALRFHAGWTETRRCGTRRCMIPLVVTAGTVRSAIGAGLAETRESLLDRRSGLTPCDFAGVKTGYMGRVAGIEQHSLPSELLSFDCRNNRLADMTLQQDGFIDAVADARAFYGASRIAVITGTSTSGILSSEEAYARRNIASGTMPADFQEEYTQDLFSLPRYVAAALGLTGPLLTVSNACASSSRAFIDAWHWIAAGLCDAVVVGGADSLCGMTLRGFASLSLIASGPTRPCDAMRDGISVGEGAGFVLLERACARSISPMARMMGFGVSSDGYHMSSPDPAGRGAMAAMTQALNRASLTPRDIGYINLHGTGTLTNDAMEDGAVFKVFGDGTPCSSTKGWTGHTLGASGIIEVLFAIQTLETGVLPGCLNVQTVDPAFRSQIITANENTAPRAILSNAFGFGGTNCSLVIGAA

SEQ ID NO: 5724 - protein, 476 aa, Synechococcus sp. CC9605
MPATTPFRDPPAWVADAVLYQIFPDRFRRSGRVDAQRHLALKPWGTDPREEGFQGGDLYGVIDALDGLQAMGITCLYLTPIFSSAANHRYHAYDYFEVDPMLGGNAALRDLIDAVHRRGMKLVLDGVFNHCGRGFWAFHHVVENGADSPYRDWFHVHRWPLQPYPAPGAYCGYDGWWALPDLPKFNHANPGVREHLLAVGRHWLEQGIDGWRLDVPAEVPADFWVEFRQMVRSTNPEAWIVGEVWGDATTWLQGDHFDGVMNYRLGWSSICWAAGEALRRDYRNSEYPLDLLDGQALLTIWTTTTGSYREVVNRSQMNLLDSHDVPRALHSLNNDLAALKLALLLLFLHPGAPCVYYGTEAALAGGPEPGPSSGPGPACREAYPWDVPWSADLRSFIQSLAELRFAHGVLRREGLRWSAQGADVLEGVADGLRVVINRSRSNSVPLTIEQRRSCVWTLGTVDSRAVGPQSAAVLRS

SEQ ID NO: 5725 - protein, 260 aa, Arabidopsis thaliana
MDIEQKQAEIIDQLVKRASTCKSEALGPLIIEATSHPSLFAFSEILALPNVAQLEGTTDSVYLDLLRLFAHGTWGDYKCNATRLPHLSPDQILKLKQLTVLTLAESNKVLPYDTLMVELDVSNVRELEDFLINECMYAGIVRGKLDQLKRCFEVPFAAGRDLRPGQLGNMLHTLSNWLNTSENLLISIQDKIKWADNMSEMDKKHRKEAEEGVEEVKKSLSMKGDVDIRGNKEMFGEPSGVMDYEEDGIRPKRRRHPVTR

SEQ ID NO: 5726 - protein, 349 aa, Triticum aestivum
  misc_feature (101)..(101): Xaa can be any naturally occurring amino acid
  misc_feature (115)..(115): Xaa can be any naturally occurring amino acid
  unsure (1)..(349): unsure at all Xaa locations
MDMDSVECLSLPDASMDVDDVDSHQHQQHHHSIPIHPVHLAANGGVGGRAFAKMNAGGAARGRGSGCYRRAAAGGPPATSVHELLECPVCTNSMFPPIHQXCQNGHTLCSTCKAXVHNRCPTCRQELGDIRCLALEKVAESLELPCKYFSLGCPEIFPYYSKIKHEGQCSFRPSNCPYAGSECAVAGDIPFLVAQRGRGRGVDMHSGCTFNHRYVKSNPREVENATWMLTVFHCFGQYFCLHFEAFQLGMAPVYMAFLRFMGDENEARNYTYSLEVGGNGRKMVWEGTPRSIRDSHRKVRDSHDGLIIQRNMALFFSGGDRKELKLRVTGRIWKEQPNPEGTCIPNLCS

SEQ ID NO: 5727 - protein, 448 aa, Oryza sativa
MVMPMPTEGSEPLLPRKQRDGGDDGAASSHDHFDGASFSGAVFNLSTTIVGAGIMALPATMKVLGLVPGLILVMLAAVLTDASIELLVRFSRAVGATSYGEAMGDAFGAFGRGLLQLCVVVNNVGVMVVYMIIIGDVLSGKSSSGGVHHHGVIEGWFGPNRWNGRFSILVIVTLGVFTPLTCFKRVDSLKYTSALSVALAVVFVVITAGITTIKLMRGQIPMPKLFPDVHDWSSTWRLFTAAPVLVTAYICHYNVHPIHNELKDHSQIRPIVRASLLLCLAVYTTTSFFGFLLFGEATLDDVLANFDSDLGIPYSLVLDDAVRVSYVLHLMLVFPIVFHALRFNMDGLLFPSARPLSSDNRRFGAITAALLTVIFLAANFVPNIWDAFQFTGATAAVAIAYIFPAGMALRDRHGIATKGDKYLAVFMIVLALVANGVAVYSDACLGTF

SEQ ID NO: 5728 - protein, 128 aa, Pseudomonas fluorescens Pf-5
MAYSEKVIDHYENPRNVGKMNAEDPDVGTGMVGAPACGDVMRLQIKVNEQGIIEDAKFKTYGCGSAIASSSLATEWMKGKTLDEAETIKNTQLAEELALPPVKIHCSVLAEDAIKAAVRDYKQKKGLI

SEQ ID NO: 5729 - protein, 264 aa, Thermococcus kodakarensis KOD1
MKVAYVQMEPVFLDPEANYSRAEKLIREAADQGAKLVVLPELFDTGYNFRSREEVEEVAGQIPDGPTTEFLVELAKELEVFIVAGTAEKDEKGNLYNSAVLVGPVGWGYIGKYRKIHLFNREKLFFRPGNLGFHVFNIGIAKVGVMICFDWFFPESARTLALKGADVIAHPSNLVMPYAPRAMPIRALENRVYTITANRIGEEFGLRFIGKSTIASPRAEVLAMGSEDKEEVGVVEIDLSLARDKRINEMNDIFKDRRPQYYTL

SEQ ID NO: 5730 - protein, 338 aa, Ralstonia metallidurans CH34
MKVFYDKDADLSLIKGKNVTIIGYGSQGHAHALNLKDSGVNVTVGLRKSGASWNKAVNAGLQVKEVAEAVKGADVVMILLPDEQIADVYKNEVHANIKEGAALAFAHGFNVHYGAVIPRADLDVIMIAPKAPGHTVRSTYAQGGGVPHLIAVHQNKSGAARDIALSYATANGGGRAGIIETNFREETETDLFGEQAVLCGGTVELIKAGFETLVEAGYAPEMAYFECLHELKLIVDLIYEGGIANMNYSISNNAEYGEYVTGPRVVTEETKKAMKQCLKDIQTGEYAKSFLLENKAGAPTLISRRRLTAEHQIEEVGGKLRAMMPWIAKNKLVDQSKN

SEQ ID NO: 5731 - protein, 197 aa, Arabidopsis thaliana
MSASRFIKCVTVGDGAVGKTCLLISYTSNTFPTDYVPTVFDNFSANVVVNGATVNLGLWDTAGQEDYNRLRPLSYRGADVFILAFSLISKASYENVSKKWIPELKHYAPGVPIVLVGTKLDLRDDKQFFIDHPGAVPITTVQGEELKKLIGAPAYIECSSKSQENVKGVFDAAIRVVLQPPKQKKKKNKAQKACSIL

SEQ ID NO: 5732 - protein, 228 aa, Thiobacillus denitrificans ATCC 25259
MSLPEVRVFPDPEHLVAALADALCAEAEADIRARGSFHLVLAGGNTPRELYRALAARGAGDAHWVVWYGDERCVAADHPERNSVMAEMAWLAASRIPPINRHAIPAECGARDAADAYSKRLEGVGDFDLVLLGMGEDGHTASLFPGQAWGETADSADALAVHDSPKPPPERVSLSAARLNRSRRVWFLVGGASKREAMRRWRDGERLPVGAIHARTETLVWLDRAAAP

SEQ ID NO: 5733 - protein, 585 aa, Leptospira interrogans serovar Copenhageni str. Fiocruz L1-130
MENLQSMPEVQKIISLGKANGEVSYDDINEILPDKILNSEKIDDFFTLLHEMGIEIVEEYTRNTLEPASTLVPKDDSKPARKKKESSASTSGSEDPIKLYLREIGKVSLISGETEVFLAKRIEKGEKIIEETILSSSILRANYIKLLPKIRSKKIKVYDLIRVDKMYALNAEEAHKLEELFFKNILVIQEQEKVLQEAVSKIRKYSETSKKYKEFKEKIDASTEIIHNAIRELGVSQKEIQKISQKIKSMVFRIKEIDRHFLKIKAQYGQDVRDIKAFNRFIEKNEKLDDIEVKMGVNIDEVREVIKDIRNNERKLRRMEQEAGSTVQEIKDWGEKIIKGEREISQAKKELVKANLRLVVSIAKRYANRGMHFFDLIQEGNIGLIKAVDKFEYKKGYKFSTYATWWIRQAITRAISDQARTIRVPVHMIEQVNKVIRETRLFIQEFGRDPNNEEIAERLGWPVQKVKMVKNVAREPISLEIPVGSEEDSELGDFIPDTEVETPVNAAASSILAEQIRQVLHTLPAREQKVIRMRFGLDDGYPQTLEEVGYQFKVTRERIRQIEAKALRRLRHPSRSKKLKDYIDG

SEQ ID NO: 5734 - protein, 781 aa, Oryza sativa
  misc_feature (12)..(12): Xaa can be any naturally occurring amino acid
  misc_feature (25)..(25): Xaa can be any naturally occurring amino acid
  unsure (1)..(781): unsure at all Xaa locations
MASHIVGYPRMXPKRELKFALGVFXGMGRAALRDLEKVATDLRASIWKQMADAGIQDIPSNTFSYYDQVLDTTAMLGAVPERYSWTGGEIGFSTYFSMARGNATVPAMEITKWFDTNYHFIVPELGPNNKFSYSSHKGVNEYKEAKALGVDTVPVLVGPVSYLLLSKPAKGVEKSFALLSLLSSILPVYKEVIAELKAAGATWIQFDEPTLVLDLDSHQLAAFSAAYTELESALSGLNVLIETYFADIPAESYKTLTSLNSVTAYGFDLIRGSKTLDLVKSAGFPSGKYLFAGVVDGRNIWADDLAASLTTLESLEAIVGKDKLVVSTSCSLMHTAVDLVNETKLDSEIKSWLAFAAQKVVEVNALAKALAGQKDEAYFAANTAAQASRRSSPRVTNEEVQKAAAALRGSDHRRATNVSARLDAQQKKLNLPVLPTTTIGSFPQTVELRRVRREYKAKKISEDEYVSAIKEEISKVVKIQEELDIDVLVHGEPERNDMVEYFGEQLSGFAFTANGWVQSYGSRCVKPPIIYGDVSRPNAMTVFWSKMAQSMTSRPMKGMLTGPVTILNWSFVRNDQPRLRLSFLLRLTFSHLLRFETCYQIALAIKKEVEDLEAGGIQVIQIDEAALREGLPLRKAEHAFYLDWAVHSFRITNCGVQDTTQIHTHMCYSNFNDIIHSIINMDADVITIENSRSDEKLLSVFREGVKYGAGIGPGVYDIHSPRIPSTEEIADRINKMLAVLDTNILWVNPDCGLKTRKYTEVKPALTNMVFEAVCRCICIVN

SEQ ID NO: 5735 - protein, 511 aa, Oryza sativa (japonica cultivar-group)
MARMGISKGGSGKEAKKPPLLLGRFEVGKLLGQGNFAKVYHARNVATGEEVAIKVMEKEKIFKSGLTAHIKREIAVLRRVRHPHIVQLYEVMATKLRIYFVMEYVRGGELFARVARGRLPEADARRYFQQLVSAVAFCHARGVFHRDIKPENLLVDDAGDLKVSDFGLSAVADGMRRDGLFHTFCGTPAYVAPEVLSRRGYDAAGADLWSCGVVLFVLMAGYLPFQDRNLAGMYRKIHKGDFRCPKWFSPELIRLLRGVLVTNPQRRATAEGIMENEWFKIGFRRFSFRVEDDRTFTCFELDDDAAVDAPTSPPDTPRTVDSGDVGAAPTRPRKAGSLTSCDSAPSLLEGRFGLGGSSRRRSSLNAFDIISFSPGFDLSGLFDQDDGGGAGAGSIPEQQKHTARFVSAAPVEVIVATLEAAAAAAGMAVREREDGSISMEGTREGEHGALAVAAEIYELTPELVVVEVRRKAGGAAEYEEFFRARLKPSLRELVCDDRPCPEDSGELSRSL

SEQ ID NO: 5736 - protein, 414 aa, Oryza sativa (japonica cultivar-group)
MEHATCDDVHEHAINVSHGETASTSTSHQDLHSDSDDSHQDDRPSTSTQTPSPQSSASTSPTAYNTRNLSFPRRDSMYGHGRSIWNSGLWISFELVIYVVQIVAAIFVLVFSRDEHPHAPLFAWIIGYTIGCIASIPLICWRCAHRNRPSEQEPEQPPAAYPNLTSSQSSEGRNQRSSGTVLHFGCITISCPRPSILAYHFKTAVDCFFAVWFVVGNVWIFGGHSTLSDSQEAPNMYRLCLAFLALSCVGYAIPFVMCAAICCCFPCLISLLRLQEDLGHTRGATQELIDALPTYKFKPKRSKMWVDHASSSENLSEGGILGPGTKKERIVSAEDAVCCICLTKYGDDDELRELPCTHFFHVQCVDKWLKINAVCPLCKTEIGGVVRSFFGLPFGRRRVDRMAGRGIASSRFTV

SEQ ID NO: 5737 - protein, 368 aa, Oryza sativa
MDMASIECVSYSDSMDDDDDDGVGVGGVSHLPRPILVKPSSAAAAVNVVVVSAGSGGGAGGGGGGVGVVAGAPAVPPATSVHELLECPVCTNSMYPPIHQLGHWEPEELPSMLSVILLECQNGHTLCSTCKTRVHNRCPTCRQELGDIRCLALEKVAESLELPCKYYSLGCPEIFPYYSKLKHESQCNFRPYNCPYAGSECSVVGDIPFLVAHLRDDHKVDMHSGCTFNHRYVKSNPREVENATWMLTVFHCFGQYFCLHFEAFQLGVAPVYMAFLRFMGDENDARNYSYSLEVGANGRKMIWEGTPRSIRDSHRKVRDSHDGLIIQRNMALFFSGGERKELKLRVTGRIWKEQQNPDSGACIPNLFS

SEQ ID NO: 5738 - protein, 286 aa, Arabidopsis thaliana
MAAYYRWKSFEENEDRPEKPRRYGVTEMRGPHYSVLSQNLLQEIFESMGQFVDGLKFSGGSNSLIPKSFIKQAIEMAHEHGVYVSTGDWAEHMLRSGPSAFKDYVEECKQLGFDTIELNANLLEVPEETLLRYVRLIKNGGLRAKPMFAVKFNKSDIPGRNRAFGSYVVPEPRSSEFVEDIDLLIRKAERCLEAGADTIMIDADDVCKYADSLRADIIAKVIGRLGIEKTMFEASDAKLVEWFIKRYGPNVNLYVDHSQIMDLECLRGRHLGKDHQSVLSSSYFLF

SEQ ID NO: 5739 - protein, 419 aa, Glycine max
MLPTGAKETQLRESNSQKVHPQPIEEAMNQNPEAMETLISKVFMNISSLKSAYIELQAAHTPYDPDKIHTADKLVISELKNLSELKHFYRENNPKPVCVSPQDSRLAAEIQEQQSLLKTYEVMVKKFQSEIQNKDSEIHQLQQQIEQASQKRAKLEKNLKLRGLSTKESEDENGFFPVDLTPDLFTSAVEVAAKAIHDFSKPLINMMKAAGWDLDAAANSIEPDVVYAKRAHKKYAFESYICQRMFSGFEQENFSVKLDNTTATKESFFHQFLALREMDPLDMLGQNPDSIFGKFCRSKYLVVVHPKMEASFFGNLDQRNYVMGGGHPRTPFYQAFLKLTKSIWLLHRLAYSFEPNVKVFQVKGGSEFSDVYMESVVKNLIMDDNDEKPKIGLMVMPGFWIGGSLIQSKVYLSGMKAAE

SEQ ID NO: 5740 - protein, 337 aa, Moorella thermoacetica ATCC 39073
MAKVLVTGGAGYIGSHVVKALGERGYRVLTYDSLVTGHPWAVLYGDLVVGDLLDAAKLEAVIRDFRPDAVMHFAAHIVVPESVAQPLKYYINNVQGTLNLLACMQKSGVNKLIFSSSAAVYGIPERIPVPEEAPLHPINPYGHSKAMVERILQDLSAAGGITYVSLRYFNVAGADRDGRIGEGKEDATHLITLATRTAAGKRPYLSVFGTDYPTPDGTCIRDYIHVEDLAAAHVLALEYLLDGGKSEVFNCGYGRGYSVLEVIAAAKKVTGVDFPVRYEGRRPGDPPALVADARKIRERLGWVPAYDNLEGIIYSAWQWERKRNSVPARPATISTRR

SEQ ID NO: 5741 - protein, 157 aa, Glycine max; identical to SEQ ID NO: 1014

SEQ ID NO: 5742 - protein, 150 aa, Arabidopsis thaliana
  misc_feature (43)..(43): Xaa can be any naturally occurring amino acid
  unsure (1)..(150): unsure at all Xaa locations
PKKNQSSLLEFDRMGMSKSKGNTHNIFLLCNYILLGSASSCIXLTISHGLFPSLSGLSLIFLYTLTIATAVSGCSIFASTTSVIASDRLDGSDMVAIVLTAIFQGAVSVLVFTRIGDFLRFLKSYVREEDGAVILILAHKKNNKREEKVK

SEQ ID NO: 5743 - protein, 560 aa, Rhizopus oryzae
MPSIKIGQHLLNRLKEINIDVVFGVPGDFNMPLLDIIEDDPELTWGNNANELNASYAADGYARIRGAGAVVTTFGVGELSAVNGIAGSYSEMLPVIHIVGTPSTKSQAAGAMLHHSLGDGNFDVFFNMSSMIACASAHLKKQTAIAEIDRVISQAVLSKRTGYIGIPIDLIKTEVEVPEPIPALKTELPKNPADVQAIALRVVTDAIAKAQFPVIIVDGCVLRQRCQKAVQAFIERSGFPTYVAPMGKGAVDESSVSYRGCYSGNVTLEAVNEEIKQADLIIEVGSIKSDFNTGNFSYSLDRSKTITLHSFATIVFCAEYQKVSMLEFVPLLTQALPEQPRQFNLGPRPRPVPIQPGTEITHNYFWHKVPEFMDENAIVCAETGTAEFASLNMDGPKGTTYITQFLWGSIGFSVGAAVGAAIAARDRRVYLFVGDGSFQLTCQEISGFLRHGLTPVVFLLNNDGYLIEKLIHGPERAYNNYQMWNYSKSLDYFGAHLEHNKSMGVPPVGFEGKVATRDEFESAMRQVQANPDKIHFLEVIMPQFDSPRELELLVANSENR

SEQ ID NO: 5744 - protein, 324 aa, Synechococcus sp. CC9605
MSIPPVVVTAARRSWRWQWQRLMGGLGPADAAGSYTRPSSNPLTPPALKPPDLLQRSAGQRPMLVIGRSCPWAHRTWLVHQLRHLHDSVTLVMARADHNAGRWALDPAWEGCKTLLELYQLCDAPPSYRATVPVLVDPKTRTLLGNDSAPLVDLLNRWPHHDEVVDLAPAEATDRIQAWQHRLQPAINDGVYRCGFARNQAAYDHAEADLFTALDAVEQSLESNGPWLCGEALTLADVRLFPTLIRWELVYAPLFGCSRQPLWHYPNLWKWRQRFYRLPGVADTCDGTAWRHDYFGALFPLNPSGIVPAGPDLSTLVNSTAASG

SEQ ID NO: 5745 - protein, 369 aa, Yarrowia lipolytica CLIB122
MTQAAAEHVLVTGGAGYIGSHTVIALVEAGRKPVIVDNLDNSCEEAVRRIEQIVGEKIPFFEVDIRDTNGLDEVYKQYPTITSVLHFAGLKAVGESGQIPLEYYNCNVAGSINLLQWCQKHNIHNFVFSSSATVYGDVTRFEGMIPIPEECPTGPTNPYGRTKMMIEDIIRDHVRANAPWNAAILRYFNPMGAHPSGLVGEDPLGIPNNLLPYLAQVAVGRREKLFVFGDDYPSRDGTPIRDYIHVCDLAAGHVAALEKLEAVDKERKQLPQGSPELKHGFSREWNLGTGHGSTVLEVVKAFSNAVGKDLPYEITGRRDGDVLDLTAKPGRANSELNWKAEKTLDESCSDLWRWTSENPYGYKKDRHDK

SEQ ID NO: 5746 - protein, 124 aa, Kluyveromyces lactis NRRL Y-1140
MKSAFKSEFPFEKRKAESERIVQKFHNRIPVICERGGKSDIPDIDKRKYLVPGDLTVGQFVYVIRKRIKLPAEKAIFIFVNDTLPPTAALMSSIYQQHKDKDGFLYVSYSSENTFGDDALFSEE

SEQ ID NO: 5747 - protein, 161 aa, Brassica napus
MGEIVFTEKQEALVKESWEILKQDIPRYSLHFFSQILEIAPAAKDMFSFLRDTDEVPHNNPKLKAHAVKVFKMTCETAIQLREKGKVAVPDTTLQYLGSVHLKSGVLDPHFEVVKEALVRTLKEGLGEKYNEEVEGAWSQAYDHLALAIKAEMKQENSQKP

SEQ ID NO: 5748 - protein, 385 aa, Asclepias syriaca
MQTLVFSTTNPSAWNTHGYTIKNPPKSTAVFRRLPNVSAVASPPALRTLPPEKVQIFKSLESWATQNVLPLLKPVEKSWQPTEFLPNPAQNFDDFTKEVHALRHRTSDLPDEFLVVLVGDMITEEALPTYQSMINRLDGVKDETGACTSPWAIWTRAWTAEENRHGDLLKTYLYLSGRVDMTMIDKTIQYLLSSGMNTGTNRNPYFGFVYTSFQERATFVSHGNTARLAKERGDPVLAKICGSIASDEKRHESAYSRIVEKLVEVDPSGAMLAIGEMMRMKITMPAHLMYDGQDPNLFAHFSAVAQRLGVYTAGDYADILEFLIQRWRLEKLEGLTDDARRAQEFVCGLAPRMRRLQEKADERAKKLRTTTGVKFSWIFNKELYL

SEQ ID NO: 5749 - protein, 922 aa, Methylobacterium extorquens
MTKTLHARPSAATDTTFAPPVITGTATEDALEILFHALLDVARRHDPELEDVLHGRADISSFTPEMLARALQVQGIWFQLVSIAEQNAAMRRRRHVERDQGREALNGSFAKVLAEASARGIGPQQIHALLKDLRIRPTITAHPTEGKRVTVLEKLRRIYLVLRELELPRWTERERNGLMNELRDQIELIWMTGELHLEKATVEREVAWGLHFFDETLFEMLPEMLLSLEESLAQYYPDETFEVPPFFQFGSWIGGDRDGNPYVTASVTRETLQRNALASLRRYRDGITHLGRVLSITERSLPVPETFRSELAHMLAESGDARAIANRNPGEAYRQFLSCVLRKLEATIARNKGARSVGPDYPSADGLINDLRTLEKGLADAKCGALATDIVRPVRRMVEIFRFSTVRLDLRENSTRTTKTLHALWKLRNGDREPPALDSPAWKDWLLTELARPRTPETSFEDFADRLPDDARETLATFALVGEMRDTLDREAFGAFILSMTRSTVEVLGAYLLAKEAGIFLDTTGTEICPLPIVPLFETIDDLRAAPAIMKELLGIPVVRRSTRWQGGVQEVMIGYSDSNKDGGFIASNWELYKAQVRLTTLGNHLGVPIAFFHGRGGSVSRGGVPTHRGIAAQPPGSIQGRFRITEQGEVVSFKYANRGTAAYQMELLAASVFEHALLSEGNGNGSRAEFDDALEALSGASRAAYVNLLQAEGLVDYFQAASPLDEISLLNIGSRPARRFGAKSLSDLRAIPWVFAWSQNRHVITGWYGVGSGLKSFIDVRGEAGEALLRRLFRDCRVFRLVLDEVEKTLLMVDLEIARDYAGLVEDAGIRARIFGMIEAEYALTREMVLRVSGDSELAQRFPQFSERLRGRLPTINQVSREQVELLRRYRSETDEDKREAVKSALLLSINCIAVGFGATG

SEQ ID NO: 5750 - protein, 639 aa, Solibacter usitatus Ellin6076
MCGIAGFTRLNKYASRGVAQRITEALSHRGPDQQGVFEGSEATLCAVRLKIIDLAGGDQPILSDDGDTAIAFNGEIYNHREVRGELEALGHRFRSNCDTETVLRAFLQWDTAAFQRLRGMFAIALWTESRKRLLLVRDRMGIKPLYYYRSGDDLYFGSELKAILEHPDVPRTLDLSALDTYLSVNYVPGPQTLIRGIRKVPPGHLLEWRHGKAWCEAWWKRPDSGTRRISLGAAKEQLDVLMKDSVREHLVSDVPLGVWASGGLDSSAILHYAAAQTAGRLKTFSVSFEGRSFDESRYFREIAQVYGTDHHEFDLNPDVELQSAIEDFAYYSDEPSADAGALPVWFLSRMSRRHVTVALSGEGADELFGGYLTYQADRLARPFRMVPAGLRRLMRGALDRYMPVSDDKISLEYKLKRWIDGSLLNADEAHFFWNGTFSPEQLRQIRPGTNGNGLQRMVEGLNGPREVVQRYLDVDQSFYLPDDILYKTDRMSMAHSLEVRPPFLDHRIVEFAASLPQRLKIRGAKQKHVLRELMRGKLPESVLTRKKSGFDIPTHDWFRGTLRGMLMDTLTPDAIAATGVFDANAIDGLIRDHMERRINVGYHLWGLLTLFLWMKRWKVEALPPEEEMRQVPARVLATR

SEQ ID NO: 5751 - protein, 1014 aa, Oryza sativa (japonica cultivar-group)
MISLHSAPFTLLVKLPGRRRSGLTPPRCAVRGAGNVSSAAVREMAVAEGRRQHEYSIDARLRQLAPEKVSADDRLVDYETLLVARFLDILEDLHGGDFRQVVEDCLRLSGEYQSEGDPARLGELGGLLTSLDVGDAIMVASSFSHMLNLANLAEEIQMVYRKKAEASRRGDFVDEASAPTESDIDETFQRLVRGLGKSPREVFDALRSQTIDLVLTAHPTQSVRRSLLQKHASIRSCLTQLCGEGISDNEEQEIDEALQREILAAFKTDEIRRTPPTPQDEMRAGMSYFHDTIWNGVPKFLRRVDTALKNIGIDERLPYNAPLIQFSSWMGGDRDGNPRVTPEVTRDVCLLARMMAANMYFSKMADLMFELSMWRCNDELRARANELHRKSSRKYAKYYIEFWKKISPGEPYRIILGDVRDKLYNTCERARQILSKGISSIPEDQTYTNVEQFLEPLELCYRSLCDCGDKLIADGRLLDLMRQVSTFGLSLVKLDIRQESERHTDAMDAITTHLGIGSYREWPEERRQEWLVSELRGRRPLFGPDLPQSEEVADVLGAFRVIAELPADSFGAYIISMATAPSDVLAVELLQRECGVKKPLRVVPLFEKLADLQQARATMELLFSVDWYKERIDGKQEIMIGYSDSGKDAGRLSAAWQLYKAQEEIVGVAERHGVKLTIFHGRGGTVGRGGGPSHLAILSQPPNTVNGSLRVTVQGEVIEKSFGEENLCFRTLQRFTAATLEHGMNPPVSPKPEWRRLLDDMATVATDEYRSIVFQEPRFVEYFRAATPETEYGRMNIGSRPSKRKPGGGIESLRAIPWIFAWTQTRFHLPVWLGFGAAFRHAMQQSDAGGGLATLREMYDEWPFFRVTIDLLEMVFAKGDPGIAALYDELLVPDDLRPFGEQLRANYVETQRLLLQVAGHKDLLESDPYLRQRLMLRDSYITALNVCQAYTLKRIRDGGFRPETRPPLSKELLGSSAVAEKLVKLNPNSEYDPGLEDTLILTMKGIAAGMQNTG

SEQ ID NO: 5752 - protein, 358 aa, Frankia sp. EAN1pec
MTLMAERSENGAPFDTGVRLLAPDGTLVDDPRFTVRADSRQTESFYREMVRARRLDEEATALQRQGELVLWIPLRGQEAAQVGSAAAAEPADFLFPSYREHAVVWHRGIPPVEALRLLRGVTHGGWDPEAYNVANYVLVLASQTLHAVGYGLGVRLDGAAGQVVMVYLGDGAMSQGDANEAFVWAASFGAPVVFFCQNNQWAISTPSARQSPVPLARRAAGFGFPGVRVDGNDVLAVHAVTTWALEHARSGQGPVLIEANTYRMAPHTTSDDASRYQEAAEVAAWRARDPIDRVALLLGHTHDPAWFEGVRAEAEEAAATLRRECLALPDPAPRTLVDHVLVGGSALLREQRGEIWEG

SEQ ID NO: 5753 - protein, 261 aa, Triticum aestivum
RKKKGGKGNRGAPRPHGKEISHLHQSPNLLPAQISPPPPPPPPPLPRRIAPRAPPDPTRPTGRRDGAQEERAGGGGGGGQGSMCDLVARTGRHQQRYEDGRRLVAGCIPFRYRADETSGDEQKKVVEVLMINSQSGPGLLFPKGGWENDETVEQAAAREAIEEAGVRGDIVQFLGFYDFKSKTHQDACCPEGMCRAAVFALHVKEELASWPEQSTRRRTWLTVPEATSQCRYQWMQEALLTGFSEWHDNWSKGGSAGGDPI

SEQ ID NO: 5754 - protein, 116 aa, Brassica rapa
WRKYGQKVTRDNPSPRAYFRCSFAPSCPVKKKVQRSAEDPSILVATYEGTHNHLGPNGSEGDVTSQVGSSTVTLDLVHSGQGTMQEVLVRQMASSLTKDSKFTAALAAAISGRLME

SEQ ID NO: 5755 - protein, 1047 aa, Nostoc sp. PCC 7120
MTPTGSQSQTNLISDTIEQLRSCCQVNVQSTWLYQDSTREINGVATSSVSNWQSVELDTKGNIAWSGGQQVLWLEQKFVVPQNLHDYPLAGLSLRLSLLWWADSAKIYVNGELVLEGDLFDCSPRVLLSREVSPGQEFVVALRLASPGHCDGALVRSLLVYESTDYNYPDPGFIADELAILQLYLEKSAPEKLNILTAAIPEINPSNPESLITIRQNLINHLSISDPKFKIYLLGHAHLDLAWLWPVSETWNAAQNTFASVLKLQQDFPELIFCHSTPALYAWIEEHRPDLFTAIQQAVAAKTWEIIGGFWVEPDLNLIAGESIVRQLLYGQRYFQEKFDKLTTVVWVPDTFGFCATLPQFLANAGIEYFVTQKLRWNDTTKFDYGAFWWRSPDGSQVFSVMSAPIGEGIDPIKMAAYSLEWQTQTNLTESLWLPGVGDHGGGPTRDMLETAQRWQTSPFFPDLEFITAEKYLQQIQSTVNSQQSIVPTWNDELYLEFHRGCYTTHADQKRWNRHSENLLYQAELFATLATFICGVTYPKTAIETAWKQVLFNQFHDILPGSSITQVYIDALHEWQQVEQTGTRILKESLQAIASHFTLPEPPKADSFPIFVFNSLNWQRSEVVSVTLPPPPTNQQWQVYDTTGEQIISQLTEPSTLLFLAKDIPSVGYRLFWLSPTSPPSPTSPTSLDYVLENEHLRVIVDPDTGDLSSIYDKTHQREILSGAGNQLQAFKDSGQYWDAWNIDPSYSQHPLPATNLKSIQWLEQGAVQNRLRVVRQLGESEFCQDYILQVGSPQLKIASRVNWREKQVLVKAAFPLNLTADFATYEIPCGAIRRPTQPQNPQDKAKWEVPALRWADLTADTDKGIYGVSLLNDCKYGYDSQPQLLRLTLLRSPTWPDPEADTGIHEFTYTVYPHADSWESAHTVQKGYELNIPLQVILNPVPNSQLLTSHYPPNMRDRVSFVNLPAENLVLMAIKPSEDDQQQLILRFYESHGVTTELSLQSDLNLTLGTPVDLLERPTSQFSFQQQISTIEPWKIATFKILEVKG

SEQ ID NO: 5756 - protein, 463 aa, Medicago sativa
MASSSLLSSVPSHSASLSILDTNIKGKLKLGTNGLRFNNEGINNFSNLRSSGRICMAVATNVSRFEGIPMAPPDPILGVSEAFKADTSDVKLNLGVGAYRTEELQPYVLNVVKKAENLMLERGENKEYLFIEGLAAFNKATAELLLGADNPAIKQGRVATVQGLSGTGSLRLGAALIERYFPGAKVLISNPTWGNHRNIFNDARVPWSEYRYYDPKTVGLDFEGMIEDIKSAPEGTFVLLHGCAHNPTGIDPTPEQWEKIADVIQQKNHFPFFDVAYQGFASGSLDEDAASVRLFVSRGMEVLVAQSYSKNLGLYAERVGVISSSPESATRVKSQLKRLARPMYSNPPVHGARIVANIVGTPALFDEWKAEMEMMAGRIKTVRQALYDSISSKDKSGKDWSFILKQIGMFSFTGLNKSQSDNMMTNKWHIYMTKDGRISLAGLSLAKCEYLADAIIDSYHNVS

SEQ ID NO: 5757 - protein, 364 aa, Vibrio vulnificus YJ016
MNIQALPMHRFLDDEGNVQSPLPSWASEERLVQFYRDMLITRAYDNKAVALQRTGKLGTYPSHLGSEAFGVGIGHALKPSDVFIPYYRDMPAMWVRGIGMEKNLQYWGGDERGSDFCPEESHLRCSDLPFCVPIATQCTHAVGVASALKIQGNHDAALVTCGDGATSKGDFLESINCAGVWHLPLVFVVNNNQWAISVPRQLQCAADLLSEKAKGAGIPGITVDGNDVVAVYDAVNNALDRARKGKGATLIEAISYRLSDHTTADDASRYRSADELKQAWQYEPIKRLQAYLTAQGLWNEELEQQWLAHCKQQVEQAVAHYLSLPPQAPESAFDYLYASLPVELHAQRDMLINKAMRMQGGKHG

SEQ ID NO: 5758 - protein, 321 aa, Oryza sativa
MGRKPCCSKEGLNRGAWTAMEDDILVSYIAKHGEGKWGALPKRAGLKRCGKSCRLRWLNYLRPGIKRGNISGDEEELILRLHTLLGNRWSLIAGRLPGRTDNEIKNYWNSTLSKRVAMQRTAAATSMPAAATTSSNADAAGAAARRRRSPEPRTVVVSPIRTKALRCNNNSSSGIVVVQQAGACSHGGRPPESGAPGDAAADKVATPQAVQQQQQQELAGAEDDDDLPVPAVCIDLDLDDIELGGLDGFLISPWRGGGHDDGNAAAGAVPNLPMPIGYKLGGAGGGGEAGAVDLEALLGQLEAEEDDDGDHHHHHHHHHHQ

SEQ ID NO: 5759 - protein, 678 aa, ASPERGILLUS NIDULANS FGSC A4
MTTFKLNTGATIPALGFGTWQDADAQETAVLEALRAGYRHIDTARVYGTEAAVGRAIKKSGIPRNQIFLTTKIWNNKHHPDDVAQALQDSLNDLDQDYVDLLLIHWPVAFKRGTEQFPKTEDGKPAVADTDYLDTYKALEKLLSTGKVKAIGVSNFSKAEMERILANATVPPAVHQLEGHPWLQQREFAEWHKKHGIHITHYSPFGNQNEVYSREGTIGRLIEDPVLVEIGKKYNKSAAQVALAWGVTEGHSVLPKSKTPERIKANLEGDFKLEEEDLKKIRGIDRKLRFNDSSKDFGNAASATPRAYSALMADSVILRGQAIHDQDSDSSGLLQVGTFQNALLNLIESPSGRFMQQNWQEYLGRSVDSVVNVVGNAKEDTKFPLDRLSKMDRYGQTGNKTYKNILDSLRFSIDLQPRNQFGGLWYYVYPNWSYLDGMFSLLSFSPMYASTFDIANSTLMNRDLFNQLDLLWSHCRDNRTGLLVHGYDASRTAPWANPVTGASPIVWIRALGWFMMALVDLFEHDLMDARVSIWRTRFVDLANALVDAVDSTSGAWWQVMSAPGQEGNYIESSGSAMFVYALYKGVRVGILPAPEKGGEAYIEVAERAYSELVKRFIVENEDGTLSYNGTVGVCSLNSTATYDYYIHQPLVYDSVLGSAAFIRASTEHELHLEASLNL

SEQ ID NO: 5760 - protein, 560 aa, Rhizopus oryzae
MPSIQIGQHLLNRLKEINIDVVFGVPGDFNMPLLDIIEDDPKLTWGNNANELNASYAADGYARIRGAGAVVTTFGVGELSAVNGVAGSYAEMLPVIHIVGTPSTKSQAAGAMLHHSLGDGNFDVFFNMSSMIACASTHLRKQTAIAEIDRVISQAVLSKRTGYIGIPIDLIKTEVEIPEELGPFQTTLPKNNPEVQAIALKVVAEAIQSAKHPVIIVDGCVLRHRCQKPVQEFITRSGFPTYVAPMGKGAVDESIENFRGCYSGNVTLEAVNEEIKLADLIIEIGSIKSDFNTGNFSYSLDRSKTITLHSFATVVFCAEYQKVSMMEFIPLLTEALPQQPRTFNLGPRAKPVPIQPGTEITHNYFWHKVPEYMEENAIVCAETGTAEFASLNMDGPKGTTYITQILWGSIGFTVGASVGAAIAARDRRVYLFVGDGSFQLTCQEIAVFLRHGLTPVIFLLNNDGYLIEKLIHGPERAYNNYQMWNYSKSLDYFGAHLEHNKSMGVPPVGFEGKVATRDEFESAMKQVQANPDKIHFLEVIMPQFDAPRELELLVANSENR

SEQ ID NO: 5761 - protein, 103 aa, Anabaena variabilis ATCC 29413
MAAVSLSVSTVKPLGDRVFVKVSASEEKTAGGLYLPDTAKEKPQVGEVVALGAGKRNDDGSRQELEVKVGDKVLYSKYAGTDVKLGTEEYVLLSEKDILAVVG

SEQ ID NO: 5762 - protein, 275 aa, Solibacter usitatus Ellin6076
GDSARSLPTPQIMAWIMDTYSMNKGYPVHGVVTGKPLSIGGSLGRNEATARGVFYTTMSSCEHLGIQLAGSRVVVQGFGNAGAIAADLFHGAGAKVLAVSDTSGCIFNKNGLHIPAVVAYKARTGRLEGFPEATRITPAELLALECEILVPAALENAITEENAHTIHAKIISEAANGPVTPEADRILGSKGIFLIPDILCNAGGVTVSYFEWVQDENHLFWDEQDVNAKLEKIMKRSFADVLKIHLDKKVDMRLAANMLGVSRVAEACKVRGLYP

SEQ ID NO: 5763 - protein, 422 aa, Mycobacterium bovis AF2122/97
MAAPRLTGDQRNAFMASFLGWTMDAFDYFLVVLVYADIATTFHHTKTDVAFLTTATLAMRPVGALLFGLWADRVGRRVPLMVDVSFYSVIGFLCAFAPNFTVLVILRLLYGIGMGGEWGLGAALSMEKVPAERRGVFSGLLQEGYAFGYLLASVAALVVMNWLGLSWRWLFGLSIIPALISLIIRYRVKESEVWEAAQDRMRLTKTRIRDVLGNPAIVRRFVYLVLLMTAFNWMSHGTQDVYPTFLTATTDHGAGLSSLTARWIVVIYNIGAIIGGLAFGTLSQRFSRRYTIVFCAALGLPIVPLFAYSRTAAMLCLGSFLMQVFVQGAWGVIPAHLTEMSPDAIRGVYPGVTYQLGNLLAAFNLPIQERLAESHGYPFALAATIVPVLLVVAVLTAIGKDATGIRFGTTETAFLVRHRNRH

SEQ ID NO: 5764 - protein, 197 aa, Triticum aestivum
RVNLGISRGARGRVQKAAGGPVGRVEPWGAGVGVVGQKGGRPGLWILGRGRSPRRRGDWDGMGSAARTRPSCGSCGMRRRFGAPGEAGTKQVVEVCAAAQTARRAYYGPEARLPGATHPCLPPHSRSAGKAPALAKKAKVLGRLVPGCHKLPFPALLSEASDYIRALEMQVRAPPALAEVLASVSSSAASGSSSSPA

SEQ ID NO: 5765 - protein, 400 aa, Triticum aestivum
  misc_feature (234)..(235): Xaa can be any naturally occurring amino acid
  misc_feature (251)..(251): Xaa can be any naturally occurring amino acid
  misc_feature (273)..(273): Xaa can be any naturally occurring amino acid
  unsure (1)..(400): unsure at all Xaa locations
TIEQVCTKKQAGTGPEFPGYRRPTRPLNRHLSRAYGSNIGGYKNEGFVEVLAAQQSPDNPDWFQGTADAVRQYLWLFEEHNVMEYLILAGDHLYRMDYEKFIQAHRETDADITVAALPMDEERATAFGLMKIDEGGRIIEFAEKPKGEQLKAMMVDTTILGLDDARAKEMPYIASMGIYVISKHVMLQLLREQFPGANDFGSEVIPGASGTGMRVQAYLYDGYWEDIGTIEAFXXNANLGITQKPIPDFSXFYDRSAPIYTQPRHLPPSKVLXDADVTDSVIGEGCVIKNCKIHHSVVGLRSCISEGAIIEDTLLMGADYYETEADKKLLAEKGGIPIGIGKNSHIKRAIIDKNARIGDNVMIINVDNVQEAARETDGYFIKSGIVTVIKDALLPSGTVI

SEQ ID NO: 5766 - protein, 247 aa, Chlorobium tepidum TLS
MKKLVLLRHGESQWNRENRFTGWVDVDLSEKGREEARTAGQLLKDEGFVFDLAYTSVLKRAIRTLWTVLDEMNLMWIPVTKNWRLNERHYGALQGLNKAETAQRHGDEQVLIWRRSYDTPPPALTESDEFWPGKDPRYASLSSQELPATECLKDTVARFLPYWHETIAPQIRDGKNVIITAHGNSLRALVKYLDNISDEDIVGLNIPTGIPLVYELDDDLKPLKSYYLGDQEELKKKVEVVVKQGKA

SEQ ID NO: 5767 - protein, 423 aa, Zea mays
  misc_feature (156)..(156): Xaa can be any naturally occurring amino acid
  misc_feature (411)..(411): Xaa can be any naturally occurring amino acid
  unsure (1)..(423): unsure at all Xaa locations
MAGGGFVEDMNMMREQSLLEATCGDLFDHIDDLLDFPNEDSAAAVLLLDAPAPGSPLSARIIDVGRAGNALAPPAAPAQHDASASAFFAAAGNDVFDTKDVVGAHIGSCDDIDMDMAQLEWLSGLFDDASIPHEPVFPGATAGGAAPIMKSSALAXAALLPPDKMEDALLFRSSSPISVLEHGSGGSGSASATGSASSSSSSASSSSESFSGSGSGGGHVWSAPVSPRPAPPPVLVIPARARSKRSRSSAFTGAAARAGAETPTILVPTPMYSSGSAHSDPESIAESSPHPAPPMKKKKKAKKPAPPAPAASSDDNDGDADYEEGGEQAEPQGGAVRRCTHCQIEKTPQWRAGPLGPKTLCNACGVRYKSGRLFPEYRPAASPTFVPSIHSNSHKRVVEMRQKAVRSGDPXSCDLLHFIRRRD

SEQ ID NO: 5768 - protein, 1646 aa, Anabaena variabilis ATCC 29413
MVNMKTVENQEPLDGVAIVGMVGRFPGAKNVQEFWGNLCAGKESTTFFQDEELDPSIDPHLVQDPSYVKARGIIPGGETFDAAFFGINPREAEVMDPQSRVFLELVYEALENAGYDAEAYSGLIGLYAGCGQNTYFANHICGRQEIIDRVGEFQTMLANEKDFLTTRAAHKLNLKGPAVSISTACSTSLVAVIQACQSLSNYQCDMALAGGVSMTTPQNSGYIAQEGTMLSGDGHCRPFDAKSQGTMFNNGAGLVVLKRVEDAIQDGDRIYAVIRGFGINNDGADKVSFTAPSVDGQAEAIAMAQAYANFHPETISYIEAHGTATSLGDPIEIEALTQAFRIHTNSKQFCAIGSLKSNVGHLVAAAGVAGLIKTALALYHQQIPPSLNFEAPNPNIDFANSPFYVNTQLTPWPQGETPRRAGVSSFGVGGTNAHIVLEEAPAILPSNLSRPSQLLLLSAKTSTALETATVNLQEHLRNNASINLADVAHTLQRGRKAFNYRRFVVCQNTKEAITTLQSLEPKRVFTRHTQVRDPEIAFMFPGQGSQYVNMGFNLYSREIVFRQVVDQCAEILKPILGRDLREIIYPVATDIETASTALQQTCFTQPALFVVEYALAQLWQSWGVKPQAMIGHSIGEFVAACLAGVFSLEDALMLVANRGRLMWELPRGAMLSVRLSAPEVEKRLAGELAIAAINSPSLCVVSGTTEAIAAWQTQLETAEIVCRLLHTSHAFHSPMMEAIVAPFAELVGKVKLSPPQIPFVSSVTGDWITPEEATNPMYWAQHLRQTVRFADGVKTLWQQPERLLLEVGPRTTTTTLARQQAKDIKQQITIASLSDNADNEAEWTALLQAMGQLWLAGVTINWNNFYQEERRQRIPLPNYPFERQRFWIDPLPHPNRNTNHKPAHYQLEKTQTMSAQTTLISLLKEIIEETSGLEIASVDASTTFLEMGLDSLSLTQVGLALKKKFKVKVSLRHLLEVYPNLATLADFLQQNLSAEALSALVPSETTSPSATLSLQEVSTNGSNGKNGKNGSTPSPMLLVPPTSTNGNGSKNGSLPQVSLPNVASSALEGVINQQLQIMAQQLALLGNNSQPVTVPAVNGQNNGVKSEKPVTQSNQKPEPQDSTENLPKKVFGAGARIETTQTKTLTPQQRTYLDSIIQRYTQRTQKSKEYTQTNRPHLADPRSVSGFNPTMKEMVYPIVVSRSSGSKLWDIDGNEYVDLSNGFGLNLFGWSPAFVTEAIEAQLKLGMEIGPQTPLVGEVAKLMCEITNFDRAAFCNTGSEAVLGAMRLARTITGRNLIAIFSGGYHGILDEVIVRGTKKLRSIPAAPGIPQEKVDNILVIDYDAPDALDILKSRADELAGVMVESVQSRRPEYQPREFLQQLRQFTEQEDIALIFDEIVTGFRIHPGGAQAHFGIKADIATYGKIVGGGLPIGVIAGKSKYMDALDGGFWQYGDDSVPEVGVTYFAGTFVRHPLALAAAKAVLQHLLKNGPSLQQQLNAKTDQFVVELTDYFQQMQAPYTVHNFGSLFMVKSAPEFLYGDLLFYLMRDKGVHIWDHRPCFLTTAHSDADLSLAMAAFKESIAEMQSAGFFSAPTPTTKGSPESSKNLRNRPPQPGAKLGRDPEGNPSWYVPDPQRPGKYLQVSSVS

SEQ ID NO: 5769 - protein, 331 aa, Triticum aestivum
  misc_feature (176)..(176): Xaa can be any naturally occurring amino acid
  misc_feature (192)..(192): Xaa can be any naturally occurring amino acid
  misc_feature (201)..(201): Xaa can be any naturally occurring amino acid
  misc_feature (282)..(282): Xaa can be any naturally occurring amino acid
  misc_feature (285)..(285): Xaa can be any naturally occurring amino acid
  misc_feature (295)..(295): Xaa can be any naturally occurring amino acid
  unsure (1)..(331): unsure at all Xaa locations
HSITSLYKKAGWYRSGIPGISSTHASAASDSSDKSRDKLDHKSLRRLAQNREAARKSRLRKKAYIQNLESSRLKLTQLEQELQRARQQGIFISSSGDQSQSAGGNGAVAFDMEYARWLEEHNKHINELRAAANAHAGDDDLRKIVDSIMAQYDEFFRLKGVAAKADVFHVPSGEWXKTPAEGCFMWLGGLRXSSELLKLLXAGQLEPLTEQQLTGICNLRTSSQPAEDALSQGMEALQQSLAETLSSGSLGPAGSSGNVASYMGQMAMAMGKLGTLETSSDXADXLRLQTLQQMXKRILTTRQSARALLAISDYFSRLRALSSLWLARPRE

SEQ ID NO: 5770 - protein, 385 aa, Frankia sp. ACN14a
MAAVPDDGDELDVSAVAEVIARGREAGEISRSELRDALESADIGLELLPALIAKLSAAGVELLEEEETTDDVTAATRSTAEHAGTADLVRMYLREIGKVPLLNAAQEVELSKRVEAGLFAEHKLESDPDLPADLRRDLGLLVKDGHAAKQQLVSANLRLVVSVAKKYSGRGMTLLDLVQEGNLGLIRAVEKFDYAKGYKFSTYATWWIRQAIGRALADQARTIRIPVHVVEQINKITRLQRQLVSTLGREPTDEELALELDMPIEQVVELRRYAQDTVSLETSVGDDGDSVLGDFIEDSDATSPADAASYGAMQDEIENVLGGLNPREREVMRLRFGLADGKQHTLAEVGNRLGLTRERIRQIERDTLRELRKPAVAGRLREFLD

SEQ ID NO: 5771 - protein, 448 aa, Yarrowia lipolytica CLIB122
MREIVSLQCGQAGNQVATAFWNTITEEHCLDDDGFFVGDNREQSDRLEVFFSEASNRKYVPRAVAVDLEPATLDSIRSGKQGHLFRPDNLISGQSGAGNIWAKGYYTEGAELMETVMDAVRREAESCDALQGFQVTHSLGGGTGSGMGTLLLSKIKEEYPERMLATYSVLPSPKVSETVTEPYNAVLSFHQLVEQADATFCLDNEALYDISTRTLKIKQPRIQDLNNLISKVMSGVTTCLRFPGQLNGDLRKMAVNLVPFPRLHFFTVGYAPLFSAASQSFQQLEVPELTQQLFNPNNVMAACNLYNGRYLTVSTIFRGKVSTKEVEDSIQTARTKHSPYFVEWIPNNIQTSVCNVPPKGLKTSATFVANSTAVQELFTRTASQFSAMFRRKAFIHWYTAEGMELMEFTEAESNLHDLIAEYQQYQEAGVDDDLGYEEGEYVEEEYLE

SEQ ID NO: 5772 - protein, 127 aa, Mannheimia succiniciproducens MBEL55E
MAYSEKVIDHYENPRNVGSFDKKSSDVGTGMVGAPACGDVMQLQIKVNEEGIIEDAKFKTYGCGSAIASSSLITEWVKGKSLDEAGAIKNSQIAEELELPPVKVHCSILAEDAIKAAIADYKSKKGA

SEQ ID NO: 5773 - protein, 185 aa, Frankia sp. ACoN24d
  misc_feature (61)..(61): Xaa can be any naturally occurring amino acid
  unsure (1)..(185): unsure at all Xaa locations
SGRGMTLLDLVQEGNLGLIRPVKKFDYAKGYKFSTYATWWIRQAIGRALADQGRTIRIPVXVVEQINKITRLQRQLVSTLGREPTDEELALELDMPIEQVVELRRYAQDTVSLETSVGDDGDSVLGDFIEDSDATSPADAASYGAMQDEIENVLGGLNPREREVMRLRSASPTASSTPSPRWVTG

SEQ ID NO: 5774 - protein, 405 aa, Thiomicrospira crunogena XCL-2
MEQLTASLDVMFILLGAILVLFMHAGFAFLEVGTVQHKNQVNALVKIMTDLGVSTVAYFFIGYGVAYGVFLGFNLDGQLTQAMTEKSGYELVKFFFLMTFAAAIPAIVSGGIAERARFYPVLLATFLTVAFIYPFFEGMAWNGNFGMQSWLEASYGAPFHDFAGSIVVHAVGGWIALAAIIVLGSRTGRYDSNGNMRHVYPPSSIPFLALGAWILSVGWFGFNVMSAQAIEGIQGLVAMNSLMAMVGGIIAATFIGDKDPGFIHNGPLAGLVAICAGSDVVSPLGALVIGLVAGALFVKAFTWTQKSLKIDDVLGVWPLHGLCGVWGAIAVGIFGSTALGGLGGVSMMSQILGTLAGVGVALIGGFLVYILVDKLMGLRMSDEDQYEGADLSIHKIHANPPREEF

SEQ ID NO: 5775 - protein, 398 aa, Simmondsia chinensis
MALKLHHTAFNPSMAVTSSGLPRSYHLRSHRVFMASSTIGITSKEIPNAKKPHMPPREAHVQKTHSMPPQKIEIFKSLEGWAEENVLVHLKPVEKCWQPQDFLPDPASEGFMDQVKELRERTKEIPDEYLVVLVGDMITEEALPTYQTMLNTLDGVRDETGASLTSWAIWTRAWTAEENRHGDLLNKYLYLTGRVDMKQIEKTIQYLIGSGMDPRSENNPYLGFIYTSFQERATFISHGNTARLAKDHGDFQLAQVCGIIAADEKRHETAYTKIVEKLFEIDPDGAVLALADMMRKKVSMPAHLMYDGKDDNLFENYSAVAQQIGVYTAKDYADILEHLVNRWKVENLMGLSGEGHKAQDFVCGLAPRIRKLGERAQSLSKPVSLVPFSWIFNKELKV

SEQ ID NO: 5776 - protein, 393 aa, Listeria innocua Clip11262
MNNKIKQIVLNNEENMIAFRRDLHMHPELQWQEFRTTDQVAKQLDQLGIPYRRTNPTGLIADLKGDKVGKTIALRADMDALPVQELNQDLSYKPTEDGKMHACGHDAHTAMLLTAAKALVEIKSELRGTVRFIFQPSEEIAEGAKEMIAQGAMEGVDHVFGIHIWSQTPSNKISCVVGSTFASADIIQIDFKGQGGHGAMPHDTIDAAVIASSFVMNLQAIVARETDPLDPVVVTIGKMEVGTRYNVIAENARLEGTLRCFNNTTRAKVAKTIEHYAKQTAAIYGGTAEMIYKQGTQPVINDEKSALLVQKTIIESFGEEMLYFERPTTGGEDFSYFQDEAPGSFALVGSGNPEKDTEWAHHHGRFNIDESVMKNGAELYAQFAYNYLNQDEI

SEQ ID NO: 5777 - protein, 268 aa, Legionella pneumophila str. Lens
MNRVALVQMASSAKIADNLQLTEQYLIEAREQEASLVVLPENFAFMGMNEREKLHIAEYYGQGPIQQRISELARDLRVWIIAGTIPLKSMGSKVRASCIVYDDKGLNVARYDKIHLFDVIVSEQEKHQESLTIEAGKDIALVDTPVGKIGLTICYDLRFPELYQYLTQRGAQLLSVPSAFTAVTGAAHWEVLLRARAIENLCYVLAPNQGGTHENGRHTYGHSMVVEPWGKVLAQKEEGQGVILADIDLERLSQLRRQFPCVEHHVLM

SEQ ID NO: 5778 - protein, 218 aa, Brassica napus
MVSLKIQKRLAASVMKCGKGKVWLDPNESSDISMANSRQNIRKLVKDGFIIRKPTKIHSRSRARRMKIAKMKGRHSGYGKRKGTREARLPTKVLWMRRMRVLRRLLKKYRESKKIDKHMYHDMYMRVKGNVFKNKRVLMESIHKSKAEKAREKTLSDQFEAKRAKNKASRERKHARREERLASGPGGDVAPVTAPPAAAAAASTTAQTAEVPKKKSKK

SEQ ID NO: 5779 - protein, 555 aa, Legionella pneumophila str. Lens
MQKESNSNSLFDLLLKNERNAADRVYLRQPKNGVWHEYTWSSVMLQARKVAGFLHHLGLKKGDHISIISKNCAEWFITDFGIHIAGMVNVPLFANQNEESAHYVLEHGDVKLVFVGKLDDHQRVRQFIPKSYPTIGFDYHKDLQVDYEWSDVLKSDPMINLVEPEPDALYTIIYSSGTSGAPKGAMYTNRSIANYLTVFPKDLLRIRELEHYKLISYLPLAHVYERSAIQLGSVAINASVSFVESLEKFAENLREVSPTFFTAVPRIWGVFKQKIEQKLPPAKLNFLLKIPLISSLIKRKIIHSLGLSECTNCFSGASHLPISIIDFFEKLGIYIQEGYGQSENLAYATLSMLNERKRGYVGTPRLEVEIKVGEENELLMKCPCLMSGYYKNEQATKNAFTEEGWLRTGDVVDVDNEDRVKILGRLSENFKNQTGEFIAPSPIEKLFSVNPMLEQLCLVGRELPNNVLLVTLNEAVRLGMPKEEITHSLQETLKQVNSKLVKYEKVSHILVLKDAWTTENDKLTPTLKVKRRVVEKDYAELIQKALQQSQSIVWE

SEQ ID NO: 5780 - protein, 427 aa, Oryza sativa
MENGGGDASAAAWRFGAANPAMEAARSQSIRALVYRVYACLDRGDARSVAPLGHGDPAAFACFRAAPAATGAVVAAAASGAHNSYAPAAGIAEACSAVAAHLSRELPYAVSPADVVLTAGCNHAVEIMMSVLASPGANVLLPRPGYPLYASRAALSGLEFRHFDLLPDSEWEVDLAGVEALADANTVAMVIVNPNNPCGCVYSRDHLAKIAETARKLGIMVISDEVYDHFAFGSKPFVPMGVFGDVAPVMTLGGISKRWMVPGWRLGWIAATDPNGILRNKKIIDSVIDYRAISVDPVTFVQGALPDILAKTDDAFFTNALGVVKKAAEICYEKLKEIDCITCPHKPEGSMFVMAKLDLSSLDGIEDDVDFCSKLAKEESVVICPGSGLGMKNWLRITFAVDPQLLEDGLERTKCFCKRHGKIKEAS

SEQ ID NO: 5781 - protein, 476 aa, Yersinia pestis KIM
MVRFESTDSLMLARQLPNKTVALILAGGRGSRLKDLTATRAKPAVHFGGKFRIIDFALSNCLNSGVRRIGVITQYQSHTLVQHIQRGWSFLNEEMNEFVDLLPAQQRLSTEQWYKGTADAVCQNLDIIRRYDAEYIVILAGDHIYKMDYSRMLLDHVEKGAECTVACIPVPISEGSEFGIMEVTADYQITAFYEKPANPPPIPGDPSNALASMGIYIFNADYLFKLLEEDNNTPGSSHDFGKDIIPQLTARKVVWAHPFDLSCVTSNAELPPYWRDVGTLDAYWRANLDLASVTPELDMYDRAWPIRTHMEPLPPAKFVQDRSGSHGMTMNSLVSGGCIVSGSVVVHSVLFPRVRVNSFCTIDSSLLLPDVHVGRSCRLRRCIIDRACHIPEGMVIGENADEDSARFYRSEGGGGVSDSGYAGKVRGKIEPLGFLFVRLDLLIRLSLLIRLNLFIRMNLLIILTLFFKLASIQASH

SEQ ID NO: 5782 - protein, 167 aa, Citrus limon
LTSISRRLWTISELPCTTPRSSVLSCSIPRGPGFELGFLKDGKPIQLKEGQEITVSTDYDFKGNEEMITMSYKKLPVDVKPGNTILCADGTITLTVLSCDPKSGTVRCRCENTAMLGERKNVNLPGVVVDLPTLTEKDKEDILRWGVPNNIDMIALSFVREGSDLAM

SEQ ID NO: 5783 - protein, 544 aa, Treponema pallidum
MANELLFNEEARKKLLSGVEQISSAVKVTLGPKGRNVLLEKGYGAPTVTKDGVSVAKEVELEDPFENMGAQLLKEVATKTNDVAGDGTTTATVLAYSMVREGLKAVAAGMTPLELKRGMDKAVAIAVDDIKQNSKGIKSNEEVAHVASVSANNDKEIGRILASAIEKVGNDGVIDVDEAQTMETVTEFVEGMQFDRGYISSYFVTDRDRMETVYENPYILIYDKSISTMKDLLPLLEKIAQTGRPLLIIAEDVEGEALATLVVNSLRGTLKTCAVKAPGFGDRRKEMLEDIAILSGGQVISEDLGLKLESADIALLGQAKSVKVDKENTTIIDGSGKSKDIKDRIEQIKKQIEASTSDYDSEKLKERLAKLSGGVAVIKIGAVTEVEMKEKKHRVEDALNATRAAIEEGIVAGGGLALIQAAAALEKADLSGLTPDEAVGFKIVRRALEEPIRQISENAGIDGAVVAEKAKEKRGIGFDASKMEWVDMIKVGIIDPAKVTRSALQNAASVSGLLLTTECAIAAIGQKSSSTPPAPDMGGMGGMY

SEQ ID NO: 5784 - protein, 256 aa, Corynebacterium diphtheriae NCTC 13129
MANLATVERYVSAAAQRGADMVVFPEATMQGFGTGRLDRVAERIDGPFATRICQLARELNIVIVVGMFSPADTHDGKQRINNVALIAHPDSVREYRKIHTYDAFGFKESDTVRPGNQLVTFPVGDVTCGIAVCYDVRFPQQFIDLARLGAEVIVLPASWADGEGKLEQWRTLTAARALDSTSYIVACDQAVAEDERAPGAPTGVGHSAVVTPDGRRIAEAGTGEELFMVNVNRDLVRRTREAIPVLADAGYNQNGE

SEQ ID NO: 5785 - protein, 111 aa, Citrus limon
METSVPYENDLNLKATELRLGLPGSDENEQQTRNNKRSLPDTPDDLDTKDKSDEAASVAKAQVVGWPPIRSYRKNSLQQKKNEGECAGIYVKVSMDGAPYLRKIDLKLYNG

SEQ ID NO: 5786 - protein, 526 aa, Gluconobacter oxydans 621H
MKNLLARSGARRAACLAVSGLALSLSGGWSVGPAFAQSAPPTSSQPSSVPTPAPRSVPSSFADLANRLLPSVVNVSTSAVLKPSKNDDKGPDSSDPDGPQVPPFQPGSPLEKFFHDYLKHKPAPNQPPRRQQALGSGFIIDASGIIVTNNHVIEGADQVSVTLQDGTEMPARIVGRDSQVDLAVLEVKPKHPLPTVPLGQSDKARIGDWVLAIGNPFGLNGTVTAGIISSRGRNVEHGLYDDYIQTDAAINRGNSGGPLFNLSGEVIGINTLIYGGAGGDSIGIGFAIPADDARGIIDQLRRTGHVSRGWMGLKFQDVTNDIAETLDFHKPDGSNGKGTLISEIDPKGPAAKAGLEVGDIITRVGDQDVTGQTMPRIIASILPGAKAQLTVWHKGALKTLPITLGQSPTPPDMPPSDTHQPEHRHAALGELGVTVSSIDADARTQYALTDDQRGVLVSRVEAGSPAASRGIAEGNVITQVGQDQINTPDDFAKAVQRLHERKKTEVLLLVQDDDGLRWVPVPFLGN

SEQ ID NO: 5787 - protein, 542 aa, Oryza sativa
MAAATAAVFALLMASALAGAAAGGDIVHHDDEAPKIPGCSNDFILVKVQSWVNGKEDDEYVGVGARFGPQIVSKEKHANRTRLMLADPIDCCTSPKEKVSGDILLVQRGKCKFTKKAKFAEAAGASGIIIINHVHELYKMVCEKNETDLDINIPAVLLPRDAGFALHTVLTSGNSVSVQQYSPDRPVVDTAEVFLWLMAVGTVLCASYWSAWSAREALCEQEKLLKDGREVLLNVENGSSSGMIDINVASAIMFVVVASCFLIMLYKMMSSWFVELLVVIFCVGGVEGLQTCLVALLSRWFRAASESFFKVPFFGAVSYLTLAVSPFCIVFAVLWAVHRHFTYAWIGQDILGIALIITVIQIVRVPNLKVGSVLLSCAFFYDIFWVFVSKRWFHESVMIVVARGDKTDEDGVPMLLKIPRMFDPWGGYSIIGFGDILLPGLLVAFALRYDWAAKKSLQTGYFLWSMVAYGSGLLITYVALNLMDGHGQPALLYIVPFTLGALISLGWKRGELWNLWSKGEPERVCPHHMHMQPQPKTPPLVQ

SEQ ID NO: 5788 - protein, 458 aa, Oryza sativa
MASAPFAVSSSPAASAVAARSKVLRGGRSEARTGCRLGITRKNFGRVMMALAVDVSRFEGVPMAPPDPILGVSEAFKADQNDLKLNLGVGAYRTEELQPYVLNVVKKAETLMLEKGENKEYLPIEGLAAFNKATAELLFGADNPVLKQGRVATLQSLSGTGSLRLAAAFIQRYFPEAKVLISSPTWGNHKNIFNDAKVPWSEYRYYDPKTVGLDFEGMIADIQAAPDGSFVLLHGCAHNPTGIDPTPEQWEKIADVIQEKKHMPFFDVAYQGFASGSLDEDASSVRLFVQRGLEVFVAQSYSKNLGLYAERIGAINVVCSTPEVANRVKSQLKRLARPMYSNPPIHGARIVANVVGDPTMFGEWKQEMEEMAGRIKNVRQKLYDSLSAKDDSGKDWSFILRQIGMFSYTGLNKTQSDNMTDKWHIYMTKDGRISLAGLSLAKCEYLADAIIDSFHNVS

SEQ ID NO: 5789 - protein, 750 aa, Salmonella typhimurium
MSHNEKSPHQSPVHDTRESQPGLDSLAPSDGSHRPTPETTPPGAQPTAPGSLKAPETANDKLTALDAFRKGSENYALTTNQGVRIADDQNSLRAGSRGPTLLEDFILREKITHFDHERIPERIVHARGSAAHGYFQPYKDLSDITKAAFLCDPQKITPVFVRFSTVQGGAGSADTVRDIRGFATKFYTEEGIFDLVGNNTPIFFIQDAHKFPDFVHAVKPEPHWAIPQGQSAHDTFWDYVSLQPETLHNVMWAMSDRGIPRSYRTMEGFGIHTFRLINAQGKATFVRFHWKPLAGKASLVWDESQKLTGRDPDFHRRDLWEAIEAGDFPEYELGLQLIAEEDEFKFDFDLLDPTKLIPEELVPVQRVGKMVLNRNPDNFFAENEQAAFHPGHIVPGIDFTNDPLLQGRLFSYTDTQISRLGGPNFHEIPINRPTCPYHNFQRDGMHRMDIDTNPANYEPNSINDNWPRETPPAPKRGGFESYQERVDGNKIRERSPSFGEYYSHPRLFWLSQTPIEQQHIIDAFSFELGKVARAYIRERVVDQLAHIDVTLAQGVAHNLGFALTHEQTQIAPPPDVNGLKKDPALSLYAVPDGDVKGRVVAILLNDKVNAAELLTILQALKAKGVHAKLLYSRMGEVTADDGSTLTIAATFAGAPSLTVDAVIVPCGNIADIESCGDARYYLLEAYKHLKPIALAGDARRFKALLNIDSQGEEGLVEADNVDHHFMDTLLTLMAAHRVWSRAGKINAIPA

SEQ ID NO: 5790 - protein, 450 aa, Shewanella sp. MR-7
MKTKLSVLSAAMLAATLTMMPAASQAAIPQSVEGQSIPSLAPMLERTTPAVVSVAVSGTHVSKQRVPDVFRYFFGPNAPQEQVQERPFRGLGSGVIIDADKGYIVTNNHVIDGADDIQVGLHDGREVKAKLIGTDSESDIALLQIEAKNLVAIKTSDSDELRVGDFAVAIGNPFGLGQTVTSGIVSALGRSGLGIEMLENFIQTDAAINSGNSGGALVNLKGELIGINTAIVAPGGGNVGIGFAIPANMVKNLVAQIAEHGEVRRGVLGISGRDLDSQLAQGFGLDTQHGGFVNEVTAGSAAEKAGIKAGDIIVSVDGRAIKSFQELRAKVATMGAGAKVELGLIRDGDKKTVNVTLGEASQTTEKAAGAVHPMLQGASLENASKGVEITEVAQGSPAAMSGLQKGDVIVGINRSAVKDLKSLKEQLKDQEGAVALKILRGKSLLYLVLR

SEQ ID NO: 5791 - protein, 396 aa, Chlamydophila caviae GPIC
MSFFNQLPTFSPDSILGLQKLFLEDEREEKVNLVIGVYEDPSKAYGGFSSVRKAQFLFLEDEMNKGYLPISGLSSFNQEMEKLVFGDVNSSFVVGAQALGGTGALHLGAKIFSMAYTSGKVYIPEQTWGNHVRIFAQQGLEVLKYPYYSSESKSLLFDEMLSVLKAAPKNSLVLLQCCCHNPTGMDLNEDMWTRLAEVMKEHQLLPFFDTAYLGFGRGIKEDRRPIEIFIEVGNPVFVAACASKNFSLYGERVGYFAVHSKITEDLDKISSCLEEKARGEYSSPPRHGAKIVSTILSDASLKKEWLSELDTIRSSLGKTRARLVQAMRNHVGHSFDFILSQKGFFGYPGFSVEQVLFLRSEKGIYTTSGARFNLNGITDKNIDHVSQSFAEAYQLS

SEQ ID NO: 5792 - protein, 329 aa, Bradyrhizobium japonicum USDA 110
MTAGSISSEKIDLLIYGPVRPILENGFSDHFVVHKAETRGDLERLTPAIREKIRGVAVTYHTVRADRDSLSQLPKIEMVASFGVGYDHVDAKYAAEHNIIVTNTPDVLTEEVADVAMGLLISTVREFIKADRYVRSGLWQTQNYPLSVGSLRDRKVGIVGMGRIGQAIARRLDASLVPVVYHSRNPSKDVSYKHYPDLIEMAKAVDTLMVIVPGGASTNKMINAEVLKALGPRGVLINVARGSVVDEPALVQALKSGTILAAGLDVFAAEPSVPDELKSMQNVVLLPHIGSASVVTRNAMDQLVVDNLKAWFAGKAPLTPVAETPFKGR

SEQ ID NO: 5793 - protein, 301 aa, Shewanella sp. MR-7
MNKLTDFERYVIEEKGTERPFSGEYYKHDAKGVYLCKKCHAPLYRSEDKFNAHCGWPAFDDEIPGAVSRHVDADGRRTEIVCSQCGGHLGHVFEGEYLTPKNIRHCVNSVSMVFQAADEAAASTHKTAFATFGAGCFWCVEAIFKSLKGVLNVSSGYSGGEASDADYKSVCSGLTGHAEVVHIEFDPAQISFTTLLQVLFESHDPTTLNRQGNDKGPQYRSVVFAHDAAQIEETNAMITKLTEARVFDAPIVTQVVAFESFYPAEDYHNDYFALHGEQPYCQIVVRPKVEKVRALFAELQA

SEQ ID NO: 5794 - protein, 247 aa, Actinidia chinensis
LCFDLLESWLANNPEPAGFMRDGQSIFRELALFQDYHGLPAFKNAMVDFMSEIRGNKVSFDPKKLVLTAGATSANETLMFCLAEPGEAFLLPTPYYPGFDRDLQWRTGVEIVPIHCTSANSFQITDSALEEAYQSAQKRNLRVKGVLVTNPSNPLGTTLTRPELNLLLTFITSKNIHLISDEIYSGTVFSSPDFVSIMEVLKDSSHSTEVWNRVHIVYSLSKDLGLPGFRVGAIYSNDDVVLAAAKK

SEQ ID NO: 5795 - protein, 299 aa, Oryza sativa (japonica cultivar-group)
MMAEALREVLPLPYFPGQPCWYLQERRGAEAWSAEENKVFERALAQVDLDSPNRWEMVAAMLPRKTVIDVMNHYRDLENDVGSIEAGLVPFPHYSSSLSPASSGFTLQDWDGSDGGFRRGCYLKRGRAPDQERKKGVPWTEEEHKSFLMGLKKYGRGDWRNISRYFVTSRTPTQVASHAQKYFIRLNSGGKDKRRSSIHDITTVNLPEEDTSNPSPSPPSVLTTASDQLGSLVDTKPVPPPPSLGAQRHFMSPLPGALGVSHHPYGNVKLEPNASFLAGGGTGPGLDDAILLQMQCGHL

SEQ ID NO: 5796 - protein, 353 aa, Mannheimia succiniciproducens MBEL55E
MIILFNLNIIGENLMAIKIGINGFGRIGRIVFRAAQTRDDIEVVGINDLIDVEYMAYMLKYDSTHGRFDGSVEVKDGNLVVNGKTIRVTAERDPANLNWGAIGVDIAVEATGLFLTDETARKHITAGAKKVVMTGPSKDATPMFVRGVNFSAYAGQDIVSNASCTTNCLAPLARVVHETFGIKDGLMTTVHATTATQKTVDGPSAKDWRGGRGASQNIIPSSTGAAKAVGKVLPALNGKLTGMAFRVPTPNVSVVDLTVNLEKPASYETIKQAIKDAAEGKTFNGELKGVLGYTEDAVVSTDFNGCALTSVFDADAGIALTDSFVKLVSWYDNETGYSNKVLDLVAHIYNYKG

SEQ ID NO: 5797 - protein, 243 aa, Triticum aestivum
MRVAATRPASSAPVALLAALALLFLVGSASLAIGAMASHVLGGKSENPDAANSLETDGLARFAVDEHNKRENALLEFVRVVEAKEQTVAGTLHHLTLEALEAGRKKVYEAEVWVKPWLDFKELQEFRHTGDATSFTISDLGAKRGGHEPGWRDVPVHDPVVKDAASHAVKSIQQRSNSLLPYELVEIVRAKAEVVEDFAKFDILMKLKRGTKEEKMKAEVHKNLEGAFVLNQMQPEHDESSSQ

SEQ ID NO: 5798 - protein, 339 aa, Neisseria meningitidis MC58
MKKILVTGGTGFIGSHTVVSLLKSGHQVVILDNLCNSSINILPRLKTITGQEIPFYQGDIRDREILRRIFAENRIDSVIHFAGLKAVGESVAEPMKYYDNNVSGSLVLAEEMARAGVFSIVFSSSATVYGDPGKVPYTEDMPPGDTTSPYGASKSMVERILTDIQKADPRWSMILLRYFNPIGAHESGLIGEQPNGIPNNLLPYICQVAAGKLPQLAVFGDDYPTPDGTGMRDYIHVMDLAEGHVAAMQAKSNVAGTHLLNLGSGRASSVLEIIRAFEAASGLTIPYEVKPRRAGDLACFYADPSYTKAQIGWQTQRDLTQMMEDSWRWVSNNPNGYDD

SEQ ID NO: 5799 - protein, 124 aa, Arabidopsis thaliana
MQMLRNLSTRTRSRRGGYERVSDDSTFSLLGAKLRRSTSVPYYAPSIRLGGDFPVILEKLPRQKPTKTVVTSKLSHPIFSLFDGYRRRSKKKATAKPEFSRYHEYLKESGMWDLRSNSPVIYFK

SEQ ID NO: 5800 - protein, 352 aa, Debaryomyces hansenii CBS767
MTTTTIKPKVLRIGEIDFAHQKWKELSDVVEVVKCESSNREEFFKDLKTKYLDITNITRSFASIDQTGRFDEELVSHLPESVKAVSHCGAGYDQIDVEPFSNRKIQLSNVTTPVEAPTADVAVFLILSTLRNFQVGHDLTVQGKWPSGGKCAGAALGHEPLSQTVGIFGMGGIGRAIRDRLKPFGFKKIIYHNRSQLSPELEGGATYVTFDQLLSESDVICISIPLNAKTKHSINGDTISQMKDDVVIVNTARGAIIHEAELLQSLKSGKVGAFGSDVFEFEPEVSQELLDLPNVVSLPHMGTHTYESIQNMEEFVIANVFDHLYTGKVKTIVPEQYNLQFDETPLLKKASG

SEQ ID NO: 5801 - protein, 573 aa, Candida albicans SC5314
MKYVVVSGGVISGIGKGVLASSTGLLFKTLGLRVTSIKIDPYMNIDAGTMSPLEHGECFVLDDGGEVDLDLGNYERYLNITLTRNHNITTGKIYSHVIEKERNGDYLGKTVQVVPHITNAIQDWIERVARIPVDDTGLEPEVCIVELGGTVGDIESAPFVEALRQFQFRVGNENFALIHVSLVPVIHGEQKTKPTQAAIKDLRSLGLTPDMIACRCQEELEHATIEKIGMFCHVGPEQVIAVHDVNSTYHVPLLLKQQKVMNYLTKRLAIGEIDKQSLAKGEALLSKWRHLTSSHDKSFETVTIALVGKYTHLHDSYLSVIKSLEHASMRCNRRLKIEWVESSDLEEDTKKENLSKYHKAWHFVCQADGILVPGGFGSRGIEGMVAAAKYARENNVPYLGVCLGLQIAVIEFVRSVLGVSHSTSMEFDSNIEEKDASVVYMPDVDQVKLGGTMRLGIHQTKFVQDSEWSNLRKLYGGADAVYERHRHRYEVNPLLIDDIEKRGLKFIGKDETGKRMEMIELKDHKFFVGTQYHPEYLSKVLDPSRPFLGLVAAAAGILEDVLSRDDLNYKGEF

SEQ ID NO: 5802 - protein, 585 aa, Pirellula sp. 1
MPSQRSQWSDQPPSRNLMKLTSIPQLYRNLRRGREILRVLRRYGLADWISRTRRLPLQNWIKDRSGVPLTQYTRSQRIRMAITELGPTFIKVGQVLAARPDLVGNEIAEELKQLRNEVSPDSMEVVETTLAEELGPNFRKHFRHIEPMPLATASIGQVHRAELMDGQRVVLKVQRRGIEKMMREDLDVLEGLAQWADHVESLAIWGPSDMVRQLMPMILRELDFNRERSNLKQFAQILEADKAEIVIPSVFDQLCTRRVLVMEEMVGEPLAKVFERDVHSPSRETGEMTRADLPPELGRTLARTYLRMVFEDGFFHADPHPGNLFCLRDGRLAILDFGMTGRIDEAMRESIEEMLAAINAGDCRRLTRLIRRVGNPRVDLDQSALEIDVADFVDTYGRQTLDRFDLSGALNQLSEILHRHGIGLPNQSALLLKMLISLEGTLREIGVGFDSLDIVRSYLRRVMIRRLTPARRLRQARRIYLESEAFMENAPEQLLSLMNQARLGQLQVRLEPKRFAPVVNRLVVGLMTSAVFLGSALMLSYEVSPVLFPDQPMFGIQRVSILGLVGLIASFSVMVALCLAILRSE

SEQ ID NO: 5803 - protein, 279 aa, Glycine max
FFFFIQARSLSLRSIQTLFLFFTIPILWRRFALEVLGKNGCLVEGVLHLPGNPPVKLDSQDLLQIGDKEFYFLLPVRSILVGPVGPRHYPNHAAPGPVVPHYNNYHLGPGPVKKAPRREYYEEEFDDEDDVGGRKMRRDGYDGYGYAGGKSSLSAPMDKKSEGRSRVDRDADNLQLQQLEEKDVVSSVATVLSDLCGPGEWMPMEKLHTELLEQYSSVWHHNRVRRYLTSEDWPGPESKGKPWYGLLMLLRKYPEHFVINTRSKGRVTLEFVSLVSLIS

SEQ ID NO: 5804 - protein, 485 aa, Glycine max
MALGNNSHQLLSKIATNDKHGENSPYFDGWKAYDSNPFHPTKNPQGVIQMGLAENQLCFDMIQEWIRNNPKASICTAEGVNQFKYIANFQDYHGLPEFRNAVANFMSKVRGGRVRFDPDRILMSGGATGANELIMFCLADAGDAFLVPSPYYPAFVRDLCWRTRAQLIPVECHSSNNFKITREALEESYRKAKEGNINVKGLIITNPSNPLGTTIDKETLKSIVGFINEKNIHLVCDEIYAATVFRAPSFVSVSEVMQDMEHCKKDLIHIIYSLSKDLGLPGFRVGIVYSYNDEVVNSGRKMSSFGLVSSQTQHFLAALLSDDEFVERFLAESARRLAARHSHFTKGLEKVNITCLPSNAGLFFWMNLKGLLKEKTFEGEMMLWRVIINEVKLNVSPGSAFNCPEPGWYRVCFANMDDETVDVALMRIRAFVGKETGKPPKELKRWKSNLRLSFSNSRRFDENLMSPHMMSPHSPMPHSPLVRAT

SEQ ID NO: 5805 - protein, 160 aa, Xylella fastidiosa Temecula1
MNVVRYTPWPGQAALQNEIKQVFDRFFEHNGDTDESAVVTAQWVPRVDIKEEPNQFVLYADLPGIDPADIEVQMDKGILSIKGERKTESSSQTEHFSRIERRYGSFHRRFALPDSADADGITASGSHGVLRILIPKQAATTPRRIQVGNAVSSDVALQSM

SEQ ID NO: 5806 - protein, 1329 aa, Cochliobolus heterostrophus
MAAETYSGVAAIIRNLARQHDPARDPSFSAQVSANGAKTAANAIALPGPESEEKTQLEQELSALCSRIDFLEHKCSHAAAKSGQFPLTPAQESPDDGVLYTPAGAIRNSSAPPGQARRGSNKERAIWVSNWLAAKETNGGPEEPAAALTEEQLNYLRVHLNQQADQIRNQREHIDNLSREVNKQLTTQSMVFEHGIEDIGALKRELGKHQQANLAFQKALREIGAIVTAVAMGDLSKKVLIHAKEMDPEITLFKRTINTMVDQLQEFASQVTFLAREVGTEGRLGGQANLPGVAGIWAELTDSVNMMANNLTEQVREIAVVTTAVAHGDLSRKIERPARGEILQLQQTINTMVDQLQSFATEVTKVARDVGTEGKLGGQAEIAGVKGMWNELTVNVNAMAQNLTTQVRDIAQVTTAVAQGNLTRKVEAQCKGEILELKNTINRMVDQLQQFAHEVTKIAREVGSEGRLGGQATVHGVEGTWKDLTENVNGMAMNLTTQVREIAEVTTAVARGDLSRKVKAEVQGEILSLKITINTMVDRLNTFAQEVSKVAREVGTDGILGGQAQVDNVEGKWKDLTNNVNTMAQNLTLQVRSISEVTQAIAKGDMSRRVHVDAEGEIRLLKDTVNDMVMRLDEWSLAVKRVARDVGVDGKMGGQADVRDIDGRWKEITTDVNTMAQNLTSQVRAFGDITNAAMEGKFTQITVEASGEMDELKRKINQMVSSLRESIQRNTAAREAAELANKTKSEFLANMSHEIRTPMNGIIGMTQLTLDTDLTHAQREMLTIVHNLAGQLLTIIDDILDISKIEANRMVMEEIPFSMRGTIFNALKSLASRANERKLNLAYDVSYTVPDYVVGDSFRLRQIILNLVGNAIKFTEHGEVKVAISMAQEQDCGPDHYVFQFAVSDTGIGIRGDKLNLIFDTFQQADGSTTRKFGGTGLGLSISKRLVTLMGGRMWVESDFGKGSVFYFTCRVRLGKPEITAIQPQLVAYKQHTVLFVDQGNTGFSDQIIEHLKALDLVPMVVNSVEEVPETTKRADMPYDCVIVDNDKTARELRIAERFKYIPLVMLTPHVCISLRSALENGISSYMTTPCLPIDLGNALIPALDGRAAPLVSDHSKSFQILLAEDNAVNQKLAVRILEKYHHRVTVANNGLEAFEHIQKKRYDCVLMDVQMPVMGGFEATAKIREWERENGIPSTPVIALTAHAMVGDREKCLAAQMDDYLSKPLRQNQLIQTILRCATVGSTIYDHTSEPRYTASSHIPNLDLPGNSKDKATTGAASASTTSPKKRPQLETRGFTDRGGGADSPNLLAVDQTDNGSVERVRSLSASL

SEQ ID NO: 5807 - protein, 134 aa, Haemophilus influenzae
MAYSEKVIDHYENPRNVGSLDKKDSNVGTGMVGAPACGDVMQLQIKVDDNGIIEDAKFKTYGCGSAIASSSLITEWVKGKSLEEAGAIKNSQIAEELELPPVKVHCSILAEDAIKAAIADYKAKQGLEHHHHHH

SEQ ID NO: 5808 - protein, 670 aa, Anabaena variabilis ATCC 29413
MAVATQSLEELSINAIRFLAVDAIEKAKSGHPGLPMGAAPMAFVLWNRFMRYNPKNPKWFNRDRFVLSAGHGSMLQYALLYLTGYDSVSIEDIKQFRQWESKTPGHPENFMTAGVEVTTGPLGQGIANGVGLALAEAHLAAKFNKPDAKIVDHYTYVILGDGCNMEGVSGEAASLAGHWGLGKLIALYDDNHISIDGSTDVAFTEDVSQRFESYGWHVIHVKDGNTDLEAIHKAIEEAKAVTDKPTLIKVTTIIGYGSPNKSNTAGVHGAALGGDEVALTRQNLGWSHDPFVVPEDVLNYTRKAVERGAGYESDWNKTYADYKAKYPQEAAEFERHLSGKLADGWDKVLPSYTPEDKGLPTRKHSETCLNKLAAVLPELIGGSADLTHSNLTEIKGKGDFQKGQYQNPNIHFGVREHGMGAICNGIALHGSGLIPYGATFLIFSDYMRAPIRLSALSQAGAIWVMTHDSIGQGEDGPTHQPIETLASLRAIPNLTVIRPADGNETSGAYKVAIERAKNNAPTLLAFTRQNVPNLAGTSIDNVAKGGYIVVDTDGTPDLILIGTGSELSLCVTAAEKLKAEGKKVRVVSLAAWDLFDAQDAAYKESVLPKAVTKRLAVEAASSFGWHKYIGSEGDVVTIDRFGASAPGGICLEKFGFTVDNVLAKAKQLLG

SEQ ID NO: 5809 - protein, 468 aa, Ralstonia eutropha JMP134
MTSASTTVPTDLTNERLPSGRLLALGLQHVLVMYAGTVAVPLIVGGALKLPKDQLAFLINADLFAAGLATLIQAFGFWKFGIRMPVMMGVTFASVAPMIAIGTDPNVGLLGIYGAVIASGVFGILVAPMMGRMLGLFPPVVTGTVITLIGVSLMRVGINWAAGGQPTTRAVIDGVVKEVPNLAYGDLANLGIAGLTLAVILLLTKYGRGLVANCAVLLGIIAGTFVAMAMGKVSFEGLNEASFVAVITPLHFGIPTFELSAILSMCIVMLITLVESTGMFLALSDITGKKLSNEDLTRGLRADGLGTVIGGLFNTFPYTSFSQNVGLVTVTGVRSRYVAAAGGIILIAFGLFPKMAHVVASVPQFVLGGAGIVMFGMVAATGIRILGSCDFNRNRHNLFIVAISIGFGMIPTLAPTFFQYLPKWTVPFTHSGIVLGTIVAVALNLFYNGIQSREEAMRNAAANTHGTE

SEQ ID NO: 5810 - protein, 416 aa, Anabaena variabilis ATCC 29413
MTDYNRKRVVVTGVGAITPIGNTASEYWEGLLSGRNGIDYITHFDASSHDCRIAGEVKNFDPHEYLERKEAKRMDRFSQFAVAAAKQALADSQLVINELNAEQVGIIIGSGVGGLKVMEDQQTIYLNRGPDRCSPFMIPMMIANMAAGLTAIHTGAKGPNNCTVTACAAGSNAIGDAFRLVQGGYAQAMICGGAEAAITPLGVAGFAAARALSTRNDDPAHACRPFDRDRDGFVMGEGAGVLILEELQHAISRGARIYAEIVGYGMTCDAYHMTSPVPGGEGASRAIQLALKDANITPEQVSYINAHGTSTSANDTTETAAIKRALGDHAYKIAVSSTKSMTGHLLGGSGGIEAVATVLATAHDQIPPTINIQNLDPDCDLDYVPDSSRAHKVQVALSNSFGFGGHNVTLAFKKYV

SEQ ID NO: 5811 - protein, 116 aa, Brassica napus
MGRSPCCEKAHMNKGAWTKEEDQLLVDYIRKHGEGCWRSLPRAAGLQRCGKSCRLRWMNYLRPDLKRGNFTEEEDELIIKLHSLFGNKWSLIAGRLPGRTDNEIKNYWNTHIKRKL

SEQ ID NO: 5812 - protein, 1129 aa, Burkholderia vietnamiensis G4
MPAELKRIASQVANAGRKPFEPGRARRYQQLLLYGGGFAVTLFILMCALLVTRLDVQDYRAQARLTFLYRKAQFSRTLEMADMVLATYGGRIEQLWNQGARPSADALAQFSAAGGVLGASNGDGSETLLALARLTPDRPAPSYARYLGALFGLVRQDDRSGHVLPPALVSGGEPLGGYLIGLDAPFLAVLGTELVPRAHTLEPGTDLHTLIDGLMPTGIARQKTLMQSRPFVFDRRLDPLSGRVVMRFARRLDDAAGRPFGWLVINGLHRVDDVMAPRSDDEDVAIVDARHDIVFGRERDRSMIERALHDARAPLGDHVAVRRVGARFVVYDRLPGTGLVMMTSFSWRSMVREMRVGLGITFGAALLGIVLLWSAIVLFDRRALRPAHRRAIRLIESEAFNRTLARHAPAGLLLLSAADGETMVHNDAVRAYDGGAGGQRLGKRIWDAYRERAAAGDGRLDVMQHELAVEQADHGKVYLALQVVRTMFHGVDVLLCTLTDVTARKLTEDKLKEARTAAEDANKAKSTFLATMSHEIRTPLNAIVGNLELMARAQLPLAERRRLQTVMSSSDALLHTINDVLDLSKAESNQMALEAVPFDLRAVLHEVAAIFRALADAKHLRLECVIAAGLGDGYVGDPARVRQIVSNLVSNAIKFTEHGRVTVEALPAAVPGRGVEIVVRDTGIGIEPDSMPTLFDVYVQTDASIYRRFGGTGLGLPLCRRLARLMGGDVTVESRPGAGAVFTASLPLADAPLRGRAAVDARASGAKGAGARRAEVAGAEATEAEVTGADAARVDGTGADGTGATGTEAEAADAKATGTEAPGASGTEAKRTGADAMAAATRAAATPTNATSRPAATPKPIETHARTSALSPVQPPAPACSADGETPLRVLVAEDHPASRALLRDQLDALHCDATLVSNGIEAMRAFFAQPFDVVLTDLGMPELDGFALANCLREQGAKVPVIAMTAHATDEDRRRCAQAGAVEVVLKPLSIDALDAVLTRHARHAAAARSSTADSTDSADSDDRPIPPMTDEIRENLRTATLLSLALIDDALPRGDVERIRVELHSMRGGFALAGDTVAGAACAHAERIFSQGRTAALRAAWPACRAAIERSAERLRAAGSGAGSEPA

SEQ ID NO: 5813 - protein, 1329 aa, Cochliobolus heterostrophus
MAAETYSGVAAIIRNLARQHDPARDPSFSAQVSANGAKTAANAIALPGPESEEKTQLEQELSALCSRIDFLEHKCSHAAAKSGQFPLTPAQESPDDGVLYTPAGAIRNSSAPPGQARRGSNKERAIWVSNWLAAKETNGGPEEPAAALTEEQLNYLRVHLNQQADQIRNQREHIDNLSREVNKQLTTQSMVFEHGIEDIGALKRELGKHQQANLAFQKALREIGAIVTAVAMGDLSKKVLIHAKEMDPEITLFKRTINTMVDQLQEFASQVTFLAREVGTEDRLGGQANLPGVAGIWAELTDSVNMMANNLTEQVREIAVVTTAVAHGDLSRKIERPARGEILQLQQTINTMVDQLQSFATEVTKVARDVGTEGKLGGQAEIAGVKGMWNELTVNVNAMAQNLTTQVRDIAQVTTAVAQGNLTRKVEAQCKGEILELKNTINRMVDQLQQFAHEVTKIAREVGSEGRLGGQATVHGVEGTWKDLTENVNGMAMNLTTQVREIAEVTTAVARGDLSRKVKAEVQGEILSLKITINTMVDRLNTFAQEVSKVAREVGTDGILGGQAQVDNVEGKWKDLTNNVNTMAQNLTLQVRSISEVTQAIAKGDMSRRVHVDAEGEIRLLKDTVNDMVMRLDEWSLAVKRVARDVGVDGKMGGQADVRDIDGRWKEITTDVNTMAQNLTSQVRAFGDITNAAMEGKFTQITVEASGEMDELKRKINQMVSSLRESIQRNTAAREAAELANKTKSEFLANMSHEIRTPMNGIIGMTQLTLDTDLTHAQREMLTIVHNLAGQLLTIIDDILDISKIEANRMVMEEIPFSMRGTIFNALKSLASRANERKLNLAYDVSYTVPDYVVGDSFRLRQIILNLVGNAIKFTEHGEVKVAISMAQEQDCGPDHYVFQFAVSDTGIGIRGDKLNLIFDTFQQADGSTTRKFGGTGLGLSISKRLVTLMGGRMWVESDFGKGSVFYFTCRVRLGKPEITAIQPQLVAYKQHTVLFVDQGNTGFSDQIIEHLKALDLVPMVVNSVEEVPETTKRADMPYDCVIVDNDKTARELRIAERFKYIPLVMLTPHVCISLRSALENGISSYMTTPCLPIDLGNALIPALDGRAAPLVSDHSKSFQILLAEDNAVNQKLAVRILEKYHHRVTVANNGLEAFEHIQKKRYDCVLMDVQMPVMGGFEATAKIREWERENGIPSTPVIALTAHAMVGDREKCLAAQMDDYLSKPLRQNQLIQTILRCATVGSTIYDHTSEPRYTASSHIPNLDLPGNSKDKATTGAASASTTSPKKRPQLETRGFTDRGGGADSPNLLAVDQTDNGSVERVRSLSASL

SEQ ID NO: 5814 - protein, 1329 aa, Cochliobolus heterostrophus
MAAETYSGVAAIIRNLARQHDPARDPSFSAQVSANGAKTAANAIALPGPESEEKTQLEQELSALCSRIDFLEHKCSHAAAKSGQFPLTPAQESPDDGVLYTPAGAIRNSSAPPGQARRGSNKERAIWVSNWLAAKETNGGPEEPAAALTEEQLNYLRVHLNQQADQIRNQREHIDNLSREVNKQLTTQSMVFEHGIEDIGALKRELGKHQQANLAFQKALREIGAIVTAVAMGDLSKKVLIHAKEMDPEITLFKRTINTMVDQLQEFASQVTFLAREVGTEGRLGGQANLPGVAGIWAELTDSVNMMANNLTEQVREIAVVTTAVAHGDLSRKIERPARGEILQLQQTINTMVDQLQSFATEVTKVARDVGTEGKLGGQAEIAGVKGMWNELTVNVNAMAQNLTTQVRDIAQVTTAVAQGNLTRKVEAQCKGEILELKNTINRMVDQLQQFAHEVTKIAREVGSEGRLGGQATVHGVEGTWKDLTENVNGMAMNLTTQVREIAEVTTAVARGDLSRKVKAEVQGEILSLKITINTMVDRLNTFAQEVSKVAREVGTDGILGGQAQVDNVEGKWKDLTNNVNTMAQNLTLQVRSISEVTQAIAKGDMSRRVHVDAESEIRLLKDTVNDMVMRLDEWSLAVKRVARDVGVDGKMGGQADVRDIDGRWKEITTDVNTMAQNLTSQVRAFGDITNAAMEGKFTQITVEASGEMDELKRKINQMVSSLRESIQRNTAAREAAELANKTKSEFLANMSHEIRTPMNGIIGMTQLTLDTDLTHAQREMLTIVHNLAGQLLTIIDDILDISKIEANRMVMEEIPFSMRGTIFNALKSLASRANERKLNLAYDVSYTVPDYVVGDSFRLRQIILNLVGNAIKFTEHGEVKVAISMAQEQDCGPDHYVFQFAVSDTGIGIRGDKLNLIFDTFQQADGSTTRKFGGTGLGLSISKRLVTLMGGRMWVESDFGKGSVFYFTCRVRLGKPEITAIQPQLVAYKQHTVLFVDQGNTGFSDQIIEHLKALDLVPMVVNSVEEVPETTKRADMPYDCVIVDNDKTARELRIAERFKYIPLVMLTPHVCISLRSALENGISSYMTTPCLPIDLGNALIPALDGRAAPLVSDHSKSFQILLAEDNAVNQKLAVRILEKYHHRVTVANNGLEAFEHIQKKRYDCVLMDVQMPVMGGFEATAKIREWERENGIPSTPVIALTAHAMVGDREKCLAAQMDDYLSKPLRQNQLIQTILRCATVGSTIYDHTSEPRYTASSHIPNLDLPGNSKDKATTGAASASTTSPKKRPQLETRGFTDRGGGADSPNLLAVDQTDNGSVERVRSLSASL

SEQ ID NO: 5815 - protein, 342 aa, Xanthomonas oryzae pv. oryzae KACC10331
MTKLLPTSTAGSLPKPSWLAQPETLWSPWKLQDTELSEGKQDALLLALQEQQHAGIDIVSDGEQTRQHFVTTFIEHLSGVDFDKRETVRIRDRYDASVPTVVGAVSRPRSVFVDDAKFLRQQTRQPIKWALPGPMTMIDTLYDAHYKSREKLAWEFAKILNQEARELEAAGVDIIQFDEPAFNVFFDEVNDWGVATLERAVEGLTCETAVHICYGYGIKANTDWKQTLGSEWRQYEESFPKLQTSSLDIISLECHNSHVPIDLIELVRGKKVMVGAIDVASTTIETPQEVAETLRKALRFVDADKLYPATNCGMAPLARHVARGKLHALSAGAQIVRGELSA

SEQ ID NO: 5816 - protein, 360 aa, Shewanella sp. MR-7
MTIKETLLYLGKAVLFGLIMAAMFLLVTHYFDNKNLGSSLLQNRGNNTVELSFAKAVRRAAPAVVNIYSLSIDQSRPLNSGSLQGLGSGVIMSKEGYILTNYHVIKKADEIVVALQDGRKFTSEVVGFDPETDLSVLKIEGDNLPTVPVNLDSPPQVGDVVLAIGNPYNLGQTITQGIISATGRNGLSSGYLDFLQTDAAINAGNSGGALIDTNGSLIGINTAAFQVGGEGGGHGINFAIPIKLAHSIMGKLIKNGRVIRGALGISGEPINPVVAQILNLPDLRGVLVTGVDPNGPAARAQLQPRDVIIKYDGEDVPGVEMLMDRIAETTPGKKIMMTVIRQGKEQVLPVIIDEKVVVDN

SEQ ID NO: 5817 - protein, 318 aa, Glycine max
MNKSGGGEMSKWPFTMSQWQELEHQALIYKYMVAGLPVPPDLVLPIQNSFHSISQTFLHHPSTTMSYCSFYGKKVDPEPGRCRRTDGKKWRCSKEAYPDSKYCERHMHRGRNRSRKPVESQTMTQSSSNVSSLTVTAGSSTSATGNFHNLTTTNAYGNPQGTGSGSDQTHYHMDSIPYGIPSKEYRYFQGSKSEGGEHSFLSKTLGSNRVLHMESQMDNTLMPTSGVASFSTLRSNNNSMLQGDYLQPSFLSSEYASAETVKQEGQFLRPFFDEWPKRRDSWSGLEDEGSNHTQLSISIPMSASNFSTTSSHSPHGEI

SEQ ID NO: 5818 - protein, 1329 aa, Cochliobolus heterostrophus
MAAETYSGVAAIIRNLARQHDPARDPSFSAQVSANGAKTAANAIALPGPESEEKTQLEQELSALCSRIDFLEHKCSHAAAKSGQFPLTPAQESPDDGVLYTPAGAIRNSSAPPGQARRGSNKERAIWVSNWLAAKETNGGPEEPAAALTEEQLNYLRVHLNQQADQIRNQREHIDNLSREVNKQLTTQSMVFEHGIEDIGALKRELGKHQQANLAFQKALREIGAIVTAVAMGDLSKKVLIHAKEMDPEITLFKRTINTMVDQLQEFASQVTFLAREVGTEGRLGGQANLPGVAGIWAELTDSVNMMANNLTEQVREIAVVTTAVAHGDLSRKIERPARGEILQLQQTINTMVDQLQSFATEVTKVARDVGTEGKLGGQAEIAGVKGMWNELTVNVNAMAQNLTTQVRDIAQVTTAVAQGNLTRKVEAQCKGEILELKNTINRMVDQLQQFAHEVTKIAREVGSEGRLGGQATVHGVEGTWKDLTENVNGMAMNLTTQVREIAEVTTAVARGDLSRKVKAEVQGEILSLKITINTMVDRLNTFAQEVSKVAREVGTDGILGGQAQVDNVEGKWKDLTNNVNTMAQNLTLQVRSISEVTQAIAKGDMSRRVHVDAEGEIRLLKDTVNDMVMRLDEWSLAVKRVARDVDVDGKMGGQADVRDIDGRWKEITTDVNTMAQNLTSQVRAFGDITNAAMEGKFTQITVEASGEMDELKRKINQMVSSLRESIQRNTAAREAAELANKTKSEFLANMSHEIRTPMNGIIGMTQLTLDTDLTHAQREMLTIVHNLAGQLLTIIDDILDISKIEANRMVMEEIPFSMRGTIFNALKSLASRANERKLNLAYDVSYTVPDYVVGDSFRLRQIILNLVGNAIKFTEHGEVKVAISMAQEQDCGPDHYVFQFAVSDTGIGIRGDKLNLIFDTFQQADGSTTRKFGGTGLGLSISKRLVTLMGGRMWVESDFGKGSVFYFTCRVRLGKPEITAIQPQLVAYKQHTVLFVDQGNTGFSDQIIEHLKALDLVPMVVNSVEEVPETTKRADMPYDCVIVDNDKTARELRIAERFKYIPLVMLTPHVCISLRSALENGISSYMTTPCLPIDLGNALIPALDGRAAPLVSDHSKSFQILLAEDNAVNQKLAVRILEKYHHRVTVANNGLEAFEHIQKKRYDCVLMDVQMPVMGGFEATAKIREWERENGIPSTPVIALTAHAMVGDREKCLAAQMDDYLSKPLRQNQLIQTILRCATVGSTIYDHTSEPRYTASSHIPNLDLPGNSKDKATTGAASASTTSPKKRPQLETRGFTDRGGGADSPNLLAVDQTDNGSVERVRSLSASL

SEQ ID NO: 5819 - protein, 163 aa, Brucella suis 1330
MASITQAAKSLLLKEFASAFALSMRQFFAPKATLNYPHEKGPVSPRFRGEHALRRYPNGEERCIACKLCEAICPAQAITIEAGPRRNDGTRRTVRYDIDMVKCIYCGFCQEACPVDAIVEGPNFEFATETREELYYDKDKLLANGDRWEREIARNIAMDAPYR

SEQ ID NO: 5820 - protein, 252 aa, Arabidopsis thaliana
MAQRKMIVFPTKNELSEAMAEYTANLSAKFIKEKGLFTVVLSGGDLIDWLCKLVQPPYIDSIEWPKWHVFWVDERVCAWEDPDSNYKLAMEGFLSKVPIPDKNIYAIDKHLAADGNAEHCATLYEECLKNLVKEKIIPISKKTGYPEFDLQLLGMGPDGHMASLFPNHPQINEKQKWVTYITDSPKPPPKRITFTLPVINSTLYNLMAICDKAPAKSVAEIMKHNNLSLPSAHLSAQVENVWYLDQAAASEL

SEQ ID NO: 5821 - protein, 1329 aa, Cochliobolus heterostrophus
MAAETYSGVAAIIRNLARQHDPARDPSFSAQVSANGAKTAANAIALPGPESEEKTQLEQELSALCSRIDFLEHKCSHAAAKSGQFPLTPAQESPDDGVLYTPAGAIRNSSAPPGQARRGSNKERAIWVSNWLAAKETNGGPEEPAAALTEEQLNYLRVHLNQQADQIRNQREHIDNLSREVNKQLTTQSMVFEHGIEDIGALKRELGKHQQANLAFQKALREIGAIVTAVAMGDLSKKVLIHAKEMDPEITLFKRTINTMVDQLQEFASQVTFLAREVGTEGRLGGQANLPGVAGIWAELTDSVNMMANNLTEQVREIAVVTTAVAHGDLSRKIERPARGEILQLQQTINTMVDQLQSFATEVTKVARDVGTEGKLGGQAEIAGVKGMWNELTVNVNAMAQNLTTQVRDIAQVTTAVAQGNLTRKVEAQCKGEILELKNTINRMVDQLQQFAHEVTKIAREVGSEGRLGGQATVHGVEGTWKDLTENVNGMAMNLTTQVREIAEVTTAVARGDLSRKVKAEVQGEILSLKITINTMVDRLNTFAQEVSKVAREVGTDGILGGQAQVDNVEGKWKDLTNNVNTMAQNLTLQVRSISEVTQAIAKGDMSRRVHVDAEGEIRLLKDTVNDMVMRLDEWSLAVKRVARDVGVDGKMGGQADVRDIDGRWKEITTDVNTMAQNLTSQVRAFGDITNAAMEGKFTQITVEASGEMDELKRKINQMVSSLRESIQRNTAAREAAELANKTKSEFLANMSHEIRTPMNGIIGMTQLTLDTDLTHAQREILTIVHNLAGQLLTIIDDILDISKIEANRMVMEEIPFSMRGTIFNALKSLASRANERKLNLAYDVSYTVPDYVVGDSFRLRQIILNLVGNAIKFTEHGEVKVAISMAQEQDCGPDHYVFQFAVSDTGIGIRGDKLNLIFDTFQQADGSTTRKFGGTGLGLSISKRLVTLMGGRMWVESDFGKGSVFYFTCRVRLGKPEITAIQPQLVAYKQHTVLFVDQGNTGFSDQIIEHLKALDLVPMVVNSVEEVPETTKRADMPYDCVIVDNDKTARELRIAERFKYIPLVMLTPHVCISLRSALENGISSYMTTPCLPIDLGNALIPALDGRAAPLVSDHSKSFQILLAEDNAVNQKLAVRILEKYHHRVTVANNGLEAFEHIQKKRYDCVLMDVQMPVMGGFEATAKIREWERENGIPSTPVIALTAHAMVGDREKCLAAQMDDYLSKPLRQNQLIQTILRCATVGSTIYDHTSEPRYTASSHIPNLDLPGNSKDKATTGAASASTTSPKKRPQLETRGFTDRGGGADSPNLLAVDQTDNGSVERVRSLSASL

SEQ ID NO: 5822 - protein, 253 aa, Bacillus subtilis
MNLTDKTVLITGGASGIGYAAVQAFLGQQANVVVADIDEAQGEAMVRKENNDRLHFVQTDITDEAACQHAVESAVHTFGGLDVLINNAGIEIVAPIHEMELSDWNKVLQVNLTGMFLMSKHALKHMLAAGKGNIINTCSVGGLVAWPDIPAYNASKGGVLQLTKSMAVDYAKHQIRVNCVCPGIIDTPLNEKSFLENNEGTLEEIKKEKAKVNPLLRLGKPEEIANVMLFLASDLSSYMTGSAITADGGYTAQ

SEQ ID NO: 5823 - protein, 872 aa, Zea mays
MQCVRDELCRAGSEESVTCICMEEGGDPQLPSISVARTTSEGAGAVDLDLLEQLLSGDNGWLEVVSRSPNSVAFPPPSAFFSADATATTVTTTAAPAANASWLIQTGGASTPSVRERFSQALSYIRDTQSDGDVLVQLWVPVNRDDGKLVLTTSGQPFTLDHRSDSLIRFREVSTKYQFPADVRSGESPGLPGRVFIGRLPEWSPDIRCFTSYEYARVTDAKYLDVHGTMGLPVFEKRSYSCLGVIELIMTKQKLNFTSELNTICSALQAVNLRSTEVSSIPRKKFSTASYKDALPEILEVLRAACLTHKLPLAQTWVTCTQQGKRGSRHSDENYRYCISTIDEACFVNEAEMRGFHEACSEHHLLRGEGVAGKALTTNQPCFLPDIGSSTKLEYPLSHHAKIFRLKGAVAIRLRCTRTGIADFVLEFFLPTDCEALEEQKTVLDSLSGTMQSVCQTLRVVTEREMEDEAALEMNELNSFTPPGKDKDELSFGGNSADRREASWTSLAGTSQQEPDLAALRMHGTFSPGGQGLSLSGVQATAEGSKTKRRTKAEKTVSLQVLRQYFAGSLKDAARSLGVCPTTLKRICRQHGITRWPSRKIKKVDHSLRKLQQIIDSVHGAETAFQLNTLYKDLTDTSISSDNNLSGSVTVPPTNQSNLTDFNKHQPHKSSSNMPSTSHSHSSCSHGSQSSPSCSVGATEHAQQGIIDLMKSENPVKDSSIQTMQTENTSLYEHFSVHEAPIDLLQDVTEKANGAHHSSRSLSSPNPKQNTDANMRVKATFGSEKVRFRLNPECNFQGLKHELAKRLSIVDTNPLVLKYLDDDSEWVLMTCDADLQECLHVYKLADIQTIKISVHLAVSPATRVTAGHTGLS

SEQ ID NO: 5824 - protein, 72 aa, Brassica napus
  misc_feature (63)..(63): Xaa can be any naturally occurring amino acid
  unsure (1)..(72): unsure at all Xaa locations
MADGRCCTFLEILFAIILPPLGVFLRFGCCRIEFCICLLLTILGYVPGIIYAIYVLVALDSDXHEREYYTLA

SEQ ID NO: 5825 - protein, 592 aa, Rhodospirillum rubrum
MNGFAGHVVFDRQDGGAGLCGFLPIREGRWRVALAGRLDDRHTSAAALDLPAGRDLADIDLAARAVERWGMDAAAHLLGDFALAAWFGDERRLMLAGDAMGMRTVYYWRGPDRVVFATGLRDLLAMPGVPRAIDEVFVADHLALNYGDDEATFYRDIRKVRPGARVLLSARGIDHHRFHRFDPERRIRLAKDGDYVDHARDLLDRAVADRMRQEKIAIMGSGGLDSACLAVAALRHAPSVPFLTAVPEPGVPTAPTAGHVDERPYVEALAAAFPGLRPEFLSPSPTTDWAPEHWSLTVAGAAPYRMAGNVLWLNEAARRAAALGATSYLTGAVGNLGLTWDGLRGLPCLFKRGRWLRLTRELLLTSRGHPRRLAGLTWRSLLQPLVGRRFDEGDLLAACGLTPATLRRFDMAERLRQRGNDPSFILSPDSRRFRIAALCRNRARRPDGMNSLRGFQGIDNSAPLADLRLVEFCLAIPEDQYLRDGTTRWLSRRLLRAAGVPAMVTDNRRRGYQHPEWFAHLSRARPSLAEQVDRLERSPTASRLIDVERLKRRIADWPETTAAAEAERVGLQVMMQEALNVGAYIAWVEGTN

SEQ ID NO: 5826 - protein, 688 aa, Yarrowia lipolytica CLIB122
MRFSTSVVAVLTSALAINGVLAIPQVKNPVPQNILEPVQFRVAFAGAEAGKSAAVSWNTYGELSGAPTLRYGLDPDNLSKSASGESNTYATSTTWNHHVVLEGLEPGTVYYYRVEGADVSKTFHFKTALAPGTNKEFTFAAAIDLGVMGEYGLSTWVGEGAEGPLKPGEKNTIDSLLDDFDEYEFLLHPGDIAYSDYWLKEEIQGYLPNTTLEEGIYVYEALLNTYYQQMEGLTAYKQYMVSPGNHEANCNNGGTSDKKNNITYTADMCFEGQTNFTGLRNHFRMPAEESGGVGPMWYSFDYGLVHFVSINTETDFEDAPSSTGMRSGEFGYPGQQLDWLRADLANVDREKTPWVVVSGHRPWYIDAKKKNVCKDCQNAFEDILVDGNVDLVIMGHVHLYERNHPVAHGKVDPNGLNNPSAPWYIVNGAAGHYDGIDFAAGLDEEWIAYTMDGHYGWSSFTVHNCSHLTHEFVFSENNTRLDRQTLFKDRKCKLPIDGGSSVSISPSTSSIPGVESGSGFNGTVTKTESDKKSSVVGTATVSKPKPADETKTVIKPETSTVTETDCEKCHSETNGSLLESAAETAQTEKEQSKAATVVETVHETAVASTKPIVSISSLSPVATAPIASVGPSSVASASESESAAVFQPSTGSAGSTPALANVATLARISPMVMGVALVAVPAFAMQFV

SEQ ID NO: 5827 - protein, 250 aa, Arabidopsis thaliana
MRPPRGDGEYGWYIMLKLWRWYQRCLTVHPVKTQVISSGFLWGFGDVTAQYITHSTAKRRLLRLTETNKDADADAEFKVKWKQDAEFKVNWKRVAITSMFGFGFVGPVGHFWYEGLDKFIKLKLRYVPKSTRFVAAKVAIDGLIFGPIDLLVFFTYMGFATGKNTAEVKEGLKRDFLPALALEGGAWPLLQIANFRYVPVQYQLLYVNIFCLVDSAFLSWVEQQKDAAWKQWFNFIISTIKRNGGGQGGV

SEQ ID NO: 5828 - protein, 282 aa, Tropheryma whipplei TW08/27
MVFVLTYVPSVLLGDGVSIPQFGLGTYELPPNETSSVVQSAIELGYRHIDTASLYANEREVGRAIASSGIKREEFFVTTKLWNSDQPKPREAFERSLDLLSLDYVDLYLIHWPCPPSELYINVWEVLLELKESGRAKSVGVSNFLSEHINKIKEAGFPLPSVNQIELHPWLQQRELVLSCRNYGIQIESWGPFARFSKDLDAFPELTRPAKEYGKTPAQVILRWHIQKGYVVFPKTVHAERLRQNIDIFDFDLTPDEISGIDSLDAGFRTGPDPSSFRAGLD

SEQ ID NO: 5829 - protein, 457 aa, Escherichia coli
MMEGQQHGEQLKRGLKNRHIQLIALGGAIGTGLFLGSASVIQSAGPGIILGYAIAGFIAFLIMRQLGEMVVEEPVAGSFSHFAYKYWGSFAGFASGWNYWVLYVLVAMAELTAVGKYIQFWYPEIPTWVSAAVFFVVINAINLTNVKVFGEMEFWFAIIKVIAVVAMIIFGGWLLFSGNGGPQATVSNLWDQGGFLPHAFTGLVMMMAIIMFSFGGLELVGITAAEADNPEQSIPKATNQVIYRILIFYIGSLAVLLSLMPWTRVTADTSPFVLIFHELGDTFVANALNIVVLTAALSVYNSCVYCNSRMLFGLAQQGNAPKALASVDKRGVPVNTILVSALVTALCVLINYLAPESAFGLLMALVVSALVINWAMISLAHMKFRRAKQEQGVVTRFPALLYPLGNWICLLFMAAVLVIMLMTRGMAISVYLIPVWLIVLGIGYLFKEKTAKAVKAH

SEQ ID NO: 5830 - protein, 646 aa, Oryza sativa (japonica cultivar-group)
MGIVEGTTDFIRKIDRVMKKHSGIGVKALTIEFNGLFSTKARSYLERWLQIAVTPRIEELSLSMSKGKSYYDFPCSLLSDGSGSSIRLLDLYRCTFRPTAEIGCFQSLTRLHLEYVSITGDELGCVFSTSFALEWLKLRLCRHIKYMKLPCVLQRLTYVEVRGCSRLRVIENKAPNLHSLHIFYQPYHPIKLSFGESSLVKNLRIGYSSVLDHACAELPYIFPNLETLTIGLLGEMVNTPMVPNTFLLLKYLCITLSAVTLSPSYDYLSLVSFLDACPSLDTFIVDVSAKHPKNDSIFENPSHLRQLPEQRHDNLRNVKITGFRSAKSLFELTYHILENTSVECLTLDTSFESFRCSPGKPGRCLQTSKDDPMEASKALFAIRTYIEGKVPSTAADAWRGGAAALGGGRRRGEAGGGRRTRWEAAVDNLDSAAVDDLDDDPDDDLDDGAPDDDDGGLGSGAEVRCWRRRRGEARGGGRRTRWEAPLDDLDDDPDDDLDDDDGGPDDLDDDDPDNGDLNDDDDGAPDDDDDGLGTGHWGQRVVLAGGLLECVFDAKLLKFNLESEIRRLLEMLLVLPIFLGQRPAARLLRRWWAGGAAADGKRVQQGDGRQRVAWTVSTTVASVGGRVARLRSPNPSWLGFKRRQGP

SEQ ID NO: 5831 - protein, 920 aa, Streptococcus pyogenes serotype M3
MPLKKLESSNNQTIIAEEVALLKEMLENITRRMIGDDAFTVIESIMVLSEKQDYIELEKVVANISNQEMEVISRYFSILPLLINISEDVDLAYEINHQNNTDTDYLGKLALTIKDLAGKDNGKDILEQVNVVPVLTAHPTQVQRKTILELTTHIHKLLRKYRDAKAGVINLEKWRQELYRYIEMIMQTDIIREKKLQVKNEIKNVMQYYDGSLIQAVTKLTTEYKNLAQKHGLELDNPKPITMGMWIGGDRDGNPFVTAETLCLSATVQSEVILNYYIDKLAALYRTFSLSSTLVQPNSEVERLASLSQDQSIYRGNEPYRRAFHYIQSRLKQTQIQLTNQPAARMSSSVGLNTSAWSSPASLENPILAYDSPVDFKADLKAIEQSLLDNGNSALIEGDLREVMQAVDIFGFFLASIDMRQDSSVQEACVAELLKGANIVDDYSSLSETEKCDVLLQQLMEEPRTLSSAAVAKSDLLEKELAIYTTARELKDKLGEEVIKQHIISHTESVSDMFELAIMLKEVGLVDQQRARVQIVPLFETIEDLDNARDIMAAYLSHDIVKSWIATNRNYQEIMLGYSDSNKDGGYLASGWTLYKAQNELTAIGEEHGVKITFFHGRGGTVGRGGGPSYDAITSQPFGSIKDRIRLTEQGEIIENKYGNKDVAYYHLEMLISASINRMVTQMITDPNEIDSFREIMDSIVADSNTIYRKLVFDNPHFYDYFFEASPIKEVSSLNIGSRPAARKTITEITGLRAIPWVFSWSQNRIMFPGWYGVGSAFKRYIDRAQGNLERLQHMYQTWPFFHSLLSNVDMVLSKSNMNIAFQYAQLAESQDVRDVFYEILDEWQLTKNVILAIQDHDDLLEDNPSLKHSLKSRLPYFNVLNYIQIELIKRWRNNQLDENDEKLIHTTINGIATGLRNSG

SEQ ID NO: 5832 - protein, 138 aa, Haemophilus ducreyi 35000HP
MLQQTLCLIKPDATQRNLIGKIISYLENAGLKIKAIKKLQLTQAQAEKFYLEHQDKPFFASLVGFMISAPIVAIVLEGENAIAHYRELMGATNPEQREAGTIRALYAISNQENSVHGSDSETSAKREIDYFFSKEEIC

SEQ ID NO: 5833 - protein, 805 aa, Vigna radiata var. radiata
MATDRLTRVHSLRERLDETLSANRNEILALLSRIEGKGKGILQHHQVIAEFEEIPEESRQKLTDGAFGEVLRSTQEAIVLPPWVALAVRPRPGVWEYLRVNVHALVVEVLQPAEYLRFKEELVDGSSNGNFVLELDFEPFTASFPRPTLNKSIGNGVQFLNRHLSAKLFHDKESLHPLLEFLRLHSVKGKTLMLNDRIQNPDALQHVLRKAEEYLGTVPPETPYSAFEHKFQEIGLERGWGDNAERVLESIQLLLDLLEAPDPCTLETFLGRIPMVFNVVILSPHGYFAQDNVLGYPDTGGQVVYILDQVRALENEMLHRIKQQGLDIVPRILIITRLLPDAVGTTCGQRLEKVFGTEHSHILRVPFRTENGIVRKWISRFEVWPYLETYTEDVAHELAKELQGKPDLIVGNYSDGNIVASLLAHKLGVTQCTIAHALEKTKYPESDIYWKKLEERYHFSCQFTADLFAMNHTDFIITSTFQEIAGSKDTVGQYESHTAFTLPGLYRVVHGIDVFDPKFNIVSPGADQTIYFPHTETSRRLTSFHTEIEELLYSSVENEEHICVLKDRSKPIIFTMARLDRVKNITGLVEWYGKNAKLRELVNLVVVAGDRRKESKDLEEKAEMKKMYSLIETYKLNGQFRWISSQMNRVRNGELYRVIADTKGAFVQPAVYEAFGLTVVEAMTCGLPTFATCNGGPAEIIVHGKSGFHIDPYHGDRAADLLVEFFEKVKVDPSHWDKISQAGLQRIEEKYTWQIYSQRLLTLTGVYGFWKHVSNLDRRESRRYLEMFYALKYRKLAESVPLAVE

SEQ ID NO: 5834 - protein, 253 aa, Glycine max
  misc_feature (179)..(179): Xaa can be any naturally occurring amino acid
  unsure (1)..(253): unsure at all Xaa locations
MEVGLKKENMGFEETELRLGLPGNGGTEEVLIRKRGFSETETGHEDESATTVDLMLNLSSKEAATTAAAAADPTDKHKTLPKEKTLLPADPAKPPAKTQVVGWPPVRSFRKNMLAVQKSVGEESEKNSSPNASFVKVSMDGAPYLRKVDLKMYKSYRELSDSLGKMFSSFTFGNCESQXGMKDFMNESKLNDLLNSSDYVPTYEDKDGDWMLVGDVPWEMFVESCKRLRIMKGKEAIGLGLAPRAMAKCKNRS

SEQ ID NO: 5835 - protein, 487 aa, Legionella pneumophila str. Lens
MKTNIPTLSKPIKDSGYRRGLKDRHVQLIALGGIIGSGYFLGTGEVINLVGPSVFIAYLLGGLIIYLTMLCMGELAVAIPISGSFVTYTSDFISPTVACGVGWSYWITWVAYIPAECVAGGIIMELFTGVSGYIWVVCFGLVITYINLAKVDTFGEIEFWLALIKIISLLAFVFLAILIFFGLIHGSEPPGIIGFKYLLDDGGLLPNGAMSLLTAMVLLLVNYQGSEIIGLAAGESENPARMIPHAIRNVTFRILFLYIIPVFCLVLIFPWQKAGLSNSVFADALNFYGLKWAGAVTSFVTLSATLSCANSGFYGAVRSLNALARDGMAPHVLAKFNQNSVPQNAVIATLIGVWILLGVGYFFGQTKLYIALLLVSGFTGTLAWLSLCIAQISFRNRLYKAGYSIKDLRYVTPYSPYTGILAVILMVGSLFFLLLNKDPIYKLSFIIGVVSFIIPVIIYKVFDLSKVRKKALHVKSRVKFQDLFPPQ

SEQ ID NO: 5836 - protein, 621 aa, Dunaliella salina
MSYHSIDGIGNSRHPLMQLRSVLVGGVKIASLDVWKTQLLLFSHTVSQPSHNTNPVLTDGPGAMGEPAKADEHRDSNGENGNGKPAPGQLFPDYRRTVALKYVSRGLQVAFSYISLTMLATPFVVFGSLELFNLYRQGELQKLVEVAKQTEMTFDMITVMGCIAMMVVGLLLYFFLRKNPVYLVDFSVFRANDSSWNATYKRFMNGSFMTRRFTEDSLNFQKKILERSGLGQDTMLPPAMQTMCSLDWKTLELSHDPAQTLASVAPRPGMKLAREEFEVVIFSTVQDLLNKTGVRAKDIGILVVNCSLFNPTPSLCAMVINHFKMRSNIISYNLSGMGCSASPIAIDLANQMLQLYSGTYALVISTENITQNWYFGNDRSMLLPNCLFRVGGAAMLLSNRRRDGLRAKYELQHVVRTHLGAKDQAYGCIFQTEDDEDNVGVRLTKELMAVAGEALKVNVTTLGPLVLPISEQALFIFNLIVRKTFNKKLKPYIPDFKLAFDKICIHTGGRAVIDEIEKQLRLTPEMVEPSRAVLFRYGNVSSSSIWYVLAYMESIEGVKRGDRIWQLGFGSGFKCNSAVWRSKRRIKNMHYAWEGFNLQEMRDHLASLAIHKARHLEQKPK

SEQ ID NO: 5837 - protein, 514 aa, Xylella fastidiosa Temecula1
MNSRIHTRCFGLLAITLPLAACGAQHNNSPTPTAHSTPIVTPSTTPAPQLVAGLPDFTQLVDQVGPGVVNIETVITRKKVGKRRGIPLDNDIPEFFRRFFGPDFQMPNQPRGGQDDEGGIAGRGMGSGFIISKDGYILTNHHVITGASEVTIKLTDRREFKAKVIGSDEQYDVALLKIDAKNLPTVRIGDSSSLKPGQWVVAIGSPFGLDHSVTAGIVSALGRSTSDDQRYVPFIQTDVPINQGNSGGPLLNTRGEVIGINSQIFSASGGYMGISFAIPINLAINAAEQIRKTGKVQRSMLGVEIGPIDALKAQGLGLPDSRGALVNNIPPHSPAAKAGIEVGDVIRSVNGKVISSFSDLPPLIGMMPPGTKATLGIIRDGKSLEIVVTLSALNQDATVSEDEDDTSPSKPETSANVELLGLQVENLSAAERERLASSQNAKGGVRITAVTAPWARNANPPLVEGLFILRIGRTPVSNVAELNRALGNYKKGDVIMLLVTNGRGTFYSALKAGG

SEQ ID NO: 5838 - protein, 1329 aa, Cochliobolus heterostrophus
MAAETYSGVAAIIRNLARQHDPARDPSFSAQVSANGAKTAANAIALPGPESEEKTQLEQELSALCSRIDFLEHKCSHAAAKSGQFPLTPAQESPDDGVLYTPAGAIRNSSAPPGQARRGSNKERAIWVSNWLAAKETNGGPEEPAAALTEEQLNYLRVHLNQQADQIRNQREHIDNLSREVNKQLTTQSMVFEHGIEDIGALKRELGKHQQANLAFQKALREIGAIVTAVAMGDLSKKVLIHAKEMDPEITLFKRTINTMVDQLQEFASQVTFLAREVGTEGRLGGQANLPGVAGIWAELTDSVNMMANNLTEQVREIAVVTTAVAHGDLSRKIERPARGEILQLQQTINTMVDQLQSFATEVTKVARDVGTEGKLGGQAEIAGVKGMWNELTVNVNAMAQNLTTQVRDIAQVTTAVAQGNLTRKVEAQCKGEILELKNTINRMVDQLQQFAHEVTKIAREVGSEGRLGGQATVHGVEGTWKDLTENVNGMAMNLTTQVREIAEVTTAVARGDLSRKVKAEVQGEILSLKITINTMVDRLNTFAQEVSKVAREVGTDGILGGQAQVDNVEGKWKDLTNNVNTMAQNLTLQVRSISEVTQAIAKGDMSRRVHVDAEGEIRLLKDTVNDMVMRLDEWSLAVKRVARDVGVDGKMGGQADVRDIDGRWKEITTDVNTMAQNLTSQVRAFGDITNAAMEGKFTQITVEASGEMDELKRKINQMVSSLRESIQRNTAAREAAELANKTKSEFLANMSHEIRTPMNGIIGMTQLTLDTDLTHAQREMLTIVHNLAGQLLTIIDDILDISKIEANRMVMEEIPFSMRGTIFNALKSLASRANERKLNLAYDVSYTVPDYVVGDSFRLRQIILNLVGNAIKFTEHGEVKVAISMAQEQDCGPDHYVFQFAVSDTGIGIRGDKLNLIFDTFQQADGSTTRKFGGTGLGLSISKRLVTLMGGRMWVESDFGKGSVFYFTCRVRLGKPEITAIQPQLVAYKQHTVLFVDQGNTGFSDQIIEHLKALDLVPMVVNSVEEVPETTKRADMPYDCVIVDNDKTARELRIAERFKYIPLVMLTPHVCISLRSALENGISSYMTTPCLPIDLGNALIPALDGRAAPLVSDHSKSFQILLAEDNAVNQKLAVRILEKYHHRVTVANNGLEAFEHIQKKRYDCVLMDVQMPVMGGFEATAKIREWERENGIPSTPVIALTAHAMVGDCEKCLAAQMDDYLSKPLRQNQLIQTILRCATVGSTIYDHTSEPRYTASSHIPNLDLPGNSKDKATTGAASASTTSPKKRPQLETRGFTDRGGGADSPNLLAVDQTDNGSVERVRSLSASL

SEQ ID NO: 5839 - protein, 426 aa, Absidia coerulea
VVVIGHVDSGKSTTTGHLIYKCGGIDKRTIEKFEKEAAELGKGSFKYAWVLDKLKAERERGITIDIALWKFETPKYHVTVIDAPGHRDFIKNMITGTSQADCGILIIAAGTGEFEAGISKDGQTREHALLAFTLGVRQLIVAINKMDSTKWSEQRFNEIIKEVSGFIKKIGFNPKSVPFVPISGWHGATMLKESTNMPWSKGWTKEPKAGAKSGKTLLDAIDAIDPPQRPSDKPLRLPLQDVYKIGGIGTVPVGRVETGVIKAGMVVTFAPANVTTEVKSVEMHHEQLVEGLPGDNVGFNVKNVSVKDIRRGNVCSDSKNDPAKEAGSFTAQVIVLNHPGQIGAGYAPVLDCHTAHIACKFAELLEKIDRRSGKKLEDAPKFVKSGDSAIVKMIPSKPMCVEAYTDYPPLGRFAVRDMRQTVAVGV

SEQ ID NO: 5840 - protein, 405 aa, Absidia corymbifera
GKSTSTGHLIYKCGGIDKRTIEKFEKEAAELGKGSFKYAWVLDKLKAERERGITIDIALWKFETPKYHVTVIDAPGHRDFIKNMITGTSQADCGILIIAAGTGEFEAGISKDGQTREHALLAFTLGVRQLIVAINKMDSTKYSEARYNEIVKEVSTFIKKIGFNPKSVPFVPISGWNGDNMLEESTNMPWFKGWNKETKAGAKTGKTLLEAIDNIDPPVRPSDKPLRLPLQDVYKIGGIGTVPVGRVETGVIKPGMVVTFAPANVTTEVKSVEMHHEQLAEGVPGDNVGFNVKNVSVKDIRRGNVCSDSKNDPAKESASFTAQVIVLNHPGQIGAGYSPVLDCHTAHIACKFSELLEKIDRRSGKKLEDSPKFVKCGDSAIVKMVPSKPMCVEAYTEYPPLGRFA

SEQ ID NO: 5841 - protein, 426 aa, Absidia repens
VVVIGHVDSGKSTTTGHLIYKCGGIDKRTIEKFEKEAAELGKGSFKYAWVLDKLKAERERGITIDIALWKFETPKYHVTVIDAPGHRDFIKNMITGTSQADCGILIIAAGTGEFEAGISKDGQTREHALLAFTLGVRQLIVAINKMDSTKWSEQRFNEIIKEVSGFIKKIGFNPKSVPFVPISGWHGDNMLDESTNMPWYKGWNKETKAGAKSGKTLLDAIDAIDPPQRPSDKPLRLPLQDVYKIGGIGTVPVGRVETGVIKAGMVVTFAPANVTTEVKSVEMHHEQLVEGLPGDNVGFNVKNVSVKDIRRGNVCSDSKNDPAKESGSFTAQVIVLNHPGQIGAGYAPVLDCHTAHIACKFAELLEKIDRRSGKKLEDAPKFVKSGDSAIVKMIPSKPMCVEAYTDYPPLGRFAVRDMRQTVAVGV

SEQ ID NO: 5842 - protein, 119 aa, Arabidopsis thaliana
MSSPIKKVKHFTDLDQKCVNTIRTLCADVVQKANSGHPGAPMGCAPMAHVLFTKCMKFAPSHPHWADRDRFVLSNGHGCALLYALLHLTGYERPTMDDLKKFRQLDSVTPGHPERQPRS

SEQ ID NO: 5843 - protein, 398 aa, Ehrlichia ruminantium str. Welgevonden
MIDYEEIFYDKIKHIKEEGRYREFTGFSRVPGQFPYAIECSINDKVTLWCSNDYLGMGQNEQVILAIKNFSSNIGAGGTRNISGTTKEILELEESLADLHKKPAALTFVCGYVANQTTISTLLTIVPNIVVFSDEKNHSSMIEGIRGSKREKYIFKHNDVNHLEDLLKSVDKSLPKIIIFESLYSMDGNIAPIAEICYLANKYGAMTYLDEVHAVGMYGERGGGISEQENLSDKITIIQGTLSKAYGVMGGYIAGSKSLVDVIRSFAPGFIFTTALSPLIASSARISVEYLKKSSSEREKQREVVNKVKSSFTKAGINFVKTDTHIIPIIIGDSVICKDISRTLLRDYKIYIQSINYPTVPVGTERLRITPTPYHTDEMIEILTRALVDILRKFKIMN

SEQ ID NO: 5844 - protein, 1145 aa, Cochliobolus heterostrophus
MAAETYSGVAAIIRNLARQHDPARDPSFSAQVSANGAKTAANAIALPGPESEEKTQLEQELSALCSRIDFLEHKCSHAAAKSGQFPLTPAQESPDDGVLYTPAGAIRNSSAPPGQARRGSNKERAIWVSNWLAAKETNGGPEEPAAALTEEQLNYLRVHLNQQADQIRNQREHIDNLSREVNKQLTTQSMVFEHGIEDIGALKRELGKHQQANLAFQKALREIGAIVTAVAMGDLSKKVLIHAKEMDPEITLFKRTINTMVDQLQEFASQVTFLAREVGTEGRLGGQANLPGVAGIWAELTDSVNMMANNLTEQVREIAVVTTAVARGDLSRKVKAEVQGEILSLKITINTMVDRLNTFAQEVSKVAREVGTDGILGGQAQVDNVEGKWKDLTNNVNTMAQNLTLQVRSISEVTQAIAKGDMSRRVHVDAEGEIRLLKDTVNDMVMRLDEWSLAVKRVARDVGVDGKMGGQADVRDIDGRWKEITTDVNTMAQNLTSQVRAFGDITNAAMEGKFTQITVEASGEMDELKRKINQMVSSLRESIQRNTAAREAAELANKTKSEFLANMSHEIRTPMNGIIGMTQLTLDTDLTHAQREMLTIVHNLAGQLLTIIDDILDISKIEANRMVMEEIPFSMRGTIFNALKSLASRANERKLNLAYDVSYTVPDYVVGDSFRLRQIILNLVGNAIKFTEHGEVKVAISMAQEQDCGPDHYVFQFAVSDTGIGIRGDKLNLIFDTFQQADGSTTRKFGGTGLGLSISKRLVTLMGGRMWVESDFGKGSVFYFTCRVRLGKPEITAIQPQLVAYKQHTVLFVDQGNTGFSDQIIEHLKALDLVPMVVNSVEEVPETTKRADMPYDCVIVDNDKTARELRIAERFKYIPLVMLTPHVCISLRSALENGISSYMTTPCLPIDLGNALIPALDGRAAPLVSDHSKSFQILLAEDNAVNQKLAVRILEKYHHRVTVANNGLEAFEHIQKKRYDCVLMDVQMPVMGGFEATAKIREWERENGIPSTPVIALTAHAMVGDREKCLAAQMDDYLSKPLRQNQLIQTILRCATVGSTIYDHTSEPRYTASSHIPNLDLPGNSKDKATTGAASASTTSPKKRPQLETRGFTDRGGGADSPNLLAVDQTDNGSVERVRSLSASL

SEQ ID NO: 5845 - protein, 407 aa, Actinomucor elegans
GKSTTTGHLIYKCGGIDKRTIEKFEKEAAELGKGSFKYAWVLDKLKAERERGITIDIALWKFETPKYNVTVIDAPGHRDFIKNMITGTSQADCAILIIAGGTGEFEAGISKDGQTREHALLAFTLGVRQLIVAINKMDTTKWSEARYTEIVKEVSSFIKKIGFNPKSVPFVPISGWHGDNMLEESKNMPWFKGWNKETKAGSSTGKTLLQAIDAIEPPTRPSDKPLRLPLQDVYKIGGIGTVPVGRVETGTIKAGMVVNFAPAAVTTEVKSVEMHHETLTEGLPGDNVGFNVKNVSVKDIRRGNVCSDSKNDPAKESASFTAQVIILNHPGQISAGYAPVLDCHTAHIACKFAELIEKIDRRSGKKMEDAPKFVKSGDSAIVKMIPSKPMCVEAYTDYPPLGRFAVR

SEQ ID NO: 5846 - protein, 414 aa, Amylomyces rouxii
GKSTTTGHLIYKCGGIDKRTIEKFEKEAAELGKGSFKYAWVHDKLKAERERGITIDIALWKFETPKYQITVIDAPGHRDFIKNMITGTSQADCAILIIAGGTGEFEAGISKDGQTREHALLAFTLGVRQLIVAVNKMDTTKWSEARFNEIVKEVSSFIKKIGYNPKSVPFVPISGWHGDNMLDESTNMPWYKGWNKETKAGAKSGKTLLDAIDNIDPPTRPVDKPLRLPLQDVYKIGGIGTVPVGRVETGVIKAGMVVTFAPAAVTTEVKSVEMHHETLSEGLPGDNVGFNVKNVSVKDIRRGNVCSDSKNDPAKEAGSFTAQVIILNHPGQIGAGYAPVLDCHTAHIACKFAELIEKIDRRSGKSLEATPKFVKSGDSAIVKMIPSKPMCVEAYTDYPPLGRLAVRDMRQTVA

SEQ ID NO: 5847 - protein, 363 aa, Corynebacterium diphtheriae NCTC 13129
MKAARYYDQKDIRIEEISEQPLLPGTARIKVAWCGICGTDLHEFLEGPLFVPEHHHPHPVSGEDSPVTLGHEMSGVITEVAEDVTDLAVGDHVVVEPYLIHDDVDTSEANPFYHLSRDMNFIGLAGGGGGLSENIVVKRRWIHKISPDLPLDEAALIEPLSVGYHAVERAGFASEEAAKGKVALVGGAGPIGLLTASVLKAFGATVVISELSPLRRKKALDSGAADYALNPAEVDVVEEIAKLTDGKGADVAFECTSVQVVLDTLMDAVRPGAVIVVVSIWSKRSNFDIHKLVMKEIDLRGTIAYSHAHPNTIKLVESGKINLKPFITGKIALQDIVDKGFDTLINHNETAVKILVSPSGVGL

SEQ ID NO: 5848 - protein, 423 aa, Corynebacterium diphtheriae NCTC 13129
MNNKKETPQAAPAQRKRTRRIFDQSDKLKNVLYEIRGPVTAEAEAMELDGHRILKLNTGNPAIFGFEAPDVIMRDMIASLPTSQGYSTSKGIIPARRAIVTRYEVIPGFPAFDVDDVYIGNGVSELITMTTQALLNNGDEVLIPMPDYPLWTAATSLAGGKPVHYLCDEEDDWNPSIEDIKSKITERTKAIVVINPNNPTGAVYSKEVLQKIVDVAREHDLLILADEIYDRILYDGAVHTNIAALAPDLLCITFNGLSKAYRVAGYRAGWMIVTGPKNNARGFIEGLDLLSGTRLCANVPGQHAIQVALGGRQSIYDLTGQGGRLLEQRNVTWEKLNAIPGVSCVKPMGALYAFPKLDLEYYDIKDDAQLMLDLLRQEKILMVQGTGFNWDKPDHFRVVTLPWASQLSEAMDRLGNFLASYKQ

SEQ ID NO: 5849 - protein, 904 aa, Xanthomonas axonopodis pv. citri
MNEYRSSLVFATPDLPLRDDVRRLGALVGDLLAEQVSAEFLDEIERVRTTAISRRESDAPPSTLSEQLAGRQPRDAEALVRAFSTYFQVVNIAERVHRIRRRREYQRSGTDTPQPDGLHDALRRLKAQGVTLDELSQWLPRIDVEPVFTAHPTEAVRRALLEKEQLMVASLVDNLDGMRTPNERASDAARFRMALTASWQTADSSPVRPTVDDEREHVGFYLTQVLYRVIPVMYETLEHAIEETYGSVPALPRLLRFGTWVGGDMDGNPNVDAKTIAGTLDAQRRAVLDRYQKELWQLASLLSQSTTLVQVSGELTAQLERYRALLPDAAARSRPRHGDMPYRLLNDLMRARLQATLDDADGAYAAPSELEHDLQLILDSLQANKGLHAGWFAARRLLWRVRSFGFHLARLDVRQESSVHARAVADALGQTDWDAQDATQRAAVLGPYAAGQDPLPRVDDEGNARLDAVFAALADARTRHGADALGSYIISMAHNRADVLTVLALARRGGLVDDAGAVPLDIVPLFETVDDLRGGTGTVQDLLADPVYRQHLAARGDTQMVMLGYSDSGKDGGIAASRWGLQRAQVELLEAAAELGVRLTFFHGRGGSIARGGGKTSRALDAAPRGSVDGRLRVTEQGEVIHRKYGIRALALRSLEQMTGAVLLSSLRPRAPEPREARWRPVMDLVAERSTVAYRAFVGAPEFMQYFRLATPIDVIERMTLGSRPSRRLGQDAALSNLRAIPWVFAWSQARAVIPGWYGVGSGLQAAVDAGHEETLREMAQDWPFFRTFLDDIAMVLSKGDLNIAELFSRLSGDLHTRFFPLIRDELALTKGWVKALLQQQSLLQHDPRLALSIRLRNPYIDPISVLQVDLLQRWRATDGEDEALLRALVACVNGVSQGVQNTG

SEQ ID NO: 5850 - protein, 370 aa, Shewanella sp. MR-7
MTNANVDATQLTTKPSQDGFYMPAEWAAQQAVWMIWPYRPDNWRSAGAYAQATFAKVADAIGGATPVYMGVPQAFLAEAQKVMPSHVTLVEIDSNDCWARDTGPTVVVNAEGECRGVDWGFNAWGGHNGGLYFPWDKDEQVAAQMLKQHGFARYSAPLILEGGSIHVDGEGTCMTTAECLLNANRNPDLTKEQIEALLRDYLNVKQFIWLEEGVYMDETDGHIDNMCCFARPGEVVLHWTDDETDPQYPRSKAALDVLQNTVDAQGRKLKIHLLPQPGPLYCTEEESKGVTEGTGVPRTAGERLAGSYVNFLITNDRIVFPLLDPATDDIAAQKLQDIFPEHKIVGVPAREILLGGGNIHCITQQIPSGK

SEQ ID NO: 5851 - protein, 131 aa, Brassica carinata
FIGSWLVMRLLERGYFVRATVRDPGNLKKVQHLLDLPNAKTQLTLWKADLSDEGSYDDAINGCDGVFHIATPMDFESKDPENEVIKPTVNGVLGIMKACDKAKTVRRIVFTSSAGTVNVEEHQKDVYDEND

SEQ ID NO: 5852 - protein, 210 aa, Kluyveromyces lactis NRRL Y-1140
MSVEEVTQKTQDLTVDEAKPATVLSDPKEFQLKHPLSSKWTLWYTKPPVDSSESWSDLLRPVTSLDTVEEFWAIQNGIPKPFDLPIKSDYHLFRNDIRPEWEDEANSEGGKLSYQFKNKRHNIDDLWLRTLLAVIGETIDEEESEINGCVLNVRKAVFKIALWTRTTNLNALTNIATKFKQVLQLGEGEKLEFYNHRTSNSGHAPPTALL

SEQ ID NO: 5853 - protein, 309 aa, Triticum aestivum
  misc_feature (124)..(125): Xaa can be any naturally occurring amino acid
  unsure (1)..(309): unsure at all Xaa locations
MASHFVLSTGAKIPSVGLGTWQSEPGVVGDAVYAAVKAGYRHIDCAQVYGNEKEIGFALKKVFDEGITSRKDLFITSKLWCTNHAPEDVPVALDGTLQDLQTGYVDLYLVHWPFRTRKGAGFSXXNVVPAGTPATWAAMEGLYDSGKARAIGVSNFSCKKLEELLAVARVPPAANQVECHPVWQQAKLRDLCASKGIHFSAYSPLGSPGTFKSYSVLEHPVVVSTAEKLGKTPAQVALRWGIQAGHSVLPKSTHEERIRANFDVFDWSIPSDLFAGFSEIEQTRLIRGKFWTHPEGVFKSEEEIWDGEI

SEQ ID NO: 5854 - protein, 827 aa, Silicibacter sp. TM1040
MRDWLQSFFVALGNRTYLPTWIALFVVGIAFAYAERQNQIINDQELRAEVQAEVGLIRSHLEGKLTADVQLIKGLVGALMAEQLMTQETFNEVASYAAGDRHEILNIAIAPDLVVTMVYPYERNKAVLGLDYNKNEAQREAVMRMRDSGEIVLAGPVNLVQGGTGFIIRYPVFAGEGADRRFWGMVAAVIDADALYAEAGLAAEDLPIEIALSGRDGTGHQGGVFYGDQNIHDHDPIVTDVFLPTGTWELAAIPRGGWPKQPGNLLELRLVLLAAGILIIVPTFMACRLSAVRRATINTLRKRETELERNQAELEQLSTVAQNASDSIVLSGPDQRIFWVNEAFSRMTGYTVDEAVGKRPGELLNGPETDPATIREISEYISRGERLHREILNYTKSGKTIWVDTNLVPVLDEDGEINMVIGIERDVTSQKQNAAELAVAKVAAEQADRTKTEFLANMSHEIRTPMNGIIGMADLLSETELHEDQEQYVQIIRTSSKALLKIINDILDLTRMESGKLSLEPVDFDLESCIENAVDILRPVASEKGLDLTVNYASGLPRTVRADDGRLRQILVNLVGNAVKFTASGRVDVRVLCASTNPYRLTIDVQDTGIGMTSAQLHNIFDRFSQADAATTRSFGGTGLGLTISRLLAKQMDGDITVYSDPGRGSCFSLHIQCQAPLGLPGHIDADEAPDLDLIYGCKVLLAEDNRTNRLLIRKYLSDLSVDLIEASNGQEAVELCAHHRPDLILMDMSMPEMDGLTATRLIRMPQNPHQPPIVALTANAFASDREACLAAGMNGFLSKPINKRELLHGMAGVLDDPDNLRRVASG

SEQ ID NO: 5855 - protein, 142 aa, Streptococcus thermophilus CNRZ1066
MKVGNMQKTFFIIKPDAVKRHLIGQVLDRIERRGFVIERMEMLMLDEERLKEHYAQLADKPFFPSISEFMMSGPAVIGIMSGPGVIKSWRDMMGATNPGDAAPGTIRGDFATAPDGDMIPNIVHGSDSEESAAREIKIWFGE

SEQ ID NO: 5856 - protein, 187 aa, Arabidopsis thaliana
  misc_feature (39)..(39): Xaa can be any naturally occurring amino acid
  misc_feature (64)..(64): Xaa can be any naturally occurring amino acid
  misc_feature (116)..(116): Xaa can be any naturally occurring amino acid
  misc_feature (123)..(123): Xaa can be any naturally occurring amino acid
  misc_feature (136)..(136): Xaa can be any naturally occurring amino acid
  unsure (1)..(187): unsure at all Xaa locations
LPFNRSVITAFYYNTFNENFNKSQKTIRCELYLRASELXKEGKKIILTNVMNPNTLRHNPLTFXRQLVALCQTPILLDHPNVVMLFTDDAIARAKHYLSLTSSGLCAYSDSRCLPXLENRLLXFIQRHDGYPSHPXTIFLTDGASKSVMQILNCVIRGNGYGILVPRPQYPLYSATISLLADTLVTY

SEQ ID NO: 5857 - protein, 491 aa, Oryza sativa
MAGGDAEEEEEEEEETYTTDDALTRAGFGRFQALVLAYACVGWVAEAMEVMLLSFVGPSVKAEWGVSGAAEGLVSSVVFAGMLIGACLGGLISDRYGRRIGFLSTAVVTGIFGLLSAFSPNYASLLVLRFVVGLGLGAGHVLSTWFIEFVPAAKRGTWMVVFHCSWTVGTILEALLAWAVMPVLGWRWLLALSSAPCFILFIFFPVTPESPRYLCSVGRTMDARVILEKIARMNNSSLPPGILTYASTRRIDKVLDDSETALLITEDGGSGIDEHTSSKPGGITALRESWSYDLIRSTFLLWFVYLANYFAYYGVILLTSELSNGQRRCASVGINFMQPKDANLYRDVLVTSLAEFPGLVLAALLVDRIGRKVSLGIMLLLSCAFLAPLAVHLGQGSVTTLLFCARTCIMGGFAVLYVYTPEIYPASSRNTGVGITSSFGRIGSIVSPVVTVSLSENCRQKEAVFFMDLMLFLAAVACALIPLETKGRQIQ

SEQ ID NO: 5858 - protein, 455 aa, Oryza sativa
MLAVSPAMCPDIEDRAAVAGDAGMEVVGMSSDDMDQFDFSVDDIDFGDFFLRLEDGDVLPDLEVDPAEIFTDFEAIATSGGEGVQDQEVPTVELLAPADDVGVLDPCGDVVVGEENAAFAGAGEEKGGCNQDDDAGEANVDDGAAAVEAKSSSPSSTTSSSQEAESRHKSSSKSSHGKKKAKVDWTPELHRRFVQAVEQLGIDKAVPSRILEIMGIDSLTRHNIASHLQKYRSHRKHMIAREAEAASWTQRRQIYAAGGGAVAKRPESNAWTVPTIGFPPPPPPPPSPAPIQHFARPLHVWGHPTMDPSRVPVWPPRHLVPRGPAPPWVPPPPPSDPAFWHHPYMRGPAHVPTQGTPCMAMPMPAARFPAPPVPGVVPCPMYRPLTPPALASKNQQDAQLQLQVQPSSESIDAAIGDVLSKPWLPLPLGLKPPSVDSVMGELQRQGVANVPPACG

SEQ ID NO: 5859 - protein, 356 aa, Oryza sativa (japonica cultivar-group)
MAEVCCDSAVVVGAEAEARARARAGRRRRAGVEGAGRWNATATAAGVAAEEAATRKRRASGGEAGLVVVAKRHGAASVAGRRREMEDAVSLREAFAAPANGEVAAARCDFYGVFDGHGCSHVADACRERMHELVAEEMGAGSPAAAAREPASWTETMERSFARMDAEVIAGCRAESGSCRCEGQKCDHVGSTAVVAVVEESRVVVANCGDSRAVLCRGGAPVQLSSDHKPDRPDELERIEAAGGRVIFWEGARVLGVLAMSRSIGDAYLKPYVTAVPEVTVTGRSDFDECLILASDGLWDVVSNEAACEVAQSCLRRGRQRWCAEAAAVLTKLALARRSSDNISVVVVDLRRGNAL

SEQ ID NO: 5860 - protein, 458 aa, Listeria innocua Clip11262
MAQTSTIQNDTKAAEEYAARVFETIKQRNPGETEFHQAVEEFLNSVIPALAKEPKYEAHGILEQLTEPERLISFRVPWVDDAGTVQVNRGYRVQFNSAIGPYKGGLRFHPSVTGSIVKFLGFEQIFKNSLTGLPIGGGKGGSDFNPKGKSDAEVMRFCQSFMTELQKHIGPDTDVPAGDIGVGGREIGYLFGQYKRLRGAYDAGTLTGKGLSYGGSLARTEATGYGLVYFTVEMLEAAGESIRGKKIVVSGSGNVAIYAIEKAHELGAKVVACSDSAGFVYDKEGIKVETVKQLKEVERKRISEYVTLHPSAEYYAGGDVWSVPCDIALPCATQNEINADQARALVKNGVIAVAEGANMPSTLEAVDIYHENKVLFGPAKAANAGGVAVSALEMAQNSTRMSWTFQTVDEHLQNIMKDIYKNSSNAASEYGAPGNLVVGSNIAGFLKVADTMIAHGII

SEQ ID NO: 5861 - protein, 208 aa, Lycopersicon esculentum
ASGSKDFDFFYFVQQWPGSYCDTKQSCCYPTTGKPAADFGIHGLWPNNNDGTYPSNCDPNSPYDQSQISDLISSMQQNWPTLACPSGSGSTFWSHEWEKHGTCAESVLTNQHAYFKKALDLKNQIDLLSILQGADIHPDGESYDLVNIRNAIKSAIGYTPWIQCNVDQSGNSQLYQVYICVDGSGSSLIECPIFPGGKCGTSIEFPTF

SEQ ID NO: 5862 - protein, 490 aa, Neisseria meningitidis MC58
MNQTSRDLTRISHNTKIVATLGPGSNNVELLEDMIRVGGLNVVRFNFSHGTPEFHQENALIVREAAKRAGQEIAIIADLQGPKIRVGKIAGGGIELNKGETLVLDAALEGEGTREAVGLDYRDLPDDVAAGDVLWLDDGLLTLTVESVEGSRIITRVENSHVLKSNKGINKRGGGLSAGALTEKDFRDLKTAIAIGCDYLAISFVKSAEDLHIARAKVEEEMKGSTAVRPGLVSKIERVEAIENLDEIILAGDGIMVARGDLAVEVGHAAVPALQKRMIRRARELRRFSITATQMMESMITNPVPTRAEVSDVANAVLDGTDAVMCSAETAVGAYPFETVSQMAIICAAAEKEQDSLNGVAEQVEYPEAVSTNLAVAGGAVSVARAVHAKAIVALTESGSTAFEISRHNITLPIFALTPSVSAQRRMAMYRGVRPLILATSTDHDTALNEVETMLVEHNILHSGDQYIITSGSQMRESGSTNTLEVLRVK

SEQ ID NO: 5863 - protein, 628 aa, Mannheimia succiniciproducens MBEL55E
MNQRRTSYMDHNPQSQLKLLIAQGKEQGYLTYAEVNDHLPEELVDTDQIEDIIQMINDMGIQVLESAPDADDLMLSETIADEDAVEEATQVLSSVEAELGRTTDPVRMYMREMGSVELLTREGEIDIAKRIEDGINEVQSAVAEYPEALDYLLKQYEQVEEGSVRLADLITGFVDLNAEEASEEISDLEEVLDDEDGDIPADALNDEEEDEESDEGDTSTDDSDNSIDPEVAREKFSALKDQCVKTLEFIEKYGRTDNKVKEQIQVLSDIFTQFRLVPRQFDTLVLSMRSMMKQVRAEERQIQRLAVDYAKVPKDDFQKAFIGNETSEQWLESLLQSKKTYVEKLQQRAPEISKSIVRLQQVETDTKLTVQQIRDIGERIAQGELKARRAKKEMVEANLRLVISIAKKYTNRGLQFLDLIQEGNIGLMKAVDKFEYRRGYKFSTYATWWIRQAITRSIADQARTIRIPVHMIETINKLNRISRQMLQEMGREASPEELAERMGMPEDKIRKVLKIAKEPISMETPIGDDDDSHLGDFIEDSTLELPLDSATAQSLKVATHEVLEGLTPREAKVLRMRFGIDMNTDHTLEEVGKQFDVTRERIRQIEAKALRKLRHPSRSETLRSFLDE

SEQ ID NO: 5864 - protein, 231 aa, Escherichia coli
MFRKLAAECFGTFWLVFGGCGSAVLAAGFPELGIGFAGVALAFGLTVLTMAFAVGHISGGHFNPAVTIGLWAGGRFPAKEVVGYVIAQVVGGIVAAALVYLIASGKTGFDAAASGFASNGYGEHSPGGYSMLSALVVELVLSAGFLLVIHGATDKFAPAGFAPIAIGLALTLIHLISIPVTNTSVNPARSTAVAIFQGGWALEQLWFFWVVPIVGGIIGGLIYRTLLEKRD

SEQ ID NO: 5865 - protein, 510 aa, Eustoma grandiflorum
MAVGNGVLLHIAASLMLFFHVQKLVQYLWMNSRRHRLPPGPIGWPVLGALRLLGTMPHVALANMAKKYGPVMYLKVGSCGLAVASTPEAAKAFLKTLDMNFSNRPPNAGATHLAYNAQDMVFADYGPRWKLLRKLSNIHILGGKALQGWEEVRKKELGYMLYAMAESGRHGQPVVVSEMLTYAMANMLGQVMLSKRVFGSQGSESNEFKDMVVELMTVAGYFNIGDFIPSIAWMDLQGIQGGMKRLHKKFDALLTRLLEEHTASAHERKGSPDFLDFVVANGDNSEGERLQTVNIKALLLNMFTAGTDTSSSVIEWALAELLKNPIILRRAQEEMDGVIGRDRRFLEADISKLPYLQAICKEAFRKHPSTPLNLPRIASQACEVNGHYIPKGTRLSVNIWAIGRDPSVWENPNEFNPDRFLERKNAKIDPRGNDFELIPFGAGRRICAGTRLGILLVEYILGTLVHSFVWELPSSVIELNMDESFGLALQKAVPLAAMVTPRLPLHIYSP

SEQ ID NO: 5866 - protein, 77 aa, Avicennia marina
MSCCGGNCGCGSGCMCGGGCGGCKMYPNLSYSEAATEPLVLGVAPQKTNYGGSVEEVTAENGCKCGDNCTCNPCNCK

SEQ ID NO: 5867 - protein, 397 aa, Nocardioides sp. JS614
MYGDVKQQLAQTLAEIESAGLYKREREITTPQAAHIATTAGEALNFCANNYLGFSDHPDVIAASKAALDTWGFGMSSVRFICGTQTQHTELERRLSEFLHTEATILYSSCFDANGGVFEVLCGEEDAIVSDELNHASIIDGIRLSKAARYRYKNADLADLRDQLVAAREAGARRVLIATDGVFSMDGSFAPLSEICDLADEFSALVLVDDSHAVGFVGPGGRGTPELFGVLDRVDIITGTLGKALGGASGGYVASHQEIVDLLRQRSRPYLFSNSVAPGVVAGSLAALDLVTSSSEARDTLEENSALFRSLMTEAGFSLLPGTHPITPVMFPGEDGARLATAIADDMLAQGVYVIAFSFPVVPRGKARIRVQLSAAHSEDDVRRCVAAFVAARDAQA

SEQ ID NO: 5868 - protein, 156 aa, Zea mays
MLLLLCRVDVMCGILVGLGCSHWAQAKRARILVWSGRVKHRGPDWWCLYHDDGNFLAQQRLADCSPLSGDQLLFNEDRTDVVVVNGEIYNHKNVRKQFAGTHDYRRCSDCGVIMPLHDNYSENFENMMDRPFVFVLYHIRDRTNGVESDAIVDEPL

SEQ ID NO: 5869 - protein, 405 aa, Triticum aestivum
MAFAAQAARLAASALVAGVVAAVVAMPVPAAGGVCFDRIFSFGDSLTDTGNFLLSVPDDFPDPARSLPYGQTFFGRPSGRYSDGRNLLDFFAEAFGMPFVPPYLGGGDFLNGANFAVGGATALNNSFFRELGVEPTWTPHSLDEQMQWFKRLLPSIASTESEHSVIMSKSLFLVGEVGGNDYNHLMVRGKSLAELRELVPQVVGAISLAITELINLGAKKFVVPGNFPIGCVPLYLAILPSEEKDYYNEETGCIKWLNEFTEYHNRLLQEELEKLRNLHPDVSVIYADYYGATLNIYRAPLQFGFTVPLNSCCGSDAPHNCSLSVLCGNPGSFVCPDPSKYVSWDGLHFTEATYKVIIQGVLGSYAVPPLSEICRDGEYKVSQLHQCTDSNPTNTVTYDAMSSFI

SEQ ID NO: 5870 - protein, 347 aa, Eustoma grandiflorum
MEKSGGAASTVCVTGAAGYIGSWLVMRLLERGYTVRATVRDPGDVKKVKHLFELPKASTNLTVLKADLIEEGSFDEAIQGCHGVFHMATPMEFESKNPENEVIKPTIDGVLSVIRSSVKAKTVKKIVFTSSAGTVDVQKEQKSVYDENDQSDLDFIYSKKMTGWMYFVSKILAEKAAWEAAKANNIGFISIIPTVVVGPFITCTFPPSLITALSLLTGNEAHYSIIKQGQFVHLDDLCEAHIFLYEHPEAEGRYICSSHDTTINDLAKMIRHRWPEYNVPTNLKGIDEDIPLASFSFKKLTGMGFQYKYTLEDMFRGAIETCREKGLLPHSNENHVIMQQTEHGKDT

SEQ ID NO: 5871 - protein, 346 aa, Nocardioides sp. JS614
MRALVKTTAGPGLELIDVPEPACGDRDVKIRVLRAGLCGTDLHLLSWDDWAAATVQAPMTIGHEFFGEVVEVGADVDHVSVGDRVSGEGHIVCGACRNCRAGRRQLCINTVGVGVNRDGAFADYVVIPAANAWVQPADLDPDLGALFDPLGNATHTALQWPVVGEDVVITGAGPIGIMATAIVRHAGARRIAVTDLSPERLELAASAGADLTVDVSQGQDLAWAQRQLGMLEGFDIGLEMSGAPDAVRDMLENLNHGARVAMLGLPRSAYEIDWGKVITHMITLRGIYGREMFETWYLMGSMLATTPALRDAVQSVITWRGPAEDWEEAFEHTRSGTAGKAVLDWS

SEQ ID NO: 5872 - protein, 79 aa, Vigna angularis
MSCCGGNCGCGSSCKCGSGCGGCKMYPDLSYTEQTTTETLVMGVAPVKVQFEGAEMGVAGENDGCKCGSNCTCNPCTCK

SEQ ID NO: 5873 - protein, 344 aa, Sulfolobus tokodaii str. 7
MEAVILHGGQGTRLRPLTHTGPKQLIKVAGKPVSQWVLEQIRDSGIRDVVIVLGDNTPKRVVDYYGDGSKFGVNITYVYQGKARGLADAVYKVKDVVSKKFLVYLGDNLVPYDLRKFMSFKGSASILLAKVDNPNRFGVAVIKENKVVKLVEKPKEPISDLALVGVYAFTDEIFEVIESLRPSWRGELEITDAIQGLIDEGKEVNYEIVQGWWKDTGTPRDILEANSFLLDRYTERRIEGDVDNSTIDGRVIVEKGTVIKNSVIRGPVYIGRDSKIVNSYVGPFTSIGDSSQVVDSEVEYSVILDNVRIKGVSLMDSLIGNNSVVEKGNRWQRLIIGENSSVIL

SEQ ID NO: 5874 - protein, 426 aa, Apophysomyces elegans
VVVIGHVDSGKPTTTGHLIYKCGGIDKRTIEKFEKEAAELGKGSFKYAWVLDKLKAERERGITIDIALWKFETPKYHVTVIDAPGHRDFIKNMITGTSQADCGILIIAAGTGEFEAGISKDGQTREHALLAFTLGVRQLIVAINKMDSTKWSEARYNEIVKEVSAFIKKIGFNPKAVPFVPISGWHGDNMLEESNNMPWFKGWTKETKAGAKTGKTLLEAIDNIEPPVRPSDKPLRLPLQDVYKIGGIGTVPVGRVETGVIKAGMVVTFAPANVTTEVKSVEMHHEQLAEGVPGDNVGFNVKNVSVKDIRRGNVCSDSKNDPAKESASFTAQVIVLNHPGQIGAGYAPVLDCHTAHIACKFAELLEKIDRRSGKSLEASPKFVKSGDSAIVKMVPSKPMCVESYTEYPPLGRFAVRDMRQTVAVGV

SEQ ID NO: 5875 - protein, 271 aa, Pirellula sp. 1
MATKSAHSSVLAVKRILKKGGTMHPYVAEFVGTMFLILFGNGVVANVVLPKTNGNNGGWIVIAAGWGIAVFIGAFCASEFSGAHLNPAVTFAMYWADTEFGLLDSGGYIGAQMLGAMAGAALVYVFYREHFREASDDPDGMLACFSTAPSIRKLPQAFVCEMIGTFALILPIFLMVAPGFSSGPEPVDTDPVLGLGSIGLLPVGLLVFGIGLSLGGTTGYAINPARDLGPRLIHALLPIKGKQGSDWSYAWVPVLGPLTGAALAVVVNSFL

SEQ ID NO: 5876 - protein, 275 aa, Xylella fastidiosa Temecula1
MNRKMFGELISEAIAMFIIIALGESAAAMYILYDPSPYQNAYWGLCICWGLAVTIAIYVTASVSGTHANPAVTLALALYRGFPWKKVLPYWAAQVIGAFIGAMIVYQLYSPVIDYYNHIHQLTRDAGGAAGVFFTSTGMAITPIHALGDEIILTAFLVFGIFAITERFNEAAPTANSGALVIGLLVATIGACMGYLEGWAINPARDLGPRLFAFLAGWGESAFPGKDHYWWIPIIGPLIGGVMGATAFQCLIYPFLPARVQAKQQAAILLHRKHP

SEQ ID NO: 5877 - protein, 161 aa, Glycine max
  misc_feature (14)..(14): Xaa can be any naturally occurring amino acid
  misc_feature (33)..(33): Xaa can be any naturally occurring amino acid
  misc_feature (127)..(127): Xaa can be any naturally occurring amino acid
  misc_feature (140)..(140): Xaa can be any naturally occurring amino acid
  unsure (1)..(161): unsure at all Xaa locations
MADHYTSVILVDGXQREGILNEACSLARHCGIXKLIALYEDIHISIDGDTEIAFTENADQRIEALGWYAMRVKNGHTGYDETRAAIKEALAARDTPTLMKATTTIGSWSPNKANSYRVHGSALRTSXADATWKNLAWPYXPLHVPQDVEKHWRRHTPDGAK

SEQ ID NO: 5878 - protein, 411 aa, Ustilago maydis 521
MSSFSRNLLRTAGKAKSLPAYSRNAIPSSSRFVQLTAEASRPQQELPESKTEKFTVDLNADSFKGYKLEVPKLEWETSKDELVHLYSEMVKMRRMEMAADQLYKQKLIRGFCHLAIGQEAVAVGMEAGMKPSDKLITAYRCHPFTVQKGGSIKSVIAELFGRQDGISKGKGGSMHMFTPTFFGGNGIVGAQVPVGAGIAFAQQYMNTNDATFAMYGDGASNQGQVFEAYNMAKLWNLPCVFVCENNKYGMGTSAERSSMNTQYYTRGDVIPGIQVNAMDVLAVAAATKHASGYTLGGNGPLLMELVTYRYGGHSLSDPGTTYRTRDEIQTMRSSSDPIQGLKARMLDWGVVEEAELKRIDKAAKEEVDQAVEEAKQSPQPSEHSLWTDIYYPGTEPDWMRGRDRTEIHRYR

SEQ ID NO: 5879 - protein, 760 aa, Shewanella sp. MR-7
MQLNSLGFPRIGRRRELKFALEKYWRGESTQAELHEVAKELRRTHWQWQVAAGIEQVPVGDFAFYDQVLTLSATLNAIPDRHRGEGAIDLDTLFRVARGRAPTGTDAPASEMTKYFNTNYHYLVPELKQDQVFSIAYEQFFDEVAEAQALGYQAKPVLLGPVSYLYLAKTVGQDFDKLSLLPNLLKAYADILARFAGQGVTWVQLEEPILALELAADWQAAISEAYQALQTAQVKILLTSYYGSISHHQALVSALPVAGLHLDLVTAPEQLALFANALRPDQILSAGVVNGRNVWAAEVDLIVERIGSVARDLCSQDGARLWIGTSCSLLHSPVDLEVETTLTPALRQQLAFAKQKLLELANVRQLLQAPESVAAKEIVNTCLARREAKAQAADAKVIARVAALTQADYERVSEFTERQAVQQRKYRLPLLPTTTIGSFPQTPAIRGLRSRWRKGELSDAQYTEQLQQVTRDTIDRQLKLGIDVLVHGEAERNDMVEYFGEQLEGVGFTKNGWVQSYGSRCVKPPLIYGDVSRPKAMTVEWAEFAQSLTDKPVKGMLTGPVTILHWSFAREDISRDTIATQLALAIRDEVVDLQNAGIGIIQIDEPAFREGLPLKQSEWQAYLDWAVNAFKLSAAGVVDETQIHTHMCYSEFNDTIAAIAAMDADVITIETSRSRMELLNAFEDFEYPNEIGPGVYDIHSPNTPSVEAMVHLIEKAAQKVPVRQLWVNPDCGLKTRTWDEVEPALKNMVDATRELRRRLG

SEQ ID NO: 5880 - protein, 417 aa, Benjaminiella poitrasii
GKSTTTGHLINKCGGIDKRTIEKFEKEAAELGKGSFKYAWVLDKLKAERERGITIDIALWKFETPKYHVTVIDAPGHRDFIKNMITGTSQADCAILIIAGGTGEFEAGISKDGQTREHALLAFTLGVRQLIVAINKMDTTKWSEARYNEIVKEVSNFIKKIGFNPKSVPFVPISGWHGDNMLDESTNMPWFKGWTKETKAGSKTGKTLLEAIDAIDPPSRPVDKPLRLPLQDVYKIGGIGTVPVGRVETGVIKAGMVVSFAPAAVTTEVKSVEMHHETLTEGLPGDNVGFNVKNVSVKDIRRGNVCSDSKNDPAKESASFTAQVIILNHPGQISAGYAPVLDCHTAHIACKFSELIEKIDRRSGKKLEDAPKFVKSGDSAIVKMVPSKPMCVEAYTEYPPLGRFAVRDMRQTVAVGV

SEQ ID NO: 5881 - protein, 401 aa, Blakeslea trispora
GKSTTTGHLIYKCGGIDKRTIEKFEKEAAELGKGSFKYAWVLDKLKAERERGITIDIALWKFETPKYHVTVIDAPGHRDFIKNMITGTSQADCAILIIAGGTGEFEAGISKDGQTREHALLAFTLGVRQLIVAINKMDTTKWSEARYTEIVKEVSSFIKKIGFNPKAVPFVPISGWHGDNMLEESTNMPWFKGWKKETKAGEKSGKTLLEAIDAIEPPVRPSDKPLRLPLQDVYKIGGIGTVPVGRVETGVIKAGMVVTFAPAAVTTEVKSVEMHHETLTEGLPGDNVGFNVKNVSVKDIRRGNVCSDSKNDPAKEAGSFTAQVIILNHPGQIGAGYAPVLDCHTAHIACKFSELIEKIDRRSGKKLEEQPKFVKSGDSAIVKMIPSKPMCVEAYTDYPPL

SEQ ID NO: 5882 - protein, 145 aa, Glycine max
  misc_feature (72)..(72): Xaa can be any naturally occurring amino acid
  unsure (1)..(145): unsure at all Xaa locations
ARGERAAAERKWYRNVLMYGFHFAVSFIGGIWNIKDTQCGFKLFTRRTAQFLFFNQRLRRWCFDVELLQLCXRHGKIPMVEVGVRWREIPGSKLNLLESSFLMARDLVVIRLAYFLHIWTADQPPSNVTELKQTAASLAARAKAA

SEQ ID NO: 5883 - protein, 229 aa, Solanum tuberosum
MAAILARKSLSALRSRQLVLAGHTIEGTNGYNRTLLGTRSFATKHSFSTDKDDEEREQLAKELSKDWNSVFERSINTLFLTEMVRGLMLTLKYFFEKKVTINYPFEKGPLSPRFRGEHALRRYATGEERCIACKLCEAICPAQAITIEAEEREDGSRRTTRYDIDMTKCIYCGFCQEACPVDAIVEGPNFEFATETHEELLYDKEKLLENGDRWETEIAENLRSESLYR

SEQ ID NO: 5884 - protein, 352 aa, Zea mays
MALEAVVFPKEHPGCTAVKARPASLGCGFHTEELEVEDKGGVVLQGEAADALPPPGGAATTWDWDAVLCPCSTAPAAGAVEECWDVQQQQHQLLSVSPPPSSAVAASSSGRRKAAASEAARRRRRRPMAVRNTDEMESQRRNHIAVERNRRRQMNEYLSVLRSAMPPSYTQRGDQASIVAGAINFVKELEQLLQSLEAQKRCTEPPAPAPFAGFFIFPQYSTTAATGGAVGSSSDSAGSGGDQSGGGGGCAGARRGVADIEVSLAESHANVKVLAARRPRQLLRMVVALQCLGLTVLHLNVTTTADHLALYSLSLKMEDECRLSPSVDDIAAAVNEILAEISDECARGGPGH

SEQ ID NO: 5885 - protein, 418 aa, Xanthomonas oryzae pv. oryzae KACC10331
MSPDLHHLHTFAELDPPQRLLMGPGPVNAHPRVLRAMAADLLGQFDPEMTTYMNEVMALYRPLFGTDNRWTFLVDGTARAGIEAALVSLVQPGDRALVLNFGRFGLLLIELLGRLGADVHTVDAPWGEVVPLAAIAKAIERVAPKLVATVHGDTSTTMAQPLDGLGALCRAAGALSYVDATATIGGMPIASDRWDLDVLTGGLQKCMGGPSGSAPITISERAAEAIFARRHVERGIVRADILNGSGPRIASNYFDLAMIMDYWSDKRLNHHTEATTMLYGARECARVALQEGLDARFARHAAAGRAVSAGIRALGLDVFGDDAHRMTNVTGVVIPPGIDGEAVRRRMREDFEIEIGTAFGPLQGKIWRIGAMGYNAMKHKVLLTLAALEAVLRAEGCACTQGLAVAAALAAWHAEPQA

SEQ ID NO: 5886 - protein, 303 aa, Shewanella sp. MR-7
MSHILVIGSANADHVMNFEYLPAPGQTLMSRSYRLEHGGKGANQAVACARLCQADSRVDFICHLGQDSVGNEMRENWLKDGIEADGITQVANLSTGTAMIFVADNGENSIGIAAGANANLTPPELEKHYALFVNAQYMLIQLETPMETVNHALQTAKRLGITTVLNPAPAVSQELDYLKWVDIITPNETEAEALTGIEVNNEDDAKLAAQLLHQQGVTTVVITLGSKGAFISSAGFTGLIPALEVQAIDTVAAGDTFNGALVVGLSEGMSIAAAVGFANAASAITVTRAGAQRAIPYRHELPR

SEQ ID NO: 5887 - protein, 229 aa, Solanum tuberosum
MAAILARKSLSALRSRQLVLAGQAWQGTNTPNGTLLGTRSFATKHSFSTDKDDEEREQLAKELSKDWNSVFERSINTLFLTEMVRGLMLTLKYFFEKKVTINYPFEKGPLSPRFRGEHALHRYATGEERCIACKLCEAICPAQAITIEAEEREDGSRRTTRYDIDMTKCIYCGFCQEACPVDAIVEGPNFEFATETHEELLYDKEKLLENGDRWEIEIAENLRSESLYR

SEQ ID NO: 5888 - protein, 330 aa, Triticum aestivum
MSSGTGKVVCVTGASGYIASWLVKFLLQRGYTVRATVRDTADPKKTLHLQALDGAKDRLHLFKASLLEEGTFDDAVAGCDCVFHTASPFYHNVKDPKAELLDPAVNGTLNVLRSCKKASIKRVIVTSSMAAVAYNGKPRTPDVVVDETWFSSAEVCEKNKQWYVLSKTLAEEAAWKYANDNGLEIITINPTMVIGPLLQPTLNTSTEAILKFINGSSSTYANFCFGWINVKDVALAHILAYEVPSANGRYCMVERVIHHSDLVKIIHEMYPEFPVPDKCADDAPFAPIYQVSKDRIRSLGMELTPLETSLKETIESLREKGFVTSESSHL

SEQ ID NO: 5889 - protein, 221 aa, Zea mays
MAAVGAHPVLYHHPAPAGDASSMSSYFSHGGSSTTSSSASSFTAALAPTTTALAEHFDISEFLFDDAAGAGVAGAPGVFADGAARPVVLPVPDAAGGGAIIGAAAGGAAAASEVPERPRTTRIAFRTRSEIEILDDGYKWRKYGKKSVKNSPNPRNYYRCSTEGCNVKKRVERDKDDPSYVVTTYEGMHNHVSPSTVYYASQDAASGRFFVAGTQPPGSLN

SEQ ID NO: 5890 - protein, 465 aa, Sinorhizobium meliloti
MIFGHRALAALVLAVAISTPAMAQDARTVPQSRSEMQLSFAPLVKQTANAVVNVYAERVVERRSIFAGDPFFEEFFGQRMPNRTEKQSSLGSGVIVGRNGLVVTNNHVIEGADDIKVALADGREFPCKIILKDDRLDLAVLKIQSDGPFDIVPIGDSDAVEVGDLVLAMGNPFGVGQTVTSGIVSALARNQISNGDFGFFIQTDAAINPGNSGGGLINMKGELIGINTAIFSRGGGSNGVGFAIPANLVKVFVASAEGGNGSFIRPFVGATFEPVTSDVAEALGLERARGALVTAVVAGGPAESAGMRPGQVVTAVNGIPVEHPDALGYRLTTVGIGHEARVTVSENGGSREITLKLERAPETQPRDERLIEGRNPFAGAVVANLSPRLAEELRMPTSLQGVVITEINRGSPAARIGLEPKDIVRSVNGTAIDSSKTLESVVAEDASFWRVEIERNGQIIRQFFR

SEQ ID NO: 5891 - protein, 457 aa, Agaricus bisporus
MVLPHEPEFEQALHELETSLQPFLTTNPQYKKALEIIQVPERVLQFRVTWEDDQGKPQVNRGFRVQYNSALGPYKGGLRLHPTVNLSILKFLGFEQTFKNALTGLSMGGGKGGSDFDPKGKSDNEIRRFCVAFMSELFRHIGQDTDVPAGDIGTGAREIGFLFGAYRRLKNEFTGMLTGKGINWGGSFIRPEATGYGLIYYVEHMIAHACPEYSLDRPSTLVAISGSGNVSQFTALKVIELGATVLSLSDSKGSLISEKGYTKEAIEKIAELKLKGGALEAIVDDLGAGYTYHAGKRPWTLLPQVHIALPGATQNEVSQEEAEALVKAGTRIVAEGSNMGCTEEAIAIFENSRRASRAGVWYAPGKASNCGGVAVSGLEMAQNSQRLAWSTQEVDAKLKSIMAECYQICYTAGSRWSGEKVAEGVAEGEALPSLLSGANLAGFIKVADAMKEQGDWW

SEQ ID NO: 5892 - protein, 447 aa, Ectocarpus variabilis
MREIVHVQAGQCGNQIGSKFWEVISDEHGIDPTGSYHGDSDLQLERINCYFNEATGGRYVPRAILMDLEPGTMDSVRAGPFGQLFRPDNFVFGQTGAGNNWAKGHYTEGAELIDSVLDVVRKEAESCDALQGFQLTHSMGGGTGAGMGTLLISKVREEYPDRVMSTYSVIPSPKVSDTVVEPYNATLSVHQLVENADQCFTLDNEALYDICFRTLKLTTPTYGDLNHLVSAAICGTTCSLRFPGQLNCDLRKLAVNMVPFPRLHFFMIGFAPLTSRGSQQYRALTVPELTQQCFDSKNMMCAADPRHGRYLTCAVMFRGRMSTKEVDEQMLNVVNKNSSYFVEWIPNNVKASICDIPPKGLKMSTTFVGNTTAIQEVWKRVAEQFTSMFRRKAFLHWYTGEGMDEMEFTEAESNMNDLVSEYQQYQDATAEEEGEFDEDEELDDAMG

SEQ ID NO: 5893 - protein, 77 aa, Vicia faba
MSCCGGNCGCGSSCKCGSGCGGCKMYADLSYTESTTSETLIMGVGSEKAQYESAEMGAENDGCKCGANCTCNPCTCK

SEQ ID NO: 5894 - protein, 338 aa, Neisseria gonorrhoeae
MTVLITGGTGFIGSHTAVSLVQSGYDAVILDNLCNSSAAVLPRLRQITGRNIPFYQGDIRDCQILRQIFSEHEIESVIHFAGLKAVGESVAEPTKYYGNNVYGSLVLAEEMARAGVLKIVFSSSATVYGDAEKVPYTEDMRPGDTANPYGASKAMVERMLTDIQKADPRWSVILLRYFNPIGAHESGLIGEQPNGVPNNLLPYICQVASGRLPQLSVFGGDYPTPDGTGMRDYIHVMDLAEGHIAAMKAKGGVAGVHLFNLGSGRAYSVLEIIRAFEAASGLHIPYRIQPRRAGDLACSYADPSHTKQQTGWETKRGLQQMMEDSWRWVSRNPGRYGD

SEQ ID NO: 5895 - protein, 465 aa, Triticum aestivum
GQAEEVADVIEELEQTLATPTPLLRGIADAMVEEMERGLRADPHAPLKMLVSYVDNLPTGDEHGLFYALDLGGTNFRVLRVQLGGKEKRAVQQYEEVPIPPHLMVGTSTELFDFIAAELERFVETEGDDFHLPEGRHRELGFTFSFPVHQTSISSGTLVKWTKGFCINGTVGEDVVAELSSAMERQGLDMKVTALVNDTVGTLAGGIYADNDVVAAVILGTGTNAAYVEHANTIPKWKGPLPRSGNMVINMEWGNFKSDKLPRSDYDIALDFESLNPGEQMYEKMISGMYLGEVVRRILLRLAHDASLFGDVVPSKLEKLFVLRTPDMSAMHHDTSHDLKHLGAKLKDILGVPDTSLEARYITLHVCDLVAERGARLAAAGIYGILKKLGKDKLLSDFSQQRTVVAIDGGLYEHYKKFSACLEATLTDLLGEEVASSVVVKLANDGSGIGAALLAASHSQYAEVA

SEQ ID NO: 5896 - protein, 344 aa, Nocardioides sp. JS614
MTTQAAAQPATPQQAGGGTGLDPAVRLDLYETMVLSRTYEEAILREYHADKGPGFDIGKGLIPGEMHLSAGQEPVAAGVCAHLTTDDAVTATHRPHHFAVAHGVDLRRMTAEIFGREDGLGRGRGGHMHLFDPDTHFSCSGIIAEGYPPALGQAFAFHRQGTDRIAVAVTGEGAANQGAFHESLNLAARWSLPVVFVVEDNDWGISVPRTASTSVASNADRAAAYGIPGERIEGNDVEGVYDAARRAVARARAGEGPSLIEVHTLRLWGHFEGDAQGYRLDLEDAPSHDPIPRYETRLREAGVLDDETVTRIRSAASERTEDAIAFAKNSPVPDPASATSYVFA

SEQ ID NO: 5897 - protein, 132 aa, Schizosaccharomyces pombe
YLIALTVSLLGVQLTWSVELGYGTPYLFSLGLRKEWTSIIWIAGPLTGILIQPIAGILSDRVNSRIGRRRPFMLCASLLGTFSLFLMGWAPDICLFIFSNEVLMKRVTIVLATISIYLLDVAVNVVMASTRS

SEQ ID NO: 5898 - protein, 77 aa, Pisum sativum
MSCCGGNCGCGTSCKCGSGCGGCKMYADLSYTEATSSETLIMGVGSEKTQFESAEMGAENDGCKCGANCTCNPCTCK

SEQ ID NO: 5899 - protein, 758 aa, Xylella fastidiosa Temecula1
MTIVTNLGFPRIGARRELKRALESHWRGETDATQLQHTARELRARHWRLQRDAGVDLPPSNDFSLYDHVLDTAFLFDAIPQRYRGLVDADPLAGYFAMARGRQADNIDLHALEMTKWFDTNYHYLVPELHRDQHFALRGNKPIAEFEEALALGITTRPVLLGPVSFLLLSKTVDGSNRLDLLERLLPVYTQLLRQLQESGAEWVQIDEPTLVLDLDAQTQQAFRKAYAILNQGPRPKLLLTSYFGPLGDNLELALQLPADGLHIDLVRGTEQLDAVLNTLPAGRVLSAGLVNGRNIWRTDLDNALTMARYAQGHVGADRLWLAPSCSLLHVPVDLEQEKNLDADVRNWLAFAKQKLSELRVLADALDNKPEAETALTQTRQALEARRQSPKVHRPDVAQRLAALTPDTTRRNTAYPQRSQAQQHTLNLPAYPTTTIGSFPQTLEVREARAQFKSGKLSESDYEAFLKAETERCVRTQEEIGLDVLVHGEFERNDMVEYFGEQLDGFIFTKLGWVQSYGSRCVKPPIIYGDVVRPAPMTVTWSAYAQSLTDKPMKGMLTGPVTMLQWSFVRDDQERAQTCRQIALALRDEVQDLEKAGIKVIQIDEPAIREGLPLRRGEWADYLNWAVESFRIASSNVHDTTQIHTHMCYSEFNDIIEAVAALDADVISIETSRSRMELLDAFVKFRYPNAIGPGVYDIHSPRVPQEEEMVLLLKKARAVLPPEQLWVNPDCGLKTRGWKETRAALQTMVHAAQRLRAE

SEQ ID NO: 5900 - protein, 73 aa, Lablab purpureus
MSGCGCGSSCNCGSNCSCNKYSFDLSYAEKEESLVLGVGPVKAQFEGGEMGVAAEDSGCKCGSNCTCDPCNCK

SEQ ID NO: 5901 - protein, 454 aa, Burkholderia vietnamiensis G4
MESPKQYEYLFLGGGKGGKSLAMDLARSGKRVAIIERGMIGGSCINVACIPSKTLIQNARNMHAWRSADATAHPVADMARVHANVRAVVDGMVDVNRRAFEQSGLDLVIGSGRFVAPRRVAVRAADGSEQLFEGENVYINTGTVATIPDVPGLRDAAPLTHVEALGLDVLPARLIVIGGGYIGLEMAQAFRRLGSEVVVIHDAPRVAVREDEDVSIEIQNAFEADGIALRLSARIASVEGRSGTGVTVALADGTAVEGSHLLVATGRRPVTDDLGLDLAGVERDARGFIKVDDTLATTAQRTWAIGEVAGTPMFTHASFDDYRVLKAGIDGRGGSTASRVIPYALFTDPELARIGLNETDAKARNTPVIVAKLPMAAVPRARTNGTTRGFMKALVAPDSGQILGFTMVGSGAGEVMSAVQMAMIGKLPYTSVRDAILAHPLLAEGLNLLFATIK

SEQ ID NO: 5902 - protein, 412 aa, Chaetocladium brefeldii
VVVIGHVDSGKSTTTGHLIYKCGGIDKRTIEKFEKEAAELGKSSFKYAWVLDKLKAERERGITIDIALWKFETPKYMVTVIDAPGHRDFIKNMITGTSQADCAILIIAGGTGEFEAGISKDGQTREHALLAFTLGVRQLIVAINKMDTTKYSEARYTEIVKEVSNFIKKIGFNPKSVPFVPISGWHGDNMIDESKNMPWFKGWNKETKAGVKTGKTLLEAIDAIEPPTRPTDKPLRLPLQDVYKIGGIGTVPVGRVETGVIKAGMVVNFAPAAVTTEVKSVEMHHETLAEGLPGDNVGFNVKNVSVKDIRRGNVCSDSKNDPAQEAGSFQAQVIILNHPGQISSGYSPVLDCHTAHIACKFAEIIEKIDRRSGKKMEDAPKFIKSGDSAIVKMVPSKPMSVEAYTDYPPLGR

SEQ ID NO: 5903 - protein, 259 aa, Oryza sativa
MRIQCDACEAAAATVVCCADEAALCARCDVEIHAANKLASKHQRLPLDAALPAALPRCDVCQEKAAFIFCVEDRALFCRDCDEPIHVPGTLSGNHQRYLTTGIRVGFSSVCSANADHLPPPAPKGNSKPPASGIAAAAAPKPAVSAAAQEVPSSPFLPPSGWAVEDLLQLSDYEIALLDRKGSPIGFKDLEWLDDIDLFHVQSPAKGGSTAAEVPELFASPQPASNMGLYKASGARQSKKPRVEIPDDDEDFFIVPDLG

SEQ ID NO: 5904 - protein, 374 aa, Chaetocladium jonesii
VVVIGHVDSGKSTTTGHLIYKCGGIDKRTIEKFEKEAAELGKGSFKYAWVLDKLKAERERGITIDIALWKFETPKFNVTVIDAPGHRDFIKNMITGTSQADCAILIIAAGTGEFEAGISKDGQTREHALLAFTLGVRQLIVAINKMDTTKWSEARYNEIVKEVSGFIKKIGFNPKSVPFVPISGWHGDNMLEESANMGWFKQWTKETKAGNKAGKTLLEAIDAIDPPSRPSDKPLRLPLQDVYKIGGIGTVPVGRVETGVIKAGMVVNFAPAAVTTEVKSVEMHHETLVEGLPGDNVGFNIKNVSVKDIRRGNVCSDSKNDPAKEAGSFVAQVIILNHPGQISNGYSPVLDCHTAHIACKFAELVEKIDRRSGK

SEQ ID NO: 5905 - protein, 154 aa, Haloarcula sinaiiensis
MSEHERTFVMVKPDGVQRGLIGDIVSRFEDCGLKMVGGKFMQIDQELAEEHYGEHEDKPFFDGLVDFITSGPVFAMVWEGQDATRQVRTMMGETDPAESAPGTIRGDYGLDLGRNVIHGSDHEDEGANEREIELFFDEDELVDWDQIDSSWLYE

SEQ ID NO: 5906 - protein, 426 aa, Chlamydoabsidia padenii
VVVIGHVDSGKSTTTGHLIYKCGGIDKRTIEKFEKEAAELGKGSFKYAWVLDKLKAERERGITIDIALWKFETPKYHVTVIDAPGHRDFIKNMITGTSQAGCGILIIAAGTGEFEAGISKDGQTREHASLAFTLGVRQLIVAINKMDSTKWSEQRFNEIIKEVSGFIKKIGFNPKSVPFVPISGWHGDNMLEESTNMPWYKGWNKETKAGAKSGKTLLDAIDAIDPPQRPSDKPLRLPLQDVYKIGGIGTVPVGRVETGVIKAGMVVTFAPANVTTEVKSVEMHHEQLVEGLPGDNVGFNVKNVSVKDIRRGNVCSDSKNDPAKEAGSFTAQVIVLNHPGQIGAGYAPVLDCHTAHIACKFAELLEKIDRRSGKKLEDAPKFVKSGDSAIVKMIPSKPMCVEAYTDYPPLGRFAVRDMRQTVAVGV

SEQ ID NO: 5907 - protein, 154 aa, Haloarcula quadrata
MSEHERTFVMVKPDGVQRGLIGDIVSRFEDRGLKMVGGKFMQIDQELAEEHYGEHEDKPFFDGLVDFITSGPVFAMVWEGQDATRQVRTMMGETDPAESAPGTIRGDYGLDLGRNVIHGSDHEDEGANEREIELFFDEDELVDWDQIDSSWLYE

SEQ ID NO: 5908 - protein, 408 aa, Choanephora infundibulifera f. cucurbitarum
GKSTTTGHLIYKCGGIDKRTIEKFEKEAAELGKGSFKYAWVLDKLKAERERGITIDIALWKFETPKYHVTVIDAPGHRDFIKNMITGTSQADCAILIIAGGTGEFEAGISKDGQTREHALLAFTLGVRQLIVAINKMDTTKWSEARYTEIVKEVSSFIKKIGFNPKAVPFVPISGWHGDNMLDESTNMPWFKGWKKETKAGEKTGKTLLEAIDAIEPPVRPSDKPLRLPLQDVYKIGGIGTVPVGRVETGVIKAGMVVTFAPAAVTTEVKSVEMHHETLTEGLPGDNVGFNVKNVSVKDIRRGNVCSDSKNDPAKEAGSFTAQVIILNHPGQIGAGYAPVLDCHTAHIACKFSELIEKIDRRSGKKLEDAPKFVKSGDSAIVKMVPSKPMCVEAYTDYPPLGRFAVRD

SEQ ID NO: 5909 - protein, 226 aa, Mycobacterium sp. S65
MADTDGEGLDAAVAELAESGAAVCGVAGDVCLSDVANSVVERALTEFGRLDTLFNVVGGSLARNVEEISEEQWRSQIDMNLGSVFQMSKPVIPLLRQGGGGSIVNVASTAGILAENRCSAYSASKGGVVLLTKNMALDFARDNIRVNAIAPGGTRTPRIERFLAEHPEHASMMVDLCAMQRFAGPDEIAAPAVFLASPEASYITGAVLPVDGGMTAGVTFRAFEAV

SEQ ID NO: 5910 - protein, 396 aa, Circinella umbellata
GKSTTTGHLIYKCGGIDKRTIEKFEKEAAELGKGSFKYAWVLDKLKAERERGITIDIALWKFETPKYHVTIIDAPGHRDFIKNMITGTSQADCGILIIAAGTGEFEAGISKDGQTREHALLAFTLGVRQLIVALNKMDATKYSEARYNEIVKEVSTFIKKIGFNPKTVPFVPISGWNGDNMLEESPNMPWFKGWTKENKAGSKTGKTLLEAIDNIDPPVRPSDKPLRLPLQDVYKIGGIGTVPVGRVETGVIKAGMIVTFAPANVTTEVKSVEMHHEQLAEGTPGDNVGFNVKNVSVKDIRRGNVCSDSKNDPAKESGSFTAQVIVLNHPGQISAGYSPVLDCHTAHIACKFAELLEKIDRRSGKKLEDAPKFVKSGDSAIVKLVPSKPMCVEAYT

SEQ ID NO: 5911 - protein, 469 aa, Sulfolobus solfataricus P2
MSFIDSLATLGQYLPAVTKPKEKPSLGQKLVWSLVAVIIYLIMASTPLYGITSASFFKNLILEQIIFASTTGTLAQLGIGPIITAGLIMQILAGSKLISIDLNDPDDRVKFTEAQKGLAFIFILVESALFGYVLARTSTTINASILFIAGIVIAQLIVATYLILLLDELIQKGWGLGSGVSLFILAGVMKIMFWDMFGIASVSSQNLPIGFFPALFTALASHSDVLNLIVNTSTKNLFQPDLVGLVTTIALIIITIYLTTMTIEIPVTSQKLRGIRRTIPLNFLYVSSIPVIFVAVLGSDIQLFASLASYVSPSASNILNTVSGVFFFPPPNSAIPHSIYAVVLDPLGALEYAVVFIVLSILFGILWVDVAGLDPATQAQQLVEAGIEIPGVRNNPKIIEGILARYIYPLAFFSSIIVGLIAVFATLLGAYGTGIGILLAVTIAIQYYSLLAYERSLEMYPLLKRLIGE

SEQ ID NO: 5912 - protein, 304 aa, Glycine max
  misc_feature (109)..(109): Xaa can be any naturally occurring amino acid
  misc_feature (217)..(217): Xaa can be any naturally occurring amino acid
  misc_feature (238)..(238): Xaa can be any naturally occurring amino acid
  misc_feature (240)..(240): Xaa can be any naturally occurring amino acid
  misc_feature (248)..(248): Xaa can be any naturally occurring amino acid
  unsure (1)..(304): unsure at all Xaa locations
WCKTGGLGDVLGGLPPALAGFGHRVMTIVPRYDQYKDAWDTGVVIEVKVGDRTEKVRFFHCYKRGVDRVFVDHPWFLEKVWGKTGQKLYGPTTGDDYEDNQLRFSLFCXGEDVIFVANDWHTALIPCYLKSMYQPRGIYMNARVVFCIHNIAYQGRFAFADFSLLNLPDQFKSSFDFIDGHVKPVVGRKINWLKAGLIESWFVITVSPNYAKELVSXPDKGVELDNILRKIDDDGRLXGXVNGMDVHXWNPPLTIFSIVQFENGFLKNPPWMRFLFWLVVNQRFFEPFILSRKRNQINFLVLSF

SEQ ID NO: 5913 - protein, 340 aa, Photorhabdus luminescens subsp. laumondii TTO1
MPILITGGAGYIGSHTVLTLLERGADVVVIDNLCNSSPESLRRVEKLTGKSVKFYQGDILNLDLLHKIFQENKIETVIHFAGLKAVGESTRKPLEYYQNNVTGTLVLLQAMRANSVHQLIFSSSATVYGDPEFVPLTENAKVGGTTNPYGTSKLMVEQILKDFAAAEPSFKITSLRYFNPVGAHSSGMIGEDPNGIPNNLLPYITQVAIGRLECLSVYGNDYPTKDGTGIRDYIHVMDLAEGHIAAIDYLDKQQSYEVFNLGTGAGYSVLELLHAFEKASGKDIPYKITDRRPGDIAECWSDPSRARNILGWQATRNIDDMMRDSWNWQKNNPHGFRSGK

SEQ ID NO: 5914 - protein, 151 aa, Sulfolobus solfataricus P2
MTNLKAQKRLAASIAGVGINRIKVVEDYIEDVQSSLTRDEIRNLIKDGKIIVLKKVGISGGRLKERRKKRSLKSEGKKSGSRKGKKGARANSKQMWVKRVRKIRAYLKWLRDHKVIDRHTYRELYLKTKGGNYKGVSDVRNVLIQMGKIKG

SEQ ID NO: 5915 - protein, 447 aa, Ectocarpus variabilis
MREIVHVQAGQCGNQIGSKFWEVISDEHGIDPTGRYHGDSDLQLERINCYFNEATAGRYVPRAILMDLEPGTMDSVRAGPFGQLFRPDNFVFGQTGAGNNWAKGHYTEGAELIDSVLDVVRKEAESCDALQGFQLTHSMGGGTGAGMGTLLISKVREEYPDRIMSTYSVIPSPKVSDTVVEPYNATLSVHQLVENADQCFTLDNEALYDICFRTLKLTTPTYGDLNHLVSAAICGTTCSLRFPGQLNCDLRKLAVNMVPFPRLHFFMIGFAPLTSRGSQQYRALTVPELTQQCFDSKNMMCAADPRHGRYLTCAVMFRGRMSTKEVDEQMLNVVNKNSSYFVEWIPNNVKASICDIPPKGLKMSTTFVGNTTAIQEVWKRVAEQFTAMFRRKAFLHWYTGEGMDEMEFTEAESNMNDLVSEYQQYQDATAEEEGEFDEDEELDDGMM

SEQ ID NO: 5916 - protein, 548 aa, Escherichia coli O157:H7 EDL933
  misc_feature (160)..(160): Xaa can be any naturally occurring amino acid
  unsure (1)..(548): unsure at all Xaa locations
MAAKDVKFGNDARVKMLRGVNVLADAVKVTLGPKGRNVVLDKSFGAPTITKDGVSVAREIELEDKFENMGAQMVKEVASKANDAAGDGTTTATVLAQAIITEGLKAVAAGMNPMDLKRGIDKAVTAAVEELKALSVPCSDSKAIAQVGTISANSDETVGXLIAEAMDKVGKEGVITVEDGTGLQDELDVVEGMQFDRGYLSPYFINKPETGAVELESPFILLADKKISNIREMLPVLEAVAKAGKPLLIIAEDVEGEALATLVVNTMRGIVKVAAVKAPGFGDRRKAMLQDIATLTGGTVISEEIGMELEKATLEDLGQAKRVVINKDTTTIIDGVGEEAAIQGRVAQIRQQIEEATSDYDREKLQERVAKLAGGVAVIKVGAATEVEMKEKKARVEDALHATRAAVEEGVVAGGGVALIRVASKLADLRGQNEDQNVGIKVALRAMEAPLRQIVLNCGEEPSVVANTVKGGDGNYGYNAATEEYGNMIDMGILDPTKVTRSALQYAASVAGLMITTECMVTDLPKNDAADLGAAGGMGGMGGMGGMM

SEQ ID NO: 5917 - protein, 298 aa, Streptococcus thermophilus CNRZ1066
MSSKYAVWLAFFLNLSFAIVEFIAGGIFVSSAVLADSIHDLGDALAIGLSAFLETISNREEDSRYTLGYKRFSLLGALVTAVILMTGSGMVILENVSKLFHPQPVNDEGLLWLGIIAISVNLLASLVIRKGQTKNESILSLHFLEDTLGWLAVILMAIVLRFTDWYILDPLLSLAISFFILSKAIPRFWSTLKIFLDAVPEGVDIKQVKNDLEQLDNVASINQLNLWTMDGLEKNAIVHVCLEHVKHIEVCKESIRDLLKESGFQNVTIEVDEDLATHQAHKRNIEELEAESEQQHHH

SEQ ID NO: 5918 - protein, 465 aa, Brassica rapa subsp. pekinensis
MAETTTTAKTSSKGHVLVLPYPVQGHLNPMVQFAKRLVSKGVKVTIATTTYTASSISTPSVSLEPISDGHDFIPIGVPGVSIDAYSESFKLHGSQTLTRVISKFKSTDSPIDSLVYDSFLPWGLEVARSNSLSAAAFFTNNLTVCSVLRKFASGEFPLPADPASAPYLVRGLPALSYDELPSFVGRHSSSHAEHGRVLLNQFRNDEDADWLFVNGFEGLETQGCEVGESEAMKATLIGPMIPSAYLDGRIKDDKGYGSSLMKPLSEECMEWLDTKLSKSVVFVSFGSFGILFEKQLAEVAKALQESNFNFLWVIKEAHIAKLPEGFVEATKDRALLVSWCNQLEVLAHGSIGCFLTHCGWNSTLEGLSLGVPMVGVPQWSDQMNDAKFVEEVWRVGYRAKEEAGGGVVKSDEVVRCLKGVMEGESSVEIRESSKKWKDLAVKAMSEGGSSDRSINEFVESLGKKH

SEQ ID NO: 5919 - protein, 79 aa, Lablab purpureus
MSCCGGNCGCGSSCKCGNGCGGCKMYPDLSYAEQTSPESLVMGVAPVRVQFGGAEMGVAGETDGCKCGANCTCNPCTCK

SEQ ID NO: 5920 - protein, 474 aa, Pseudomonas aeruginosa
MHTLKRCMAAMVALLALSLAMTARAELPDFTPLVEQASPAVVNISTRQKLPDRAMARGQLSIPDLEGLPPMFRDFLERSIPQVPRNPRGQQREAQSLGSGFIISNDGYILTNNHVVADADEILVRLSDRSEHKAKLVGADPRSDVAVLKIEAKNLPTLKLGDSNKLKVGEWVLAIGSPFGFDHSVTAGIVSAKGRSLPNESYVPFIQTDVAINPGNSGGPLLNLEGEVVGINSQIFTRSGGFMGLSFAIPIDVALNVADQLKKAGKVSRGWLGVVIQEVNKDLAESFGLDKPSGALVAQLVEDGPAAKGGLQVGDVILSLNGQSINESADLPHLVGNMKPGDKINLDVIRNGQRKSLSMAVGNLPDDDEEIASMGAPGAERSSNRLGVTVADLTAEQRKSLDIQGGVVIKEVQDGPAAVIGLRPGDVITHLDNKAVTSTKIFADVAKALPKNRSVSMRVLRQGRASFITFKLAE

SEQ ID NO: 5921 - protein, 423 aa, Streptomyces aureofaciens
MSRRVVITGIGVVAPGGVGTKEFWSLLTAGKTATRAISLFDASPFRSRIAAEADFNPLDHGFTAEEAMRLDRAAQFAIVSASEAVRDSGIDTAELDPTRTGVTLGSAVGCTTGLDVEYNAVSRGGSTWQVDHTLAVPHLFDYFVPSSMAAEVAWRVNAQGPVSMVSTGCTSGLDSIGHAVELIREGSADVMITGATEAPISPITVACFDAIKATSPRNDDPGTASRPFDATRNGFVLGEGSAVLVLEDLESARKRGAHVYAEISGFASRCNAYHMTGLRADGVEMAEAITVALDEARLDPSAVDYINAHGSGTKQNDRHETAAFKRSLGQRAYEVPVSSIKSMIGHSLGAIGSSKVAASALAIEYNTVPPTANLHTPDPLCDLDYTPLTAREQRTDAVLSVGSGFGGFQSAMILTRPRLGDAA

SEQ ID NO: 5922 - protein, 420 aa, Streptomyces aureofaciens
MTTETAARPGGTPLSPTAAPVVTGIGVTAPNGLGTEAWWAAVLRGESGIRPVGRFDATQYPAKLAGEVPGFDAAEHVPSRLLPQTDHMTRLALTAADEALADAGVDPAELPDFSAGVITASSAGGFEFGQKELQALWSQGGQYVSAYQSFAWFYAVNTGQISIKNGLRGPSGVLVTEQAGGLDAVAQARRQLRKGLRLVVTGGVDSSLCPWGWAAHLAGGELSTSEDPARAFRPFSAEADGHVAGEGGALLVLEDAAAARERGAEIYGTVAGYASTFDPAPGSGGAPRLQAAAELALRDAGLTPADVDVVFADAAGRRDADRAEARALTALFGEYGVPVTAPKTMTGRLAAGGASLDLAAALLSLRDQVIPPTVNTGPAAEDCPVDLVSEVRRPERLRTALVLARGRGGFNAAMVVRAAH

SEQ ID NO: 5923 - protein, 488 aa, Mycobacterium bovis AF2122/97
MRAEIGPDFRPHYTFGDAYPASERAHVNWELSAPVWHTAQMGSTTHREVAKLDRVPLPVEAARVAATGWQVTRTAVRFIGRLPRKGPWQQKVIKELPQTFADLGPTYVKFGQIIASSPGAFGESLSREFRGLLDRVPPAKTDEVHKLFVEELGDEPARLFASFEEEPFASASIAQVHYATLRSGEEVVVKIQRPGIRRRVAADLQILKRFAQTVELAKLGRRLSAQDVVADFADNLAEELDFRLEAQSMEAWVSHLHASPLGKNIRVPQVHWDFTTERVLTMERVHGIRIDNTAAIRKAGFDGVELVKALLFSVFEGGLRHGLFHGDLHAGNLYVDEAGRIVFFDFGIMGRIDPRTRWLLRELVYALLVKKDHAAAGKIVVLMGAVGTMKPETQAAKDLERFATPLTMQSLGDMSYADIGRQLSALADAYDVKLPRELVLIGKQFLYVERYMKLLAPRWQMMSDPQLTGYFANFMVEVSREHQSDIEV

SEQ ID NO: 5924 - protein, 347 aa, Agrobacterium tumefaciens str. C58
MGQNPKVIEAMKAAIDHCGAGAGGTRNISGTNHYHVLLEQELADLHGKESALIFTSGYVSNWATLGTLGQKIPGLIIFSDALNHASMIEGIRYGRCERVIWKHNDLEDLEAKLKAADPNAPKLIAFESVYSMDGDIAPIREICDLADRYGAMTYLDEVHAVGMYGPRGGGIAEREGLMDRLTIIEGTLGKAFGVMGGYITGSTAVCDFIRSFASGFIFTTALPPSLAAGAIASIQHLKASPFERARHQDRVRKLRGLLDARGIPHMDNPSHIVPVMVGDAAKCKWISDILLDNHGVYVQPINYPTVPRKTERLRITPTPLHTDADIEQLVGALHQLWSHCALARAVA

SEQ ID NO: 5925 - protein, 288 aa, Arabidopsis thaliana
MKTSLLCIAEDNSGLVVWNPYLCQTKWIRLRNTFHRYDVFALGHDNNRNHKILRFLYDAKKYRTGRGRDNDVYDFSSDSWRRVFDVNPHRGELFYYSGVSLKGNSYFFGQEVTIEEEEEEVISQPRDYLLCFDFTTERFGPRLSLPFNPPSPNFDYLTLSWARDEKLAVLYNHYNTREIIEIWISTKIEPNTVSWSTFLTVDTSLINGLPDRFSTFYGPRSFFIDEEKKVAVFFDNKGTETGCYQVAYIIGDNGYFKSVKIGVISNSQWQQGILVCSSYVPSLVQLQD

SEQ ID NO: 5926 - protein, 341 aa, Mycobacterium sp. S65
MEAIVLNGTNDVGLTSVPDPAPQDGEVIIEVAATGLCGTDLHEYVAGPTFSQPPVVLGHEVSGRIVEVGAGVDQSRIGEGAAVIPMDFCGSCHYCHRSLYHLCQRPGWIGFTRNGGLANYVAVPSRLAVRVPDVVDLEEAALTEPTAVAFHAVRRAELLLGETVMVLGAGALGLTVIQCARAAGAARIFVTEPSGVRASLARDLGATLVLDPHDPGTTACILEETRGVGVDVVFHVAGSAEAFTQGLDCLRKQGRFMEMSSWAGAASLDVNRHLLKEIQLRMVFGYDMFDDFPAVLALIADGKLALAPQITARVPLDRAVKEGLGGLLEGREGLVKVLVKP

SEQ ID NO: 5927 - protein, 401 aa, Circinomucor circinelloides
GKSTTTGHLIYKCGGIDKRTIEKFEKEAAELGKGSFKYAWVLDKLKAERERGITIDIALWKFETPKYNVTVIDAPGHRDFIKNMITGTSQADCAILIIAGGTGEFEAGISKDGQTREHALLAFTLGVRQLIVAINKMDTTKWSQDRYNEIVKEVSGFIKKIGFNPKSVPFVPISGWHGDNMLDESTNMPWFKGWNKETKAGSKTGKTLLEAIDAIEPPVRPSDKPLRLPLQDVYKIGGIGTVPVGRVETGTIKAGMVVNFAPAAVTTEVKSVEMHHETLSEGLPGDNVGFNVKNVSVKDIRRGNVCSDSKNDPAKESASFTAQVIILNHPGQISAGYAPVLDCHTAHIACKFSELIEKIDRRSGKKMEDAPKFVKSGDSAIVKMVPSKPMCVEAYTDYPPL

SEQ ID NO: 5928 - protein, 416 aa, Cokeromyces recurvatus
GKSTTTGHLIYKCGGIDKRTIEKFEKEAAELGKGSFKYAWVLDKLKAERERGITIDIALWKFETPKYHVTVIDAPGHRDFIKNMITGTSQADCAILIIAGGTGEFEAGISKDGQTREHALLAFTLGVRQLIVAINKMDTTKWSEARYNEIVKEVSNFIKKIGFNPKSVPFVPISGWHGDNMLDESTNMPWFKGWTKETKAGSKTGKTLLEAIDAIDPPTRPVDKPLRLPLQDVYKIGGIGTVPVGRVETGVIKAGMVVTFAPSAVTTEVKSVEMHHETLAEGLPGDNVGFNVKNVSVKDIRRGNVCSDSKNDPAKESASFTAQVIILNHPGQISAGYAPVLDCHTAHIACKFAELIEKIDRRSGKKLEDAPKFVKSGDSAIVKMVPSKPMCVEAYTEYPPLGRFAVRDMRQTVAVG

SEQ ID NO: 5929 - protein, 544 aa, Vibrio vulnificus CMCP6
MENKWWHDAVVYQIYPRSFCDSNNDGIGDLNGIISKLDYLKTLGVNVLWLSPVYKSPMDDNGYDISDYQDIAAEFGTMADMQNLLAQAKARDIRIVMDLVVNHTSDEHPWFVEARKSRDNPYRDYYIWRDAKPDGSVPDDQGSIFGGSAWQWDEATQQYYFHLFSKRQPDLNWENPKVQQEVHKMMNWWIDQGIGGFRLDVIDLIGKEIDKGITGNGPRLHPLLQEMNRATFGDKDLLTVGETWGATPEIAKLYSDPERHELSMVFQFEHITLTWQHGDKWNPIPLDLKQFKHVLTKWQTELSNQGWNSLFWNNHDLPRVVSKYGDDQRYRVESAKMLATALHFLKGTPYIYQGEEIGMTNVAFESLEQYKDIETLNFYKVKTESGVSHQHMMDAIHENSRDNARTPMQWSASQNGGFSQAKPWIEVNPNYPEINVEQALADSDSIFYHYQKLIELRKQHPAIVYGDFTPLFAEHDSVFAYVRSHQDEQLLVINNFSDQDISLALPDNLQNKEVNCLIYNYDSLCMLGVTLSLKPYQCYAFKLR

SEQ ID NO: 5930 - protein, 426 aa, Cunninghamella bertholletiae
VVVIGHVDSGKSTTTGHLIYKCGGIDKRTIEKFEKEAAELGKGSFKYAGVLDKLKAERERGITMDIALWKFETPKYHVTVIDAPGHRDFIKNMITGTSQADCGILIIASGTGEFEAGISKDGQTREHALLAFTLGVRQLIVALNKMDTCKWSQDRYNEIVKEVSSFIKKIGYNPKSVPFVPISGWHGDNMLEASTDMPWYKGWTKETKAGSSTGKTLLEAIDSIEPPTRPSDKPLRLPLQDVYKIGGIGTVPVGRVETGVIKAGMVVTFAPANVTTEVKSVEMHHEQLEQGVPGDNVGFNVKNVSVKDIRRGNVCSDSKNDPAKESASFNAQVIVLNHPGQIGAGYAPVLDCHTAHIACKFAELLEKIDRRSGKKLEDAPKFVKSGDSAIVKMVPSKPMCVEAYTEYPPLGRFAVRDMRQTVAVGV

SEQ ID NO: 5931 - protein, 226 aa, Mycobacterium sp. S65
MADTDAGRLDAAVAELAESGAAVCGVVGDVCRRDVADGVAERALTEFGQLDALFNVVGGSLARNVEEISEEQWRTQLDMNLGSVFQMSKPAIPLLRQGGGGSIVNVASTAGLLAENRCSAYSASKGGVVLLTKNMALDFARDNIRVNAIAPGGTRTPRIERFLTEHPEHSSMMVDLCAMQRFGWPDEIAAPAVFLASPEASYITGAVLPVDGGMTAGVTFRAFEAG

SEQ ID NO: 5932 - protein, 426 aa, Cunninghamella echinulata
VVVIGHVDSGKSTTTGHLIYKCGGIDKRTIEKFEKEAAELGKGSFKYAWVLDKLKAERERGITIDIALWKFETPKYHVTVIDAPGHRDFIKNMITGTSQADCGILIIAAGTGEFEAGISKDGQTREHALLAFTLGVRQLIGAINKMDSTKWSEARYKEIVKEVSGFIKKIGFNPASVPFVPISGWHGDNMLEESKNMDWFKGWTKETKTGSYKGKTLLEAIDAIEPPTRPSDKPLRLPLQDVYKIGGIGTVPVGRVETGVIKAGIVVTFAPANVTTEVKSVEMHHEQLEQGVPGDNVGFNVKNVSVKDIRRGNVCSDSKNDPAKEAGSFTAQVIVLNHPGQIGAGYAPVLDCHTAHIACKFAELIEKIDRRSGKKLEDAPKFVKSGDSAIVKMIPSKPMCVEAYTEYPPLGRFAVRDMRQTVAVGV

SEQ ID NO: 5933 - protein, 341 aa, Mycobacterium sp. S65
MDAIVLKGTNDVGLTSVPDPAPQPGEVIIEVAATGLCGTDLHEYVAGPTFSQPPVVLGHEVSGRIVEVGAGIDRCRIGEGAAVIPMDFCGSCHYCHRSLYHLCQRPGWIGLTRNGGLASHVAVPSRLAVRVPDAVDLQEAALTEPTAVAFHAVRRAELLLGETVLVLGAGALGLTVIQCARAAGAARIYVTEPSRVRGNLARDLGATLVLDPHEPGTTARILEETRGVGVDVVFHVAGSVEAFTQGLDCLRKQGRFMEMSSWAGPASLDVNRHLLKETQLRMVFGYDMFDDFPAVLALMADGKIALTPQITTRIPLDSAVEEGLNGLLEAREGLIKVLVRP

SEQ ID NO: 5934 - protein, 417 aa, Dichotomocladium elegans
GKSTTTGHLIYKCGGIDKRTIEKFEKEAAELGKGSFKYAWVLDKLKAERERGITIDIALWKFETPKYFVTVIDAPGHRDFIKNMITGTSQADCGILIIAAGTGEFEAGISKDGQTREHALLAFTLGVRQLIVAINKMDSTKYSEARYNEIVKEVSGFIKKIGFNPKSVPFVPISGWNGDNMLEESPNMPWFKGWTKETKAGSKAGKTLLEAIDAIDPPVRPSDKPLRLPLQDVYKIGGIGTVPVGRVETGVIKAGMIVNFAPANVTTEVKSVEMHHEQLVEGVPGDNVGFNVKNVSVKDIRRGNVCSDSKNDPAKEAGSFTAQVIVLNHPGQIGAGYSPVLDCHTAHIACKFAELLEKIDRRSGKKLEDAPKFIKSGDSAIVKMIPSKPMCVEAYTEYPPLGRFAVRDMRQTVAVGV

SEQ ID NO: 5935 - protein, 466 aa, Escherichia coli CFT073
MFSMSVSTLESENAQPVAQTQNSELIYRLEDRPPLPQTLFAACQHLLAMFVAVITPALLICQALGLPAQDTQHIISMSLFASGVASIIQIKAWGPVGSGLLSIQGTSFNFVAPLIMGGTALKTGGADVPTMMAALFGTLMLASCTEMVISRVLHLARRIITPLVSGVVVMIIGLSLIQVGLTSIGGGYAAMSDNTFGAPKNLLLAGVVLALIILLNRQRNPYLRVASLVIAMAAGYALAWFMGMLPESNEPMTQELIMVPTPLYYGLGIEWSLLLPLMLVFMITSLETIGDITATSDVSEQPVSGPLYMKRLKGGVLANGLNSFVSAVFNTFPNSCFGQNNGVIQLTGVASRYVGFVVALMLIVLGLFPAVSGFVQHIPEPVLGGATLVMFGTIAASGVRIVSREPLNRRAILIIALSLAVGLGVSQQPLILQFAPEWLKNLLSSGIAAGGITAIVLNLIFPPEKQ

SEQ ID NO: 5936 - protein, 213 aa, Oryza sativa (japonica cultivar-group)
MAITVRTHRTTKLFGRERPLHDALGGHKAADIILWRERRVSASIVAGATVAWYLFEVAEYHFLSLACYLAMLGMLVVFIWANASAFFNLPAPRIPEIFVSERTTRQVILALHSRLTWFVHRLYDIACGKDIKMFILTVFSLFIASVIASCFSSLTLLYLVVLGTMTLPVMYENYESEVDHLVSTAVHDLRSHVGDIDSGVFKKIPRGRGATAN

SEQ ID NO: 5937 - protein, 425 aa, Brucella suis 1330
MTKYTDHLGRPIVAITGAGVVSSLGQGKDDNWAALTGGKSGIHTITRFPTENLNTRFSGTVDFLPESESGASALSEALARLAGEEALAQSGLSVTAFGGPLFLAAPPVELDWKSRFALDASVKDEGPASYQLLLEACRRARHDALFNTTQFGYIAERLSQAFGTRGLPITLSTACASGATAIQLGVEAIRRGESDRVLSIGTDGSVSAEALIRFSLLSALSTQNDKPEKASKPFSKDRDGFAMAEGSGALVMESLESAVARGAKVLGILAGCGEKADDFHRTRSKPDASPAIGTVRAALADAGLTEDQISYINAHGTSTPENDKMEYLALSTVFGDKLGSIPVSSNKSMIGHTLTAAGAIEAVFSLLTIQTGTLPPTINYDNPDPAIPLDVVPNVKREAKVAAVLSNSFGFGGQNTSLVLTPNPN

SEQ ID NO: 5938 - protein, 114 aa, Sulfolobus solfataricus P2
MVSKGKTVKDPGIPNITIPEKVCEDEDCPYHGSLRVRGITLEGVIVKYRGTKAAVIERQYLYYDSKYKRYERRRSRIHAHVPPCINVREGDKVIIGECRPLSKSISFVVLGKVS

SEQ ID NO: 5939 - protein, 78 aa, Zea mays; identical to SEQ ID NO: 1021

SEQ ID NO: 5940 - protein, 134 aa, Zea mays
  misc_feature (11)..(11): Xaa can be any naturally occurring amino acid
  misc_feature (34)..(34): Xaa can be any naturally occurring amino acid
  misc_feature (66)..(66): Xaa can be any naturally occurring amino acid
  misc_feature (99)..(99): Xaa can be any naturally occurring amino acid
  misc_feature (112)..(112): Xaa can be any naturally occurring amino acid
  misc_feature (120)..(120): Xaa can be any naturally occurring amino acid
  unsure (1)..(134): unsure at all Xaa locations
ADRNIPFREKXCYTGICLLIILVCGQLPLYGIHXETEADPFYCMRIMLASNRDTAMELGITPIVTXGMVMQLLAESKIIEADNSVRDDGALLNSAQQLXTLLTAIREAVAYXLSRMHGSXVSQLLTGNAILIIL

SEQ ID NO: 5941 - protein, 467 aa, Listeria innocua Clip11262
MTSVMWFRRDLRVNDNKALYHACKEEDLILLFQVNPEQFIKGSPSHQAFFASVAHFQQELNKNTHLQIMFGEPIELLKQLKEKIPTWDKVFFNRDETGYGASRDEAARAFFADKEITVHSYHDSYLHSAEEVKKSATEYYKIFTPYYKKWREEIKEMPLKVTLKPEKIRKESLFPNYEEQFRELIQDLPAFDSGEKAANTRLANFVKEDLADYDKARDVPALDKTSHLSRYLRTGEISIRTVWQALQKEEATEGRATFEKELCWRDFYNMIYVSFPKQKNEPIQENYRFIEWENNREFFKKWQDGQTGFPLVDAAMRQLKETGWMHNRLRMITASFLTKDLLIDWRFGEKYFQQMLIDYDPASNIGGWQWAASTGTDAVPYFRIFNPTTQSEKFDPDGTFIRKYVKELRDLPDKFIHQPEKMSETEQKEHGLILGKDYPLPIIDHKERRKLAIARYEFSKEHSRGNI

SEQ ID NO: 5942 - protein, 602 aa, Escherichia coli O157:H7 EDL933
MQTFQADLAIVGAGGAGLRAAIAAAQANPNAKIALISKVYPMRSHTVAAEGGSAAVAQDHDSFEYHFHDTVAGGDWLCEQDVVDYFVHHCPTEMTQLELWGCPWSRRPDGSVNVRRFGGMKIERTWFAADKTGFHMLHTLFQTSLQFPQIQRFDEHFVLDILVDDGHVRGLVAMNMMEGTLVQIRANAVVMATGGAGRVYRYNTNGGIVTGDGMGMALSHGVPLRDMEFVQYHPTGLPGSGILMTEGCRGEGGILVNKNGYRYLQDYGMGPETPLGEPKNKYMELGPRDKVSQAFWHEWRKGNTISTPRGDVVYLDLRHLGEKKLHERLPFICELAKAYVGVDPVKEPIPVRPTAHYTMGGIETDQNCETRIKGLFAVGECSSVGLHGANRLGSNSLAELVVFGRLAGEQATERAATAGNGNEAAIEAQAAGVEQRLKDLVNQDGGENWAKIRDEMGLAMEEGCGIYRTPELMQKTIDKLAELQERFKRVRITDTSSVFNTDLLYTIELGHGLNVAECMAHSAMARKESRGAHQRLDEGCTKRDDVNFLKHTLAFRDADGTTRLEYSDVKITTLPPAKRVYGGEADAADKAEAANKKEKANG

SEQ ID NO: 5943 - protein, 64 aa, Hordeum vulgare subsp. vulgare
AALSAQDIVLPQYREPGVLLWRGFTLQEFANQLFGNNLDYGKGRQMPIHYGSNRLNLFTRSHRL

SEQ ID NO: 5944 - protein, 653 aa, Paenibacillus sp. A11
MFLEAVYHRPRKNWSYAYNGTTVHLRIRTKKDDMTAVYALAGDKYMWDHTMEYVPMTKLATDELFDYWECEVTPPYRRVKYGFLLQQGHEKRWMTEYDFLTEPPANPDRLFEYPFINPVDVFQPPAWVKDAIFYQIFPERFANGDTRNDPEGTLPWGSADPTPSCFFGGDLQGVIDHLDHLSKLGVNAVYFTPLFKATTNHKYDTEDYFQIDPQFGDKDTLKKLVDLCHERGIRVLLDAVFNHSGRTFPPFVDVLKNGEKSKYKDWFHIRSLPLEVVDGIPTYDTFAFEPLMPKLNTEHPEVKEYLLKAAEYWIRETGIDGWRLDVANEVSHQFWREFRRVVKQANPDAYILGDVWHESSIWLEGDQFDAVMNYPFTNAVLDFFIHQIADAEKFSFMLGKQLAGYPRQASEVMFNLLDSHDTARLLTQADGDKRKMKLAVLFQFTYFGTPCIYYGDEVGLDGGHDPGCRKCMEWDETKHDKDLFAFYQTVIRLRQAHAALRTGTFKFLTAEKNSRQIAYLREDDQDTILVVMNNDKAGHTLTLPVRHAQWTHLWNDDVLTAAHGQLTVKLPAYGFAVLKASSDWSSWGRPPFTGEHASPSKRGASFCRSPSFPLTSSHWLDPVSTLSCSWVQLFSKLVNYKFSEQLSCMSLKS

SEQ ID NO: 5945 - protein, 341 aa, Photorhabdus luminescens subsp. laumondii TTO1
MKALSKLKAEEGIWMIDVPEPELGHNDVMIKIRKTAICGTDVHIYNWDDWSQKTIPVPMVVGHEYVGEVVAIGQEVKGFKIGDRVSGEGHITCGYCRNCRGGRTHLCRNTIGVGVNRAGCFAQYLVIPAFNAFKIPDNISDELAAIFDPFGNAVHTALSFDLVGEDVLVSGAGPIGIMAAAVCKHVGARHVVITDVNEYRLELARKMGVTRAVNVSQENLTDVMAELGMTEGFDVGLEMSGAPAAFRTLLNTMNHGGRVALLGIPPSDMAIDWNQVIFKGLFIKGIYGREMFETWYKMATLIQSGLDLTPIITHRFSIDDFQKGFDIMRSGQSGKVILNWD

SEQ ID NO: 5946 - protein, 398 aa, Photorhabdus luminescens subsp. laumondii TTO1
MSASFYQQINEQLEQAHSEGLFKNERIITSAQNADIAVADGSHVINFCANNYLGLANHPELIAAAKAGMDSHGFGMASVRFICGTQDTHKALERKLAEFLGMEDAILYSSCFDANGGLFETLFGPEDAIISDALNHASIIDGVRLCKAKRYRYANNDMQELRAQLEKAKADNARHIVIATDGVFSMDGVIADLKSICDLADEFDAMVMVDDSHAVGFVGAHGRGTHEYCDVMDRIDIITGTLGKALGGASGGYTAARKEVVEWLRQRSRPYLFSNSLAPAIVAASIKVLDMLKEGDALRDRLWKNANLFREKMTAAGFTLAGADHAIIPVMLGDAKLAQEFAAELLKEGIYVTGFFYPVVPKNQARIRTQMSAAHTEEQIERAVAAFTRIGKQLNVIA

SEQ ID NO: 5947 - protein, 416 aa, Geobacter sulfurreducens PCA
MTHHQEPVWRQAIAGAQILFVAFGALVLVPILTGLNPSMALLGAGIGTLIFQACTGRKVPIFLGSSFAFIAPIIYSVQTWGIPATLSGLFASGALYLMLALLIKMRGVAFIHRIMPPVVVGPIIMLIGLGLAGVAVNLAMGKTGDGKAVLVDYQTALLVAGVSLATTVVIALKAKGIFRLIPILAGVTVGYSLSAFLGLVNFSTIAAAPWFAMPPFVAPQWSWPAVFFMIPVALAPAIEHVGDIIAIGAVTGRDYTARPGLHRTMLGDGLAVCVAGLIGGPPVTTYSEVTGAVMITRNHNPVIMTWAACIAILMAFFGKFNALLQSIPTPVMGGIMILLFGSIAAVGLNTLIHARVDMHRPRNLVIVSLVLVFGIGGLTLQAGWVTLQGVSLCGITAVLLNLFLPKEKRDSAQQAF

SEQ ID NO: 5948 - protein, 504 aa, Candida albicans SC5314
MYKQILTFLILFLRYILSEFPDDPYEDDDTSDDNNSDYEGQKCNPYRDKACLVNDEALGKKIFESFAEGTKYFTITSSTRGVRFGSEGLALTIQDEFDNPALVSSFYIMYGKVEAEIKGAAGKGIISSFYLQSDDLDEIDVVEIFGSDPYEFQTNFFIKGNTTTYDRGRYHEMHPSPLSEFHKYGIEWSPDLITWYLDDKPVRMLGRRNKHGLPCSPMFLKFSLWSVEDDDEGTIAWAGGAASFSEGPFTMHIKNLKVQDYSKALTYSYGNLRDGNWLDLRADGGYLYEGHKYCLPPKMLDKLKPTPKQETDDDQVLTSSKSQRVATTISEDKNTVSYYPPSATNSHTTWDRLSEWETEQDETGTDDTENSDNEEEESITAIPISKSRKGSTRRLDISTQLPPLSQNESKIAEIKNITTTKHIHNTTTSLQISKIKSKKVGVTTTIYSSSTPQSTSKSRMPYNIFFNYPGKENSRFKSGVSSILATSFSSVVIAEILVIVVLLL

SEQ ID NO: 5949 - protein, 203 aa, Triticum aestivum
MASGRIALLCLLGLLLVAASPAAIAAKDDKIFYQITFMWPGAYCAQTKAGCCMPKTDVAPASDFYVAGFTVYNATTNSSLSSCSNTPFDMNQIGDATRLMQYWNNIRCPSKSGQKGWKNAWETSGVCSDLTESAYFDTALALRDKINPLSRLVSNGIKPDFGLYSVKKIKEVIEEGIGAPALIQCSKGPFNKFQLYQIYVCVA

SEQ ID NO: 5950 - protein, 385 aa, Mycobacterium leprae TN
MKVPIETSPLAWLEAVEQQRRGAGLRRSLRPRSAVATELDLASNDYLGLSQHPDVIDGGVAALRVWGAGATGSRLVTGDTILHHELECELAEFVGACVGLLFSSGYAANLGAVVGLSGPGSLIVSDAYSHASLVDACRLSRARVVVTPHCDVDAVDTALRSCHEERAVVVTESVFSADGVLAPVSELHDVCRRHGALLLVDEAHGLGVRGGGRGLVYEVGLAGAPDVVITTTMSKALGSQGGAVLGSSAVRAHLINTARPFIFDTGLAPAAVGAARAALQILKAETWRPEAVLQHARTLAKICDLSELPQSAVVSVVLGDPEVALAAAIACLDAGVRVGCFRPPTVPAGTSRLRLTAHASLDSAKLEVARRVLTDVLGGCCVARR

SEQ ID NO: 5951 - protein, 481 aa, Helicobacter pylori
MIVRTQNSESKIKEFFEFCKENEVEFVDFRFSDIKGTWNHIAYSFGALTHGMFKEGIPFDASCFKGWQGIEHSDMILTPDLVRYFIDPFSADVSVVVFCDVYDVYKNQPYEKCPRSIAKKALQHLKDSGLGDVAYFGAESEFFIFDSIKIKDASNSQYYEVDSEEGEWNRDRSFENGVNFGHRPGKQGGYMPVPPTDTMMDIRTEIVKVLNQVGLETFVAHHEVAQAQGEVGVKFGDLVEAADNVQKLKYVVKMVAHLNGKTATFMPKPLYGDNGSGMHTHVSVWKNNENLFSGETYKGLSGLALHFLGGVLRHARGLAAFTNASTNSYKRLIPGYEAPSILTYSANNRSASVRIPYGISKNSARFEFRFPDSSSNPYLAFGAILMAGIDGIKNKMDPGEAMDINLFKLTLDEIIEQGIIQMPHTLRRSLEEMLADKQYLKQGQVFSEQFIHAYQSLKFHSEVFPWESKPHPFEFITTYSC

SEQ ID NO: 5952 - protein, 642 aa, Arabidopsis thaliana
MDEETMATGQNRTTVPENLKKHLAVSVRNIQWSYGIFWSVSASQSGVLEWGDGYYNGDIKTRKTIQASEIKADQLGLRRSEQLSELYESLSVAESSSSGVAAGSQVTRRASAAALSPEDLADTEWYYLVCMSFVFNIGEGMPGRTFANGEPIWLCNAHTADSKVFSRSLLAKSAAVKTVVCFPFLGGVVEIGTTEHITEDMNVIQCVKTSFLEAPDPYATILPARSDYHIDNVLDPQQILGDEIYAPMFSTEPFPTASPSRTTNGFDQEHEQVADDHDSFMTERITGGASQVQSWQLMDDELSNCVHQSLNSSDCVSQTFVEGAAGRVAYGARKSRVQRLGQIQEQQRNVKTLSFDPRNDDVHYQSVISTIFKTNHQLILGPQFRNCDKQSSFTRWKKSSSSSSGTATVTAPSQGMLKKIIFDVPRVHQKEKLMLDSPEARDETGNHAVLEKKRREKLNERFMTLRKIIPSINKIDKVSILDDTIEYLQELERRVQELESCRESTDTETRGTMTMKRKKPCDAGERTSANCANNETGNGKKVSVNNVGEAEPADTGFTGLTDNLRIGSFGNEVVIELRCAWREGVLLEIMDVISDLHLDSHSVQSSTGDGLLCLTVNCKHKGSKIATPGMIKEALQRVAWIC

SEQ ID NO: 5953 - protein, 424 aa, Dissophora decumbens
VVVIGHVDSGKSTTTGHMIYKCGGIDKRTIEKFEKEAAELGKGSFKYAWVLDKLKAERERGITIDIALWKFETPKFYVTVIDAPGHRDFIKNMITGTSQADCAILIIAGGTGEFEAGISKDGQTREHALLAFTLGVKQLIVAVNKMDTTKWSQDRFEEIIKEVSTFVKKVGYNPKSVPFVPISGWHGDNMLEESVNMPWFKGWTKETKTGSFKGKTLLEAIDAIEPPSRPTDKPLRLPLQDVYKIGGIGTVPVGRVETGVIKAGMVVTFAPSNVTTEVKSVEMHHEVLTEGIPGDNVGFNVKNVSVKDIRRGNVCSDSKNDPAKEAASFNAQVIVLNHPGQISNGYAPVLDCHTAHIACKFGEILEKIDRRTGKAMEEFPKFIKSGDAAIVKMIPSKPLCVESFQEYPPLGRFAVRDMRQTVAV

SEQ ID NO: 5954 - protein, 403 aa, Lobosporangium transversale
VVVIGHVDSGKSTTTGHLIYKCGGIDKRTIEKFEKEAAELGKGSFKYAWVLDKLKAERERGITIDIALWKFETPKYYVTVIDAPGHRDFIKNMITGTSQADCAILIIAAGTGEFEAGISKEGQTREHALLAFTLGVKQLIVAINKMDSTKWNKERFEEIVKEVSTFVKKVGYNPKAVAFVPISGWHGDNMLEESVNMPWYKGWVKETKGGEVKGRTLLDAIDAIEPPARPTDKPLRLPLQDVYKIGGIGTVPVGRVETGIIKAGMVVTFAPTNVTTEVKSVEMHHEVLTEGIPGDNVGFNVKNVSVKDIRRGNVCSDSKNDPAKEAASFNAQVIVLNHPGQISNGYAPVLDCHTAHIACKFSEILEKIDRRTGKATEEFPKFIKSGDAAIVKMVPSKPLCVET

SEQ ID NO: 5955 - protein, 389 aa, Yarrowia lipolytica CLIB122
MLLSNTIVVSVLAAIAAAAPATSKVVQFPVTRHSNPNKAPSQFLQKVSTPSVTVTNKEYWYSVALQLGSPAQNFNVLLDTGSSDLWVYASNDTQDCENNACAFTGTFNADQSSTYQFLNDDFSIHYVSGSSVGNWGTDTLHIGGVSLTDFQFAAAASAGGGQGVLGISLQGSESVPPGNQYENFPLKLKSDGYIDRAVFSLYLDDLSSSTGNLLFGGVDKAKYEGDLAVLPLTSSAAFQVAYSGISVGQNSYGGGNAVLDSGTSYTYIPDQDFQQLAQDLNFQETDQSTGLPIIDCDSNEPVTFSFDGKDIVVPSSQMVIPLSTLVGDDSETQCVFGIQSAASTQDYVLFGDTFLRAAYVVYDLDQEQVGIAQAKYTSETDIQPVSGSI

SEQ ID NO: 5956 - protein, 121 aa, Zea mays
MRAISTAVGGMLRARLRSASRVRGGGGEGAGRWTTPGHEERPKGYLFNRPPPAAGETRKWEDWELPCYITSFLTVVILGVGLNAKPDLTIETWAHEKALERLKQQELAAVSGGGDADADAE

SEQ ID NO: 5957 - protein, 305 aa, Brucella suis 1330
MGGFASIGECMIELSGNEGDQWRMGFAGDTLNTAWYMRALTDKSYPVEYVTAFGEDSFSQKQRVFLTSNGIGIAHSPVISGLHPGLYAITLDGAERSFTYWRSNAAARRLACDRDALEKSLAGRDMIYLSGITLAIILPEHRATFFDILHQCRAAGSRIAFDPNFRQQLWPDRKAAREIISNAMGIADIALPTFPDEQALFGDRDAAACAKRIAALGVGEIVVKDGTEPALVAAGGECTLVPSAAAQAIDTTGAGDSFNGAYLAARLNGLAPVEAARKAHLVAARVVEIRGALAPMETARATFAG

SEQ ID NO: 5958 - protein, 86 aa, Enterococcus faecium
VIIEVAKEEEKTVGGIVLASAAKEKPQTGTVVAVGEGRLLENGEKVPAAVKAGDQVMFEKYAGTEVKYEGKEYLIVAGKDIMAIVE

SEQ ID NO: 5959 - protein, 364 aa, Fennellomyces linderi
GKSTTTGHLIYKCGGIDKRTIEKFEKEAAELGKGSFKYAWVLDKLKAERERGITIDIALWKFETPKYHVTVIDAPGHRDFIKNMITGTSQADCGILIIAAGTGEFEAGISKDGQTREHALLAFTLGVRQLIVAINKMDSTKYSEARYNEIVKEVSTFIKKIGYNPKSVPFVPISGWNGDNMLEESPNMPWFKGWTKETKAGAKSGKTLLEAIDNIDPPVRPSDKPLRLPLQDVYKIGGIGTVPVGRVETGVIKAGMVVTFAPANVTTEVKSVEMHHEQLAEGVPGDNVGFNVKNVSVKDIRRGNVCSDSKNDPAKEAGSFTAQVIVLNHPGQIGAGYSPVLDCHTAHIACKFAELLEKIDRRSG

SEQ ID NO: 5960 - protein, 254 aa, Arabidopsis thaliana
MNIVGLSKRFFSDRRSLHGINNALLKTVFTGRKPILGFSGRSIHELRKTGNFVIPRVFSVSRNLTTKASSSSSKQPAFLRWYLRKLESHPFMTKSITTSVIYMAADLTSQMITMEPTGSFDLIRTARMASFGLIFLGPSQHLWFSYLSKILPKRDVLTTFKKIMMGQVLFGPVSNTVFYSYNAALQGENSEEIVARLKRDLLPTLKNGLMYWPVCDFVTFKYVPVHLQPLMNSSCAYIWTIYLTYMANQTKADS

SEQ ID NO: 5961 - protein, 326 aa, Mangifera indica
MMATASSELSIKSSNETSKSPMEEDKDLNLETALYKELWHACAGPLVTVPRQGERVYYFPQGHIEQVEASTNQFADQQMPIYDLRSKILCRVINVQLKAKPDTDEVFAQITLLPEPNQDENAVEKEPPPPLLPRFHVHSFCKTLTASDTSTHGGFSVLRRHAEECLPVLDMSQQPPTQDLVAKDLHGNEWRFRHIFRGQPRRHLLQSGWSVFVSSKRLVAGDAFIFLRCEKELRVGVRRAMRQQGNVPSSVISSHSMHLGVLATAWHAVSTGTMFTVYYKPRISPAEFIVPFDQYMESVKSNYSIGMRFKMRFEGEEAPEQRLVFG

SEQ ID NO: 5962 - protein, 531 aa, Enterococcus faecium
MAKELKFAEDARAAMLRGVDKLADTVKVTLGPKGRNVVLEKSYGSPLITNDGVTIAKEIELEDHFENMGAKLVSEVASKTNDIAGDGTTTATVLTQAIVREGLKNVTAGANPLGIRRGIELATKAAVEELHNISTVVDSKEAIAQVAAVSSGSDKVGHLIADAMEKVGNDGVITIEESKGIETELDVVEGMQFDRGYLSQYMVTDNDKMEAVLENPYILITDKKISNIQDILPLLEQILQQSRPLLIIADDVDGEALPTLVLNKIRGTFNVVAVKAPGFGDRRKAMLEDIAILTGGTVITDDLGLELKDATIENLGNASKVVVDKDNTTIVEGSGEKEAIEARVQLIKNQIAETTSDFDREKLQERLAKLAGGVAVVKVGAATETELKELKLRIEDALNATRAAVEEGMVSGGGTALVNVISKVSAVEAEGDVATGIKIVVRALEEPIRQIAENAGYEGSVIVDKLKNVELGTGFNAATGEWVNMVEAGIVDPTKVTRSALQNAASVSALLLTTEAVVADKPEPAAPAAPA

SEQ ID NO: 5963 - protein, 405 aa, Arabidopsis thaliana
MNSILSSVLPAPEDPVLSVIFACRDDPSPVKLNLSAGTYRTEEGKPLVLDVVRRAEQQLANDLSRDKEYLPLNGLPEFNKLSTKLILGDDSPALKENRVVTTQCLSGTGSLRVGAEFLATHNKESVIFVPNPTWGNHPRIFTLAGLSVQYFRYYDPKSRGLDFKGMLEDLGAAPPGAIVVLQACAHNPTGVDPTFEQWEKFRRLVRSKSLLPFFDSAYQGFASGSLDADAQAVRMFVADGGECLIAQSYAKNMGLYGERIGSLTIVCTSEDVAKKVENQVLLVVRPMYLTPPIHGASIVATILKNSDMYNDWTIELKGMADRIISMRQQLYAALEARGTPGDWSHIIKHIGMFTFTGLSEEQVRLMAKEYHIYMTYDGRISMASLSSTTVPQLADAIHAVVTRIA

SEQ ID NO: 5964 - protein, 254 aa, Triticum aestivum
  misc_feature (21)..(21): Xaa can be any naturally occurring amino acid
  misc_feature (28)..(28): Xaa can be any naturally occurring amino acid
  misc_feature (238)..(238): Xaa can be any naturally occurring amino acid
  unsure (1)..(254): unsure at all Xaa locations
VWPEWGRSPCCEKEHTNKGAXWTKEEDXQRLVAYIRANGEGCWRSLPKAAGLLRCGKSCRLRWMNYLRPDLKRGNFTDDEDELIIRLHSLLGNKWSLIAGQLPGRTDNEIKNYWNTHIKRKLLSRGMDPHTHRPLTAVDGGAASSRPAHIAVPARAAPPTMFALPTKQPPVDSSSSDGSSGATSTGEPRCPDLNLDLSVGPPAADTPTSHPVCLCRHLGLRGGAACSCRQGDSPGSQXGGGFRYFRPLEEGQYI

SEQ ID NO: 5965 - protein, 489 aa, Frankia sp. EAN1pec
MSSPLRSVLARRASARVPTGRRLPDAVVGVPGGRAGMRRTLADVTPDSTITTPSATSADASDGVPASPAGTVPGPAGGATSHANSPAASPAPLGWLGEAARLRAEAGLHRVLRPRAPRAERGPTGAPALPAHGSLQPWTDGDLLLDLAGNDYLGLARHPEVVEGGIAALRAFGAGSTGSRLVSGTTTLHGELESALAEHLGFGSALVFSSGYAANLAMLTVLTGPGDLVLSDERNHASLVDACRLSRADVLVTPHSDVDAVDEALATRSWRRAFVLTDSIFSADGDLAPLAALHAVARRHGAVLLVDEAHGLGVVGPGGRGALAAAGLAGEPDVIATVTLSKSLGSQGGAVLGPAALRDHLIDTARTFIFDTGLAPACAGSALAALRLLTRHPDLPERVQRRAREIAAATGAPEPAGAVVSVVLGDPERAVAVAAACRDAGVAVGCFRPPTVPAGTSRLRVAARADLTEADVSRAVGVITDAIGRFPAP

SEQ ID NO: 5966 - protein, 713 aa, Glycine max
KCNGVAEEVKIGKGGIVESSSVQQHIPQPQGAIICWERFLHIRSLKVLLVEYDDSTRHVVTALLRNCSYEVIDAANGLQAWKILEDLTNHIDLILTEVAMPGLSGIGLLYKIMGHKTRKNIPVVMMSSHDSMGLVFKCLSKGAVDFLVKPIRKNELKNLWQHVWRRCHSSSGSGSESGTQTQKSVKSKSLEKFDNNSGSNGEDDNGSIGLNNGDGSDNGSGTQSSWTKHAVEVDSPKPVSHWDKIAECPDSTCAQVVHSNAEIGENKVVPLAAKECPEQKEQLVKTAGSKHSNAPDVGPSKFNDQINRGQLDLNCENQSSKLRCKGLSLSDAITSTSDSQMHSGGFEALYKKPKSSDIENKDTNNDEELPSLELSLKRLRGVEDAGIAIQDDRNVLRRSDQSAFSRYNAALNPKKSPTGCVGSNSPHNNSLEVTKKDSSHDIQSHSSGNPPNQNSNGASNNIDMGSTTNNAYAKSAVISEPAVASTTKCLYQTSAYQPEKNNLVCTSQQVVLHNTEDTTATMLAPPKLDRHKDSAAPDFHLHCENHNCIADNMKHQLPPDHDAESIKKMATAAPHCGSSNAVEVLVEGNVGNHSINRSASGSNNGSNGQNGSSTAVNAGGTNMKSNNGLTGNSGSGDASGSVSANRVDQNKTSQREAALTKFRQKRKERRERCFHKKVRYQSRKRLAEQRPRFRGQFVRQSSNENASEATTDS

SEQ ID NO: 5967 - protein, 183 aa, Glycine max
LECAVCLNEFRDDETLRLIPKCCHVFHSDCIDAWLANHSTCPVCRANLAPKPEDAPSSVEIQLSDPARPIGPNEPGHDPNYINPVEEREGEQNRIVTEPPRVLDDPNRARPVRSKSTGFGIARLFPRSHSTGHSLVRPGEDCERFTLRLPEEVRDRLVRSATLNRTKSCGMTWQLESSERRGY

SEQ ID NO: 5968 - protein, 294 aa, Fusobacterium nucleatum subsp. nucleatum ATCC 25586
MRILLVSGFLGAGKTTFIKELAKNINLEFVVLENEYADIGIDRDFLDEKNLNVWEMSEGCICCSMKGDFKSSIKRIYSEINPEYLIIEPTGVGMLSSIIENIREINNNDIEILSPLTLIDITSFNEYLKTFNDFFYDNLKNTGKVILTKLESFNSFDVESIKSEILKTNSNLEIITTDYRYFPKEWFGEILNKNIDNKIIDKSFSLKTHINLRTFSKENVNLKTMDELGLLLNRLVNGDFGKIYRAKGIVKIDGYWGKFNLVYKNFEMEPITDAKGTKIVIIGNNLDIKNLKNI

SEQ ID NO: 5969 - protein, 487 aa, Sinorhizobium meliloti 1021
MNPETTAVPYERLGILIDGRWIYEAERSTEVVDPATGQTIARLPFAADGEIAEAVASSQRAFESWKDRSPLERGRILRRFADLARKHADEIARNMTRDQGKPLSEAIGEIRFAADHADWHAEEARRIYGRVIPARDPRVQQMVLREPVGVCIAFTPWNFPFSQALRKVVAALASGCTIILKGPGESPSSTVAIGRLMQEAGLPDGCLNILWGDPAHLSETLLAAPEVRKISFTGSVEVGKHLASLAGRHMKRSTMELGGHAPVILFDDADIEAAADALAGQKVRNAGQVCISPTRFYVQAKGHDRFLARFAEKIASTRVGNGFQESVQMGPLCHGRRVAAMEGFIQDAREQGAEIVTGGERVGNAGFFYAPTVVAAGTDELRLMKEEPFGPIAVVTPFGDFDEVIRRANSLPFGLASYVFTGSSSRAQNAARALAAGMVSVNHFGLALPETPFGGINDSGYGSEGGSETFDGYLNTKFVTRFDQIPQ

SEQ ID NO: 5970 - protein, 461 aa, Sinorhizobium meliloti 1021
MNDRPNSLHALDKQSLVHPYTNLAVHQETGPHVITGGDGIYVVDDEGKRYIEGLAGLFCAGLGFSEQRLVEAATRQLKTMPFYHSFAHKSTEPGIRLAEKLLSIAPVPMSKVFFAGSGSEANDTAIKLIWYYNNALGRPEKKKIISRRKAYHGVTVATASLTGLPFNHRDFDLPIANILHTDCPHYWRFAETGETEEDFATRMANNLEAIILEEGPETIAAFFAEPVMVSGGVITPPKTYFEKVQAVLRKYDILLIADEVICGFGRTGNMFGSETYGLKPDMISCAKQLSAAYMPISALMINAKIADALVDQSRKIGTFSHGFTYGGHPVAAAVALEALTIYEEIDIVGHVRSVAPAFQDRVRKLGEHPLIGEARGVGLVAGLEFVKDKATRENFPPAWQVANQAGKFATARGVLTRGLGDMVSLCPAMIIDDEQIDDLMTRMGLALDDTLAWARAQGHVG

SEQ ID NO: 5971 - protein, 414 aa, Clostridium tetani E88
MLKMKRVVITGMGAVTPLGNDVNTFWNNIKLGTCGIDFIKNFNTEGFKVKLAAEVKDFEPSDVIEKRELKRMDKYCQFAVVAAEEAIKDANLNLDNIDKDKFGVVVGSGIGGIETIEKQYKTLMEKGPNRVHPLFIPMIISNMAAGNIAIRYGAKGICTTVVTACATGTNSIGEAYRMIQNGTSDVMIAGGTEASITPLAMAGFTSLTALSKSEDPTRASIPFDKERNGFVMGEGSGILILESLEHAQKRGAKIYAEMVGYGATCDAYHITSPAPGGEGASRAIRLAIDEAKISPREISYINAHGTGTEYNDKFETEAIKDVFGEYAINIPISSIKSMTGHLLGAAGAVEAITSVKSICEGFVPPTIGYKIKDEECDLDYVPNKGRYQEIKYAMSNSLGFGGHNAIILFKKWSD

SEQ ID NO: 5972 - protein, 354 aa, Oncidium Gower Ramsey
MGIENKGTVAVTGASGYVGSWLVMKLLQKGYEVRATVRDPTNFEKVKPLLDLKGSNELLSIWKADLNDINESFDDVTRGCVGIFHVATPMNFQSKDPENEVIKPAINGMLGILRSCKRAGTVKRVIFTSSAGTVNVEEHQAEVYDESSWSDLEYITRVKMTGWMYFLSKTLAEKAAWEFVRDNDIHFITIIPTLVMGSFLISGMPPSMITALSLITGNEAHYSIIKQAQFVHLDDLCDAHIFLFEHPEANGRYICSSHDSTIYGLAKKLKNRYVTYAIPQKFKDIDPDIKSVSFSSKKLMDLGFKYKYTMEEMFDDAIKACRDKNLIPLNTEKMVSAAEKFNEIKEKFCLVNNE

SEQ ID NO: 5973 - protein, 436 aa, Photorhabdus temperata
MHLQNTWREEYIKCQTLYARHPLFTKIKVRLSMLAVKKSSKLDNVCYDIRGPVLKEAKRLEEEGNKVLKLNIGNPAPFGFEAPDEILVDVIRNLPTAQGYSDSKGLYSARKAIMQHYQARNMLDVSVEDIYIGNGVSELIVQAMQALLNTGDEMLVPAPDYPLWTAAVSLSSGKAVHYMCDEGSDWFPDLDDIRNKITPRTRGIVIINPNNPTGAVYSKALLLEIVEIARQHNLIIFADEIYDKILYDDAEHHSIAALAPDLLTVTFNGLSKTYRVAGFRQGWMVLNGPKKHAKSYIEGLEMLASMRLCANVPMQHAIQTALGGYQSISEFILPGGRLYEQRNRAWELINQIPGVSCVKPKGALYMFPKIDAKRFNVHDDQKMVLDLLLQEKVLLVQGTAFNWPEPDHFRIVTLPRLDELEMAIQKFARFIGKYHQ

SEQ ID NO: 5974 - protein, 495 aa, Pyrus pyrifolia
MASSASENRLLLSKIATNEKHGENSPYFDGWNKYNQNPFHLTENPEGVIQMGLAENQLSFDLVEEWIRKNPKASICTAEGIEKFRNVANFQDYHGLPEFRQAIATFMSKARGGRVTFDPHRVVMSGGATGANELVMFCLADRGDAFLIPSPYYPAFYRDLGWRTGVQIVPVDCDSSNNFKITKEALEAAYEKAQNNNINVKGLIITNPSNPLGTTLDKDTLESLVTFINQKNIHLVCDEIYAATVFSSPKFTCITEVIQNMNCNPNLIHIVYSLSKDMGFPGLRVGIVYSYNDDVVNIGRKMSSFGLVSSQTQHMLASMLSDEDFVEKFLTTSAKRLAKRHGVFTDGLEEVGINCLKSNAGLFCWMDLRRLLKDQTFDGEMVLWRVIVNEVKLNVSPGSSFKCVEPGWFRVCFANMDDDTVEVALKRIRAFVGQGKKAQEQAQVKSPKKRWQSNLRLSFSSSSRRFEQEGVSVMSPRMMSPHSPMPHSPLLRATT

SEQ ID NO: 5975 - protein, 334 aa, Oncidium Gower Ramsey
MRSGLQSEIQVSNISNCNFIANFEKVKPLLDLKGSNELLSIWKADLNDINESFDDVTRGCVGIFHVATPMNFQSKDPENEVIKPAINGMLGILRSCKRAGTVKRVIFTSSAGTVNVEEHQAEVYDESSWSDLEYITRVKMTGWMYFLSKTLAEKAAWEFVRDNDIHFITIIPTLVMGSFLISGMPPSMITALSLITGNEAHYSIIKQAQFVHLDDLCDAHIFLFEHPEANGRYICSSHDSTIYGLAKKLKNRYVTYAIPQKFKDIDPDIKSVSFSSKKLMDLGFKYKYTMEEMFDDAIKACRDKNLIPLNTEKMVSAAEKFNEIKEKFCLVNNE

SEQ ID NO: 5976 - protein, 354 aa, Oncidium Gower Ramsey
MGIENKGTVAVTGASGYVGSWLVMKLLQKGYEVRATVRDPTNFEKVKPLLDLKGSNELLSIWKADLNDINESFDDVTRGCVGIFHVATPMNFQSKDPENEVIKPAINGMLGILRSCKRAGTVKRVIFTSSAGTVNVEEHLAEVYDESSWSDLDFITRVKMTGWMYFLSKTLAEKAAWEFVRDNDIHFITIIPTLVVGSFLISGMPPSMITALSLITGNEAHYSIIKQAQFVHLDDLCDAHIFLFEHPEANGRYICSSHDSTIYGLAKKLKNRYVTYAIPQKFKDIDPDIKSVSFSSKKLMDLGFKYKYTMEEMFDDAIKSCRDKNLIPLNTEKMVSAADKFNEIKEKFCLVNNE

SEQ ID NO: 5977 - protein, 714 aa, Candida albicans SC5314
MSKKNPGDPRVKKNAFVHKLYTMLHDPALSHLIWWTNRNGEQNTFALCPGKEFADCLTQYFKHGNVASFVRQLHMYGFHKVSDPLPITYPPNGNNNNNNNNKEVPPVWEFKHSSGRFKRGDETSLVYIKRRSSSNHTSGSTIYAEPIYNPLLTNPYNQPQFMYQDYSMGPPVEVQQFYNYQNQPLMYYQQPPGQVPPPPPPSLPPHQQPEMALQYHQYNNYQQPPPAPPAPPPQPGNVLFGYQQVAPPQQPGSTVQQIPANAPPTLDQTQPLSYTPQLEYQQQQYPQPPLPPPPPQLQLQTSPGIPKVNDNLSRPSPNEQHLQFRKIWPDENNEANSKPRNPSLMFDPLLRVNSEGSPKTQPNHSVSLLNNEVRSESSTSSSSTTVTSTALPPPSAIDRSVSLVGGSPFDLSSRMNNQQSFNRTPSISTPPTQNGRLPKISSPLIPSNTESQSPTMVTGTDNDVGVTSKGSTSIISVSKKPSVFSNSLQERLRPSMFEYHPIGNNLSKDVLTIPKISTNSNSGSRTTSQSSMSSASALSSKKSSLSSISSTHGNLSILNSTNYRSTSVGGSGSGPFSTSTSTSTTSPTLSSLLHHPQHEPQNSTIANGTSIRSSISSSQSISSPPLTTTTTTTTTDQRQLSNSPISRQQQQQPNNNTNKKVSVTSLLLPSHSQSQGYAQPLYKSSVIAEEENSTTSSGGGYRSKSDDDTDNMNK

SEQ ID NO: 5978 - protein, 2118 aa, Mycobacterium leprae TN
MRAANVTPVAVIGMACRLPGGIDSPQRLWEALLRGDDLVTEIPKERWDADLYYDPEPGVPGRSVSRWGAFLDDVGGFDCDFFGMTEREAIAIDPQHRLLLETSWDAIEHAGLDPATLAGSATGVFVGLTHGDYELLSADCGATEGPYGFTGTSNSFASGRVAYTLGLHGPAVTVDTACSSGLMAVHQARGSLDCGESDLALAGGVVVTLEPRKSVSGSLQGMLSPTGRCHAFDVAADGFVSGEGCVVLLLKRMPDAERDGDRILAVLRGTAANQDGHTVHIAAPSEQAQIAVYHKALAVGGVDPTTVGLIEAHGTGTPVGDPIEYASLAAVYGTAGRCALASTKTNFGHMQSTSGPLGMMKAILALQHGVVPKNLHFTRLPDQLAEITTELFVPQVNTPWPVDVQQPRRAAVSSYGMSGTNVHAILEQAPENSGKDSPAVSKVNGPLLFPLSATSVEQLRATAARMADWVDEHGSGTKHTGLWDLGYTLSRRRGYRPVRTMVLASSFAELSRGLREIAGSEIPYQSAVGQDDRGPVWVFSGQGSQWAGMGAELFAKEPVFAAAIAAMEPVIVEESGFSVTEALTVAEKVTGIDRVQPTIFAIQVALAATMKSYGVYPGAVIGHSLGEAAAAVAAGALSCEDGLRVICRRSQLMSRVAGSGAMASVELPGQQVLSELSIRGLSDVVLAVVASPTSTVVGGDTQAIRHLLAAWQAQDVMVREVAVDVASHTPQVEPILDDLVETLADLKPTEPKVPYYSATLWDPRERPSFTGEYWAENLRYTVRFAAAVQAALKDGFRVFGELAPHPLLTYAIEQNAASLDMPVSALAAMRREQELPFGLRGFIADVHSAGALVDFSVQYPNGCLVDAPLPTWTRRELMLSRESVDHPAHGAAVQAVHPLLGAHVHLFEEPERHVWQGRVGTEAHPWLGDHQIHDVAAFPGAAYCEMALTAARVTLGEASEVRDIKFEQTLLLDRETMASSAATVSAPGVLEFAVETYEEGERVRRASAVLRALEDRVNQQPASHSIDALIASHPLRTEGADLRATFDAIGIQYGLAFSGLTAVYTAAGTNEDVSTVLAEVALPGAIRSQQASYTSHPALLDACFQSVIVAPEVQKAGAGGLLLPVYVRRLLNYHSMRNAQYCLTRVKTSRAGECEVDLEVLDQSGAVLLLVEGLRLAGGASEHECANRVLDERLFTVEWEPRELPEVTQRERGSWLVLGASAEDPLVQQLGDALNADGGHCTAVSLPLGQIDTAQLCSLLSRDGVSSSIGHGALKGLTGVVVVTAPPATVAESPALRRGRDYVSHLITIVREISELPGERPRLFVVTRNAASIKTGDLANLEQVGLRGLIRVIDSEHPYLSVTQIDVEETNQATIATQVARQLRSGSDEDETGWRDGEWYTARLRPGPLRQAERRTVVVQNEHDGMRLEIRTPGDLDSLEFVAFDRVPPGPGEIEVAVTASTVNFADVLVAFGRYPTFEGYCQLLGIDFAGVVSAVGLNVTDHKVGDRVGGVSRNGCWTTFVICDARHAVTLSPEVPLEEAAAVPTVAATAWYGLHDLARISQTDKVLIHSGTGGVGQAAIAIARAAGCEIFATAGSPQRRQLLRDKGIEHVYDSRSLEFAEQIHRDTKGYGVDVVLNSLPGAAQRAGIELLAFGGRFVEIGKRDIYGDTRLGLFPFRRNLSLYAVDLALLTYTHPDTVRRLLTTVYQRTAEGVLPVPQTTHYPIHNTANAVRLVAGAGHTGKVLLDVPHTGSSVAVVPPEQVRTFRADGAYIVTGGLTGLGLFLGTEMAAAGCGRIVLNSRSAPNPQAQETIERLRAGGADIQVECGDIAEPRVADRLVVAATQSGLPVRGVLHAAGVVEDATLTNVTDDLIDRCWAPKVYGAWNLHQALQEGKTAQLLDWFCSFSTAAALVGSPGQGAYAAANSWLDGFSYWRRAQGLASTTIAWGAWGELGLATALAEMAGVAIAPTEGARVFQTLLRYNRPYSCYAPIMETPWLKSFAQHSRFAEAFRSISQGQKDKSKFLAELKVLPRDEWPSMIRRLVSEQISLLLRRTIDPDRLLSDYGLDSLGNLELRTRIETETGIRISPTKITTIRSLAEHLCEELAATEAESAVTAT

SEQ ID NO: 5979 - protein, 130 aa, Wolbachia endosymbiont strain TRS of Brugia malayi
MSYNEKILDHYENPRNVGSLDKNDPSVGTGLVGAPSCGDVMKLQIKVNDKGVIEDAKFKTFGCGSAIASSSLLTEMIKGKTIEDVTKIKNTQIVEELSLPPVKVHCSVLAEDAIKAAIHDYQSKHSKNES

SEQ ID NO: 5980 - protein, 318 aa, Zea mays
TRGRTRGLPFQFPHTHVSAHSLLQFRQLVIINRTQSSRFHSRMLLNPASETSVLDTIRQHLLEEPAAAEARPADESFGSLVADQWSGSLPFRTDDADDMVVFGVLQDAFAYGWLPDGSFVHVKPEPVRSPDSSSYHPCSYDGSPCFGLLDPEPPLTPGTTTPGRGQEEAAAAMARGKHYRGVRQRPWGKFAAEIRDPARNGARVWLGTYDTAEDAALAYDRAAYRMRGSRALLNFPLRIGSGDKRPSPAPPEPATSSDSSSSASGSHKRRKRGEAAAANMAMALVPPPSQLNRPPQPWFPAAPVEQAAMAPRVEQIVV

SEQ ID NO: 5981 - protein, 403 aa, Gilbertella persicaria
GKSTTTGHLIYKCGGIDKRTIEKFEKEAAELGKGSFKYAWVLDKLKAERERGITIDIALWKFETPKYHVTVIDAPGHRDFIKNMITGTSQADCAILIIAGGTGEFEAGISKDGQTREHALLAFTLGVRQLIVAINKMDTTKWSEARYNEIVKEVSSFIKKIGFNPKAVPFVPISGWHGDNMLDESTNMPWFKGWNKETKAGAKTGKTLLEAIDAIEPPVRPSDKPLRLPLQDVYKIGGIGTVPVGRVETGVIKAGMVVTFAPAAVTTEVKSVEMHHETLTEGLPGDNVGFNVKNVSVKDIRRGNVCSDSKNDPAKEAGSFTAQVIILNHPGQIGAGYAPVLDCHTAHIACKFAELIEKIDRRSGKKMEDAPKFIKSGDSAIVKMIPSKPMCVEAYTDYPPLGR

SEQ ID NO: 5982 - protein, 86 aa, Enterococcus avium
VILEVTQEEEKTVGGLVLASAAKEKPQTAKVVAVGEGNVLENGQKSPMPVAVGDMVMFEKYAGTEVKYEGNEYLIIAAKDIMAIVE

SEQ ID NO: 5983 - protein, 426 aa, Gongronella butleri
VVVIGHVDSGKSTTTGHLIYKCGGIDKRTIEKFEKEAAELGKGSFKYAWVLDKLKAERERGITIDIALWKFETPKYHVTVIDAPGHRDFIKNMITGTSQADCGILIIAAGTGEFEAGISKDGQTREHALLAFTLGVRQLIVAINKMDTTKWSEARFNEIVKEVSSFIKKIGFNPKSVPFVPISGWHGDNMLEESVNMPWYKGWNKETKAGAKSGKTLLDAIDAIDPPTRPSDKPLRLPLQDVYKIGGIGTVPVGRVETGVIKAGMVVTFAPANVTTEVKSVEMHHEQLVEGLPGDNVGFNVKNVSVKDIRRGNVCSDSKNDPAKEAGSFTAQVIVLNHPGQIGAGYAPVLDCHTAHIACKFAELLEKIDRRSGKKLEDAPKFVKSGDSAIVKMVPSRPMCVEAYTDYPPLGRFAVRDMRQTVAVDV

SEQ ID NO: 5984 - protein, 485 aa, Lycopersicon esculentum
MVSISKNNQKQQLLSKIATNDGHGENSPYFDGWKAYANNPFHLTDNPTGVIQMGLAENQLCFDLIQEWVVNNPKASICTVEGAENFQDIAIFQDYHGLPEFRQAVARFMEKVRGDRVTFDPNRIVMSGGATGAHEMLAFCLADPGDAFLVPTPYYPGFDRDLRWRTGVQLFPVVCESCNDFKVTTKALEEAYEKAQQSNIKIKGLLINNPSNPLGTLLDKDTLRDIVTFINSKNIHLVCDEIYAATVFDQPRFISVSEIVEDMIECNKDLIHIVYSLSKDLGFPGFRVGIVYSYNDTVVNIARKMSSFGLVSAQTQHLLASMLSDEVFIDKFIAESSERLGERQGMFTKGLAEVGISTLKSNAGLFFWMDLRRLLKEATFDSELELWRIIINEVKLNVSPGCSFHCSEPGWFRVCFANMDDETMRIALKRISYFVLQPKGLNNIAAIKKQCSRRKLQISLSFRRLDHEFMNSPAHSPMNSPLVRT

SEQ ID NO: 5985 - protein, 532 aa, Enterococcus avium
MAKDIKFSEDARAAMLRGVDKLADTVKVTLGPKGRNVVLEKSYGSPLITNDGVTIAKDIELDDHFENMGAKLVSEVASKTNDIAGDGTTTATVLTQAIVREGLKNVTAGANPMGIRRGIELATKAAVEELHSISKVVDSKDAIAQVAAVSSGSEEVGKLIAEAMEKVGNDGVITIEESKGIDTELDVVEGMQFDRGYLSQYMVTDNDKMEAALENPYILITDKKISNIQDILPLLEQVLQQSRSLLIIADDVDGEALPTLVLNKIRGTVNVVAVKAPGFGDRRKAMLEDIAILTGATVITEDLGLDLKEATIENLGTAGKVVVDKDNTTIVEGSGDKAALNDRVEMIKRQIGETTSDFDREKLQERLAKLAGGVAVVKVGAATETELKELKLRIEDALNSTRAAVEEGIVSGGGTALVNVIKKVSELEAEGDAATGIKIVVRALEEPVRQIAENAGFEGSVVIDKLKNADQGTGFNAASGEYVNMIDAGIVDPTKVTRSALQNAASVSALLLTTEAVVADKPVEGGAAAAPA

SEQ ID NO: 5986 - protein, 426 aa, Halteromyces radiatus
VVVIGHVDSGKSTTTGHLIYKCGGIDKRTIEKFEKEAAELGKGSFKYAWVLDKLKAERERGIAIDIALWKFETPKYHVTVIDAPGHRDFIKNMITGTSQADCGILIIAAGTGEFEAGISKDGQTREHALLAFTLGVRQLIVAINKMDSTKWSEARFNEIIKEVSGFIKKIGFNPKSVPFVPISGWHGDNMLDESTNMPWYKGWKKETKAGEKSGKTLLDAIDAIDPPTRPSDKPLRLPLQDVYKIGGIGTVPVGRVETGIIKAGMVVTFAPANVTTEVKSVEMHHEQLTEGLPGDNVGFNVKNVSVKDIRRGNVCSDSKNDPAKESASFTAQVIVLNHPGQIGAGYAPVLDCHTAHIACKFAELLEKIDRRSGKKLEDAPKFVKSGDSAIVKMIPSKPMCVEAYTDYPPLGRFAVRDMRQTVAVGV

SEQ ID NO: 5987 - protein, 402 aa, Acinetobacter sp. ADP1
MTDVILNPTKYVNSTRIPVTVLSGFLGSGKTTLLNYILNHQKDMRIAVIVNDMSEINIDAEDVRRHVNLNRGSDQLIEMSNGCICCTLRADLLEQVSLLARQAEFDYILIESTGISEPMPVAETFAFLDQHGFSLSELARLDTMVTVVNGENFEQMIQSRDKIEMDHPDEVSVQRHLSDLLLEQVEYANVILVSRIDIIGEDRFKHLRSLLAELNPSAKIFPISHGAIDLNNILNTYTFDLPDLVKSPGWMKHLDQEQAVHSESETYGISSWVYSARLPFHPQRFQHFLAHPWTNGTLLRCKGYIWNAKCYQDIGMLVQTGGQFEWEIVGRWWNFINQSDWPQDHYRRDSIFEKWDERTGDCRQEIVFIGQNIDWNTLKHQLDDCLLTLQEIEDGPEAWLNY

SEQ ID NO: 5988 - protein, 483 aa, Lycopersicon esculentum
MVSISKNNQKQQLLSKIATNDGHGENSPYFDGWKAYANNPFHPTDNPTGVIQMGLAENQLCFDLIQEWMVNNPKASICTVEGAENFQDIAIFQDYHGLPEFRQAVARFMEKVRGDRVTFDPNRIVMSGGATGAHEMLAFCLADPGDAFLVPTPYYPGFDRDLRWRTGVQLFPVVCESCNDFKVTTKALEEAYEKAQQSNIKIKGLLINNPSNPLGTLLDKDTLRDIVTFINSKNIHLVCDEIYAATVFDQPRFISVSEMVEEMIECNTDLIHIVYSLSKDLGFPGFRVGIVYSYNDTVVNISRKMSSFGLVSTQTQHMLASMLSDEIFVEKFIAESSERLGKRQGMFTKGLAQVGISTLKSNAGLFFWMDLRRLLKEATFDGELELWRIIINEVKLNVSPGCSFHCSEPGWFRVCFANMDDETMRIALRRIRNFVLQTKGLNNIAAIKKQCSRSKLQISLSFRRLDDFNSPAHSPMNSPLVRT

SEQ ID NO: 5989 - protein, 290 aa, Zea mays
MEDERNTQQHQGGEAQQDAADQVDVKDRGLLDSLLGRKKHDDDQEKKKQTDELATGMEKVTVSEPEKHGHKEEEHEVVGEKKEGLLAKLHRTSSSSSSSSDEEEEAIDENGEIIKRKKKKMGLKEKLKEKLPGHKDGHHTAAPSPAPAPVETHAHHQEEAHRPHVVPTPAPPPPPHVHQHDHGVVVQDDVKTGTPPHAPEEEKKGLLDKIKEKLPGGHNKKPEAAAAAAPAPPVHAPAPAPQAENVSSPDGKEKKGLLGKIMDKIPGYHKSSAEEADHKADAAGEHRTSS

SEQ ID NO: 5990 - protein, 551 aa, Arabidopsis thaliana
MGCLCINLKKKVKKPTPDISGEQNTEVKSREITPKEQPRQRQPAPRAKFQIVVQPHKLPLPLPQPQEKQKLINHQKQSTLQQPEPILGRPFEDIKEKYSLGRELGRGQFGITYICTEISSGKNFACKSILKRKLIRTKDREDVRREIQIMHYLSGQPNIVEIKGAYEDRQSVHLVMELCEGGELFDKITKRGHYSEKAAAEIIRSVVKVVQICHFMGVIHRDLKPENFLLSSKDEASSMLKATDFGVSVFIEEGKVYEDIVGSAYYVAPEVLKRNYGKAIDIWSAGVILYILLCGNPPFWAETDKGIFEEILRGEIDFESEPWPSISESAKDLVRNMLKYDPKKRFTAAQVLEHPWIREGGEASDKPIDSAVLSRMKQLRAMNKLKKLAFKFIAQNLKEEELKGLKTMFANMDTDKSGTITYDELKSGLEKLGSRLTETEVKQLLEDADVDGNGTIDYIEFISATMNRFRVEREDNLFKAFQHFDKDNSGFISRQELETAMKEYNMGDDIMIKEIISEVDADNDGSINYQEFCNMMKSCSQSHQSKLVQPN

SEQ ID NO: 5991 - protein, 86 aa, Enterococcus casseliflavus
VIIEVAKEEEKTVGGIVLASAAKEKPQTGTVIAVGEGRTLENGEKAPVAVNVGEQVMFEKYAGTEVKYEGTEYLIVAAKDIIAVVE

SEQ ID NO: 5992 - protein, 365 aa, Helicostylum elegans
GKSTTTGHLIYKCGGIDKRTIEKFEKEAAELGKGSFKYAWVLDKLKAERERGITIDIALWKFETPKYMVTVIDAPGHRDFIKNMITGTSQADCAILIIAGGTGEFEAGISKDGQTREHALLAFTLGVRQLIVAINKMDTTKWSEARYTEIVKEVSSFIKKIGFNPKSVPFVPISGWHGDNMLEESKNMGWFKGWTKETKAGSKTGKTLLEAIDAIEPPVRPSDKPLRLPLQDVYKIGGIGTVPVGRVETGIIKAGMVVNFAPAAVTTEVKSVEMHHETLTEGLPGDNVGFNVKNVSVKDIRRGNVCPDSKNDPAKEAGSFTAQVIILNHPGQISNGYSPVLDCHTAHIACKFAELIEKIDRRSGK

SEQ ID NO: 5993 - protein, 531 aa, Enterococcus casseliflavus
MAKEIKFAEDARAAMLRGVDKLADTVKVTLGPKGRNVVLEKSYGSPLITNDGVTIAKEIELEDHFENMGAKLVSEVASKTNDIAGDGTTTATLLTQAIVREGLKNVTAGANPLGIRRGIEMATKVAVEELHNISSIVDSKEAIAQVGAVSSGSEKVGQYIADAMEKVGNDGVITIEESKGIETELDVVEGMQFDRGYLSQYMVTDNDKMEAALENPYILITDKKISNIQDILPLLEQILQQSKPLLIIADDVDGEALPTLVLNKIRGTFNVVAVKAPGFGDRRKAMLEDIAILTGGTVITEDLGLELKDATIDNLGQASKVVVDKDNTTIVEGAGEKEAIDARVQLIKNQIADTTSDFDREKLQERLAKLAGGVAVIKVGAPTETELKELKLRIEDALNATRAAVEEGMVSGGGTALVNVINKVAEIETDGDAATGVKIVLRALEEPVRQIAENADYEGSVIIDKLKNADLGVGFNAATGEWVNMLEAGIVDPTKVTRSALQNAASVAALLLTTEAVVADKPEPAAPAAPA

SEQ ID NO: 5994 - protein, 417 aa, Hesseltinella vesiculosa
GKSTTTGHLIYKCGGIDKRTIEKFEKEAAELGKGSFKYAWVLDKLKAERERGITIDIALWKFETPKYHVTVIDAPGHRDFIKNMITGTSQADCGILIIAAGTGEFEAGISKDGQTREHALLAFTLGVRQLIVAINKMDSTKWSEARFNEIVKEVSAFIKKIGFNPKSVPFVPISGWHGDNMLEESGNMPWYKGWNKETKAGAKSGKTLLDAIDAIDPPTRPSDKPLRLPLQDVYKIGGIGTVPVGRVETGVIKAGMVVNFAPANVTTEVKSVEMHHEQLVEGVPGDNVGFNVKNVSVKDIRRGNVCSDSKNDPAKEAGSFTAQVIVLNHPGQIGAGYAPVLDCHTAHIACKFAELLEKIDRRSGKKLEDAPKFVKSGDSAIVKMIPSKPMCVEAYTDYPPLGRFAVRDMRQTVAVGV

SEQ ID NO: 5995 - protein, 147 aa, Pisum sativum
GFTDKQEALVNSSSEFKQNLPGYSILFYTIVLEKAPAAKGLFSFLKDTAGVEDSPKLQAHAEQVFGLVRDSAAQLRTKGEVVLGNATLGAIHVQKGVTNPHFVVVKEALLQTIKKASGNNWSEELNTAWEVAYDGLATAIKKAMKTA

SEQ ID NO: 5996 - protein, 784 aa, Bacillus cereus G9241
MKGVILAGGKGRRLRPLTCNTPKPMLPLLEKPVLEYNIELLRQHGIREIAITVQYMSTAIKQYFGDGSKWGVNLYYFEDSPPLGTAGSIKQAEKFLDETFVVISGDALTDFQLSEGITFHEQQKRMVTMFVKEVENPLSFGLVVMNKEQEVTRYIEKPSWNEVVSNIVNTGIYIMEPEIFSYIPPREFFDFSQDVFPLLANKNALFAYLSEGYWLDIGTFDQYRQAQFDLLMKKLQVPIPYTEVLPMVWMGEGVTIGKGTKIHGPSFIGEGAKIGAGAVIEPYSIIGKNSIVSSYSHLQKSIVFANAHIGQYCELLETTIGEHTMVEDDVTLFQKSIVADHCHIGKSTVIKQKGKLWPYKAIDSYSVVGSAGVQESEKSAGWLQKSRIVGRGNVEITPQFIVKVAMAYGSLLAKGESILIGSQEHIETTSYKNLFLHAIHGIGIHTMECKEMNESLFQYSIQDLQCAGGVFIQLENEKEVVIKLYGKDGVQLTYKQQKVIEQVYMSESFYYVCEKEMGRNKLVHVSLHDYIEAVLERIDIEKIQKQKFHLLINKRNDMLQHLLMLFLQRLGCTVTWIYAGEQKDHVKALMKSSKANMALMFSEQGNYFELYDNHSNIYQGTDFEEVDIPDLLLESTGNIYPMSLKLGECYLLFYTQDEKKSFQARWKRDILYRIGKLFELIALQGKTFLSIVEQSPPLYLLCDEVVCSWNEKGKVMRKLLADMERKEEGIFEGVQFKYTEKEWSYIVSDTKQPKFLVYSHARNPVIARENMKNLIEKIRQYQKV

SEQ ID NO: 5997 - protein, 414 aa, Glycine max
  misc_feature (396)..(396): Xaa can be any naturally occurring amino acid
  unsure (1)..(414): unsure at all Xaa locations
MVAANERVVAVIMVGGPTKGTRFRPLSFNVPKPLFPLAGQPMVHHPISACKRIPNLAQIYLLGFYEEREFALYVSSISNELKVPVRYLKEDRPHGSAGGLYHFRDLIMEEDPSHIFLLNCDVCCSFPLPEMLDAHKRYGGMGTILVVKVSAESASEFGELVADPTTNELLHYTEKPETFVSDRINCGVYVFTPDIFTAIEGVSTQRKDRANLRRVSSFEAMQPDTRSLPVNYVRLDQDILSPLAGKKQLYIYETNDFWEQIKTPGMSIKCSGLYLAQFRYTSPHLLANGDGIKKASITGDVYIHPSAKVHPSAKIGPSVSISANARIGAGTRLKHCIILDDVEIKENALVGHAIVGWKSSIGRWACVEASGDYNAKLGVTILGESVTVEDEVVVLXIVLPHKTLNLGVQDEILL

SEQ ID NO: 5998 - protein, 143 aa, Vicia faba
GFTEKQEALVNSSSQLFKQNPSNYSVLFYTIILQKAPTAKAMFSFLKDSAGVVDSPKLGAHAEKVFGMVRDSAVQLRATGEVVLDGKDGSIHIQKGVLDPHFVVVKEALLKTIKEASGDKWSEELSAAWEVAYDGLATAIKAA

SEQ ID NO: 5999 - protein, 153 aa, Lupinus luteus
GALTESQAALVKSSWEEFNANIPKHTHRFFILVLEIAPAAKDLFSFLKGTSEVPQNNPELQAHAGKVFKLVYEAAIQLQVTGVVVTDATLKNLGSVHVSKGVADAHFPVVKEAILKTIKEVVGAKWSEELNSAWTIAYDELAIVIKKEMNDAA

SEQ ID NO: 6000 - protein, 176 aa, Glycine max
MGMVTSYMGGAEVASKGMSMLTGTLYDRIIKQRNIRELNEFQIAILDIFNAINMALPGKHYDAPAHDDIQKCYETWTKSEGAEKKKEAFTRFISENVNLSKADESMMITGIVAPPVAMVAKRTGQTVPQLSVIKAIPDVAFVPGATILALIAIKLTKRMAFKNIPSLPQKEEDTPS

SEQ ID NO: 6001 - protein, 277 aa, Leuconostoc mesenteroides subsp. mesenteroides ATCC 8293
MTFHELSDGQHLPEIGFGTYKLNGFAGTQSILSAVDAGYRLFDTAFNYQNEGTVGQAIQQSHVNRDELIITSKLPGKYYSSYQDSIDLIQESLYRSKLDYFDLYLLHWPNPIDDHYLEAWHTLIQAQKFGLVKSIGVCNFLPEHIERLKKETNILPVVNQVELHPYFNQQELREYNNTQNILTQAWSPLGRASAILKDPVLVELAKKYHKNIGQLVLKWEISLGVLPIPKASSYARQKGNLDLFDFEISSSDMQRINDLTKPDGRTNNQDPAVYQEF

SEQ ID NO: 6002 - protein, 598 aa, Silicibacter sp. TM1040
MRQPLMRRQHHKGPHQGRAKDIHPKHPDRKPRRSQRAQHADTDQVATACADRAPKRHIQYGYQHARSLRAGRAGCQVLRLIPAPMAALHQTQAPTSSSLNASQMRQLPVGGSLAPARPPTRVMTSKSKRCVMNPSRRHVLAGLTACASLPALPRFAQASTETNVESAAHRLTLAPARQQIAPTDYPATDLWCVNGTMPGETLRRTQGARLVVEVDNQLPQATSLHWHGIRIDNAMDGVPGVTQDPIQPGTRFTYDFALPDAGTYWYHSHAQSVEQVERGLQGALIIEEPDAPDVDQDLPLVIDDLRVTAEAAIDANFAVPHDLSHAGRMGNILLCNGKMVADHPVKTGDRLRLRLINSANARIFTLGLQGLEGWVMAYDGMPLATPEALPDRLLLAPAQRVDLFVDVTAAAGEDAFLVQFERDGGYELARFPVASGTRARRPAPSALPPNPDFPIDLPSARSVDLITEGGAMAWLSGARFKGEDLSGQDLAQLGQFWAFNGSAGRPPEPFVTARLGETIRIRMVNDTRFPHAMHLHGMHFSEVRADGSLGPLRDTLLMLQGETREIAFQAHNAGDWLFHCHMLSHHAAGMGTWVRVTA

SEQ ID NO: 6003 - protein, 500 aa, Petunia x hybrida
MVLSKTVSQSDVSIHSTFASRYVRTSLPRFKMPDNSIPKEAAYQIINDELMLDGNPRLNLASFVTTWMEPECDKLMMDSINKNYVDMDEYPVTTELQNRCVNMIAHLFNAPLEDGETAVGVGTVGSSEAIMLAGLAFKRKWQNKMKAQGKPCDKPNIVTGANVQVCWEKFARYFEVELKEVKLSEGYYVMDPEKAVEMVDENTICVAAILGSTLNGEFEDVKRLNDLLVEKNKETGWDTPIHVDAASGGFIAPFIYPELEWDFRLPLVKSINVSGHKYGLVYAGIGWVVWRNKDDLPDELIFHINYLGADQPTFTLNFSKGSSQVIAQYYQLIRLGYEGYKNVMENCQENASVLREGLEKTGRFNIISKEIGVPLVAFSLKDNRQHNEFEISETLRRFGWIVPAYTMPPNAQHITVLRVVIREDFSRTLAERLVRDIEKVLHELDTLPARVNAKLAVAEEQAAANGSEVHKKTDSEVQLEMITAWKKFVEEKKKKTNRVC

SEQ ID NO: 6004 - protein, 326 aa, Sinorhizobium meliloti 1021
MRAAWYGKNGAARDVLEVGGLPDPLPGPGEVRVRIHASGVNPSDVKARAGRPLIAPRMIPHSDGAGIIDAVGTGVAGERIGERVWTWNAAWRRSNGTAAEYVVLPQDQAVHLPDNVSFEEGACLGIPALTALRAVTTDGGVFGKTVLVTGGAGAVGAYAIQFARLYGAACIITTVSSSEKAEICTRLGADHTINYRTEEVVDRIGGITHGRGVDRVIEVDAATNVAMLPGIIARDGLCVIYGSSKPVVSFEFFPMILAGAAARFFIVYEMSPEARTETVSALQGQLASGLLRHHIAGTYALDDIAAAHEAVESGKTIGNVVVSLGQ

SEQ ID NO: 6005 - protein, 313 aa, Leuconostoc mesenteroides subsp. mesenteroides ATCC 8293
MKNKVVVIGSLNIDTIQMIDRLPNQGETITVNNQASTFGGKGANQAVAAARQGADVTMIGAVGDDDRGRAFKQLLSDEGISTDYIFTKSQFTGSATIMLEPDGHNTIMVYGGANMNLTSADVEKARNIIANADVIVAQLEVPTEAIVAGFNIAKENGVLTILNPAPITSHLDSNIISSTDLIIPNETEAAALAHTEPTTKQSSLTPLTSKLNKVGFSNVVVTLGSDGVYYHVNGSADILPVFKVNAVDTTAAGDTFIGTFSANIDDNLSNLPSVIRRSCFASSIAVSRSGAIASIPNKKDVDAGLLANAAMAE

SEQ ID NO: 6006 - protein, 465 aa, Silicibacter sp. TM1040
MIRSLALPLTIALATALPLASPAETKIPQSQTEISLGFAPLVKEAAPAVVNIYAKIIRQDRARSPFADDPFFDDFFRQFAQPRPRVQNSLGSGVILSEDGIVVSNYHVVGEASDIRVVTNDRREYQAEVILADQASDLAILQLQDAEGLPHLGLRNSDEVEVGELTLAIGNPFGVGQTVSSGIISGLARTGTGGGQGFGYYIQTDAPINPGNSGGALIDVNGDLIGINTRILSRSGGSNGIGFAIPANLVREFVRQARAGAEEFQRPWAGMTGQPVDSDLAEALGLGQVDGMLISELHPQSPFVEAGFEVGDVVLAVDGEPVNSPSEMAFRLSVAELGGTSAVTRVRQGKTDTVEVALIEAPDTPAADPITLSERTPMPGLVVGRVNPQVITKMQLPLSTEGVVVMDPGPYAGRGGVRAGDLIFAINGEAVEAPEDVANLLMSSDRWMRMDLMRQGQRVSLRFRL

SEQ ID NO: 6007 - protein, 405 aa, Aspergillus fumigatus
MATTPINGHATKSPSLDAAEARRLKHNHADVVIIGAGVLGCALAVALGRQGRSVILLEASLKEPDRIVGELLQPGGVQALEKLGLRDCLEGIDSIPVKGYYVSYFNDPVPIPYPKPTPASPPPEGRCFHHGRFVMKLREAAMACPNVSVVETKATDLVTCSHTQQVLGVECTSKDNVRACYFGHLTVVADGYASKFRKQHHPHTPKVSSRFWGLELIDTKLPMPYYGHVLLSDNAPILLYQIGTHETRILVDIPENLPSASVKNGGVKSHMRNVVLPSLPESVQPAFIAALEQGQLRSMPNSFLPAATNTTPGLVILGDALNMRHPLTGGGMTVAFNDVVTLRNLLSPEKVPNLGDTKRVMKQLSTFHWERKKAASVINILAQALYSLFAADSAFHLLLAPSSLH

SEQ ID NO: 6008 - protein, 260 aa, Triticum aestivum
  misc_feature (219)..(219): Xaa can be any naturally occurring amino acid
  unsure (1)..(260): unsure at all Xaa locations
MSTAAANWCYATVVAPRARSSTIVASLGTPAPSNSSSFRPKLIRNTPVQAAPVAPALMDAAVERLKTGFEKFKTEVYDKKPDFFEPLKAGQAPKYMVFACADSRVCPSVTLGLEPGEAFTIRNIANMVPSYCKNKYAGVGSAIEYAVCALKVEVIVVIGHSRCGGIKALLSLKDGADDSFHFVEDWVRIGFPAKKKVQTECASMPFDDQCTVLEKEAVXNVSLQNLLTYPFVKEGVSNGTLKLVGGHYDFVSGKFETWEQ

SEQ ID NO: 6009 - protein, 619 aa, Glycine max
MATLTASSNLVSRNSHVHHGPTTASYESKAVAMGLRSLKQTNTHSGLRIFNPVDELLNRTPIKTNAMQAMRKGPQGKNAWPKGIITCGMTFIIIGTEVAPWCKTGGLGDVLGGLPPALAGFGHRVMTIVPRYDQYKDAWDTSVVIEVKVGDRTEKVRFFHCYKRGVDRVFVDHPWFLEKVWGKTGQKLYGPTTGNDYEDNQLRFSLFCQAALEAPRVLSLNSSKYFSGPYGEDVIFVANDWHTALIPCYLKSMYQSRGIYTNARVVFCIHNIAYQGRFAFADFSLLNLPDQFKSSFDFIDGHVKPVVGRKINWLKAGLIESWFVITVSPNYAKELVSGPDKGVELDNILRKIDDDGRLVGIVNGMDVQEWNPTTDKYIAVKYDVSTVLEAKALLKEALQAEVGLPVDRNIPLIGFIGRLEEQKGSDILAEAIPQFIKQNVQLVALGTGKKQMEKQLEELEISYPDKARGVAKFNVPLAHMIIAGADFILVPSRFEPCGLIQLQAMRYGSVPIVASTGGLVDTVKEGFTGFQMGAFNVECDAVDPADVDAISKTVKRALAVYGTPAFTEIIKNCMAQDLSWKGPAKEWEEVLLSLGVPGSEPGSDGEEIAPQAKENVATP

SEQ ID NO: 6010 - protein, 438 aa, Oryza sativa
MSTTKVKRRVGKYELGRTIGEGTFAKVKFARDTETGDPVAIKILDKEKVLKHKMVEQIKREISTMKLIKHPNVVRIYEVMGSKTKIYIVLEYVTGGELFDTIVNHGRMREDEARRYFQQLINAVDYCHSRGVYHRDLKPENLLLDSYGNLKVSDFGLSALSQQIKDDGLLHTTCGTPNYVAPEVLEDQGYDGAMADLWSCGVILFVLLAGYLPFEDSNLMTLYKKISNAEFTFPPWTSFPAKRLLTRILDPNPMTRVTIPEILEDEWFKKGYKRPEFDEKYDTTLDDVYAVFNDSEEHHVTEKKEEPEALNAFELISMSAGLNLGNLFDSEQEFKRETRFTSKCPPKEIVRKIEEAAKPLGFDVQKKNYKLRLEKVKAGRKGNLNVATEILQVAPSLHMVEVRKAKGDTLEFHKFYKNLSRTLKDVVWKSDDLQNQLS

SEQ ID NO: 6011 - protein, 764 aa, Xanthomonas campestris pv. campestris str. ATCC 33913
MILATDLDGTFLAGSAEHRHQLYRLVDQHPEIRLIFITGRGLEAVMPLLTDPTIPRPDYVVCDVGATVVDGHTLQPLQPLQSMIDAHWPGEQVVAQAMRAFPQLQRQDMPQERRCSYFCDPHTLAPLRAQIEQTARALGCDVLYSADRYLDILPPDTDKGRTLGALARQLELPRERILVAGDTLNDLSMYLAGFRGVCVGDSEAALTQATAQLDATYHASAPGCGGILEAIAHFGLLADDDPHVPAVQAPRKGGAELVMVYHRLPYDEVVEHGELVRRAPRSPNGIIPSLLSFFEGGQRGSWVAWSVDDPKRGPFQTHTEVDAQRYPTLTAARVPLSKSEVDIFYKRFSKEAFWPMLHVFWERARFREDDWQVFLAVNRKFAQATSAEAAHGATVWIHDYNLWMVPAYLRELRPDLKIAFFHHTYFPSADVFNVVPWRREIIGSLMCCDYVGFHIPRQVENFVDVVRGVMPVERLAQESCAPRFLTYGCAVGLDTMTTCLRVADRDVALGAHPVGTDLRRIRAALSKPDVRNDIFKLRREIGARKLVLSVERLDYTKGTLAKLEAFERLLDSQRQLLGKVTLLMVCVPAAREMTIYRTLQTQIEQAVGRINGRFSRLDWTPVRFFAQALPFEQVVAHYAAAQVMWITPLRDGLNLVAKEFVAVQGIEGGSGVLVLSEFAGAAAELKGAVLTNPHDPADLAAGLLQALAMPDDEAAGRLRQLYDSVEYYNIDHWGRDFLDAVARSRGAHARVPLAAASTVAEPVA

SEQ ID NO: 6012 - protein, 496 aa, Wolbachia endosymbiont strain TRS of Brugia malayi
MKSKVLSIFACFLISFSSYANMFDWGTRKVSDTNTYVCNCNQGLADLVEELIPAVVNISSEQIIKQENNNRTKTPSFAPRNNFFDDFREFFEHFDQFFTDRNPSINREVVLLGSGFIIDKSGTIVTNYHVIKNAQDITVTMNDNTYFKAEVLGYDARTDLAVLKIKADKDLSFVTFSNSDKARVGDTVMAIGNPFGLGGSVSTGIISARSRDISIGTTSEFIQTDAAINRGNSGGPLFDLNGKVIGINTAIYSPSESGGNVGIGFAIPSNLAISIIDTLKSGKKIKHGWLGVQVQPITREFAESLGLKDVKGALVANIVKDSPAEKGGIKVGDILLEFDGKKIDRMTQLPQMVSRTEPGKKVQIKLLRKGKEVNVKVVIEESVNDSKDSNTEENRSISDYITGLTVSNLPKEPKESKNDTPIKGVIVTNVDSNSNATLRGIKKGDIIIQLDGVDIENTENFQKQVDLAIKKSGKDSIMLLIYRNGNQFFTSIKLKK

SEQ ID NO: 6013 - protein, 86 aa, Enterococcus durans
VVIEVAKEEEKTVGGIVLASSAKEKPQTGTVIAVGEGRLLENGEQVPAAVKVGDQVMFEKYAGTEVKFEGKEYLIVAGKDIMAIVE

SEQ ID NO: 6014 - protein, 365 aa, Hyphomucor assamensis
GKSTTTGHLIYKCGGIDKRTIEKFEKEAAELGKGSFKYAWVLDKLKAERERGITIDIALWKFETPKYNVTVIDAPGHRDFIKNMITGTSQADCAILIIAGGTGEFEAGISKDGQTREHALLAFTLGVRQLIVAINKMDTTKWSEARYNEIVKEVSSFIKKIGFNPKAVPFVPISGWHGDNMLDESTNMPWFKGWNKETKAGAKTGKTLLEAIDAIEPPTRPSDKPLRLPLQDVYKIGGIGTVPVGRVETGTIKAGMVVNFAPAGVTTEVKSVEMHHETLSEGLPGDNVGFNVKNVSVKDIRRGNVCSDSKNDPAKESASFTAQVIILNHPGQISAGYAPVLDCHTAHIACKFAELIEKIDRRSGK

SEQ ID NO: 6015 - protein, 660 aa, Pirellula sp. 1
MQQKTSLRYGDCYLRAPTNAFMPEWPNWIHRLSSSSCGTRAEHVRSTRTHSPVSFPLGIESVAASGSHLCDPPINREPLGSKPPQENYIVAKQIVFDDDARGPLLAGVSKLARAVRSTLGPRGRNAVLDKGWGSPKVTKDGVTVAEDIELDDPFENLGAQLVKEAASKTNDVAGDGTTTATVLSEAIFREGLKMVATGADPMALSRGIQKAVDTAIAQIAKMATPINEKSKSDIKQVATIAGNNDPQIGDVLADAFTKVGKNGVITVEEGRSNETYVDVVEGMQFDRGFLSPHFVTNQDEVTVELDDCYILLFEEKISNNKKMIPLLEAISKAKKPLLIIAEDTEGEALATLVVNKMRGILSACAVKAPGYGDRRKAILGDIAALTGGKAIFKDLGIDLESVKVSDLGRAKQIRITSEATTIVGGAGKKADIEGRVAQIRREIEATDSDYDREKLQERLAKLAGGVAQINVGAATETEMKERKALIDDARAATQAALEEGIVPGGGTALLRCRAAVEKLEKATEGDQKLGVRIIRNVLDQPMRAIANNAGLDGAVVVNRVLQMKGKTEGYDANADKYCDLVAAGIVDPAKVVRTSLTNAASVAALLLTTESLVTEIPVEEEPAGGDHHDHGMGGGMPDMGGMGMGGMGGMGGMGGMGGMM

SEQ ID NO: 6016 - protein, 531 aa, Enterococcus durans
MAKELKFSEDARAAMLRGVDKLADTVKVTLGPKGRNVVLEKSYGSPLITNDGVTIAKEIELEDHFENMGAKLVSEVASKTNDIAGDGTTTATVLTQAIVREGLKNVTAGANPLGIRRGIELATKAAVEELHNISTVVDSKEAIAQVAAVSSGSDKVGHLIADAMEKVGNDGVITIEESKGIETELDVVEGMQFDRGYLSQYMVTDNDKMEAVLENPYILITDKKISNIQDILPLLEQILQQSRPLLIIADDVDGEALPTLVLDKIRGTFNVVAVKAPGFGDRRKAMLEDIAILTGSTVITDDLGLELKDATIENLGNASKVVVDKENTTIVEGSGEKTAIEARVQLIKNQIAETTSDFDREKLQERLAKLAGGVAVVKVGAATETELKELKLRIEDALNATRAAVEEGMVSGGGTALVNVIGKVSAVDAEGDVATGIKIVVRALEEPIRQIAENAGYEGSVIVDKLKNVELGTGFNAATGEWVNMVEAGIVDPTKVTRSALQNAASVSALLLTTEAVVADKPEPAAPAAPA

SEQ ID NO: 6017 - protein, 386 aa, Bacillus licheniformis ATCC 14580
MKDSVFIFSPSYQTYQFHQDHPFNQLRVYVTYDLLNTVGAFEPGETIAPRAATETELELVHTGDYIRAVQLAGAGKLPAAESENYGLGTEDTPVFAGMHEAASLLVGGTLTAADYVMTGKARHALNLGGGLHHGFRGRASGFCVYNDSSVVIRYLQKKYHAKVLYIDTDAHHGDGVQFTFYDDPSVCTVSIHETGRYLFPGTGQVQERGHGEGYGYAFNIPLDAFTEDESFLDSYRTAVSEIAEFFKPDVILSQNGADAHYYDPLTHLCTTMKIYEEIPKLAHELAHTYCSGRWIAVGGGGYDIWRVVPRAWARIWLEMKGMEPEEKMPEKWLKKWGKQASVRLPANWSDPEDLYPPIPRKTEITEKNAQTVAKALYPIRSAQRTT

SEQ ID NO: 6018 - protein, 365 aa, Kirkomyces cordense
GKSTTTGHLIYKCGGIDKRTIEKFEKEAAELGKGSFKYAWVLDKLKAERERGITIDIALWKFETPKYNVTVIDAPGHRDFIKNMITGTSQADCAILIIAGGTGEFEAGISKDGQTREHALLAFTLGVRQLIVAINKMDTTKWSEARYNEIVKEVSSFIKKIGFNPKSVPFVPISGWHGDNMLDESTNMPWFKGWTKETKAGSKTGKTLLEAIDAIDPPSRPIDKPLRLPLQDVYKIGGIGTVPVGRVETGVIKAGMVVTFAPAAVTTEVKSVEMHHETLSEGLPGDNVGFNVKNVSVKDIRRGNVCSDSKNDPAKESASFTAQVIILNHPGQISAGYAPVLDCHTAHIACKFSELIEKIDRRSGK

SEQ ID NO: 6019 - protein, 248 aa, Yarrowia lipolytica CLIB122
MPKVISKNESQLVAEAAAAEIIRLQNESIAATGAFHVAVSGGSLVSALRKGLVNNSETKFPKWKIFFSDERLVKLDDADSNYGLLKKDLLDHIPKDQQPQVFTVKESLLNDSDAVSKDYQEQIVKNVPLNGQGVPVFDLILLGCGPDGHTCSLFPGHALLKEETKFVATIEDSPKPPPRRITITFPVLKAAKAIAFVAEGAGKAPVLKQIFEEPEPTLPSAIVNKVATGPVFWFVSDSAVEGVNLSKI

SEQ ID NO: 6020 - protein, 86 aa, Enterococcus hirae
VIIEVAKEEETTVGGIVLASSAKEKPQTGTVVAVGEGRLLENGEKVPAAVKAGDQVMFEKYAGTEVKFEGKEYLIVAGKDIMAIVE

SEQ ID NO: 6021 - protein, 426 aa, UMBELOPSIS RAMANNIANA
VVVIGHVDSGKSTTTGHLIYKCGGIDKRTIEKSEKEAAELGKGSFKYAWVLDKLKAERERGITIDIALWKFETPKYHVTVIDAPGHRDFIKNMITGTSQADCGVLIIAAGTGEFEAGISKDGQTREHALLAFTLGVRQLIVAINKMDTTKWSGDRYDEIVKEVSSFIKKIGFNPKSVPFVPISGWHGDNMLEESTNMPWFKGWTKETKAGSKSGKTLLEAIDAIDPPTRPTDKPLRLPLQDVYKIGGIGTVPVGRVETGIIKAGMVVTFAPTMVSTEVKSVEMHHEQLVEGVPGDNVGFNVKNVSVKDIRRGNVCSDSKNDPAKEAGSFTAQVIVLNHPGQIGAGYAPVLDCHTAHIACKFAELVEKIDRRSGKKLEDNPKFVKSGDSAIVKMVPSKPMCVEAYTDYPPLGRFAVRDMRQTVAVGV

SEQ ID NO: 6022 - protein, 531 aa, Enterococcus hirae
MAKELKFAEDARAAMLRGVDKLADTVKVTLGPKGRNVVLEKSYGSPLITNDGVTIAKEIELEDHFENMGAKLVSEVASKTNDIAGDGTTTATVLTQAIVREGLKNVTAGANPLGIRRGIELATKAAVEELHNISTVVDSKEAIAQVAAVSSGSEKVGHLIADAMEKVGNDGVITIEESKGIETELDVVEGMQFDRGYLSQYMVTDNDKMEAVLENPYILITDKKISNIQDILPLLEQILQQSRPLLIIADDVDGEALPTLVLNKIRGTFNVVAVKAPGFGDRRKAMLEDIAILTGGTVITDDLGLELKDATIENLGNASKVVVDKDNTTIVEGSGDKTAIEARVQLIKNQIAETTSDFDREKLQERLAKLAGGVAVVKVGAATETELKELKLRIEDALNATRAAVEEGMVSGGGTALVNVINKVSAVEAQGDVATGVKIVVGALEEPIRQIAENAGYEGSVIVDKLKNVELGTGFNAATGEWVNMVEAGIVDPTKVTRSALQNAASVSALLLTTEAVVADKPEPAAPAAPA

SEQ ID NO: 6023 - protein, 426 aa, Mortierella chlamydospora
VVVIGHVDSGKSTTTGHLIYKCGGIDKRTIEKFEKEAAELGKGSFKYAWVLDKLKAERERGITIDIALWKFETPKYYVTVIDAPGHRDFIKNMITGTSQADCAILIIAGGTGEFEAGISKDGQTREHALLAFTLGVKQLIVAVNKMDTTKWSQDRFEEIVKEVSTFVKKVGYNPKAVAFVPISGWHGDNMLEESTNMPWFKGWTKETKAGSQKGKTLLEAIDAIEPPSRPTEKPLRLPLQDVYKIGGIGTVPVGRVETGIIKAGMVVTFAPSNVTTEVKSVEMHHEVLTEGIPGDNVGFNVKNVSVKDIRRGNVCSDSKNDPAKEAASFNAQVIVLNHPGQISNGYAPVLDCHTAHIACKFAEILEKIDRRTGKAMEEFPKFIKSGDAAIVKFIPSKPLCVESFQEYPPLGRFAVRDMRQTVAVGV

SEQ ID NO: 6024 - protein, 86 aa, Enterococcus gallinarum
VIIEVAKEEEKTVGGIVLASAAKEKPQTGTVIAVGEGRTLENGEKAPVAVNVGEQVMFEKYVGTEVKFEGNEYLIVAAKDIIAVVE

SEQ ID NO: 6025 - protein, 426 aa, Gamsiella multidivaricata
VVVIGHVDSGKSTTTGHLIYKCGGIDKRTIEKFEKEAAELGKGSFKYAWVLDKLKAERERGITIDIALWKFETPKYYVTVIDAPGHRDFIKNMITGTSQADCAVLIIAGGTGEFEAGISKDGQTREHALLAFTLGVKQLIVAVNKMDTTKWSQDRFEEIVKEVSTFVKKVGYNPKTVAFVPISGWHGDNMLEESTNMPWFKGWTKEIKSGTQKGKTLLEAIDAIEPPSRPTEKPLRLPLQDVYKIGGIGTVPVGRVETGIIKAGMVVTFAPSNVTTEVKSVEMHHEVLTEGIPGDNVGFNVKNVSVKDIRRGNVCSDSKNDPAKEAASFNAQVIVLNHPGQISNGYAPVLDCHTAHIACKFAEILEKIDRRTGKAMEEFPKFIKSGDAAIVKMVPSKPLCVESFQEYPPLGRFAVRDMRQTVAVGV

SEQ ID NO: 6026 - protein, 473 aa, Frankia sp. EAN1pec
MTVSNATTTTPRPGDPPRTGHAGRVTDLLEREERALQARTPASEAMHTRALRTMTGGVPSSYQLRDPWPIYLTHGRGSLVWDVDGNEYSDFHNGYGSMVQGHAHPAIVRAVTERMALGSHFAMPTEDSVLVSEELARRFGLPQWRYVNSGSEATMDAIRIARGVTGRDTIVKIFGSYHGHHDYVMVSIGTPYGDIGPADHMNSLAYGAGIPQAVVDLTVPVPFNDAAAMERRIAALEAEGRKPACVIMEAAMMNLGVVLPEPGYLEAVREITRRHGIVLIFDEVKTGLCVAAGGAVERFGVLPDMVTLAKALGGGLPAGAIGATAELMAAVAEDRVKQVGTFNGNPLVMAAARASLTEVLTPDAYAHLDRLNDRLVDGCTAILARHGIAGYAVGISSKGCVHFTDAPIRDYTSFMAHQNAVLPELAWLYNANRQVLMAPGREEEWTLSVQHTDADVDRYLASLDAMAADLARG

SEQ ID NO: 6027 - protein, 467 aa, Pseudomonas aeruginosa PAO1
MGLNADWMQRDLNVLWHPCTQMKDHERLPVIPIRRGEGVWLEDFEGKRYIDAVSSWWVNVFGHANPRINQRIKDQVDQLEHVILAGFSHQPVIELSERLVKITPPGLDRVFYADSGSAGIEVALKMSYHFWLNSGRPRKKRFVTLTNSYHGETIAAMSVGDVALFTETYKSLLLDTIKVPSPDCFLRPDGMCWEEHSRNMFAHMERTLAEGHDEIAAVIVEPLIQGAGGMRMYHPVYLKLLREACDRYGVHLIHDEIAVGFGRTGTMFACEQAGIAPDFLCLSKALTGGYLPMSAVLTSETIYRGFYDDYQTLRAFLHSHTYTGNPLACAAALATLDIFEEDKVIEANRALSTHMARATAHLADHPHVAEVRQTGMVLAIEMVQDKASRTPYPWQERRGLKVFQHGLERGALLRPLGSVVYFLPPYVITPEQIDFLAEVASEGIDIATRDAVSVAVSDFHPDHRDPG

SEQ ID NO: 6028 - protein, 531 aa, Enterococcus gallinarum
MAKEIKFAEDARAAMLRGVDKLADTVRVTLGPKGRNVVLEKSYGSPLITNDGVTIAKEIELEDHFENMGAKLVSEVASKTNDIAGDGTTTATLLTQAIVREGLKNVTAGANPLGIRRGIEMATKVAVEELHNISSIVDSKEAIAQVGAVSSGSEQVGKYIADAMEKVGNDGVITIEESKGIETELDVVEGMQFDRGYLSQYMVTDNDKMEAALENPYILITDKKISNIQDILPLLEQILQQSKPLLIIADDVDGEALPTLVLNKIRGTFNVVAVKAPGFGDRRKAMLEDIAILTGGTVITEDLGLELKDATIDNLGQASKVVVDKDNTTIVEGAGDKSAIDARVQLIKNQIADTTSDFDREKLQERLAKLAGGVAVIKVGAPTETELKELKLRIEDALNATRAAVEEGVVSGGGTALVNVINKVAAIEADGDAATGVKIVLRALEEPVRQIAENAGYEGSVIIDKLKHADLGVGFNAATGEWVNMLEAGIVDPTKVTRSALQNAASVAALLLTTEAVVADKPEPAAPAAPA

SEQ ID NO: 6029 - protein, 330 aa, Lactobacillus helveticus
MKVLVIGGAGYIGSHAVRELVKEGNDVLVLDALYTGHRKAVDPKAKFYQGDIEDTFLVSKILRDEKIDAVMHFAAYSLVPESVKKPLKYYDNNVTGMISLLQAMNDANVKYLVFSSSAATYGIPKKLPITEDTPLNPINPYGETKMMMEKIMAWADKADGIKYTALRYFNVAGASSDGSIGEDHAPETHLIPNILKSAISGDGKFTIFGDDYDTKDGTNVRDYVQVEDLIDAHILALKHMMKTNKSDVFNLGTAHGYSNLEILESAKKVTGIDIPYTMGPRRGGDPDSLVADSTKARTVLGWKPKHENVDDVIATAWKWHKSHPKGYEDK

SEQ ID NO: 6030 - protein, 192 aa, Oryza sativa
MTVFTSLPSAPAASYVNVTRWYDHISALLRSSGVTAEGEGVKVESTACSVSPTADQKAPAADEEDDDDVDLFGEETEEEKKAAEERAAAVKASGKKKESGKSSVLLDVKAWDDGNRHGKAWRKLLRNFEDGGPALGWIQTLYQLGYCIKKFQIMMTIVDDLVSVDSLIEDYFYTEPANEFIQSCDIVAVNKI

SEQ ID NO: 6031 - protein, 410 aa, Coxiella burnetii
EFGESGPDPLITQQHMEELKKLYGRYQNAIKRYGKKAPATLKHQKALAELFSTFKLSIKQFNRLTGQLRRMLRAARAQERLIMSYCVVKAKTPRKKFIASFPHNETNMKWLEQYKNENKEQAKRLEKYSKEIYRAQRNLAQLEEQNNLNIQEIKEINRRVAIGEAKSRRAKKEMIEANLRLVISIAKKYTNRGLQFLDLIQEGNIGLMKAVDKFEYRRGYKFSTYATWWIRQAITRSIADQARTIRIPVHMIETINKLNRISRQILQETGIEATPEELGRRMDMPEEKVRKVLKIAKEPISMETPIGEDEDSNLGDFIEDINMESPVDFATSAGLMEATRRNFVYAYPARSQVLRMRFGIDMNTDHTLEEVGNNSDVTRERIRQIEAKALRKLRHPSRAEKLHSFIEVEE

SEQ ID NO: 6032 - protein, 145 aa, Phaseolus vulgaris
GAFTEKQEALVNSSWEAFKGNIPQYSVVFYTSILEKAPAAKNLFSFLANGVDPTNPKLTAHAESLFGLVRDSAAQLRANGAVVADAALGSIHSQKGVSNDQFLVVKEALLKTLKQAVGDKWTDQLSTALELAYDELAAAIKKAYA

SEQ ID NO: 6033 - protein, 478 aa, Francisella tularensis subsp. tularensis SCHU S4
MRRTKILATLGPASESREALTEMIKAGVNAVRCNFSHGSAEDHRKRVDLIRQIAKEQDTHVGILADLQGPKIRLSKFKNGSVEIKKGQKFTLDADLGINDGDENTVGIDYKELIQDVKKGDILLVDDGKIVLEVDSVKGNKAVTKVVVGGKVSNNKGINKKGGGLTAPALTEKDKEDIKIAAMLQVDFLAVSFVRDGKDMEYARQLVHEAGWRPAMVAKIERAEAVLEDNLKSIVDASDLVMVARGDLAVEIGDENVPTVQKLIISTARRNEKGSITATQMMESMIENSSPTRAEASDVANAVFDGTDAVMLSAETAVGKYPVETVSAMSRICKSAEKSKYTHISKKQKIADCDRIDHAVSVAAVKIANDIGAKGLIVLTEGGNTSRWMSRINTDLPIYALSRNATTLGAMTLFRGVVPIYFDSTRMSKLYVNRSACMELESRNLAKDGDIFVLTSGDSMGVHGSTNKIKVIIAGQVR

SEQ ID NO: 6034 - protein, 415 aa, Shewanella sp. MR-7
MSLIKQISADAAHAARTLAQLDESLKNTVLLDMARSLREKSYEIQSANLIDVHRATQDNLSPAMVDRLTLNQHRIEAMAQGIETIAALPDPVGRERFIGKRPNGLSISKMRVPLGVVCMIYEARPNVTADAGALCFKSGNAVILRGGKEALHTSQVIASILQAVLTAYGLPKALISVIPDPDRALMLELMQQREFIDVIIPRGGEGLINYVTENSSIPVIQHFKGVCHLYVDKDANQDIALDLLLNGKTQRTGVCNALEGLLVHKDIAPRFLPRVAKALAEHQVKINACPPAAAYFDACTYMAEEDFGQEYLDLEIAIRQVDSFEVATQHIAKFGSHHTEVICTDNELTAARFQRAVDASVVMVNASSRFSDGSELGLGAEIGIATTKLHAYGPMGLEALTTEKYLVSGTGQIRA

SEQ ID NO: 6035 - protein, 368 aa, Shewanella sp. MR-7
MTDSPRKRIVVKVGSALIAPHKQGCSSHYLLGIAQFITYCRVQGIQVVLVSSGSVAAGWHHFEGQTQPSVTVKKAMAAAGQADMMATWNKLFDFPTAQLLLTHGDLRNRERYISIRDTIFSLLEHGLMPIINENDAVTADKLKVGDNDNLSAMVAAAADADTLVICSDVDGLYDQNPHEHPNAKLIKQVTEINADIYAMAGGASSDVGTGGMRTKIQAAEKAISHGIETFIINGFNADSFSQLLKGQNPGTLFTPYEKPMQEHLHWMTHTSQAQGEVIVEDDFDLALDQHSEQLTSDDVVEVKGDFSVGDTILVRKGDGTKLAKAKSNYSSCLLSFITEQDDQAFASEFQQKTGPIISDKNIAILKSI

SEQ ID NO: 6036 - protein, 394 aa, Magnaporthe grisea
MSQNRPAAFNTLRMGEVIREKVQDGITGETRDLQYTQCKIVGNGSFGVVFQTKLSPSNEDAAIKRVLQDKRFKNRELQIMRIVRHPNIVQLKAFYYSNGERRDEVYLNLVQEFVPETVYRASRFFNKMKTTMPILEVKLYIYQLFRALAYIHSQGICHRDIKPQNLLLDPTTGILKLCDFGSAKILVENEPNVSYICSRYYRAPELIFGATNYTTKIDVWSTGCVMAELMLGQPLFPGESGIDQLVEIIKVLGTPTREQIRTMNPNYMEHKFPQIKPHPFNRVLRKADNNAIDLIARLLEYTPTERLGAIDAMVHPFFDDLRNPSTKLPDSRHQTGQVRDLPPLFDFNRHELSIAPQLNHQLVPPHVRPTLAAQGLDIDHFTPMRKEDMLARLD

SEQ ID NO: 6037 - protein, 317 aa, Streptomyces aureofaciens
MPPPRTRGAESGGAGPSADLFRQYLREIGRIPLLTAAEEVDLARRVEAGLFAEEKLGGAADLDSQLAVDLDRLVVMGRMAKRRLIESNLRLVVSVAKRYVGRGLTMLDLVQEGNLGLIRAVEKFDYARGYKFSTYATWWIRQAMSRALADQARTIRVPVHVVELINRVVRVQRRMLQERGYEPTAEEVAVHLELTPERVLEVLRLAQEPVSLHAPVGEEDDVALGDLIEDGDAASPVESAAFFLRCEHLEAVLSTLGERERKVVQLRYGLADGRPRTLEEIGRIFGVTRERIRQIESKTLNKLRDHAFADQLRGYLD

SEQ ID NO: 6038 - protein, 164 aa, Clostridium tetani E88
MKGVKFMKEIILAGGCFWGVEEYFSRIYGVVDTKVGYVNGVTKNPSYEEVCNGNTGYAEGCYIKFDESIIGLKRILDKFWDIIDPTILNRQGPDVGHQYRTGIYYYDKEDLDDILKSKDEISKKYDKPIVTEVEKVTYFYLAEEYHQKYLKKNPNGYCHINLDN

SEQ ID NO: 6039 - protein, 602 aa, Pseudomonas putida KT2440
MAETPRPAEHTSSLKIYFRLLSYVKPYVGIFLLSIVGFVIFASTQPMLAGILKYFVDGLSNPEAVLFPNVPYLRDLQLLQAVPLLIILIAAWQGLGSFLGNYFLAKVSLSLVHDLRVALFNKLLVLPNRYFDNHNSGHLISRITFNVTMVTGAATDAIKVVIREGLTVVFLFAYLLWMNWHLTLVMVAILPVIAVMVSIASKKFRKQSKKIQVAMGDVTHVASETIQGYRVVRSFGGEAYEQQRFGQASQSNTDKQLRMTKTGSLYTPMLQLVIYSAMAALMFLVLFLRGDSTAGDLVAYITAAGLLPKPIRQLSEVSSTIQKGLAGAESIFEQLDEAPEVDTGTVEKERVEGRLEVRNLSFTYPGTEREVLSDISFVAEPGQMIALVGRSGSGKSTLAALIPRFYHHDKGQILLDGVEIEHYRLRNLRRHVSQVTQHVTLFNDTVANNIAYGDLAGAPRADIEAAAADAYAKEFVDRLPKGFDTEVGENGVLLSGGQRQRLAIARALLKNAPLLILDEATSALDTESERHIQAALDHVMQGRTTLVIAHRLSTIEKADQILVMDQGRLVERGTHTELLAANGHYARLHAMGLDEPAKADIT

SEQ ID NO: 6040 - protein, 395 aa, Clostridium tetani E88
MMKEKAVIINKIDIIKSELIELGNNIHKKPELSFNEYNAVKNITTMLEKHGFNIEKGIGGLETSFRAEYNGNGPTVAFLAEYDALPEIGHGCGHNLIATMAVGAAIGLKEVSNYIDGKIVVLGTPAEEGGGGKIIMLKEGCFDDIDYVLMMHPCTRNLICRGGLATRVIGIKYYGKSVHSSFPEGGINALQAVIQTFNMIDQFRALFPVRTNVNGIITNGGNTSNIIPDYASCEFSIRAETVKDLKIVVEYVEHIVNTIEKLMKVKVKIEKSLIYAERYPNKYIDEKLRENAAKFDIKMKYPDANMKYGSSDIGNVSLKVPSIHSYIKIADKEVNSHSIEFTKVANTSTAYEQIIKAAKAMALTGFDIFTDETLRKNINDEFNRVVPKYEESDLK

SEQ ID NO: 6041 - protein, 167 aa, Borrelia burgdorferi
MLLQKTLCIVKPDGVRRGLIGDVVSRFERVGLKMVAAKMLIVDESLAKKHYLYDDIVFRHSEAVWNSLIKFISNSPVFTFVVEGVESIEVVRKLCGATEPKLAIPGTIRGDFSYHSFKYSNEKGFSIYNVIHASANEADAMREIPIWFKDNEILNYKRDDECEHYYC

SEQ ID NO: 6042 - protein, 375 aa, Arabidopsis thaliana
MPLSLQSPPCATLSASIRKGRWKTLAAGFSVTPLPAVNFSLRRSIPRILASASSSSSPASSSLEAGENNELNAVSAFSEIVPDTVVFDDFERFPPTAATVSSALLLGICGLPDTIFRNAVDMALADSSCAGLETTESRLSCFFNKAIVNVGGDLVKLVPGRVSTEVDARLAYDTNGIIRKVHDLLRLYNEIDVPHDRLLFKIPATWQGIEAARLLESEGIQTHMTFVYSFAQAAAASQAGASVIQIFVGRLRDWARNHSGDTEIESAIKSGEDPGLALVKRSYNYIHKYGYKSKLMAAAVRNKQDLFSLLGVDYVIAPLKVLQSLKDSPAIPDDEKYSFVRKLTPETATHYHFTNKELVKWDQLSLSSSMGPASV

SEQ ID NO: 6043 - protein, 101 aa, Pirellula sp. 1
MATAKKINLRPLDDRVVVQPSEAEETTAGGIVLPDSAKEKPQRGTVVAVGPGKLLDSGNRGELSVSVGDVVIYGKYGGSEIEVDGHEMKILRESDILAKIG

SEQ ID NO: 6044 - protein, 540 aa, Pirellula sp. 1
MAKQLLFEDHARARMLAGVEKLAKAVATTMGPTGRNVIIDKSFGGPTVTKDGVTVAKEIELEDRFENMGAKLVIEVAQKTSDLAGDGTTTATVLARAIFKEGLRNIVAGSNPTAIRRGIEKAVEAACDQLVEMGRPVSGKQEVAHVGAISANNDNVIGELLADALERVGKDGVITVEEGKSRNTEVEYVDGMQFDKGYVSPYFITDSSTMEASLEDALVLLYEKKVSNIRDLVPLLEKTAQTGQPLLIIAEDVDAEALTLLVVNKLRGTLNVCAVKAPGFGDRRKAMLGDIATLTGGTLISEDLGMQLENVTLEHLGRAKKVTVDKSNTTIVEGAGKREDIDKRVAQIRAQIEQTDSDYDKEKFQERLAKLAGGVAVISVGAETEAEMKQTKARLEDALHATRAAVEEGILPGGGVALVHCREAVEAAKKKAKGDEKIGVDIVLGALDAPMRQIADNGGIDGSVVVDEVLQKNDPKIGFNAHTGEYTDMVKAGVIDPVKVVRTALTNAASIAGLLLTTEALVTNFEQEDKDKRPVEGMVS

SEQ ID NO: 6045 - protein, 210 aa, Triticum aestivum
  misc_feature (208)..(208): Xaa can be any naturally occurring amino acid
  unsure (1)..(210): unsure at all Xaa locations
MTTLLDALRQTTQVDCDTLDANVAHQLGPFVDCTSNQAIAFSEISRPLAGEPLLHYDALVKDAIEKARGALKEFQGSATFEEFVVQILMVKLQLLIVPNVTGYVHIQTNPKLSYSTDGTMSDAHRIVNIFKALAPEFDTKRVCIKIPATWEGLQACRALEVEGIATLATTMFCMEQATLAADAQCTYIAPYVNELKVHFEAGYVDEHXAF

SEQ ID NO: 6046 - protein, 204 aa, Chromobacterium violaceum ATCC 12472
MSPADIKLYDFALSGHSHRARLMLSLLDLEYEAVPVNLREGEHKQPAFLKLNRFGQIPVLVDGDEVIADSNAILVYLARRYGHGDWLPSDPVREARVQRWLSAAAGPLAFGAAQARLHKWRGVPLDYELAASRARALLQVMDEELAERPFLAGDAATIADVALYTYTAHAPEGDIPLAPYPHVRAWLARVEALPGFVAMPPANA

SEQ ID NO: 6047 - protein, 374 aa, Ralstonia solanacearum
MALRSLIADARRLVVKVGSSLVTDDGRGLDQAAIARWAAQIAALRAAGKEVVLVSSGAIAEGMQRLGWTRRPKEIHELQAAAAVGQMGLAQVYESEFARHGIRTAQVLLTHGDLADRERYLNARSTLLTLLGLGVVPIINENDTVVTDEIKFGDNDTLGALVTNLIEGDALIILTDQRGLYTADPRKHPDARFVDEAQAGAPELEAMAGGAGSSIGKGGMLTKIVAAKRAAKSGAHTVIASGREADVLARLAGGEAIGTQLRAPTGRMAARKQWMIDHLQLRGRVVLDAGAVDKLTAGGKSLLPIGVTEVQGEFARGEVISCVDTAGREVARGLTNYSAAEARLIARKASSEIEAVLGYVSAAELVHRDNLVLL

SEQ ID NO: 6048 - protein, 529 aa, Fragaria x ananassa
MGNCCVTPPQTGSPLKNKKNKPNPFAIDYVVANGGKLSVLKNPTGTEIEQTYELGRELGRGEFGITYLCTDKATNENYACKSISKQKLRTAVDIEDVRREVEIMKHLPKHPNIVSLKDTYEDDNAVHLVMELCEGGELFDRIVSRGHYTERAAAAVTKTIVEVVQMCHKHGVMHRDLKPENFLFANKKETAPLKAIDFGLSVFFKPGERFSEIVGSPYYMAPEVLRRNYGPEVDVWSAGVILYILLCGVPPFWAETEQGVAQAIIRSVVDFKRDPWPKVSDNAKDLVKKMLDPDPKRRLTAQQVLDHTWLQNAKRAPNVSLGETVRARLKQFSVMNKLKKSALKVIAEHLSQEEVAGIQEGFKIMDTSNKGKINIDELRVGLHKLGHQIPDADVHILMEAGDVDNDGYLDYGEFVAISVHLRRMGNDDEHLRKAFDFFDQNKSGFIEVEELRTALATEVDDHVEDVISAIISDVDTDKDGKISYEEFATMMKAGTDWRKASRQYSRERFNSLSLKLMRDGSLEGKTESK

SEQ ID NO: 6049 - protein, 382 aa, Nostoc punctiforme PCC 73102
MTQTISINDSGRLQLTPLEIPSRLLLGPGPSNAHPTVLQAMNTSPVGHLDPAFLALMDEIQSLLRYVWQTENPLTIAVSGTGTAAMEATIANAVEPGDIVLIGVAGYFGNRLVDMAGRYGADVRSITKPWGQVFNLDELKTALETHRPAILALVHAETSTGARQPLEGVADLCREFGTLLLVDTVTSLGGVPLFLDAWGVDLAYSCSQKGLSCPPGASPLTMSARAVEKLQQRQSKVANWYLDMLLLGKYWGAERTYHHTAPINLYYALREALRLLAEEGLANSWQRHQKNVEYLWEGLENLGLSMHVEQEYRLPTLTTVRIPAGVDGKAIARQLLNEHNIEIGGGLGELAGLVWRVGLMGFNSRKESVDQLLAALRQVLPK

SEQ ID NO: 6050 - protein, 265 aa, Oryza sativa
MGRGKIEIKRIENKTSRQVTFCKRRNGLLKKAYELAILCDAEIALIVFSSRGRLYEFSNVNSTRSTIERYKKASASTSGSAPVIDVNSHQYFQQEAAKMRHQIQTLQNANRHLIGESIGNMTAKELKSLENRLEKGISRIRSKKHELLFSEIEYMQKREADLQNENMFLRAKVAEAERAEHDDQQAAEDDEMAPAPAVGGGSSSGTELEALPATFDTREYYQPAPPVSMLAAAAAAAAAQYSSDHHQTALHLGYFKVDSGKGGLL

SEQ ID NO: 6051 - protein, 582 aa, Candida albicans SC5314
MTIEYTWWKDATIYQIWPASYKDSNGDGIGDIPGIISTLDYLKNLGIDIIWLSPMYKSPMEDMGYDISDYESINPDFGTMEDMQNLIDGCHERGMKIICDLVVNHTSSEHEWFKQSRSSKSNPKRDWYIWKPPRIDAKTGEKLPPNNWGSFFSGSAWEYDELTDEYYLRLFAKGQPDLNWENEECRQAIYNSAMKSWFDKGVDGFRIDVAGLYSKDQSFKDAPIVFPDQIYQPSGELISNGPRIHEFHQEMYRQVTSKYDVMTVGEIGHCDRNEALKYVSAQRKELNMMFLFDLVEVGSNNQDRFRYNGWNLIDFKKAIQNQSDFIKGTDAWSTVFIENHDQPRCISRFGNTKSLDLINKTGKLLAMLQASLTGTLFIYQGQEIGMTNLPRSWSIDEYKDINTINYYKDFKEKYGNEPDFKQREEKLLDVINLVARDHARSPVQWNDDDTASYGGFSTHKPWTRINDNYKQINVANELKDPNSILKFYQSVLKLRKEYKDLFIYGSFDILDFNNEKLFTYVKSHKEGNESPKAYVTLNFSNESIPFKPLIEGEFKLMTTNVQQSDYDESVLSPYEGRIYIVD

SEQ ID NO: 6052 - protein, 426 aa, Mortierella polycephala
VVVIGHVDSGKSTTTGHLIYKCGGIDKRTIEKFEKEAAELGKGSFKYAWVLDKLKAERERGITIDIALWKFETPKYHVTVIDAPGHRDFIKNMITGTSQADCAILIIAGGTGEFEAGISKDGQTREHALLAFTLGVKQLIVAVNKMDTTKWSQDRFEEIIKEVSTFVKKVGYNPKSVAFVPISGWHGDNMLLESTNMPWFKGWTKEGKNGSYKGKTLLEAIDAIEPPSRPTEKPLRLPLQDVYKIGGIGTVPVGRVETGIIKAGMVVTFAPSNVTTEVKSVEMHHEVLVQGIPGDNVGFNVKNVSVKDIRRGNVCSDSKNDPAKEAASFNAQVIVLNHPGQISNGYAPVLDCHTAHIACKFSEILEKIDRRTGKAIEEFPKFIKSGDAAIVKMIPSKPLCVESFQEYPPLGRFAVRDMRQTVAVGV

SEQ ID NO: 6053 - protein, 86 aa, Enterococcus raffinosus
VILEVTQEEEKTVGGLVLASAAKEKPQTAKVVAVGEGNVLENGQKSPMPVAVGDMVMFEKYAGTEVKYEGSEYLIIAAKDIMAIVE

SEQ ID NO: 6054 - protein, 532 aa, Enterococcus raffinosus
MAKDIKFSEDARAAMLRGVDKLADTVKVTLGPKGRNVVLEKSYGSPLITNDGVTIAKDIELDDHFENMGAKLVSEVASKTNDIAGDGTTTATVLTQAIVREGLKNVTAGANPMGIRRGIELATKAAVEELHSISKEVDSKDAIAQVAAVSSGSEEVGKLIAEAMEKVGNDGVITIEESKGIDTELDVVEGMQFDRGYLSQYMVTDNDKMEAALENPYILITDKKISNIQDILPLLEQVLQQSRSLLIVADDVDGEALPTLVLNKIRGTFNVVAVKAPGFGDRRKAMLEDIAILTGATVITEDLGLDLKEATIENLGTAGKVVVDKDNTTIVEGAGDKAALTDRVEMIKRQIGETTSDFDREKLQERLAKLAGGVAVVKVGAATETELKELKLRIEDALNSTRAAVEEGIVSGGGTALVNVIKKVSDLDAEGDVATGIKIVVRALEEPVRQIAENAGFEGSVIIDKLKNADRGTGFNAASGEYVNMIDAGIVDPTKVTRSALQNAASVSALLLTTEAVVADKPVEGGAAAAPA

SEQ ID NO: 6055 - protein, 426 aa, Mortierella verticillata
VVVIGHVDSGKSTTTGHLIYKCGGIDKRTIEKFEKEAAELGKGSFKYAWVLDKLKAERERGITIDIALWKFETPKYYVTVIDAPGHRDFIKNMITGTSQADCAILIIAGGTGEFEAGISKDGQTREHALLAFTLGVKQLIVAVNKMDTTKWSQDRFEEIIKEGLHFVKKVGYNPKSVAFVPISGWHGDNMLEESTNMPWFKGWTKETKGGSFKGKTLLEAIDAIEPPSRPTEKPLRLPLQDVYKIGGIGTVPVGRVETGIIKAGMVVTFAPSNVTTEVKSVEMHHEVLTEGIPGDNVGFNVKNVSVKDIRRGNVCSDSKNDPAKEAASFNAQVIVLNHPGQISNGYAPVLDCHTAHIACKFGEILEKIDRRTGKAMEEFPKFIKSGDAAIVKMIPSKPLCVESFQEYPPLGRFAVRDMRQTVAVGV

SEQ ID NO: 6056 - protein, 207 aa, Triticum aestivum
MVQPKKKFRGVRQRHWGSWVSEIRHPLLKRRVWLGTFETAEEAARAYDEAAVLMSGRNAKTNFPVQRSSTGDPAPAATRDVRGGSSSSSTSNLSQVLSAKLRKCCKAPSPSLTCLRLDTEKSHIGVWQKRAGARADSNWVMTVELNKGAGPSGDAVAAQSTVSATTASSPASTMDDEERLTLQMIEELLSSSGPASPSHGEEGSFVV

SEQ ID NO: 6057 - protein, 862 aa, Arabidopsis thaliana
MEDDGGSDGGEGNGGFSPNSSFGAFADTAMDLDFMDELLFDGCWLETTDSKSLKQTEQSPSASTAMNDNSPFLCFGENPSQDNFSNEETERMFPQAEKFLLEEAEVGKSWWIAPSASEGPSSSVKERLLQAISGLNEAVQDKDFLVQIWVPIQQEGKSFLTTWAQPHLFNQEYSSLAEYRHVSETYNFPADEGMKDFVGLPGRVFLQKFPEWTPDVRFFRRDEYPRIKEAQKCDVRGSLALPVFERGSGTCLGVVEIVTTTQKMNYRQELEKMCKALEFLQVYSDFYCAALPEIKDFLATICRSYDFPLALSWAPCARQGKVGSRHSDENFSECVSTIDSACSVPDEQSKSFWEACSEHHLLQGEGIVGKAFEATKLFFVPEVATFSKTNYPLAHHAKISGLHAALAVPLKSKSGLVEFVLEFFFPKACLDTEAQQEMLKSLCVTLQQDFRKTVESLTEIQMQESSWIAHMIKANEKGKDVSLSWEYQKEDPKELSSGRENSQLDPVPNNVPLEAEQLQQASTPGLRVDIGPSTESASTGGGNMLSSRRPGEKKRAKTEKTIGLEVLRQYFAGSLKDAAKSIGVCPTTLKRICRQHGIMRWPSRKIKKVGHSLKKLQLVMDSVQGAQGSIQLDSFYTSFPELNSPNMSSNGPSLKSNEQPSHLNAQTDNGIMAEENPRSPSSSCSKSSGSSNNNENTGNILVAEDADAVLKRAHSEAQLHNVNQEETKCLARTQSHKTFKEPLVLDNSSPLTGSSNTSLRARGAIKVKATFGEARIRFTLLPSWGFAELKQEIARRFNIDDISWFDLKYLDDDKEWVLLTCEADLVECIDIYRLTQTHTIKISLNEASQVKLSGSFGNTGLS

SEQ ID NO: 6058 - protein, 244 aa, Glycine max
MNPEMNGVEAEKRQENGHEKVDYDVQEKIDYVFKVVVIGDSAVGKTQILSRFAKNEFCFDSKSTIGVEFQTRTVTINAKVIKAQIWDTAGQERYRAVTSAYYRGALGAMLVYDITKRQSFDHVARWVEELRAHADSSIVIMLVGNKADLVDQRMVPTEDAVEFAEDQGLFFSETSALSGDNVESAFLKLLEEINRVVSKKALECGLGKENGDTNVASLKGTKVDIILGPELEISEMKKLSSCSC

SEQ ID NO: 6059 - protein, 342 aa, Hordeum vulgare subsp. vulgare
MDRYEVVRDIGSGNFGVAKLVRDVRTREHFAVKFIERGHKIDEHVQREIMNHRSLKHPNIIRFKEVVLTPTHLAIVMEYASGGELFQRICNAGRFSEDEGRFFFQQLISGVSYCHSMQVCHRDLKLENTLLDGSVAPRLKICDFGYSKSSVLHSQPKSTVGTPAYIAPEVLSRREYDGKVADVWSCGVTLYVMLVGAYPFEDPDEPRNFRKTIARILSVQYSVPDYVRVSMDCIHLLSRIFVGNPQQRITIPEIKNHPWFLKRLPVEMTDEYQRGMQLADMNTPSQSLEEAMAIIQEAQKPGHNALGLAGQVACLGSMDLDDIDFDVDDIDIENSGDFVCPL

SEQ ID NO: 6060 - protein, 94 aa, Streptococcus mitis
MLKPLGDRVVLKVEEKEQTVGGFVLAGSAQEKTKTAQVVATGQGVRTLNGDLVAPSVKAGDRVLVEAHAGLDVKDGDEKYIIVGEANILAIIEK

SEQ ID NO: 6061 - protein, 403 aa, Mucor amphibiorum
GKSTTTGHLIYKCGGIDKRTIEKFEKEAAELGKGSFKYAWVLDKLKAERERGITIDIALWKFETPKYNVTVIDAPGHRDFIKNMITGTSQADCAILIIAGGTGEFEAGISKDGQTREHALLAFTLGVRQLIVAINKMDTTKWSEARYNEIVKEVSSFIKKIGFNPKSVPFVPISGWHGDNMLDESTNMPWFKGWTKETKAGSKTGKTLLEAIDAIEPPTRPVDKPLRLPLQDVYKIGGIGTVPVGRVETGVIKAGMVVTFAPAAVTTEVKSVEMHHETLTEGLPGDNVGFNVKNVSVKDIRRGNVCSDSKNDPAKESASFTAQVIILNHPGQISAGYAPVLDCHTAHIACKFAELIEKIDRRSGKKLEDAPKFVKSGDSAIVKMIPSKPMCVEAYTDYPPLGR

SEQ ID NO: 6062 - protein, 534 aa, Streptococcus mitis
MSKEIKFSSDARSAMVRGVDILADTVKVTLGPKGRNVVLEKSFGSPLITNDGVTIAKEIELEDHFENMGAKLVSEVASKTNDIAGDGTTTATVLTQAIVREGIKNVTAGANPIGIRRGIETAVAAAVEALKNNAIPVANKEAIAQVAAVSSRSEKVGEYISEAMEKVGKDGVITIEESRGMETELEVVEGMQFDRGYLSQYMVTDSEKMVADLENPYILITDKKISNIQEILPLLESILQSNRPLLIIADDVDGEALPTLVLNKIRGTFNVVAVKAPGFGDRRKAMLEDIAILTGGTVITEDLGLELKDATIEALGQAARVTVDKDSTVIVEGAGNPEAISHRVAVIKSQIETTTSEFDREKLQERLAKLSGGVAVIKVGAATETELKEMKLRIEDALNATRAAVEEGIVAGGGTALVNVIPAVADLELTGDEATGRNIVLRALEEPVRQIAHNAGFEGSIVIDRLKNAEVGTGFNAATGEWVNMIDQGIIDPVKVSRSALQNAASVASLILTTEAVVANKPEPAAPAPAMDPS

SEQ ID NO: 6063 - protein, 416 aa, Mucor circinelloides f. lusitanicus
DSGKSTTTGHLIYKCGGIDKRTIEKFEKEAAELGKGSFKYAWVLDKLKAERERGITIDIALWKFETPKYNVTVIDAPGHRDFIKNMITGTSQADCAILIIAGGTGEFEAGISKDGQTREHALLAFTLGVRQLIVAINKMDTTKWSQDRYNEIVKEVSGFIKKIGFNPKSVPFVPISGWHGDNMLDESTNMPWFKGWNKETKAGSKTGKTLLEAIDAIEPPVRPSDKPLRLPLQDVYKIGGIGTVPVGRVETGTIKAGMVVNFAPAAVTTEVKSVEMHHETLTEGLPGDNVGFNVKNVSVKDIRRGNVCSDSKNDPAKESASFTAQVIILNHPGQISAGYAPVLDCHTAHIACKFSELIEKIDRRSGKKMEDSPKFVKSGDSAIVKMVPSKPMCVEAYTDYPPLGRFAVRDMRQTVA

SEQ ID NO: 6064 - protein, 663 aa, Francisella tularensis subsp. tularensis SCHU S4
MSLSIPREFSNAIRFLSIDATLKAKSGHPGMPMGMADIATVLWTKFLKHNPNNPHWINRDRFVLSNGHGSMLLYSLLHLTGYDLSIEDIKNFRQLHSKTPGHPEYGYTPGVETTTGPLGQGVANAVGMALGEKLLSDRYNTPDLKVIDHHTYVFLGDGCLMEGVSHEACSLAGTLGLNKLVAFWDDNNISIDGDTKGWFSDNTPERFRAYGWHVIENVDGHDFVAIEKAINEAHSQQQKPTLICCKTVIGFGSPEKAGTASVHGSPLSDQERASAAKELNWDYQAFEIPQDVYKYWDAREKGQALEANWQGQWNLFKDSPKFDEFERVLSKELPVGLESAINDYIASQLSNPVKVATRKASQMVLEVLCKNMPEMFGGSADLTGSNNTNWSGSVWLNNTQEGANYLSYGVREFGMAAIMNGLSLYGGIKPYGGTFLVFSDYSRNAIRMSALMKQPVVHVMSHDSIGLGEDGPTHQPIEHVPSLRLIPNLSVWRPADTIETMIAWKEAVKSKDTPSVMVLTRQNLMPVVQTQHQVANIARGGYLVKDNPDAKLTIVATGSEVELAVKVANEFEKKGIKLNVASIPCVEVFATQAHEYKKTVIKDDIPAVFVEMAQPDMWYKYMPKAGGEVKGIYSFGESAPAEDLFKRFGFTVENISNIVAKYV

SEQ ID NO: 6065 - protein, 543 aa, Frankia sp. EAN1pec
MSDIPRRAVVRTAKLATLPIGIAGRATLGVGKRLGGRPAEAVATELQQRTAAQIFRVLGELKGGAMKLGQALSVFEAALPDEVAGPYRAALTKLQEAAPPLPAATVHKVLAEELGPEWRALFASFDDTPAAAASIGQVHRAVWADGRPVAVKIQYPGAGSALLADLNQLGRAARLFGALTPGLDIKPLVAELKARITEELDYRLEAAWQRAFAQAYADDPDIVVPRPIAGADRVLVSEWIDGVPLSTIIDRGTQEERDRAGLLLVRFLYSCPGRAGLLHADPHPGNFRLLADGRLGVLDFGAVNRLPGGLPEPIGRLARLTLAGDAEAVAEGLRAEGFIPEGAAIPAEDLLDYLAPMLAPITDEEFTFSRDWLRGEALRLGDWRSAAAQLGRQLNLPPSYLLIHRVTLGAIGILCQLGSSGPFRAEMERWQPGFAPPRSAAARHAAAANRPNRRLPRLDIEDGTGVIRPLPGPVVLATAPAQRSGRSGRARSRVRPPEQASTPEQAGPPETSRPSRQARPAPGNRRKLEKEAQPEPGTQPEPR

SEQ ID NO: 6066 - protein, 379 aa, Arabidopsis thaliana
MELLTTVASFFTPTTLFLLLNLMIGTIVVTSRLGSGSRKHYQHHDGFGSGHAPAPLARAPSIIDRVKSINFHLYKFPHPETELFSMTAHHDIIGSDLHVYPDPNPAPLQRAPSLLDRVKSINMSYFKFPHDVTGSDPHSHSHSHLDLHPDPAPAPLQRAPSLLDRVKSINMSYFKFQQYNPEENDYAHHTEPTRFESIPTRMGRVDPIDISKFRIPEEDQPTGTGVNSQINPPGLTRAPSILERVKSIKLSSFYRSDPDLDQKQNPDPVLHEEHKHVRSRSESKKPVKKKKKALTKMTKSASEKSGFGFAGSHAEAPETVESLERRRPDTTRVERSTSFGDGEDGVDAKASDFINKFKQQLKLQRLDSILRYKEMLKAH

SEQ ID NO: 6067 - protein, 255 aa, Bacillus licheniformis
MDVEVKKENQNTQLKDHEVKELIKNSQNGDQKARDLLIEKNMRLVWSVVQRFLNRGYEPDDLFQIGCIGLLKSVDKFDLSYDVRFSTYAVPMIIGEIQRFIRDDGTVKVSRSLKELGNKIRRAKEELSKSNGRIPTVQEIADYLEISSEEVVMAQEAVRSPSSIHETVYENDGDPITLLDQIADQSEEKWFDKIALKEAIKDLDEREKLIVYLRYYKDKTQSEVADRLGISQVQVSRLEKKILKQIKNQMDHFES

SEQ ID NO: 6068 - protein, 191 aa, Kluyveromyces lactis NRRL Y-1140
MQTLKCVVIGDGAVGKTCLLISYTTNQFPADYVPTVFDNYAVTVMIGDEPYTLGLFDTAGQEDYDRLRPLSYPSTDVFLVCFSVISPPSFENVKEKWFPEVHHHCPGVPCLIVGTQIDLRDDKVIIEKLQRQRLRPITPEQGERLARELRAVKYVECSALTQRGLKNVFDEAIVAALEPPVIKKSKKCIIL

SEQ ID NO: 6069 - protein, 294 aa, Bacillus subtilis
MVTGVFAALGFVVKELVFLVSYVKNNAFPQPLSSSEEKKYLELMAKGDEHARNMLIEHNLRLVAHIVKKFENTGEDAEDLISIGTIGLIKGIESYSAGKGTKLATYAARCIENEIVITKGGCIHPSLIRFNIYGVRIHNGNFFHDKVNNCFFIFKSMPPLFVMNNEILMHLRALKKTKKDVSLHDPIGQDKEGNEISLIDVLKSENEDVIDTIQLNMELEKVKQYIDILDDREKEVIVGRFGLDLKKEKTQREIAKELGISRSYVSRIEKRALMKMFHEFYRAEKEKRKKAKGK

SEQ ID NO: 6070 - protein, 542 aa, Sinorhizobium meliloti
MARYVFITGGVVSSLGKGIAAAALGALLQARGYRVRLRKLDPYLNVDPGTMSPTQHGEVFVTDDGAETDLDLGHYERFTGRSATKTDNITTGRIYKNIIDKERRGDYLGATVQVIPHVTNEIKNFVTEGNEDYDFVICEIGGTVGDIEAMPFMEAIRQLGNDLPRGTAVYVHLTLMPYIPAAGELKTKPTQHSVKELQALGIHPDILLVRADREIPEAERRKLSLFCNVRQSAVIQALDVASIYDVPIAYHKEGLDNEVLAAFGIEPAPKPRMEAWEDVAHRIRTPEGEVTIAIVGKYTGLKDAYKSLIEALYHGGIANRVKVKLEWIESEVFEKEDPAPYLEKVHGILVPGGFGERGSEGKINAARFARERKVPYFGICFGMQMAVVEAARNLAGIEKASSTEFGPTKEPVVGLMTEWVKGNELEKRSAAGDLGGTMRLGAYRAALKPDTKIAGIYGSPDISERHRHRYEVNVDYKSRLESCGLVFSGMSPDGVLPETIEYPDHPWFIGVQYHPELKSRPLDPHPLFSSFIEAALEQSRLV

SEQ ID NO: 6071 - protein, 169 aa, Mesorhizobium loti MAFF303099
MSVRDLIPWSRGGGPAPSIYRGDDMDPFLSLHRNVNRLFDEVFRGFDTPSVLGRMAPLNGTWPGVEFSETDEEIRLTAEIPGLDENDVEVMLDDGVLTLRGEKKAETEDKDRQFSERYYGRFERRFGLGREVEDDKVAATFKNGVLTVTLPKTKRAQANAKRIAINGNK

SEQ ID NO: 6072 - protein, 473 aa, Fusobacterium nucleatum subsp. nucleatum ATCC 25586
MLSNNLKKETEKEKDLLENIQLIDMNGNDYTFSRDKNIYIKFWASWCPTCLAGLEELDRLAGETNNFEVVTVVFPGINGEKNPAKFKEWYDTLDYKNIKVLYDTDGKLLQIFKIKALPTSAIIYKDLIIDNIIVGHISNGQIKNYYEEKGENITMENNTKNIKEIYLAGGCFWGVEEYFARIDGVIDSVSGYANGSFDNPSYENVCNNSGHAETVHITYDSTKVSLDTLLKYYFRIIDPTSVNKQGNDKGVQYRTGIYYQNEEDKQIALNAIKEEQKKYSKPIVVEIEKLKRFDKAEEYHQDYLKKNPNGYCHINLNKASEAIIDEKKYQKPSDEVLKEKLSTLEYQITQEAATERAFTHEYYKNQEDGIYVDITTGEPLFSSKDKYDAGCGWPSFTKPIATEVVNYKKDSSHGMNRVEVRSRAGEAHLGHVFEDGPRDRGGLRYCINGASLRFIPYDKMDEEGYGEFKKYVK

SEQ ID NO: 6073 - protein, 482 aa, Idiomarina loihiensis L2TR
MNNEQVLQPDNVELIKNSRVGTSTKSSIAVDDPATGHVIGHVPDLTPRQILRAIESAETAFYKWRDVPLRERCEKLFRWYQLMHEKEEELAGILTSEQGKPLSESRGEIRYAASYIQWYAQPSLQDQGSVLPYSSIDESMIVITEPVGVCAAITPWNFPAAMITRKVAPALAAGCTMLVKPALETPLTAIAIAELAIQAGIPEGVLSIVTGDGEAIGKIFSESAVVRKLSFTGSTRVGRLLMASSASTIKRLSLELGGNAPFIVCETADVERAVQGAIQSKFRNAGQTCVCANAFYIHTKVYDEFTEKFIACVNQLMLGNGKNESVDIGPLINENALEKVEQIVADAVKKGAVIACGGERWVNSERWYYPTVLLNADSSMRCVNEEIFGPVAPIVRYNDETALLEELRQQQTGLAAYFYSQNLGQVNRLSRALEVGMIGVNSGVISDAAVPFGGVKSSGIGREGGRHGIEEYLETKYIKLSY

SEQ ID NO: 6074 - protein, 405 aa, Burkholderia fungorum LB400
MNPLLDSLQPYPFEKLRALFKDVTPNAGLAHISFGIGEPKHPTPALIRDAVVASLGGLSAYPATSGSPALRESIAKWVTQRYNLPPVDPATQVLPVSGSREALFSLAQTVLDPQKNAGGEPAIVLCPNPFYQIYEGAAILAGAQPYFVNSDPARNFACDYSAVPAEIWARTQLLYVCSPGNPTGAVLTLDDWRELFALSDRYGFVIASDECYSEIYFDEAKPPLGGLEAAHKLGRGFERLVMLSSLSKRSNVPGMRSGFVAGDAAILKDFLLYRTYHGAALSTVFQNASIAAWNDEAHVRENRAKYLQKFSTVTPMLAEVLDVRLPDAAFYLWADVSRTGLTDTVFAQRLYADYNVTVLPGSFLARTAHGVNPGRNFVRMALVADVDECTQGAQRIVDFCRALAG

SEQ ID NO: 6075 - protein, 325 aa, Arabidopsis thaliana
MASSSCFLRSILFSSPTNLRSNHHLPTFFPKNYLICSHSTSSRFESLSVSSIGTGSTKKSSDTRRKVKSMATTNIGKEEKKRVEIYDLEENLVIDLAKFTADLSDKFCKERGAFTVVVSGGSLIKSLRKLVESPYVDSIDWARWHFFWVDERVVPKNHDDSNYKLAYDSFLSKVPIPPGNVYAINEALSAEAAADDYETCLKHLVNTNILRVSESTGFPKFDLMLLGMGPDGHVASLFPGHGLCNESKKWVVSISDSPKPPSERITFTFPVINSSAHVALVVCGSGKAEAVEAALKKTGNVPPAGSVSAEDELVWFLDKPASSKL

SEQ ID NO: 6076 - protein, 232 aa, Streptococcus agalactiae A909
MDIFGEFLGTALLVLLGNGVVAGVVLPKTKNHNSGWIVITFGWGLAVAIAALVSGNISPAHLNPAVSLAFAIKGDLAWGTAILYMIAQIIGAMLGSLLVYLQFRPHYEAAENRADILGTFATGPALKDNFSNFLSEVLGTLVLVLTIFAIGKYNMPPGVGTMSVGMLVVGIGLSLGGTTGYAINPARDFGPRLLHALLPMKNKGDSDWTYSWIPIVGPMVGAILAALIFAMM

SEQ ID NO: 6077 - protein, 270 aa, Mycobacterium leprae TN
MMVLEQSETSRLGPVFDSCRADNRAALIGYLPTGYPDVPTSVDAMIELVESGCDIIEVGVPYSDPGMDGPTIARATEVALRGGVRVRDTLAAVEAISQAGGRAVVMTYWNPVLRYGVCAFARDLESAGGHGLVTPDLIPDEARQWIAASEKHRLDRIFLVAPSSTPHRLVTTVGASRGFVYAVSVMGVTGARDAVSQVVPELVARVKAVSDIAVGVGLGVRSREQAAQIGGYADGVIVGSALVSALGDGLPRLRALAEELAAGVRQRTFM

SEQ ID NO: 6078 - protein, 468 aa, Pisum sativum
MEPFTRDHRGSLEVFNPSSSDNINENPNPNSNSNPIPSNSWNTWTGSRAIETPPTRDSIISDEVPAATSWMALKETAPPPKSGESGSAAEQRAAEWGLVLKTDSETGKPQGVGVRGSGGGSGSRRESNNSVRSSGESSDDGREGGRGIPRVSEDLRDALSAFQQTFVVSDATKPDYPIMYASAGFFNMTGYTSKEVIGRNCRSMQGADTDPNDVAKIREAVAAGTSYCGRLLNYKKDGTTFWNLLTIAPIKDEHGKILKLIGMQVEVSKHTEGTKEKMLRPNGLPESLIRYDARQKEKANSSVTELVEAVSKRPRSLSESANRLPFIKKPTNGSNSHATQVHKTPSNSKSSRRKSESTLPSFRRKSHSGGDNFNSMHPITELPETKIISRRRSFMGFMRKSLSNNERFNDEHVIDGDSSEDDDDRFDSFDDKNITQKREKRKGLDLATTLERIEKNFVITDPRLPDNP

SEQ ID NO: 6079 - protein, 287 aa, Glycine max
SDRDCQLRPAMNAIATAAVLSLPFSFSKSSKLDTKKGLKGRFRVFAVYGEEIDKKNAWSALFDVEDPRSKVPQYKGKFLDVYQALEVARYDIQYCDWRARQDLLTIMLLHEKVVEVLNPLARDYKSIGTMKKELAELQEELAQAHQQVHISEARVSSALDKLAYMEELVNDKLLQERSTTEVSQTSSSPSTSFKPVDIEKRRSPRKSLDISGPVQSYHPHLKNFWYPVAFSTDLKDDTMVSQYVYNSLYHTLNMFVASASMQNFKSIFGLNPLVSNLLEAYYDMSVE

SEQ ID NO: 6080 - protein, 472 aa, Mycobacterium leprae TN
MTRRGKIVCTLGPATQSDELIRALVEAGMDVARMNFSHGDYSDHKAVYDRVRVASDATGRAVGVLADLQGPKIRLGRFATGSTYWADGETVRITVADCHGSHDRVSTTYKNLARDAVVGDRVLVDDGKVGLVVSAIDGDDVVCTVTEGGPVSNNKGMSLPGMHVSAPALSDKDIEDLTFALNLGADLVALSFVRSPSDVELVHKAMDRVGRRVPVIAKLEKPEAVDNLEAIVLAFDAIMVARGDLGVELPLEEVPLVQKRAIQMARENAKPVIVATQMLDSMIENSRPTRAEASDVANAVLDGADALMLSEETSVGKYPLAAVKTMSRIVCAVEENSTAAPPLTHVPRTKRGVISYAARDIGERLDAKALVAFTQSGDTVRRLARLHTPLPLLAFTAWPEVRSQLAMTWGTETFLVPKMLSTDGMIRQVDKSLLELGRYKRGDLVVIVAGTPPGTVGSTNLIHVHRIGEDDV

SEQ ID NO: 6081 - protein, 357 aa, Blumeria graminis
MAEFVRAQIFGTTFEITSRYSDLQPVGMGAFGLVCSAKDNLTGQNVAVKKIMKPFSTPVLSKRTYRELKLLKHLRHENVISLSDIFISPLEDIYFVTELLGTDLHRLLTSRPLEKQFIQYFLYQILRGLKYVHSAGVVHRDLKPSNILVNENCDLKICDFGLARIQDPQMTGYVSTRYYRAPEIMLTWQKYDVEVDIWSAGCIFAEMLEGKPLFPGKDHVNQFSIITELLGTPPDDVIHTIASENTLRFVQSLPKRVRQPLKDKFTNADPLAIGLLEEMLVFDPRRRIKATDALAHEYLAPYHDPTDEPIALEKFDWSFNDADLPVDTWKIMMYSEILDYHNVDSENQAMEDPLECP

SEQ ID NO: 6082 - protein, 715 aa, Cryptococcus neoformans var. neoformans B-3501A
MAEQLKQVYADKKAQDQAAFVTFLTAGFPTRDATVPLMLALEAGGADIIELGVPFSDPVADGPVIQKANNVAIENNVHYSDCIEYVRQARAQGLKAPVLFMGYYNPIIAYGEERAVKDAREAGANGYIVVDLPPTEAVDFRNTCTKAGMSYIPLVAPSTSIDRVKFLTSIADSFIYVVSKMGVTGSSSSENISASLPELVKRIQTFTTIPLAVGFGIDNRTHFDYVTSSGADAVVVGSKIIKLIFEHADDGLAPKVVEDYCREITLKGQNPPPLGRKNAAAPPPANGGDVSPPLPIPSGSPLGESQVKVTAAGKLPSRFGLFGGAYVAESLVDCLNELEAAYAEAKEDPAFWKEFEDMFGYINRPSELYLAERLTEEMGGARIWLKREDLNHTGSHKINNAVGQILLAKRLGKRRIIAETGAGQHGVATATVCAKFGMECDIFMGAEDVRRQELNVFRIKMLGGRVIPVTAGSQTLKDAVNEAMRDWVTRLDSTHYLIGSAIGPHPFPTIVRDFQRVIGREIKSQMHEKMGKLPDAVVACVGGGSNAIGTFYDFIEDPSVRLVGVEAGGHGIDTEAHSATLTKGVMGVVHGAASYIIQSKEGQLTPTHSISAGLDYNSVGPEHSHLKYSGRAEYVVADDLQCLKAFKMCTELEGIIPALESSHGLWGGMQLAKSLPKDKDIVICLSGNGAKDVAEVLLTLKNKEWADKLDWHVAQ

SEQ ID NO: 6083 - protein, 394 aa, Oryza sativa
MEWTAAEMDEARSIIARLTNAYDSGTLVAGAGNGDTRHDRIVRELQAWLPWRTMDQLIGLYIELMAEEPAAAQPQYFDAGAVVDPTFDFFNDHNNFLGMPPPPVQQADDHNMNNVVADAGMNYYYGGGGAGGAMVFGGAPMGETVEQAAPPVPVVPVVMNRDDDEVNNQGGGRHRAAPTNTTRRFWTTEEHRQFLRGLRVYGRGEWKSISMNFVRSKTPVQVSSHAQKYFRRVESAAADKQRYSINDVGLNDDTAAMDGTNSYSNNNFGGWQSLAFAGGHLEPVSGGGAARQVIAPASSSAAAMNSAAQFWAPMLFNPQIQQQFMQMQAQTQQAWNDQHMMMAAAPMEGATDTNFEPAGAVNYYYYQQQQEEEEGGAYGVPADQWMMNQNNNMC

SEQ ID NO: 6084 - protein, 255 aa, Arabidopsis thaliana
MAFTLGGRARRLVSATSVHQNGCLHKLQQIGSDRFQLEAKAIRLLPRRTNMVQELGIREEFMDLNRETETSYDFLDEMRHRFLKFKRQKYLPEIEKFKALAIAQSPKVMVIGCADSRVCPSYVLGFQPGEAFTIRNVANLVTPVQNGPTETNSALEFAVTTLQVENIIVMGHSNCGGIAALMSHQNHQGQHSSLVERWVMNGKAAKLRTQLASSHLSFDEQCRNCEKESIKDSVMNLITYSWIRDRVKRDREIWS

SEQ ID NO: 6085 - protein, 419 aa, Francisella tularensis subsp. tularensis SCHU S4
MKSNRRVVVTGLGMVTPLGNDVPTTWANILAGKSGVETITGFDTPAPDISEFKVRFAARIKNFDVDALVGKKDAKRVDPFCYYGIAAANEALKDAGIDKVSEEDSYKFGVCVSSGIGGIETLETTKAVIDTKGPSKISPFCIPSSIVNMLSGIISINHGLRGPNIPIVTACTTGTHNIGMAARLIASGDANTMLAGGSEKASNAIGMGGFAAARALSTRNDDPQGASRPWDKDRDGFVLGDGAGVVVLEEYERAKARGAKIYAEVVGFGMSADGYHMTMPYAPGQERCIQNALADAGLENNPDAIDYVNAHSTSTPLGDVQESQVVEKVIGQYRKDLVMSSTKSMTGHLLGAAGAIESIFSVLAIRDQVAPPTINLHNLDDGCNLDYAANAAKKMKIDYVLNNSFGFGGTNGSVIFKKI

SEQ ID NO: 6086 - protein, 175 aa, Lotus corniculatus var. japonicus
LFEPSELTSWSFYRAGIAEFVATFLFLYITVLTVMGVSGADSKCKTVGIQGIAWAFGGMIFALVYCTAGISGGHINPAVTFGLFLARKLSLTRAIFYIVMQCLGAIVGAGVVKGFEGKTKYGTLGGGANFVAPGYTKGDGLGAEIVGTFVLVYTVFSATDAKRSPETLTSPFWHL

SEQ ID NO: 6087 - protein, 567 aa, Streptococcus pneumoniae TIGR4
MALEVIMPKAGVDMTEGQIVQWNKKVGEFVKEGEILLEIMTDKVSMELEAEEDGYLIAILKGDGETVPVTEVIGYLGEERENIPTAGAASPEASPVPVASTSNDDGKSDDAFDIVVIGGGPAGYVAAIKAAQFGGKVALVEKSELGGTCLNRGCIPTKTYLHNAEIIENIGHAANRGIVIENPNFTVDMEKLLETKSKVVNTLVGGVAGLLRSYGVTVHKGIGTITKDKNVLVNGSELLETKKIILAGGSKVNKINVPGMESPLVMTSDDILEMNEVPESLVIIGGGVVGIELGQAFMTFGSKVTVIEMMDRIVPAMDVEVSKNLRLILERKGMTILTGTKLQEIIEENGQLRIKVEGKDDIIASKALLSIGRMPDLEGIGEVEFELDRGCIKVNEYMETSVPGIYAPGDINGTKMLAHAAFRMGEVSAENALKGNHAVAKLNLTPAAIYTLPEVAAVGLTEEQAREKYDVAIGKFNFAANGRAIASDAAQGFVKVIADKKYGEILGVHIIGPAAAELINEASSIIEMEITVEEMLKTIHGHPTYSEVMYEAFADVLGMAIHSPKKK

SEQ ID NO: 6088 - protein, 420 aa, Neisseria gonorrhoeae FA 1090
MSNTQKQLALAKAAKKSVNTADAEEKNRALLAMADSLEAAAEDILAANRLDLKAAAGKIPDSMTDRLLLDGKRICAMADGIRAVAALPDPVGEILETSTLPNGLEIVKKRVAMGVIGIIYESRPNVTSDAAALALKSGSAVVLRSGKDAFQSARAIVAALKTGLAQTRIDPEAVQLIEDTGREGSYEMMRAKDYLDLLIPRGGAGLIRAVVENAVVPVIETGTGIVHIYIDKDADWDKALRIVYNAKTGRPSVCNSMEVLLVHEGIAADFLPKLERLLVRGRIEAGLPPVRFRLDPQAARYIGGEAAGADDFDTEFLDYILAVKTVASVEEAVGHIEARGTHHSDGIVTENRHAADYFTTHIDSAAVYINASTRFTDGGEFGLGCEMGISTQKLHARGPMGLKELTSYKYIVQGTGQVRE

SEQ ID NO: 6089 - protein, 192 aa, Lotus corniculatus var. japonicus
YKEPPPAPLFEPGELASWSFWRAGIAEFIATFLFLYITVLTVMGVKRSPNMCASVGIQGIAWAFGGMIFALVYCTAGISGGHINPAVTFGLFLARKLSLTRAVYYIVMQCLGAICGAGVVKGFQPKQYQALGGGANTIAHGYTKGSGLGAEIIGTFVLVYTVFSATDAKRNARDSHVPILAPLPIGFAVFLV

SEQ ID NO: 6090 - protein, 327 aa, Rhodospirillum rubrum
MSETKLDALRRHTIIVADSGDIDAIRSFAPQDCTTNPSLILKAAKMPAYAGLIAQAIEAGSAEAGPSEGLIDRILDHLAVTFGSELARIVPGVVSTEVDARLSFDTQATVARAERLIGLYAARGVAAERILIKVAATWEGIRAVEILQSRGIACNVTLVFSLAQAVAAAEAGAFLISPFVGRILDWHVKASGKSFDIDEDPGVRSVTEIYTYFKHFGYKTIVMGASFRSSAEVEALCGCDRLTVSPALLDQLRSQTGDVPKRLDPAASKAATISRLAVDEASFRWQINEDALATEKLAEGIRLFNADTDALRRTIAETLAKRASTVA

SEQ ID NO: 6091 - protein, 704 aa, Rhodospirillum rubrum
MAKRSTDALTPAEIADAKILRGTGGETHQIAEGDTPVLTTQQGIPVADDQNSLRIGPRGPTLLEDFAFREKIFHFDHERIPERIVHARGFGAHGTFETYEDLSALTSADIFQRAGEKTPAFVRFSTVAGNLGSSDVARDVRGFAVKLYTKQGNWDIVGNNIPVFFIQDAIKFPDLIHAAKQEPDSGFPQAQTAHDNFWDFISLMPESLHMALWIMSDRTIPRSFRFMEGFGVHTFRLVTAEGKSSFVKFHWKPKLGLQSVVWNEAVKINGADPDFHRRDLWSAIKRGDYPEWDLGLQVFDDAFADSFPFDVLDATKLIPEELVPIRIVGRLVLDRTVDNFFAETEQVAFHTANIVPGIDFTNDPLLQGRNFSYLDTQIKRLGGPNFTHLPINAAKCPFHSFQQDGHMAFVNPKGRANYEPNSWGPGIGGPRESPESGFHSFPAEDGGEKRRVRGELFADHYSQARQFYRSQTPVEQTHIKDSFVFELSKVETPAIRARVVSHLLTIDQTLAQKVADGLGLAELPEAAKPARPLVEDLPASPALSILLNPPKDFSGRKVGVLVSDGVDGAFLDEIERLLTAEGAQMEVIAPRVGGFTAKDGTLRPAHQKVNGAPSVLYDAVAVLLSTEGAKLLLNEATAKDFVSDAFAHAKVIAFTQAAQPLLEKAGVIADEGCLLLDTPAKAETFLGLCRKGRRWEREAKVHAV

SEQ ID NO: 6092 - protein, 404 aa, Mesembryanthemum crystallinum
MESRVLSRATAIAALPRLSRPRREAASLGIAAVKPVGAVKDGGNLIWGRQLRPVLLLEPVQTGPVSRKESTAVQPCRAAAEGSDSAGEAKVGFLQKYPALVTGFFFFMWYFLNVIFNILNKKIYNYFPYPYFVSVIHLLVGVIYCLVSWAVGLPKRAPIDGNLLKLLIPVALCHALGHVTSNVSFAAVAVSFTHTIKALEPFFNASASQFILGQPIPITLWLSLAPVVLGVAMASLTELSFNWTGFISAMISNISFTYRSIYSKKAMTDMDSTNVYAYITIIALFVCIPPALIIEGPQLIKYGFNDAIAKVGLTKFITDLFWVGMFYHLYNQLATNTLERVAPLTHAVGNVLKRVFVIGFSIIIFGNKISTQTAIGTSIAIAGVAIYSFIKGKMEEEKRQKKAA

SEQ ID NO: 6093 - protein, 104 aa, Mesorhizobium loti MAFF303099
MTFRPLHDRILVRRIEAEEKTAGGIIIPDTAKEKPQEGEVIAIGPGARDESGKLTPLDVKAGDRILFGKWSGTEIKLNGEDLLIMKESDVMGVIEQTATVKKAA

SEQ ID NO: 6094 - protein, 542 aa, Mesorhizobium loti MAFF303099
MAAKEVKFHSDAREKMLRGVNILADAVKVTLGPKGRNVVIDKSFGAPRITKDGVTVAKEIELEDKFENMGAQMVREVASKTSDLAGDGTTTATVLAQAIVKEGAKAVASGMNPMDLKRGIDKAVEAIVQELKTNARKVTRNDEIAQVGTISANGDAEIGRFLAEAMQKVGNEGVITVEEAKTAETELEVVEGMQFDRGYLSPYFITNQDKMRVELEEPYVLIHEKKLSNLQALLPVLEAVVQSSKPLLIIAEDVEGEALATLVVNKLRGGLKVAAVKAPGFGDRRKAMLEDIAILTGGTAISEDLGIKLENVTLEMLGRAKKVVIEKENTTIVDGAGSKDEIQGRVSQIKSQIEETTSDYDKEKLQERLAKLAGGVAVIRVGGSTEVEVKERKDRVDDAMHATRAAVEEGVLPGGGVALLRAAKALDSVQAENEDQKHGIEIVRRAIEAPVRQIAENAGAEGSIIVGKLREKPEFGWGWNAQTNAFGDLYNEGVIDPVKVVRTALQDAASVAGLLVTTEAMVAEKPKKEPAVPAMPAGGMDF

SEQ ID NO: 6095 - protein, 459 aa, Ralstonia eutropha JMP134
MSANSEHLQRGLGERHIRLMALGSAIGVGLFLGSANAIRMAGPAIMLAYLIGGAMIFLIMRALGEMAVHNPVAGSFCRYAQDHMGPLAGYLTGWNYWFLWLVTCVAEITAVAIYMGVWFPDVPRWIWALAALATMGSVNLLTVKAYGEFEFWFAMIKIVTIVLMLFGGGAMIVFGLGNGGIATGISNLWAHGGFMPNGASGVLMSLQMVMFAYLGVEMIGLTAGEAKNPRKSIPDAINSVFWRILIFYVGALFVILSLYPWNEIGAQGSPFVMTFERLGIKTAAGIINFVVLTAALSSCNGGIFSTGRMLYNLAQQGQAPAAFARVDRNGVPRRALLVSIGALLCGVLLNYLVPEKVFVWVTSISTFGAIWTWAIILVTQMQFRKNLSPAERDKLAFRMPFWPYGSWIALAFLALVIALMAYFPDTRIALYVGPAWLVLLTVLYYRLGMQARGPVTYQA

SEQ ID NO: 6096 - protein, 481 aa, Sinorhizobium meliloti
MAENYDVIVVGSGPGGYVTAIRSAQLGLKTAIVEREHLGGICLNWGCIPTKALLRSAEILDHANHAKNYGLTLEGKITANVKDVVARSRGVSARLNGGVAFLMKKNKVDVIWGEAKLTKPGEIVVGAPSKPAVQPQNPVPKGVKGEGTYTAKHIIVATGARPRALPGIEPDGKLIWTYFEAMKPEEFPKSLLVMGSGAIGIEFASFYRSMGVDVTVVELLPQIMPVEDAEISAFARKQLEKRGLKIITDAKVTKVEKGANDVTAHVETKDGKVTPIKADRLISAVGVQGNIENLGLEALGVKTDRGCIVTDGYGKTNVAGIYAIGDVAGPPMLAHKAEHEGVICVEKIAGVPGVHALDKGKIPGCTYCDPQVASVGLTEAKAKELGRDIRVGRYSFGANGKAIALGEDQGLIKTIFDKKTGELIGAHMVGAEVTELIQGFVVAMNLETTEEELMHTVFPHPTLSEMMKESVLDAYGRVLNA

SEQ ID NO: 6097 - protein, 395 aa, Mesembryanthemum crystallinum
MITTLKQPTISFSNPDVLRKKFQVPTSQFASFAPLIRRKSDLLIQKPLHVSSVKGLGFGLGDGLLRERKPLIKCEAYEADGSEPIKPEPVPVPIPGEAARKVKIGIYFAVWWALNVVFNIYNKKVLNAFPYPWLTSTLSLAMGSLIMVVSWATRIAEAPNTDSDFWKALLPVAVAHTIGHVAATVSMSKVAVSFTHIIKSAEPAFSVLVSRFFLGESFAAGVYWSLVPIIGGCALAAVTELNFNMIGFMGAMISNLAFVFRNIFSKKGMKGKSVSGMNYYACLSILSLVLLTPFALYVEGPKMWAAGWDKAVSDIGSNFIWWLTAQSVFYHLYNQVSYMSLDEISPLTFSIGNTMKRISVIVSSIIIFRTPVQPVNALGAAIAVFGTFLYSQAKQ

SEQ ID NO: 6098 - protein, 159 aa, Burkholderia fungorum LB400
MTSIYSFSARTLGGEEVSLEQYSGKVLLIVNTASECGFTPQYAGLQKLYETYAARGLAVLGFPCNQFGKQEPGDAAQIGSFCEKNYGVTFPMFDKVDVNGANAHPLFRYLTGEAPGVLGLEAIKWNFTKFLIDREGNVVKRYAPLTKPEAITEDIEKLL

SEQ ID NO: 6099 - protein, 208 aa, Sinorhizobium meliloti 1021
MMKLYGLGPTRSLRARWALQELDAEFEFVAVNILAGEAHHPDFLRLNPAGKLPVLVDGDFVLTESAAIVMYLAEKYGGKGLMPADLKERAQAYRWSLFAVTELEQPLWRMAKHTFLYPEEKRLPEDIALAKEEFLAMAAVLEQHMKGREFIVGDRISIADCVTAYVLDWGNENGLLDDFPNLRAYLERMYARPKAPQRIAEAFASLQS

SEQ ID NO: 6100 - protein, 358 aa, Kluyveromyces delphensis
MSEWKVDPDNRRRLLQLQKVGANKRCVDCNAPNPQWASPKFGIFICLECAGTHRSLGVHISFVRSITMDQFKQEELVRMEKGGNEPFIEYMTSHGIDMTLPHKIKYDNPIAEDYKEKLSCEVEDKEFVEPKHPDFDPKALGKTSTPSVATKAGAGSITSNATSRQDTPIESRRTGTPQQKEKNEQYFAQLGQKNQERPDHLPPSQGGKFQGFGNTPVNNSKQANTNTMSLENLQTDPVGTLSRGWGLFSSALQKSFDDVNETYIKPNVQQWNTGELSEETKRAAAQFGQKFQETSTYGVQAFSSFTKQYITGEEDTMSNFNRTSPMPGTANSTNSTDNLLKKEKMRPPKAGEDEWEEF

SEQ ID NO: 6101 - protein, 458 aa, Sinorhizobium meliloti 1021
MLERSNELTAWDRDHFFHPSTHMGMHARGETPTRVIGGGEGVYITDISGKRSLDAFAGLYCVNVGYGRQKIADAIAEQAKNLAYYHAYVGHGTEASIRLSKMIIDRAPEGMSRVYFGLSGSDANETNIKLIWYYNNILGRPEKKKIISRWRGYHGSGVMTGSLTGLHLFHNAFDLPRAPILHTEAPYYFRRPDRSMSEEQFSQYCADKLEEMILAEGPDTVAAFIGEPILGTGGIVPPPKGYWEKIQAVLQKYDILLVADEVVTGFGRLGTMFGSDHYGIKPDLITIAKGLTSAYAPLSGTIVSDKLWQVLVKGSDELGAIGHGWTYSAHPICAAAGIANLELIDELGIVENAGSTGAYFRAELQKAVGDHRHVGEVRGDGLMAAIEFVEDRDDRAFFDPGRKVGPQVAAALLERGVIGRAMPQGDILGFAPPLCLTRDEADIVVKAAADTIQSVLGR

SEQ ID NO: 6102 - protein, 419 aa, Sulfolobus tokodaii str. 7
MAWKLEDIKVIIPIGGEATRLRPLTVETSKAAVRLLNRPLIEYTILELARQGIKEFIFGVKGYVNYRSLFDLYKEGIGFSARYHIKPRVHFKYIPRAETVGNAHAVKIAVEYYDVKEPFLVVQGDNLFKLDVKKVLEYHEEKKAFMTIVLKKVESVEEFGVAELDNDMKIKRFVEKPKRREEAPSDLANTGIYVISPEIRDVFKSEEVEEMLKLGKMDFGKDIIPYLIKKGYPVYGYVTENLWFDVGTPDRYLEAMLTLLKTLSDEDMQGLRIDANRRIFVQGTSPDSRKRRVIIKRMYKKGDLKLEGDILIGRHCQIGSGTYIEESAIDNFTIIGKSVKIVRSSIMDRVYIGDNAVIENSIIGRHVEIRSTSSKPTKIINSVIADDAVIGEGSEITNSKIYPHKLINSESKIYDTILT

SEQ ID NO: 6103 - protein, 392 aa, Staphylococcus aureus subsp. aureus MSSA476
MNQQLIETLKSKEGKMIEIRRYLHQHPELSFHEDETAKYIAEFYKGKDVEVETNIGPRGIKVTIDSGKPGKTLAIRADFDALPITEDTGLSFASQNKGVMHACGHDAHTAYMLVLAETLAEMKDSFTGKVVVIHQPAEEVPPGGAKAMIENGVLDGVDHVLGVHVMSTMKTGNVYYRPGYVQTGRAFFKLKVQGKGGHGSSPHMANDAIVAGSYFVTALQTVVSRRLSPFETGVVTIGSFDGKGQFNVIKDVVEIEGDVRGLTDATKATIETEIKRLSKGLEALYGVTCTLEYNDDYPALYNDPEFTEYVAKTLKEANLDFGVEICEPQPPSEDFAYYAKERPSAFIYTGAAVEDGEIYPHHHPKFNISEKSLLISAEAVGTVVLDYLKGDN

SEQ ID NO: 6104 - protein, 498 aa, Sinorhizobium meliloti 1021
MTAVFARTAFHDALKNLSDRQLLRELAYVGGRWVAGRDGTCLEVSDPASGAALAFVASLDAAQTSEAIDAAQKAFRSWHNMLPQARAAILRKWHDLMLEAREDLALLMTLEQGKPLAESRGEIDYAASFIEWYAEEGKRLNAESVTSHLAGAEMIVRREALGVVGIVTPWNFPSAMITRKAAAALAAGCTVVAHPSSETPLSALALAELGERAGLPAGVFNVVTGKAATIVGRMCEDARVRAMSFTGSTEIGRLIASQCAPTMKRLVMELGGHAPLIVFADANVEKAADIAIAAKFATSGQDCLAANRIYVERPALKAFQEAFAARIAGLKVGSGMEPDTDIGPLMHERAVAKVEEQVADALKLGARLAVGGKRHAAGPLFFQPTLLTDVPDDALIMREETFGPVAAVTAFDSEEEVVARANDTEYGLVAYVVTENGARQMRLARALEYGMVAVNRVKITGGPIPFGGWKQSGLGREGSRHGMEAFTELKYLCIDTAA

SEQ ID NO: 6105 - protein, 194 aa, Arabidopsis thaliana
  misc_feature (59)..(59): Xaa can be any naturally occurring amino acid
  unsure (1)..(194): unsure at all Xaa locations
MISLFISDFSDLSDLSPTFDNMNMNIPSKKIVPVPTPSERVVSLVSRTGRDLQRYNTAXYRQVVGCVPYRYKRHGGGEIEVLLISAQKRGKGMLLPKGGWEIDESIEEAALRETIEEAGVTGQLEESLGKWQYKSKRHTMIHDGHMFPLLVSQQFEIWPESEFRQRKWVSLSEAIELCQNSWMREDLEDLIKRE

SEQ ID NO: 6106 - protein, 459 aa, Fusobacterium nucleatum subsp. nucleatum ATCC 25586
MEKIYDLLVIGWGKAGKTLSAKLGAKGKKVAIIEENPKMYGGTCINVGCLPTKSLVHSAKILAEVKKYGIDGDYSFKNNFFKEAMKKKEEMTIKLRNKNFGLLDTNENVDIYNGRASFVSNNEVKITSSDNKEIVLKADKIVINTGSVSRTLNTEGIDNKNVMTSEGILELKKLPKKLLIIGAGYIGLEFASYFSNFGSEVSVFQFDDAFLAREDEDETKIIKEILENKGVKFFFNTSVKKFEDLGDSVKAICMKDGQEFSEEFNKVLVAVGRKPNTDNLGLENTSIQLGKFGEILVDDYLKTNAPNIWAVGDVKGGAQFTYVSLDDFRIVFPQILGENNRRKLSDRVLIPTSTFIDPPYSRVGINEKEAQRLGINYTKKFALTNTIPKAHVINEIDGFTKILINENDEIIGASICHYESHEMINLLALAINQKIKSKVLKDFIYTHPIFTESLNDILG

SEQ ID NO: 6107 - protein, 804 aa, Oryza sativa (japonica cultivar-group)
MSFGGLFDGGGGGGMQFPFASGFASSPALSLALDNAGGGIGGRMLGGGAGAGSSAGGAMTRDTEAENDSRSGSDHLDAISAAGEDDVEDAEPSNSRKRKKRYHRHTPQQIQELEALFKECPHPDEKQRAELSRRLSLDARQVKFWFQNRRTQMKTQLERHENALLKQENDKLRAENMTIREAMRSPMCGSCGSPAMLGEVSLEEQHLRIENARLKDELNRVCALATKFLGKPISLLSPPPLLQPHLSLPMPNSSLELAIGGIGGLGSLGTLPGCMNEFAGGVSSPMGTVITPARATGAAIPSLVGNIDRSVFLELAISAMDELVKMAQMDDPLWVPALPGSPSKEVLNFEEYLHSFLPCIGMKPAGYVSEASRESGLVIIDNSLALVETLMDERRWSDMFSCMIAKATVLEEVSTGIAGSRNGALLLMKAELQVLSPLVPIREVTFLRFCKQLAEGAWAVVDVSIDGLVRDHNSGTAPTGGNVKCRRVPSGCVMQDTPNGYCKVTWVEHTEYDEASVHQLYRPLLRSGLAFGARRWLATLQRQCECLAILMSSATVTANDSTAISQEGKRSMLKLARRMTENFCAGVSASSAREWSKLDGATGSIGEDVRVMARKSVSEPGEPPGVVLSAATSVWVPVAPEKLFNFLRDEQLRAEWDILSNGGPMQEMTQIAKGQRDGNSVSLLRASAVSANQSSMLILQETCTDASGSIVVYAPVDIPAMQLVMNGGDSTYVALLPSGFAILPDGPRIGATGYETGGSLLTVAFQILVNNQPTAKLTVESVETVNNLISCTIKKIKTALQCDA

SEQ ID NO: 6108 - protein, 263 aa, Aspergillus niger
MEQTAQTPGTQQGRQQPVYDTRNGGHYGASAALSAQGYAPVAELYTGTWANVNQGLQGTARDILTTYWQHIINHLESDNHDYKIHQLPLARIKKVMKADPEVKMISAEAPILFAKGCDIFITELTMRAWTHAEDNKRRTLQRSDIAAALSKSDMFDFLIVIVPREEATSHAKRTSQTAGASAGVPGPAGATGQLPPSQHGVPHHMPPPDYSTLGQHGLQDQEYRPPTMYAGAVQSDPAAAYGQHQPQMFEGMYAAYPHLPPQQ

SEQ ID NO: 6109 - protein, 441 aa, Salmonella enterica subsp. enterica serovar Paratyphi A str.
MIRGKIDILVVDDDVSHCTILQALLRGWGYNVALAYSGHDALAQVREKVFDLVLCDVRMAEMDGIATLKEIKALNPAIPILIMTAFSSVETAVEALKAGALDYLIKPLDFDRLQETLEKALAHTRETGAELPSASAAQFGMIGSSPAMQHLLNEIAMVAPSDATVLIHGDSGTGKELVARALHACSARSDKPLVTLNGAALNESLLESELFGHEKGAFTGADKRREGRFVEADGGTLFLDEISDISPLMQVRLLRAIQEREVQRVGSNQTISVDVRLIAATHRDLAEEVSAGRFRQDLYYRLNVVAIEMPSLRQRREDIPLLADHFLRRFAERNRKAVKGFTPQAMDLLIHYDWPGNIRELENAIERAVVLLTGEYISERELPLAIAATPIKTEYSGEIQPLVDVEKEVILAALEKTGGNKTEAARQLGITRKTLLAKLSR

SEQ ID NO: 6110 - protein, 557 aa, Xanthomonas campestris pv. campestris str. ATCC 33913
MSAAAPPCCTSLLGLSLSMFVAPCALAATPLEGAVVSAPAPTPPTPDLAYPELFQAVQRGELFDDQKHFVDFLPLRDPALINADYLAQHEHAGFDLRKFVDANFEESPPVQTDAIRQDTALREHIDALWPKLVRSQTNVPAHSSLLALPHPYVVPGGRFREVYYWDSYFTMLGLVKSGETTLSRQMLDNFAYLIDTYGHIPNGNRTYYLSRSQPPLFSYMVELQAGVEGEAVYQRYLPQLQKEYAYWMQGGDDLQPGQAARHVVRLADGSVLNRYWDERDTPRPEAWLHDTRTAAEAHDRPAADVYRDLRAGAESGWDYTSRWLADGKTLSTIRTTAIVPIDLNSLLYHLERTLAQACAHTGTACSQDYAALAQQRKQAIDAHLWNAAGYYADYDWQTRTLSNQVTAAALYPLFAGLASDDHAKRTATSVRARLLRPGGLATTALKTGQQWDEPNGWAPLQWVAVDGLRRYGEDGLARTIGERFLTQVQALFAREHKLVEKYGLDADAAGGGGGEYALQDGFGWTNGVTLMLLNLYPSQGATQAPAKTKRKPEPAAP

SEQ ID NO: 6111 - protein, 453 aa, Streptococcus pneumoniae TIGR4
MYKTKCLREKLVLFLKIFFPILIYQFANYSASFVDTAMTGQYNTMDLAGVSMATSIWNPFFTFLTGIVSALVPIIGHHLGRGKKEEVASDFYQFIYLALGLSVVLLGMVLFLAPIILNHIGLEAAVAAVAVRYLWFLSIGIIPLLLFSVIRSLLDSLGLTKLSMYLMLLLLPLNSGFNYLLIYGAFGVPELGGAGAGLGTSLAYWVLLGISVLVLFKQEKLKALHLEKRIPLNMDKIKEGVRLGLPIGGTVFAEVAIFSVVGLIMAKFSPLIIASHQSAMNFSSLMYAFPMSISSAMAIVVSYEVGAKRFDDAKTYIGLGRWTALIFAAFTLTFLYIFRGNVASLYGNDPKFIDLTVRFLTYSLFFQLADTFAAPLQGILRGYKDTVIPFYLGLLGYWGVAIPVRTLFDSLTDFGAYSYWIGLIISLIVSGALYRWRLTVIMKRFESLAKSKC

SEQ ID NO: 6112 - protein, 169 aa, Brassica napus
  misc_feature (126)..(126): Xaa can be any naturally occurring amino acid
  misc_feature (138)..(138): Xaa can be any naturally occurring amino acid
  unsure (1)..(169): unsure at all Xaa locations
MNREKLMKMANTVRTGGKGTVRRKKKAVHKTNTTDDKKLQSTLKRVGVNSIPGIEELNIFKDDVVIQFINPKVQASIAANTWAVSGTPQTKKLQDILPQIISQLGTDNLENLKKLAEQFQKQTPGXADIPATIQEEDXDDVPELGRGRCSRAPRSGGAAQPKATASLES

SEQ ID NO: 6113 - protein, 510 aa, Paenibacillus sp. KCTC8848P
MLTMFASGAMAEQEMNGHKPPNSVGSGVFYEIYINSFYDSNGDGHGDLKGITQKLDYLNDGNPRSGKDLQVSGLWLMPMNPSPSYHKYDVTDYYQVDPQYGNLNDFRTLTKEAKRKGVKVIIDLVINHSSSEHPWFKEASTNPQSKYHDYYVWANEKTNLDEKGSWGQQVWHKNPNGEGYFYGTFWSGMPDLNFDNPEVRKEMIKVGKYWLQQGADGFRLDAAMHIFKGQTKDGADKNIAWWNEFRSEMEKINPNVYLAGEVWDKPETIAPYYESLHSLFNFDLGGKILNSVKNGRDQGIATFAEKTLKLYKSHNKAALDAPFLSNHDQTRVMSELGGDVRKAKLPASILLTLPGQPFLYYGEEIGMKGEKPDEYLREPMRWYKGEGRGQTTWEVPKYNRGEVSVEAQMRDNDSLLQSYRTLIRLREEHEALRSHNLEPIQAGSANVAAYQRSSGKETLYVYHNLSGKPVTLQMKDADKQKRKVVFSSSKGVKIKKNAVTIPAYSSLITK

SEQ ID NO: 6114 - protein, 346 aa, Jatropha curcas
LGSHPSFRDIVASFFELPRLNNPNLHRTLLSLSKTANIKAFVIDFFCNSAVQVSSTLNIPTYYFYTSNANGLCHFLYSPTISENVPDSLEDLDIVIDTPGIPSLSSKVLPPVMLDRSHKVYQYFIDTASQMAKSAGLLVNTFESLESRAIKAVIEGKCTPDIPVPPIYCIGPIVSSRKTKEEHECLAWLDSQPSRSVVFLSFGSMGAFSATQLKEMAIGLEKTGVNFLWVVRNPPENGQTSDGMLLEELNLETLFPEGFLERTKERGFLVKQWAPQVAMLNHDSVGLFVTHCGWNSILESLCAGVPMLAWPLYAEQKMNSVFLVEEMKMALPVNQPEDGFVSDGCL

SEQ ID NO: 6115 - protein, 122 aa, Arabidopsis thaliana
MNKGSIFKMDDDFEKRKAEAGRIREKYPDRIPVIVEKAEKSEVPNIDKKKYLVPSDLTVGQFVYVIRKRIKLSAEKAIFIFVDNVLPPTGELMSSVYEDKKDEDGFLYITYSGENTFGASSI

SEQ ID NO: 6116 - protein, 333 aa, Ralstonia eutropha JMP134
MTVNDYALVTGASGFLGSAVVRQALARGWRVRALVRATSPRANLDGLPVEVFEGDMRDPAALTSAMRGVRYLFHVAADYRLWAPDPEEIVRTNVDGTMAVMEAAQEAGVERVVYTSSVATLRVAGASAPVDETAAMTPHEAIGAYKRSKVLAERVVERMVAERGLPAVIVNPSTPIGPRDVRPTPTGRIIVEAATGKIPAFVETGLNLVHVDDVAAGHFQALERGRIGERYILGGDDVMLQQMLRDIADLCGRRPPTVQLPRWPLYPLAHAAEAVARITRKEPFVTVDGLHMSKYRMFFRSDKARQELGYQPRPYIDGLRDALDWFREAGYLR

SEQ ID NO: 6117 - protein, 252 aa, Oryza sativa
MSSVQLSGAGVAAVAFTKNGASSFDGLRLAPPSVRVCSSRRPSRSLVVKAATVVTPKYTSLKPLGDRVLVKLGAAEEKTVGGILLPSTAQSKPQGGEVVAVGEGRTIGDKKVEVSLQIGAEVVYSKYAGTEVQFNDTKHLILKEDDIIGVLETDDVKDMKPLNDRVLIKVAEAEDKTAGGLILTETTKEKPSIGTVVAVGPGPLDDEGKRQPLSVSAGSTVMYSKYAGSEFKGADGTNYIVLRVSDVMAVLS

SEQ ID NO: 6118 - protein, 1039 aa, Cryptococcus neoformans var. neoformans
MSRVPSGSQQPQYTQQPLYHPSSVHSQSTPIQQTHQQYHPHTGQPMTFQGDAHAYSYDRQSQINTWQANPGAAGSMEYHSAVAGSSRGADPYQPYSQSHRSSPSQSVTASRTQPASAQQYTPWAPVQTSATTPSSRGGGVKLEDLMSSDSRAGGKNQPLSGIPLSVSASFDTRSQFSAGPQGASAEKEKDKERDKATQQQGPSEFIKKLYKMLEEEQAQYGNSRTKKGEKGKRGSVGWGANGTSFVVWDMNDFTTKILPQTFRHSNFSSFVRQLNKYGFSKIKHVDAGTGSIKENIWEFQHPNFQAGGKSDLESIKRKPVAPKKANNQEGDENSPRHIGLSNEDQTRMHLMEDRINMLEDALAKSRSEADEARMREMAMMGLVRDMIGHIAASESEAIGSPAATTGHSPRVLHLLKSLDNLARAYPPEMYHSNIARQPTTMPYTPAQPQSHQSFLNAAYNPAFSGNSVGGAAQAQASPHTDGTGSRGSFSGPSTGEIKPPASSSRLRAASNAGAAPSGSVNASVPLASQPTGNPPAGPVARAEDPAEDVIEIPNQMQDMYGGESVGIAPLFVETPAWLTEGTTVPLTMYRKQSDGQVLKAVYQAFAAGGKLPAGEGQDEDGNAIASGSSTSAAEIMAGSSQMGLQQSYGAGSSTSTGIPLPMEGSPSSESSSRKGKGKKSRGTSLKEQRESKLKPHWAQTPRILVVEDDIVYRTLSKKFLQKFGCETETVENAQGAVDKMNGTKYDLVLMDIFFGPNMDGRKATSLIRQFNNYTPIISMTSNAQPQDVDSYYQSGMNDILAKPFTKNHLFTILDKHLVHLRHAQLYERLIPLGVGVPPLSDQHVQEALAVSAANLQNTNGQLQLENGPTAETQNEQQDSNGELELGIRNPLAGSGWSDEAYQLVLAQFLQTGVMPDITTISAVSSSPNPNGIDGTIGTSIVFGESSGFSRKRSIEAISDDNWDGQAQTSASAQAQTQAQVQNTIMQGDQQQGMSLQMPMNVGMGMEVNMGNMPESGMMNQDISNGSDGREAKRARGMAG

SEQ ID NO: 6119 - protein, 408 aa, Alkalilimnicola ehrlichei MLHE-1
MKVPRLLRFLLSYTAIGLLVAAVIIGLRPDLVGMQTGNNAAPNDRNGNGAAAPATQTLAPPIQPRTGPVSYADAVEQAQPAVVNIYTAKTVQEAPHPLFDDPFFRRFFGDVAPHRPRERTQTSLGSGVIFSEQGYVITNNHVIEDADQIQVLLADGREALASVVGRDPETDLAVLRIELDRLPVIQLADDRALRVGDVVLAIGNPFGVGQTVTMGIVSATGRDQLGLTTFENFIQTDAAINPGNSGGALINAEGRLVGINTAIFSRTGGHQGIGFAIPAHLAVSVLQSIVEEGRVVRGWIGVQAQSLTPMLAESFDLAAAQGIVISGVLRGGPADRAGLRPGDIITHIEGEPAADAQALLERVTDKRPGSELRLDLLRDGEARTVTVAVGERPAQDERQPAPRQPRLP

SEQ ID NO: 6120 - protein, 329 aa, Streptomyces coelicolor A3(2)
MTRTPVNVTVTGAAGQIGYALLFRIASGQLLGADVPVKLRLLEITPALKAAEGTAMELDDCAFPLLQGIEITDDPNVAFDGANVALLVGARPRTKGMERGDLLEANGGIFKPQGKAINDHAADDIKVLVVGNPANTNALIAQAAAPDVPAERFTAMTRLDHNRALTQLAKKTGSTVADIKRLTIWGNHSATQYPDIFHATVAGKNAAETVNDEKWLADEFIPTVAKRGAAIIEARGASSAASAANAAIDHVYTWVNGTAEGDWTSMGIPSDGSYGVPEGIISSFPVTTKDGSYEIVQGLDINEFSRARIDASVKELSEEREAVRGLGLI

SEQ ID NO: 6121 - protein, 917 aa, Pseudomonas fluorescens
MLKKLGIKGRVLLLTLLPTSLMALVLGGYFTWMQLSDLQTQLLQRGEMIAEQLASLVAPAMGNHNTQMLERIATQALEQQDVRAVSLLAPDRSLLAHAGPSMLNPPPAGNSSHMMQRSGSDATRYQLPVFGRHRNLAGDLIPDESDRLLGWVELDLSHSGMLLRGYRNLFASLLLIPAGLAVTALLAVRMGRTINNPLTQIKQAVAQLKDGNLETRLPPLGSQELDELASGINRMASTLQNAQEELQHSIDQATEDVRQNLETIEIQNIELDLARKEALEASRIKSEFLANMSHEIRTPLNGILGFTHLLQKSELTPRQLDYLGTIEKSADSLLGIINEILDFSKIEAGKLVLDSIPFNLRDLLQDTLTILAPAAHAKQLELVSLVYRDTPLSLVGDPLRLKQILTNLVSNAIKFTREGTIVARAMLEEEHEDSVQLRISIQDTGIGLSNQDVRALFQAFSQADNSLSRQPGGTGLGLVISKRLIEQMGGEIGVDSTPGEGSEFWISLNLPKTRDDAEDLPGPPLLGRRVAVLENHELARQALQHQLEDCGLEVTPFNTLEALTNGITGVHQSEQAIDLAVLGITTNDMSPERLSQHIWDLEHLGCKVLVLCPTTEQTLFHLSVPNPHSQLQAKPACTRKLRRALSDLVTPRRARSEPEETLSSRAPRVLCVDDNPANLLLIQTLLEDMGAKVLAVDNGYAALNAIQTEPFDLVMMDVQMPGMDGRKSTEAIRQWESERHGTPLPIVALTAHAMANEKRALLQSGMDDYLTKPISERQLAQVVLKWTGLALRNQGPERASERPELGLELQVLDQDEGLRLAAGKADLAADMLAMLLASLDADREAIKAARAANDQNALIERVHRLHGATRYCGVPQLRAACQRSETLLKQEDAKAFAALDELDHAIGRLAAEARTNA

SEQ ID NO: 6122 - protein, 221 aa, Triticum aestivum
  misc_feature (184)..(184): Xaa can be any naturally occurring amino acid
  misc_feature (194)..(194): Xaa can be any naturally occurring amino acid
  misc_feature (206)..(206): Xaa can be any naturally occurring amino acid
  unsure (1)..(221): unsure at all Xaa locations
MERPAPVRKSHTNTADLLAWPEGAQPELADGATPPPNRRPHQPSEAIHKVVFGGQVTEEEAESLNKRKQCSAPKWKEMTGSGIFAAGGEAEEDESANASATPVRTASKNYQAISTISHISFAEDESVSPKKPTSIAEVAKQRELSGTLQSEDDSKLKKQVSHAKSKELTGHAVFSPPEDPRPRXNSENGSSSQXTPRINAQGDQLXFGEADTSTGWGHAGD

SEQ ID NO: 6123 - protein, 328 aa, Arabidopsis thaliana
MRPILMKGHERPLTFLRYNREGDLLFSCAKDHTPTLWFADNGERLGTYRGHNGAVWCCDVSRDSSRLITGSADQTAKLWDVKSGKELFTFKFNAPTRSVDFAVGDRLAVITTDHFVDRTAAIHVKRIAEDPEEQDAESVLVLHCPDGKKRINRAVWGPLNQTIVSGGEDKVIRIWDAETGKLLKQSDEEVGHKKDITSLCKAADDSHFLTGSLDKTAKLWDMRTLTLLKTYTTVVPVNAVSLSPLLNHVVLGGGQDASAVTTTDHRAGKFEAKFYDKILQEEIGGVKGHFGPINALAFNPDGKSFSSGGEDGYVRLHHFDSDYFNIKI

SEQ ID NO: 6124 - protein, 354 aa, Magnaporthe grisea 70-15
MDPRSREVHLVTGGNGYIGLHVVTALLSKGFIVHTTVRSNKFKKVAALYALRDRHQPGRLQIFHADLLRPGSFTKAMKGCTVVHHIASPFLLPEDIKDGETQCIIPAVEGARNVLASVNETYSVKRVVFMSSVGAIYGDSRDVIEYMDGTLTEEYWNETSTSHHYPFHYSKVLAEKEAWMISKEQSRWDMVVICPGLALGPSLSQDGSDSGSVVLMNRIFGGQLFFGAPNLHLPVVDVREVATAHVQAADLPWASGRYILAATETRSLGDIARICRRQKGASRLIPTHKVPDFLLRICAPWIRLSQYWLSRNLGVGFSLDNSRSYKDLGIDYRPLEETIADHFVVWKEAKLARR

SEQ ID NO: 6125 - protein, 665 aa, Pseudomonas putida KT2440
MPSRRERANAIRALSMDAVQKANSGHPGAPMGMADIAEVLWRDYLKHNPSNPSFADRDRFVLSNGHGSMLIYSLLHLTGYDVTIDDIKGFRQLHSRTPGHPEYGYTPGVETTTGPLGQGIANAVGFALAEKVLAAQFNRDGHNIVDHNTYVFLGDGCMMEGISHEVASLAGTLGLNKLIAFYDDNGISIDGEVHGWFTDNTPARFEAYNWQVIRNVDGHDAEEIKMAIETARKSDRPTLICCKTTIGFGSPNKQGKEDCHGAPLGNDEIALTRQALNWNHGPFEIPADIYAEWDAKAAGAKVEAEWNQRFDAYAKAYPELAAEFKRRASGELPADFSEKAQAYINEVAAKGETIASRKASQNALNAFGPLLPEFLGGSADLAGSNLTLWKGCKGVEANDASGNYVFYGVREFGMTAIMNGVALHGGLVPYGATFLMFMEYARNAVRMSALMKQRVIHVYTHDSIGLGEDGPTHQPIEQLTSLRSTPNLDTWRPADAVESAVSWKNALERKDGPSALIFSRQNLQHQDRDAQQIADISRGGYVLKDCAGEPELILIATGSEVGLAVQAFDKLTEQGRKVRVVSMPCTSVFDAQDAAYKQSVLPLEVGARIAIEAAHADFWYKYVGLEGRIIGMTTYGESAPASALFEEFGFTLENILGTAEELLED

SEQ ID NO: 6126 - protein, 540 aa, Arabidopsis thaliana
MDSLRFLRILLLSSSILLLSLRSTVTAGDIVHQDNLAPKKPGCENDFVLVKVQTWIDGVENEEFVGVGARFGKRIVSKEKNANQTHLVFANPRDSCTPLKNKLSGDVVIVERGNCRFTAKANNAEAAGASALLIINNQKELYKMVCEPDETDLDIQIPAVMLPQDAGASLQKMLANSSKVSAQLYSPRRPAVDVAEVFLWLMAIGTILCASYWSAWSAREAAIEHDKLLKDAIDEIPNTNDGGSGVVEINSISAIFFVVLASGFLVILYKLMSYWFVELLVVVFCIGGVEGLQTCLVALLSRWFQRAADTYVKVPFLGPISYLTLAVSPFCIVFAVLWAVYRVHSFAWIGQDVLGIALIITVLQIVHVPNLKVGTVLLSCAFLYDIFWVFVSKKLFHESVMIVVTRGDKSGEDGIPMLLKIPRMFDPWGGYSIIGFGDILLPGLLIAFALRYDWLANKTLRTGYFIWAMVAYGLGLLITYVALNLMDGHGQPALLYIVPFTLGTMLTLARKRDDLWILWTKGEPERACPHHVRLEQCSEK

SEQ ID NO: 6127 - protein, 374 aa, Idiomarina loihiensis L2TR
MAEKKLSGAGLRGQSAGETALCTVGKSGSGLTYRGYDISELAEKVSFEEVAYLLAKGELPNKQQLTDYKKRLKSLRTLPQEVKDVLERIPKSAHPMDVMRTGCSMLGNLETEESFDEADDHIERLLATFPGIVLYWYRYTHDGVRIDTDSEEESIGAHFLRLLHDKAPSELHAAVMNTSLILYAEHEFNASTFTARVCASTLSDIHSCVTGAIGSLRGPLHGGANEAAMELIEGMKDADDAEQKLKGMLERKEKIMGFGHAIYRDFDPRNDVIKAWSKKLSEEVGDSRLYDVSVRCEKVMWDEKKLFPNADFFHASAYHYMGIPTKLFTPIFVMSRVTGWTAHVKEQRANNRIIRPSADYTGPEPRKVPALEER

SEQ ID NO: 6128 - protein, 334 aa, Pseudomonas chlororaphis
MALSKEVPEFDIDDEVLLMETDIATDSMSNEGSAVPSVRAKSKHSASLKQHKHIDYTRALDATQLYLNEIGFSPLLSPEEEVHFARLSQSGDPAGRKRMIESNLRLVVKIARRYVNRGLSLLDLIEEGNLGLIRAVEKFDPERGFRFSTYATWWIRQTIERAIMNQTRTIRLPIHVVKELNVYLRAARELTQKLDHEPSPEEIANLLEKPVGEVKRMLGLNERVSSVDVSLGPDSDKTLLDTLTDDRPTDPCELLQDDDLSQSIDQWLSELTDKQREVVVRRFGLRGHESSTLEDVGLEIGLTRERVRQIQVEGLKRLREILEKNGLSSESLFQ

SEQ ID NO: 6129 - protein, 162 aa, Triticum aestivum
  misc_feature (45)..(45): Xaa can be any naturally occurring amino acid
  misc_feature (65)..(65): Xaa can be any naturally occurring amino acid
  misc_feature (109)..(109): Xaa can be any naturally occurring amino acid
  unsure (1)..(162): unsure at all Xaa locations
MAEQTEKAFLKQPKVFLSSKKSGKGKKPGKGGNRFWKSIGLGFKXTPGKQFEGTYIDKKCPFTGXTVSIRGRIIAGTCHSAKMNRTIIVRRNYLHFVKKYQRYEKRHSXNIPAHISPCFRVKEGDHVIIGQCRPLSKTVRFNVVKVIPAGSAAAGKKAFTAA

SEQ ID NO: 6130 - protein, 471 aa, Frankia sp. CcI3
MPRRAKIVCTLGPATSSPEKVRALVDAGMDIARLNFSHGTHEQHAVTYARVREAAEAAGRSVGTLADLQGPKIRLGNFADGGVTLLPGQRFTVTIRDVPGDQHQVGTTYPGLPGDVAAGDRVLVDDGRLVLQIDGVTDTDVHTTVVVGGPVSDHKGMNIPNAALTVPALTEKDAADLRFALNLGVDMVALSFVRSAVDAAAVHAIMDEVGIRVPVHAKIEKPQAVAELDEIIEAFDGLMIARGDLGVELPLEDVPLVQKRAVSQARERAKPVIVATQVLESMVSAPRPTRAEASDCANAVLDGADAIMLSAETSVGAYPIEATATMARIIETAEADLGRIPPLRTEPRTLGGALAQAAASVGAAVGARYLVAHTLSGDTARRLARYRTEVPVLAFTPIPAVRNQMALFWGVETFLVPFADSTDEMVRQVDSALFHIGRCKPGELVVVVAGTPPGVAGMTNMMRVHRIGEAI

SEQ ID NO: 6131 - protein, 498 aa, Mycobacterium leprae TN
MATLAESPEPKSGASRAGVLGEEAGYHKGLKPRQLQMIGIGGAIGTGLFLGAGGRLAKAGPGLFLVYAVCGVFVFLILRALGELVLHRPSSGSFVSYAREFFGEKAAYVVGWLYFLDWAMTAIVDTTAIATYLHRWTIFTALPQWTLALLALAVVLVMNLISVEWFGELEFWAALIKVCALMAFLVVGTIFLGGRYPVDGHNTGLSLWTSHGGLFPTGVAQLIVVSSGVMFAYAAVELVGTAAGETVEPKKIMPRAINSVIARIAIFYVGSVILLALLLPYSAFKASESPFVTFFSKVGFYGAGDLMNIVVLTAALSSLNAGLYATGRVMHSIAINGSGPKFTARMSKNGVPYGGILLAAVICLCGVALNAFNPGQAFEIVLSVAALGIIAGWGTIVLCQLRLHKMAKAGIMRRPRFRMPLAPYSGYLTLAFLFAVLVVMAFDKPIGTWTVASLIVIVPALIAGWYSIRKRVMTIARERMGYTGPFPAIANPPVKSSD

SEQ ID NO: 6132 - protein, 246 aa, Clostridium tetani E88
MFIYDKLNIYVIVGGIKMINGKIAKILIVDDDQNICEVIKMYLESAGFDTRVCHDGKESQSIFIEYNPDLVLLDIMLPSMDGIDVLKWIRKEHETPVIMLTAKGETFDKVLGLELGADDYMVKPFEPKELLARVKAVLRRFNSDNVSKEALQFNGLTIDIDSYTVIYNGKEIKMPPKEFELLYYLASNKNRVFTREQLLCEVWGYDYPGDSRTVDVHIKRLREKLEEGSNWQIETVWGVGYKFEVK

SEQ ID NO: 6133 - protein, 505 aa, Mycobacterium leprae TN
MATLAESPEPKSGASRAGVLGEEAGYHKGLKPRQLQMIGIGGAIGTGLFLGAGGRLAKAGPGLFLVYAVCGVFVFLILRALGELVLHRPSSGSFVSYAREFFGEKAAYVVGWLYFLDWAMTAIVDTTAIATYLHRWTIFTALPQWTLALLALAVVLVMNLISVEWFGELEFWAALIKVCALMAFLVVGTIFLGGRYPVDGHNTGLSLWTSHGGLFPTGVAPLIVVSSGVMFAYAAVELVGTAAGETVEPKKIMPRAINSVIARIAIFYVGSVILLALLLPYSAFKASESPFVTFFSKVGFYGAGDLMNIVVLTAALSSLNAGLYATGRVMHSIAINGSGPKFTARMSKNGVPYGGILLAAVICLCGVALNAFNPGQAFEIVLSVAALGIIAGWGTIVLCQLRLHKMAKAGIMRRPRFRMPLAPYSGYLTLAFLFAVLVVMAFDKPIGTWTVASLIVIVPALIAGWYSIRKRVMTIARERMGYTGPFPAIANPPVQPSERSHSQNP

SEQ ID NO: 6134 - protein, 1816 aa, Arabidopsis thaliana
  misc_feature (1730)..(1730): Xaa can be any naturally occurring amino acid
  misc_feature (1750)..(1750): Xaa can be any naturally occurring amino acid
  misc_feature (1780)..(1780): Xaa can be any naturally occurring amino acid
  unsure (1)..(1816): unsure at all Xaa locations
MEETEKNKGSISMVEANLPPGFRFHPRDDELVCDYLMRRTVRSLYQPVVLIDVDLNKCEPWDIPQTARVGGKEWYFYSQKDRKYATGYRTNRATATGYWKATGKDRAIQRNGGLVGMRKTLVFYRGRSPKGRKTDWVMHEFRLQGKLLHHSPNSLEGQNRTVLQSGQMHNSVVASASSVSSQPNMVNGISQDTLLLRQEMLNRTYAWLQQRQPSKTDDASKAKLSEVAKRLESAMWRTATSKVVIVLDGNFFWQEDYLDFRSFDVRVESTLKQLLSQRRANPSSSVSTMVQTPGVSHGWGQSYTATPMVDTSKFNSSNNLSDATTETGRLLPTNRMYRGTINNGRQELSAVGQMIPTPGFDNSANADVYQSHRNEEYSGDGGKLLATGSDFGNPSQLQKQRPTGSNDLMGYNLDHQLGGGFRSNIHQNTSGMTSIPLNAGVGMSGNNVHLANVPRSSEGVLSSTHFSTFSQPSQQPVEQLQVSHVNRYSMSNSGTFVSGNLYGVQTSSGSIETAVDMNSMSLNSMRRVDTSFGSQSGLQNNPLLKPHLRHQFENGNFQSSSNSKENLAQVSHRPLERQFNQQAHYGQYHQQELLMNNDAYRQSQPASNLVSQVKNEPRVEYYNEAFQMQAINKVEPSKPQNQYKQNTVKDEYVGAQSAPVSSSQLKMSPSFPPQTHQTQQVSQWKDSSSLSAGVQPVSGLGQWHSSSQNLTPISKNSNEEREHFGVRFHKQHEGTNNSSSVRESTNCLTVAPSGTLDVPHLPVGINVLSKQLNGDCGLSYKNQRRWLLFLLHVRKCNAAEDNCESKYCFTAKTLLKHINCCKAPACAYQYCHQTRQLIHHYKHCGDEACPVCVFVKNFKEKQKEKFTFLQRAEPSSASLNHGPKESFESMRTSSERDSEAPFVVDDLQPSPKRQKVEKPSQFAYPDTQGNPATISAGVSQAHFSMGLQEKDRLPSDVCKPVRSNVPMNADSSDSSRRLVPVSRELEKPVCKDTHMGRHGVKSALDGESLRLSKQEKPKRMNEISAPKEENAEQSLGVVSASNCGKSKIKGVSLIELFTPEQVEEHIRGLRQWVGQSKTKAEKNKAMGLSMSENSCQLCAVERLAFEPTPIYCTPCGARVKRNAMHYTVVAGESRHYVCIPCYNEARANTVSVDGTPVPKSRFEKKKNDEEVEESWVQCDKCQAWQHQICALFNGRRNHGQAEYTCPNCYIQEVEQGERKPVSQNVILGAKSLPASTLSNHLEQRLFKKLKQERQERARLQGKSYEEVPGADSLVIRVVASVDKILEVKPRFLDIFREDNYSSEFPYKSKAILLFQKIEGVEVCLFGMYVQEFGTDSASPNQRRVYLSYLDSVKYFRPDVRTVSGEALRTFVYHEILIGYLDYCKKRGFSSCYIWACPPLKGEDYILYCHPEIQKTPKTDKLREWYLAMLKKASKEKVVVECTNFYDHFFVQSGECRAKVTAARLPYFDGDYWPGAAEDLIDQMSQEEDGKKSNRKLMPKKVISKRALKAVGQLDLSVNASKDLLLMHKLGEIILPMKEDFIMVHLQHCCKHCCTLMVSGNRWVCNQCKNFQICDKCHEVEENRVEKEKHPVNQKEKHVLYPVAIDNIPTEIKDNDDILESEFFDTRQAFLSLCQGNHYQYDTLRRAKHSSMMILYHLHNPTVPAFAMACAICQQELETAQGWRCEVCPDYDVCNACYSKGINHPHSIISRPSATDSVVQNTQTNQIQNAXREVLLHVMTCCTAQCQYPRXCIACKKMWSLFRLHSRNCRDPQCKVPKCRXRAHFSRKQQQADSRRRAAVMEMVRQRAADTTASTPE

SEQ ID NO: 6135 - protein, 678 aa, Arabidopsis thaliana
MASSEVSMKGNRGGDNFSSSGFSDPKETRNVSVAGEGQKSNSTRSAAAERALDPEAALYRELWHACAGPLVTVPRQDDRVFYFPQGHIEQVEASTNQAAEQQMPLYDLPSKLLCRVINVDLKAEADTDEVYAQITLLPEANQDENAIEKEAPLPPPPRFQVHSFCKTLTASDTSTHGGFSVLRRHADECLPPLDMSRQPPTQELVAKDLHANEWRFRHIFRGQPRRHLLQSGWSVFVSSKRLVAGDAFIFLRGENGELRVGVRRAMRQQGNVPSSVISSHSMHLGVLATAWHAISTGTMFTVYYKPRTSPSEFIVPFDQYMESVKNNYSIGMRFKMRFEGEEAPEQRFTGTIVGIEESDPTRWPKSKWRSLKVRWDETSSIPRPDRVSPWKVEPALAPPALSPVPMPRPKRPRSNIAPSSPDSSMLTREGTTKANMDPLPASGLSRVLQGQEYSTLRTKHTESVECDAPENSVVWQSSADDDKVDVVSGSRRYGSENWMSSARHEPTYTDLLSGFGTNIDPSHGQRIPFYDHSSSPSMPAKRILSDSEGKFDYLANQWQMIHSGLSLKLHESPKVPAATDASLQGRCNVKYSEYPVLNGLSTENAGGNWPIRPRALNYYEEVVNAQAQAQAREQVTKQPFTIQEETAKSREGNCRLWHSSDQQHEWDRLNHVSEKQLE

SEQ ID NO: 6136 - protein, 202 aa, Arabidopsis thaliana
MNILNRLGLGSSGQTNMDPSPIAQGNDDDTPAPGNQFAQFGAGCFWGVELAFQRVPGVTQTEAGYTQGTVHNPSYGDVCSGTTGHSEVVRVQYDLNDCTYESLLDLFWSRHDPTTLNRQGNDVGTQYRSGIYFYTPEQEKLARESLERHQQQMERKIMTEILPAKKFYRAEEHHQQYLSKGGRFGQGQSTAKGCNDPIRCYG

SEQ ID NO: 6137 - protein, 530 aa, Arabidopsis thaliana
MTVNGEFPGPTIKAFAGDTIVVNLTNKLTTEGLVIHWHGIRQFGSPWADGAAGVTQCAINPGETFTYNFTVEKPGTHFYHGHYGMQRSAGLYGSLIVDVAKGKSERLRYDGEFNLLLSDWWHEAIPSQELGLSSKPMRWIGEAQSILINGRGQFNCSLAAQFSNNTSLPMCTFKEGDQCAPQILHVEPNKTYRIRLSSTTALASLNLAVQGHKLVVVEADGNYITPFTTDDIDIYSGESYSVLLTTDQDPSQNYYISVGVRGRKPNTTQALTILNYVTAPASKLPSSPPPVTPRWDDFERSKNFSKKIFSAMGSPSPPKKYRKRLILLNTQNLIDGYTKWAINNVSLVTPATPYLGSVKYNLKLGFNRKSPPRSYRMDYDIMNPPPFPNTTTGNGIYVFPFNVTVDVIIQNANVLKGIVSEIHPWHLHGHDFWVLGYGDGKFKPGIDEKTYNLKNPPLRNTAILYPYGWTAIRFVTDNPGVWFFHCHIEPHLHMGMGVVFAEGLNRIGKVPDEALGCGLTKQFLMNRNRN

SEQ ID NO: 6138 - protein, 613 aa, Arabidopsis thaliana
MESCDCFETHVNQDDLLVKYQYISDALIALAYFSIPLELIYFVQKSAFFPYKWVLMQFGAFIILCGATHFINLWMFFMHSKAVAIVMTIAKVSCAVVSCATALMLVHIIPDLLSVKNRELFLKKKADELDREMGLILTQEETGRHVRMLTHGIRRTLDRHTILRTTLVELGKTLCLEECALWMPSQSGLYLQLSHTLSHKIQVGSSVPINLPIINELFNSAQAMHIPHSCPLAKIGPPVGRYSPPEVVSVRVPLLHLSNFQGSDWSDLSGKGYAIMVLILPTDGARKWRDHELELVENVADQVAVALSHAAILEESMHARDQLMEQNFALDKARQEAEMAVHARNDFLAVMNHEMRTPMHAIISLSSLLLETELSPEQRVMIETILKSGNPGSTHASDVLDLSRLEDGSLLLENEPFSLQAIFEEVISLIKPIASVKKLSTNLILSADLPTYAIGDEKRLMQTILNIMGNAVKFTKEGYISIIASIMKPESLQELPSPEFFPVLSDSHFYLCVQVKDTGCGIHTQDIPLLFTKFVQPRTGTQRNHSGGGLGLALCKRFVGLMGGYMWIESEGLEKGCTASFIIRLGICNGPSSSSGSMALHLAAKSQTRPWNW

SEQ ID NO: 6139 - protein, 107 aa, Glycine max
  misc_feature (84)..(84): Xaa can be any naturally occurring amino acid
  unsure (1)..(107): unsure at all Xaa locations
LGESEKCVEDDESRVPIHIVTAASQLPVDFLEPSPQSKLVIDFDCEGVDLCRKGTLCVMQLAFSDAVYLVDAIEGGEELSIACXLYFQFGIKLNNVVDTQELMKHWV

SEQ ID NO: 6140 - protein, 671 aa, Helicobacter pylori 26695
MKKKANEEKAQKRAKTEAKAEATQENKTKENNKAKESKIKESKIKEAKAKEPIPVKKLSFNEALEELFANSLSDCVSYESIIQISAKVPTLAQIKKIKELCQKYQKKLVSSSEYAKKLNAIDKIKKTEEKQKVLDEELEDGYDFLKEKDFLEWSRSDSPVRMYLREMGDIKLLSKDEEIELSKQIRLGEDIILDAICSVPYLIDFIYAYKDALINRERRVKELFRSFDDDDENSVSDSKKDEDNEEDEENEERKKVVSEKDKKRVEKVQESFKALDKAKKEWLKALEAPIDEREDELVRSLTLAYKRQTLKDRLYDLEPTSKLINELVKTMETTLKSGDGFEKELKRLEYKLPLFNDTLIANHKKILANITNMTKEDIIAQVPEATMVSVYMDLKKLFLTKEASEEGFDLAPNKLKEILEQIKRGKLISDRAKNKMAKSNLRLVVSIAKRFTSRGLPFLDLIQEGNIGLMKAVDKFEHEKGFKFSTYATWWIKQAISRAIADQARTIRIPIHMIDTINRINKVMRKHIQENGKEPDLEVVAEEVGLSLDKVKNVIKVTKEPISLETPVGNDDDGKFGDFVEDKNIVSSIDHIMREDLKAQIESVLDQLNEREKAVIRMRFGLLDDESDRTLEEIGKELNVTRERVRQIESSAIKKLRSPQYGRILRNYLRI

SEQ ID NO: 6141 - protein, 395 aa, Vibrio vulnificus CMCP6
MFSQLPTPALDPILSLTVAFRNDPRDQKVDLGIGVYKNNKGETPIMRAVSQAQKIVADTQTTKSYVGLAGCEEFNQSMVNLLLAGTSVLDRVSAIQTPGASGALRMLGDLMKVAQPDTTVWISNPSYVNHKPVMEAAGLKVRYYRYFSPETKQVDIGQMLDDLATAGPKDVVLLHGCCHNPTGADIDFAAWQAITDLAVKNGFTPFVDIAYQGFGDGLEEDAKGLQFMADRVEEMLITTSCSKNFGLYRERTGAAIVIGKNAKESSNAKGKLLTLARSTYTMPPDHGAALVKTILQNVELTTTWKQELCEMQQRLLNLRQTLCNELRNQHNTSQFDFIESHKGMFTVLGFTPEQMGTLRDEYGIYGVGDGRINIAGLTEAHIPYVADAIVKVSQR

SEQ ID NO: 6142 - protein, 229 aa, Zea mays
MAVSFANVNAEAGLKKLDEYLLTRSYITGYQASKDDLAVYSSFSADPSSKYINVARWFNHIDALVRLSGITAEGQGVKVESSAVPSAPTPDVAEAQAPAADEDDDDDVDLFGEETEEEKKAAEERAAAAKASGKKKESGKSSVLLDVKPWDDETDMAKLEEAVRSVQMEGLLWGASKLVPVGYGIKKLQIMMTIVDDLVSVDTLIEDYLCAEPVNEYVQSCDIVAFNKI

SEQ ID NO: 6143 - protein, 322 aa, Bacillus halodurans C-125
MKAVVYEQYGDPSVLKVMDVPKPTIGPTDVLINVKASGTNPVDTYFRKGIRQVEQFPHIPHFDVAGEIVEIGSDIENWQVGDRVWATNIKGASAEYALIPEHLLFPLPKSVSYEEGAALAMTFMTAHLSLFDRGRLQKGETVLIYGGSGAVGHAAIQLAKRAGATVITTAGDREKGEIAKQAGADQVIFYKEESVVDAVGKATNGQGVPLILDMSLSENMAQDFDILTTGGRIVAIGSPVDNTPPLLWRQLNMKHASLIGVLVFTAPKNVLRQAGKEIAEGFEQGELSAYIGKVFPIDEAAHAHRALEAKTYQGRIILSHED

SEQ ID NO: 6144 - protein, 584 aa, Bacillus halodurans C-125
MVTLESIRRYLLFVRPYWKQIFITIIIGLLKFGIPLLIPLLVAYIIDGIIFAEQMTNEEKFSALFTVMGGIFFIFIVLRPPIEYYRQYFAQWIGNKILYDIRDHLFTHIQKLSLRFYSNRKVGEIISRVIHDVEQTKTFVMTGLMNIWLDMFTIIIALAIMFSMNAWLTLVAIAMFPFYGFSIKYFYAKLRHLTRVRSQALADVQGHLHERVQGMSVIRSFALEDYEQTQFAKRNGTFLNRAIDHTKWNAKTFAVVNTVTDIAPLLVIFVAACFVINGELEVGAMTAFVLYMERLYNPLRRLVNSSTTLTQSIASMDRVFEFIDEKYDIVDKEGAVKLEEVHGDVTFDHVSFSYEKEETPALKDVHFHVKRGETVAFVGMSGGGKSTLISLIPRFYDVSSGRILIDGHDIRDYQVRSLRDQIGMVLQENILFSDSVRMNILMGKPDATEEEVIAAAKAANAHDFIMNLPNGYDTEVGERGVKLSGGQKQRVAIARVFLKNPPILIFDEATSALDLESEHYIQEAMEKLAKNRTTFIVAHRLSTITHADRIIVVENGEIVESGTHDELMSCNGVYKKLFEVQNLD

SEQ ID NO: 6145 - protein, 118 aa, Brassica napus
MQMLRSFSTRTRSRRGGYERVIDDSTFSLLGAKLRRSTSVPYYAPSIKLGAGGVPTILEELPRQKSKKVKPTSKFSHPIFSFLYGKKKKSTTRKPEFSRYLEYLKEGGMWDARTNTPV

SEQ ID NO: 6146 - protein, 579 aa, Kluyveromyces lactis NRRL Y-1140
MVESDRTSLLQPVRNALNPELSEGLPAYVGAEVAETEHLLESEDEAREGLQVSEMSRARLHIIISSMCLGSFLAALDNTIVTTLLSHIASEFNELSHISWIATAYLLSSATFQPLYGKISDIFGRRPLIIISNLFFILGCLICGLSKNLWTLVAGRFIAGIGGGGVTSLGSITASDIVPLRSRALYQGIFNFFFGLGIAIGGLIGGWFSESKNGWRMAFLVQVPLCAISLVLIIIFLKLPPGCKGLGLVSNDKDGKVDIKDKLKRIDWLGSLSLVTFLFAFMLASSLGGKEIPYNSNIFKLLVVATILSGTAFIYVELYISDDPILPIRFLTNRSILGASFANWFCMMSGVTLAFYVPVYWSSVQNLKPTDMGKRIAPNFFSTAFGSIGAGYYMKKTGRYYGFLLKFTGLMVLGQLQVLLMKPDISTWRQYILLPLPHFGSSVLITVTLLAMIAAVPHEHQAATTSISYAFRSTGSTLGVSVGAALFRNKLSGSLFDSVMKFESDKYSKEYLLSIIKQASESSEYVHANAPKFIQATLIQCYEQACKSTFAFCFLISIFAWISCGVIKEYKLHTSMERK

SEQ ID NO: 6147 - protein, 437 aa, Bacillus halodurans C-125
MNRSRSESLFQKAQSLIVGGVNSPSRSFKAVGGGAPVFMEKAKGAYFWDVDGNQYIDYLAAYGPIITGHAHPHITNAIQRAAENGVLYGTPTKLENQFASMLQQAIPSLEKVRFVNSGTEAVMTTIRVARAYTGRDKIIKFAGCYHGHSDLVLVAAGSGPSTLGTPDSAGVTKNIAEEVITVPFNQLDSLKEALDHWGEEVAAVLVEPIVGNFGIVEPHEGFLEGVNELAHNAGALVIYDEVITAFRFMYEGAQNYVGVEPDMTALGKIIGGGLPIGAYGGRIDIMEKVAPLGPAYQAGTMAGNPASMSAGIACLEVLQEEGLYDELDRKGAILEKGIKAHAEAHGITISINRLKGALTVYFTDETVTCYEQAERSDGEKFSLFFKEMLNQGINLAPSKYEAWFLTIAHTDEDIEKTLQAVDHAFSVMAAKGYHLKR

SEQ ID NO: 6148 - protein, 174 aa, Triticum aestivum
MAPAVMASSATTVAPFQGLKSTAGLPVSRRSSGSLGRVSNGGRIRCMQVWPIEGIKKFETLSYLPPLSTEALLKQVDYLIRSKWVPCLEFSKVGFVFREHNSSSGYYDGRYWTMWKLPMFGCTDATQVLNEVEEVKKEYPDAYVRVIGFDNLRQVQCVSFIAFRPPGCEESGKA

SEQ ID NO: 6149 - protein, 391 aa, Clostridium tetani E88
MDDYKFNEIKDVRWESINPDEGNIKFRNNKSHNRIKNFLKLIVFILIAIISGSISGYYVVDKKINGIEKNESYKGAPIVSERTSVNNRDKNSITKVAESVGPAVVGISNKGENFWGEINKGSGSGIIFKPDGYIITNFHVIEGASEVTVKLSSGKVFPAKIVGFDKRSDLAVIKIEANNLPTAKFGDSSKVSVGDLAIVIGNPLGEEFAGSVTAGIISALNRRVEHGGAIYKVLQTDAAINPGNSGGALCNENGEVIGINSLKIGVAANAEGMGFAISINEAKEIINSLMNYGKVKRPSLGVKGQPVVSRDGKIKGFYVNEIILGSGAARSGIKPTDVIIELNGKKVENFDDIAQILEQHKIGDTVKCKVWRNGDTREVNITLSELQDFNQ

SEQ ID NO: 6150 - protein, 159 aa, Magnetococcus sp. MC-1
MLPCLFMLAVFFHQEFTMTIERTFSIIKPDAVAKNVVGEIQSRFEKAGLRIIASKMIRLTPEIAGKFYEVHKARPFYNDLCSYMSSGPVVVQVLEGDGAVLKNRDIMGATNPKDAAPGTIRADFAESIDANAVHGSDAPETAAQEIAFFFSGTELCDRP

SEQ ID NO: 6151 - protein, 464 aa, Listeria monocytogenes EGD-e
MLYSKENKESYLEPVFGSSAEDRDIPKYTLGKEPLEPRIAYRLVKDELLDEGSARQNLATFCQTYMEDEATKLMSETLEKNAIDKSEYPRTAELENRCVNIIADLWHAPKDQKFMGTSTIGSSEACMLGGMAMKFAWRKRAEKLGLDIYAKKPNLVISSGYQVCWEKFCVYWDIDMRVVPMDKEHMQLNTDQVLDYVDEYTIGVVGILGITYTGRYDDIYALNEKLEEYNSKTDYKVYIHVDAASGGFFTPFVEPDIIWDFRLKNVISINTSGHKYGLVYPGIGWVLWKDESYLPEELIFKVSYLGGEMPTMQINFSRSASHIIGQYYNFLRYGFEGYRTIHQKTSDVAQYLAHAVEQTGYFDIFNDGSHLPIVCYKLKDDANVNWTLYDLADRLQMRGWQVPAYPLPKSLENIIIQRYVCRADLGFNMAEEFIQDFQASIQELNNAHILFHDTQQSGVHGFTH

SEQ ID NO: 6152 - protein, 389 aa, Oryza sativa
MELPADGSALARQGSIYSLTFDEFQSALGSAEKDFGSMNMDELLRNIWTAEESQAIAPAAAAASAAAVVGDAQQQQQPIQRQGSLTLPRTLSQKTVDEVWRDIMGLGGSDDEDPAAAAAAAAPAQRQPTLGEMTLEEFLVRAGVVREDMGQTIVLPPQAQALFPGSNVVAPAMQLANGMLPGVVGVAPGAAAAMTVAAPATPVVLNGLGKVEGGDLSSLSPVPYPFDTALRVRKGPTVEKVVERRQRRMIKNRESAARSRARKQAYIMELEAEVAKLKEQKAELQKKQVEMIQKQNDEVMERITQQLGPKAKRFCLRRTLTGPCCCICSVCCCCVDMSSRLQFSDSVLYPSLRGFSFSDLHFKDKEERLISQMGEKRGNGLAKNIFGRL

SEQ ID NO: 6153 - protein, 326 aa, Zea mays
MRPILMKGHERPLTFLRYNRDGDLLFSCAKDHTPTVWYADNGDRLGTYRGHNGAVWTCDVSRDSARLITGSADQTAKLWDVSTGKELFSFRFDAPARSVEFAIGDALAVVTTDNFMDHVPTVQVKRIAEDIDDQTEESALVITGIKGRINRAVWGPLNRTIITAGEDATVRIWDSETGQLLKESDKESGHQKTISSLSKSLDWSHFITGSLDKSAKLWDTRTLTLIKTYVTERPVNAVDISPTHDTVVLGGGQDAMNVTMTDRRAGKFEAKFYHKILQEEIGGVKGHFGPINALAFNPDGRSFSSGGEDGYVRLHHFDSDYFSIKM

SEQ ID NO: 6154 - protein, 465 aa, Triticum aestivum
  misc_feature (251)..(251): Xaa can be any naturally occurring amino acid
  misc_feature (345)..(345): Xaa can be any naturally occurring amino acid
  misc_feature (380)..(380): Xaa can be any naturally occurring amino acid
  unsure (1)..(465): unsure at all Xaa locations
MQSLLVPTAAACAAPSSASRPRPGRVSVRASASAAAAAAPPRRETDPKKRVVITGMGLVSVFGNDVDAYYDRLLAGESGVGPIDRFDASKFPTRFAGQIRGFSSEGYIDGKNDRRLDDCLRYCIVSGKKALESAGLALGSDAMGKIDKARAGVLVGTGMGGLQVFSDGVQNLLEKGYRKITPFFIPYAITNMGSALLGMDIGFMGPNYSISTACATSNYCFYAAANHIRKGEADVMIAGGTEAAIIPIGVXGGFVACRALSQRNDDPKTASRPWDKERDGFVMGEGAGVLVMESLGHAMKRGASIVAEYLGVPVTCDAYHMTDPRADVPGVSSGIRQSLQDAGVXAPEEVNYINAHATSTLAGDLAEMNAIKQVFKDPSXIKVNATKSMIGHCLGAAGGLEAIATIKAINTGLVHPSINQFDREPAVEFDTVPNVKVEHEINVGISNSFGFGGHNSVVVFAPFKP

SEQ ID NO: 6155 - protein, 59 aa, Crocosphaera watsonii WH 8501
MNGLLADASTRLEKALRYTRISEDAIERLKYPKTSLSVSIPVRMDDGSLRIFSRVPSAL

SEQ ID NO: 6156 - protein, 334 aa, Crocosphaera watsonii WH 8501
MRYDDTRGPGKGGVRYHPNVTMDEVQSLAFWMTFKCALLNLPFGGAKGGITLNPKELSKQELERLSRGYIEAIADFIGPDIDILAPDVYTNQMIMGWMMDQYNIIQRKISPGVVTGKPQTMGGSQGRDTATGTGAYYVIQTILPKFELIPEKTTVAVQGFGKAGAVVAELLGKVGYKVVAVSDSKGGIYAEQGLDIVSIRNYKEEHQGIAAIYCQDTVCNIGEHQSITNEELLGLDVDVLIPAALENQITEENADNVRAKFIFEVANGPINSAADTILDEKGIYVFPDILVNAGGVTVSYFEWVQNRSGLYWTKTEVNQRMRDKMMSEAQEVWV

SEQ ID NO: 6157 - protein, 352 aa, Sinorhizobium meliloti 1021
MSGAPTRTRFARLYGPRDLRLEVADVPAPGDGEVLLKMAAGGICGSDLHYYQDGGFGPVRVREPIIPGHEASGRVAVLGAGVSGLAIDDLVAVNPSQPCGTCRFCGEGLPVHCLDMRFLGSAMRLPHTQGMFRDWLVVPAVQCHPAGSQVSPGEAACAEPLAVCLHAAAQAGEIRGKKVLVTGAGPIGALVVAAARHAGADEIVVTDLADAALDRAKAMGATRIVNVHRDPAGLAAYEADKGKFHVAFECSAAEPALRGAVAAVRPRGTIVQVGVTGEITLPLHALVGKELRLVGSQRFDGEFALAVALISDRRIDVRPIISHQFPVDEAVRAFEQAGDRSAACKVQLTFLS

SEQ ID NO: 6158 - protein, 305 aa, Neurospora crassa
MQIFVKTLTGKTITLEVESSDTIDNVKQKIQDKEGIPPDQQRLIFAGKQLEDGRTLSDYNIQKESTLHLVLRLRGGMQIFVKTLTGKTITLEVESSDTIDNVKQKIQDKEGIPPDQQRLIFAGKQLEDGRTLSDYNIQKESTLHLVLRLRGGMQIFVKTLTGKTITLEVESSDTIDNVKQKIQDKEGIPPDQQRLIFAGKQLEDGRTLSDYNIQKESTLHLVLRLRGGMQIFVKTLTGKTITLEVESSDTIDNVKQKIQDKEGIPPDQQRLIFAGKQLEDGRTLSDYNIQKESTLHLVLRLRGGQ

SEQ ID NO: 6159 - protein, 392 aa, Zea mays
SAIAPCLSYARGTGSAPSASCCLNRPTPFVGLAFKRKWQNKRKEQGKPCDRPNIVTGANVQVCWEKFARYFEVELKEVKLSEGYYVMDPVKAVEMVDENTICVAAILGSTLTGEFEDVKQLNDLLTDKNKETGWDVPIHVDAASGGFIAPFLYPELEWDFRLPLVKSINVSGHKYGLVYPGVGWVIWRSKEDLPEELIFHINYLGTDQPTFTLNFSKGSSQIIAQYYQLIRLGFEGYRNIMENCQENAAILREGIAATGRFDVLSKDAGVPLVAFSLRDSSRFSVFDVSENLRRFGWIVPAYTMPADAEHVAVLRVVVREDFSRSLAERLVSDVRKILRELDARATHAVRVATATAEQSGDSVVAKKSVLEIEREVAARWRNAVNKKKTGVC

SEQ ID NO: 6160 - protein, 412 aa, Frankia sp. CcI3
MPSPRVLGLVLAGGAGRRLAPLTADRAKPAVPFGGLYRLIDFVLSNLVNAGYLRIAVLTQYKSHSLDRHITTTWRMSNLLGNYVTPVPAQQRLGPRWFAGSADAIHQSLNLVYDDAPDIVVVFGADHVYRMDPRQMVAQHLDSGAGVTVAGLRVPRSEGRAFGVIQTAPDGRTIEAFLEKPADPPGLPGSPEETFASMGNYVFSTDVLIDALRKDAADEDSVHDMGGNIIPMLVAQRAAAVYDFAGNVVPGTTVRDRGYWRDVGTVDSYFEAQMDLCALDPVFNLYNREWPILTSIPSLPPAKFVHDGLQRTGTAVNSIVSNGVIISGGTVRSSVLSPGVRVSSWAEVDHTVLMDNVLVGRGAVVRDAILDKNVHVPAGAQVGVDKDRDRARGYTVSEQGITVVGKGVTIAD

SEQ ID NO: 6161 - protein, 154 aa, Crocosphaera watsonii WH 8501
MPLPTSLVTLEGTALPLSELENKVILFVNVASKCGLTPQYSGLVQLDKKYGERGFKVVAVPCNQFGEQEPGTPAEIKEFTSTKYDVEFTLLEKQDVNGSNRSPLYQFLVKDGEDIAWNFGKFLVGRDGEVVARFEPATAPDDAQLEAAIDKALG

SEQ ID NO: 6162 - protein, 146 aa, Glycine max
  misc_feature (37)..(37): Xaa can be any naturally occurring amino acid
  misc_feature (61)..(61): Xaa can be any naturally occurring amino acid
  misc_feature (72)..(72): Xaa can be any naturally occurring amino acid
  unsure (1)..(146): unsure at all Xaa locations
MVLSTTDSEAYDYDNSPFDSKSVLASLSTFKMACASXPMEAESHIINNELMLDGTPRENLXASFVTTYMDPXSDKLIMHDINYIYVDMDEHPDTTELQTLSAIMILHFCNAPPKDTEATHAVRTGGSSEALMSTGLACQRLWQCTT

SEQ ID NO: 6163 - protein, 380 aa, Mycobacterium avium subsp. paratuberculosis K-10
MPPQSSTPLPVTVLSGFLGAGKTTLLNHVLANQEGRRVAVIVNDMSEVNIDAALVAGTGFLDRTEEKLVELTNGCICCTLREDLIESVARLASAGRFDYLLIESTGISEPMPVAASFSWEFENGFSLSRIARLDTMVTVVDASTFLRELARGEALAARHLAAGDGDVRTIADLLVDQVEFADVILLNKTDLVSEKTNATVAAVLRRLNPAAKIVPTDHGRVALSEVLDTGLFDPHLAAESAGWAEELANGHSPETEEYGISSVTFRAARPLHPQRLHVALGQLQGVLRSKGFCWIASRPDIAAIWSQAGPNLVIEPAQYWSTADFPAGQEIVFIGVNLDHSRVLDLMQAALLTDTELAQGPQRWVGYPDPLPPWDVVHAH

SEQ ID NO: 6164 - protein, 337 aa, Cryphonectria parasitica
MVVKVGINGFGRIGRIVFRNAHEHSDVEIVAVNDPFIEPHYAAYMLKYDSQHGNFKGDVTVEGSDLVVGGKKVRFYTERDPAAIPWSETGADYIVESTGVFTTTEKAKAHLKGGAKKVIISAPSADAPMYVMGVNEKTYDGSGMVISNASCTTNCLAPLAKVINDEFKIIEGLMTTVHSYTATQKTVDGPSAKDWRGGRTAAQNIIPSSTGAAKAVGKVIPELNGKLTGMSMRVPTSNVSVVDLTVRIEKGATYEQIKTAVKKAADGPLKGVLAYTEDDVVSTDMNGNPNSSIFDAKAGISLNDHFVKLVSWYDNEWGYSRRVLDLISHVAKVDGNA

SEQ ID NO: 6165 - protein, 425 aa, Treponema denticola ATCC 35405
MKLYSRRQTLVFSLIAAVIFASAGFFAGIKYSTGNAGSTGIQSGTSSNPADFEESAENGFAQTENSHNLNMQQHGNTAALNTANEAGYMGYTPAESQNIRVYESTNEAVVNITTETMGANWFFEPVPVEGSSGSGSIIDESGLVLTNAHVISEASKIYISLSDGSQYEAKVVGTDAENDLAVLKFDPPKNIKLTVIKLGDSTNLKVGQRVLAIGNPFGLERTLTDGIVSALKRPIQNDKNIIIKNMIQTDTAINPGNSGGPLLDTQGRMIGINTMIYSTSGSSAGVGFAVPVNTAKRVVADILKYGKVIRGSIDADLVQVSGRLASYAKLPVSYGLLVSEVKKGSNAAKAGLRGGNEAVRSGVGRYSSVFYIGGDIIVEIAGQKINNITDYYSVLEDKKPGETVKVKIVRGKKLVDLSLTLSERN

SEQ ID NO: 6166 - protein, 628 aa, Xanthomonas campestris pv. campestris str. ATCC 33913
MSDWSLDQARKTYSIPHWADGYFDVNDAGHVVVRPTADGPAVSLPEVVDAARAAGAKLPLLVRFPDILGQRLGKLQAAFAQAQADWDYAGGYTAVYPIKVNQHRGVAGTLASHHGEGFGLEAGSKPELMAVLALSRPGGLIVCNGYKDREYIRLALIGRKLGLQTFIVIEKPSELNLVLEEARALDVKPGLGVRMRLASLGAGKWQNSGGDKAKFGLSPRQVLDLWKSLRDTEYADSLNLLHFHMGSQISNVRDIANGMREATRYFVELSRLGAKISHVDVGGGLGIDYEGTRSRSYCSINYGLHSYASNIVQPLASACEEHGLPPPRIVTECGRAMTAHHAVLIANVSEVEQAPEGRVPDAHDDEPAAIRHLREIHDELDVRPAVELFQEAQHFHAEGLSAYALGQIDLTHRARIDDLFYAIAHGVRARLSFDEKSHRPVLDELNERLVDKYFVNFSVFESIPDVWAIDQVFPIVPIERLNEAPQRRGIIADMTCDSDGMVKTYVENESLDSSLPLHGLNPGESYRIGFFLVGAYQEILGDIHNLFGDTDAVEVAVDGTGYRIAQQRRGDTTDVMLDYVGYQLDTLRATYAERIAAAQLPPERAQELHDALEAGLTGYTYLSDEPLG

SEQ ID NO: 6167 - protein, 741 aa, Oryza sativa
METRATECRTMQLLRELQTNKLDTSSKIIYAPRQQDDIYAGIMPELPLDKLPEDILHHVYSLMPLKDAARAACVSHGFLRCWRRYPILVLNSKTIGLAKRKLSLYAEDVPLYEPALKVDDMESYAISKIDHIINNHSGIGVKVFKLQLFACPNIDAAVLDKWFVHVIKAGIKELSLEMSLCKKRTEYNFPCSILSMALGCNISLTSLHLYEVHISGEEIGQFLSNSFALERLVISDCNDIIQFKVISIDAPKLSSFIYGDVGIQISLGDPLQVKDICLMGYNQPNTVCFARIELPSIMPNVESLIVSSTDEMISTPMVPIKFLHLELLEIYLAELLAFPPNYDFFSLVSFLDGSPALETFILHVKQRCERRDSILDGEHTNLRQILHPRHANLQNVTITGFNSTKSMIELTSHILENAPSLKCITLDTANFYDKNLLTMGECLPMRKGGILEARKAFDAAKRYIAGKVPAHVEYKFLEPCRKCHIGENGCSSEKSLYSVLLFERKILENYYKRKCEKKNGKKQNKNPCYRCRFWGWFYNKWYQSLQEIHGRGAREVLHAATTTQDVQGRTWTQGGARRRSTKFDRWNRTLQAARRRVKEDTMSDTGRENEEDSVLDTDRTHIFQAKSAKESHGIKPTKAMKRSDMISWAVCGLGDELRAVGARLGVVVVQVPASSTRASSRRSGGYRRKGWAAPASGGGSVGVGILTSGKPTAAAVAAFSSAVVPGRWRKGRPAPVRGSIF

SEQ ID NO: 6168 - protein, 413 aa, Bacillus cereus G9241
MGYYDGPNLNEEHSETREVRKSGSKKGYFFTGLVGAVVGAVSISFAAPYMPWAQNNGAAVSSFSSDSKVEGTVVPVVNKAKNETDLPGMIEGAKDVVVGVINMQQSIDPFAMQPTGQEQQAGSGSGVIYKKAGNKAYIVTNNHVVDGANKLAVKLSDGKKVDAKLVGKDPWLDLAVVEIDGSNVNKVATLGDSSKIRAGEKAIAIGNPLGFDGSVTEGIISSKEREIPVDIDGDKRPDWQAQVIQTDAAINPGNSGGALFNQNGEIIGINSSKIAQQEVEGIGFAIPINIAKPVIESLEKDGVVKRPALGVGVVSLEDVQAYAVNQLKVPKEVTNGVVLGKIYPISPAEKAGLEQYDIVVALDNQKVENSLQFRKYLYEKKKVGEKVEVTFYRNGQKMTKTATLADNSATKNQ

SEQ ID NO: 6169 - protein, 568 aa, Oryza sativa (japonica cultivar-group)
MGNTCVGPSSAADRHGFFHSVSLAVLWRPGGRAEPSQPPGYPPRESSHSSVTSSTAPERVTIADSDLSSSTPNKGGNKPKVRRVQSAGLLADSVLKRDSERLKDLYTLGKKLGQGQFGTTYQCVEKATGKVLACKSIAKRKLVSEEDVEDVRREIQIMHHLAGHPSVVSIVGAYEDAVAVHLVMELCAGGELFDRIVQRGHYSEKAAAQLARVIIGVVEACHSLGVMHRDLKPENFLFVNHKEDSPLKTIDFGLSIFFKPGENYSDVVGSPYYVAPEVLMKHYGREVDVWSAGVIIYILLSGVPPFWDESEQGIFEKVLKGDLDFSSDPWPAISDSAKDLVRKMLNRDPRKRLTAHEALCHPWVCVDGVAPDKPLDSAVLTRLKQFSAMNKLKKMALRVIAENLSEDEIAGLREMFKMLDTDNSGQITLEELKTGLRRVGANLKDSEITTLMEAADIDNSGSIDYGEFIAATMHLNKVEREDNLFAAFSYFDKDSSGYITQDELQKACEEFGIGDAHLEDIIKDIDQDNDGRIDYNEFVTMMQKGNNPLGKKGQGQLSFGLREALKLG

SEQ ID NO: 6170 - protein, 558 aa, Bacillus thuringiensis serovar konkukian str. 97-27
MEKQWWKESVVYQIYPRSFMDSNGDGIGDLRGIISKLDYLKELGIDVIWLSPVYESPNDDNGYDISDYCKIMNEFGTMEDWDELLHEMHERNMKLMMDLVVNHTSDEHNWFIESRKSKDNKYRDYYIWRPGKEGKEPNNWGAAFSGSAWQYDEMTDEYYLHLFSKKQPDLNWDNEKVRQDVYGMMKFWLEKGIDGFRMDVINFISKEEGLPTVETEEEGYVSGHKHFMNGPNIHKYLHEMNEEVLSHYDIMTVGEMPGVTTEEAKLYTGEERKELQMVFQFEHMDLDSGEGGKWDVKPCSLLTLKENLTKWQKALEHTGWNSLYWNNHDQPRVVSRFGNDGMYRIESAKMLATVLHMMKGTPYIYQGEEIGMTNVRFESIDEYRDIETLNMYKEKVMERGEDIEKVMQSIYIKGRDNARTPMQWDNQNHAGFTTGEPWITVNPNYKEINVKQAIQNKDSIFYYYKKLIELRKNNEIVVYGSYDLILENNPSIFAYVRTYGVEKLLVIANFTAEECIFELPEDISYSEVELLIHNYDVENGPIENIPLRPYEAMVFKLK

SEQ ID NO: 6171 - protein, 593 aa, Oryza sativa (japonica cultivar-group)
MESTMKGIRGDNAPCVLDLDDAATVGGGVGDTYGEDCATEEQLVTPWTVSVASGYNLLRDPRYNKGLAFNERERETHYLRGLLPPAIVSQELQERKIMHNIRQYQLPLQKYMAMMDLQEGNERLFYKLLIDNVEELLPVVYTPTVGEACQKYGSIFSRPQGLYISLKEKGKILEVLKNWPERSIQVIVVTDGERILGLGDLGCQGMGIPVGKLALYTALGGVRPSACLPITLDVGTNNEALPNDEFYIGLRQKRATAQEYADFLHEFMTAVKQNYGEKVLIQFEDFANHNAFELLAKYGTTHLVFNDDIQGTASVVLSGLVAALKLVGGSLSEHSYLFLGVGEAGTGIAELIALEISRQTKAPIEECRKKIWLVDSKGLIVSSRKETLQHFKKPWAHEHEPVGNLLDAVKTIKPTVLIGTSGKGQTFTQEVVEAISSFNERPVIFALSNPTSQSECTAEQAYTWSKGRAVFASGSPFDPVEYDGKIYVPGQANNAYIFPGFGLGVVMSGAIRVHDDMLLAASEALAQQVTQENFDKGLTYPPFSNIRKISAHIAANVAAKAYELGLASRRPRPKDLVKYAESCMYSPLYRNYR

SEQ ID NO: 6172 - protein, 623 aa, Leuconostoc mesenteroides subsp. mesenteroides ATCC 8293
MKMTSITKFFQSIRFRITLVFVLLMIIALELLGAFFVRQMERQNLRTFQQQITLPKYVTDPINTALRNSNSDEGNHEIQDVLSGLNNTNIEEVQVIDKTGTIRGTTSVSGQQTISQKTTDINAQKALAGDQSYVATRTINENGERKEIMTTPLGVTTGRLKDVSGVIVVKASLLPVYKNINSVMRLFIIAGLIALVASVALALFLARTLTRPIEQISEQTTKIAEGDYSMVNHIYGSDELSQLALSVNDLSTRIEESTETVNAERNRLDSVLTHMADGVLAANRRGEVTIINQAAADFVGVNREDALGQNVVSLLRLEGKRTLRDILENLNDFRVDLSDDSKELLVQIYVSLIKRQSGFISGLVVVLHDITEQQRIDSERRMFVSNVSHELRTPLTSVRSYVDALAEGAIDDPEMAQNFLGVVQDETQRMIRMINDLLELSRLDQGTMEVKLEVINLNSLFNFVLNRFDMILESDAKNENTITKNYNILREFTKEDVWVEVDPDKFTQVLDNIMNNAVKYSPDGGTITARLIKTKTRAILSISDQGLGIPRKDLDNIFNRFFRVDKSRSRAQGGTGLGLAISKEVVEKFNGRIWVDSVENKGSTFYISLAYVDEEPEDDWDAE

SEQ ID NO: 6173 - protein, 574 aa, Candida glabrata CBS138
MCGIFAAYKHQDVHAFKPKALQLSKRIRHRGPDWSGNVVKNSTIMVHERLAIVGLDSGAQPITSEDGDYTLCVNGEIYNHIQLREQFPDYKFKTLSDCEPIIPAYLEHDIDAPKYLDGMFAWCLYDAKQDRIVAARDPVGITTLYMGRCSSSPKTVFFASELKCLTDDCDEITAFPPGHVYDSKTDQITRYFTPDWIDESRIPTTPVNFKDIRESLEKAVRKRLMAEVPYGVLLSGGLDSSLIASIAARETEKANEENDAADNDASASKQLAGIDNQGHLHTAGWSRLHSFAIGLPNAPDLQAARKVAKFIGSIHHEHTFTLQEGLDALDDVIYHLETYDVTTIRASTPMFLLSRKIKAQGVKMVLSGEGSDEIFGGYLYFAQAPSATEFHIESVKRVKNLHLADCLRANKSTMAWGLEARVPFLDKEFLQLCMNIDPKDKMIDQSAGRIEKYILRKAFDTSDEPDVKPYLPEEILWRQKEQFSDGVGYSWIDGLKDTAERVISDTMFSNPKIEWGEDIPTTKEAYWYRLKFDALFPQKTAASTVMRWIPKADWGCAEDPSGRYAKIHEQHVTA

SEQ ID NO: 6174 - protein, 201 aa, Capsicum annuum
ARVDFEFLGNTTGEPYTVQTNVYVNGVGNREQRLNLWFDPSKDFHSYSILWNQRQVVFLVDETPVRVHSNLEHKGIPFPKDQPMGVYSSIWNADDWATQGGRVKTDWSHAPFVASYKGFEINGCECPATAAVAENTQRCSSNGQKRYWWDEPVMSELSVHQSHQLIWVRANHMVYDYCTDTARFPVAPVECQHHQHKTTHN

SEQ ID NO: 6175 - protein, 379 aa, Leuconostoc mesenteroides subsp. mesenteroides ATCC 8293
MVQPALTKTLLTGVIAGVVGGGAILYGQQGVQLLQNQNQKVSTTATSTKTIAKNATATSAYNKVSDAVVSVLNFTKSSQGSYQESSEGSGVIYKKTDGSAFIVTNNHVITGAAKIQVMLHSGKKVTATLVGKDAMTDLAVLKIDGTDVTTTAQFGDSSKITVGENVLAIGSPLGSEYASSVTQGIISAKKRLVEATSENGQNYGGSTVIQTDAAINPGNSGGPLINFAGQVIGINSMKLSTSSSGTSVEGMGFAIPSDQVVDIVNKLVKDGKVTRPAIGISLINLSEVTASEQKSTLKIPDSVTGGVVVMSLTNNGPADKAGLKKYDVIVGINGKKVSSQADLREELYKHSLGDTITLTYYHQDTKQTVKVKLTQKLAS

SEQ ID NO: 6176 - protein, 390 aa, Arabidopsis thaliana
MASSLEKLISSFLLVLYSTTIIVASSESRCRRFKSIISFGDSIADTGNYLHLSDVNHLPQSAFLPYGESFFHPPSGRYSDGRLIIDFIAEFLGLPYVPSYFGSQNVSFDQGINFAVYGATALDRVFLVGKGIESDFTNVSLSVQLNIFKQILPNLCTSSSRDCREMLGDSLILMGEIGVNDYNYPFFEGKSINEIKQLVPLVIKAISSAIVDLIDLGGKTFLVPGNFPLGCYPAYLTLFQTAAEEDHDPFTGCIPRLNEFGEYHNEQLKTELKRLQELYDHVNIIYADYYNSLFRLYQEPVKYGFKNRPLAACCGVGGQYNFTIGKECGHRGVSCCQNPSEYVNWDGYHLTEATHQKMAQVILNGTYASPAFDWSCSGSESVDKEYSFSS

SEQ ID NO: 6177 - protein, 470 aa, Bacillus cereus ATCC 14579
MVVGDFPIELDTVVVGAGPGGYVAAIRAAQLGQKVAIIEKANLGGVCLNVGCIPSKALINAGHRYENAMHSDDMGITAENVKVDFTKVQEWKNGVVKKLTGGVEGLLKGNKVEIIRGEAYFVDANTLRVMTEDAAQTYTFKNAVLATGSTPIEIPGFKYSKRVINSTGALSLPEIPKKLVVIGGGYIGMELGTAYANFGTEVTVVEAGDEILAGFEKAMSSVVKRALQKKGNVNIHTKAMAKGVEETETGVKVSFEVKGEIQTVEADYVLVTVGRRPNTQEIGLEQVGVKMTDRGIIEIDEQCRTNVPNIYAIGDIVPGPPLAHKASYEGKVAVEAISGHASAIDYIGIPAVCFTDPELASVGYTKKQAEEAGMTVTVSKFPFAANGRALSLNSTDGFLQLVTRKEDGLLVGAQVAGAGASDIISEIGLAIEAGMTAEDIAQTIHAHPTLGEITMEAAEVALGMPIHIVK

SEQ ID NO: 6178 - protein, 972 aa, Oryza sativa (japonica cultivar-group)
MSAAGGGGGVGKVERLSSIDAQLRQLVPAKLSEDDKLIEYDALLLDRFLDVLHGLHGDDLKDLVQECYEVAAEYETKHDVQKLDELGNMITSLDPGDSIVIAKAFSHMLNLANLAEEVQIAYRRRIKLKKGDFADENSAMTESDIEETLKRLVFDLKKSPAEVFDALKSQTVDLVLTAHPTQSVRRSLLQKHSRIRNCLVQLYSKDITPDDKQELDEALQREIQAAFRTDEIRRTQPTPQDEMRAGMSYFHETIWKGVPKFLRRVDTALKNIGIDERVPYNAPLIQFSSWMGGDRDGNPRVTPEVTRDVCLLARMMAANLYCSQIEDLMFELSMWRCNEELRSRADDLHRSSKKDAKHYIEFWKKVPLNEPYRVILSDVRDKLYNTRERSRELLSSGYCDIPEEATLTNVEQLLEPLELCYRSLCACGDRAIADGSLLDFLRQVSTFGLSLVRLDIRQESDRHTDVLDAITTYLGIGSYREWSEERRQEWLLSELNGKRPLFGPDLPRTDEVADVLDTFHVIAELPADSFGAYVISMATAPSDVLAVELLQRECHVKTPLRVVPLFEKLADLESAPAALTRLFSISWYRQRINGKQEVMIGYSDSGKDAGRLSAAWQMYKAQEQLVKVAKDFGVKLTMFHGRGGTVGRGGGPTHLAILSQPPDTINGSLRVTVQGEVIEQSFGEEHLCFRTLQRFTAATLEHGMHPPSAPKPEWRALLDEMAVVATKEYRSVVFQEPRFVEYFRLATPETEYGRMNIGSRPSKRKPSGGIESLRAIPWIFAWTQTRFHLPVWLGFGAAFKHALQKDIRNLHMLQEMYNEWPFFRVTLDLIEMVFAKGNPGIAALYDKLLVSEDLQPLGEKLRANYVETQKLLLQVAGHRDLLEGDPYLKQRLRLRDAYITTLNVCQAYTLKRIRDPDYHVTLRPHLSKEVMDGSKPAAELVKLNPGSEYAPGLEDTLILTMKGIAAGLQNTG

SEQ ID NO: 6179 - protein, 579 aa, ASPERGILLUS NIDULANS FGSC A4
MAIPEESDEREDFLSGLRNTEPQAPTASHSSSSKNNPQEKDRQNEGVRDVEDQSNDGDSAPDYQAFKLTATGRLIFCALAVLTLMVALDGTSISVALPEMASSLHGTAMQAFWSGTSFLLCSTVFQPTTATLSDIFGRRPIILISLLFFLIGSLVAGIANDFTQILVGRCLQGVGGGGIAVLSEVVVTDLVPLRLRGNYYGILSAMYSLGSVLGPILGGGFSENYTWRWIFYINLPFIGVSAFLILFFFRLERPSGSLRAKLRRIDYIGTTLFISSLSSFLIPLTWGGIMYSWTSWHTLAPLCLGVAGLAVFTVYSIKATDPMIPRSVFGNRSAVIAFITSGLQGLILWGALYYLPLYYQAVREFGPILTGVALFPQTFTVAPSAIVCGVLVTITGRYRWGLWVGWALSILGLGLLTLLDRHTSTVAWIFLNIPSGLGLGFLTAAIVCTVQASATNKNLTVAVAMVVFFRAFGQAVGIAVGGVIFQNRMRHELLKYSEWRTTAEELSRDAAALVTVIQGMHSEEEASRKNDLQMAYTDSLRIIWAFMAGIAGVGLILSLWVKKYDLNRALRTEQGVKER

SEQ ID NO: 6180 - protein, 468 aa, Pseudomonas putida KT2440
MGLNDQWMQRDLKVLWHPCTQMKDHEQLPLIPIKRGEGVWLEDFEGKRYLDAVSSWWVNVFGHANPRINQRIKDQVDQLEHVILAGFSHQPVIELSERLVAMTPAGLDRVFYADNGSSCIEVALKMSFHYWQNIGKPDKKRFVTLTNSYHGETIAAMSVGDVPLFTETYKALLLDTLKVPSPDCYLRPEGMSWEEHSRNMFQAMEQTLAEHHASISAVIVEPLIQGAGGMRMYHPVYLKLLREACDRYDVHLIHDEIAVGFGRTGTMFACEQAGIRPDFLCLSKALTGGYLPLAACLTTDKVYQAFYDDYPTLRAFLHSHSYTGNPLACAAALATLDIFEQDNVIEANKALATRMATATAHLADHAHVAEIRQTGMALAIEMVQDKAGKLAYPWQERRGLKVFEHALTRGALLRPLGSVVYFLPPYVITPEQIDFLAEVASEGIDIATRDSVSVAVPANFHPDFRDPG

SEQ ID NO: 6181 - protein, 400 aa, Xylella fastidiosa Temecula1
MPLFTDVELVPGDPILSLNDAYNADTRTNKVNLGIGIYCDESGCIPLLRAVQQVEEQLAKHPKPRGYLPIDGLPAYIKATQQLLFGVDSLLLTAGRVATSQTVGGSGALRVAAEVLKQVLPHATVAISRPSWENHRALFTAAGFKIEDYTYFDTLGHAVDFTGMVADLAKLQPKTVVLLHGCCHNPTGADLSRDQWKQLVALFQERQLLPCIDLAYQGFNQGIDADAYAIRLLAEEGISNYVVANSYSKSFSLYGERVGGLSIVASNTEQAQAIQSQVKRIIRTIYSSPPAHGAYLVAGVLNSHELRTLWEQELTQMRERIHGLRAGLVARLKALGAPEFDFIQRQAGMFSYSGLSKIQVDRLRDEFGIYAVSSGRICVAALSQHKLEYVAQAVVKVHQG

SEQ ID NO: 6182 - protein, 598 aa, Haemophilus influenzae Rd KW20
MKNFKYFAQSYVDWVIRLGRLRFSLLGVMILAVLALCTQILFSLFIVHQISWVDIFRSVTFGLLTAPFVIYFFTLLVEKLEHSRLDLSSSVNRLENEVAERIAAQKKLSQALEKLEKNSRDKSTLLATISHEFRTPLNGIVGLSQILLDDELDDLQRNYLKTINISAVSLGYIFSDIIDLEKIDASRIELNRQPTDFPALLNDIYNFASFLAKEKNLIFSLELEPNLPNWLNLDRVRLSQILWNLISNAVKFTDQGNIILKIMRNQDCYHFIVKDTGMGISPEEQKHIFEMYYQVKESRQQSAGSGIGLAISKNLAQLMEGDLTVESERGKGATFHLTLHAQEISEKESVKKNIPSLNTLLVEDVDLNIMVAKTILEKLGHHVDVATNGKQAITLFEKNVYDILLLDIKLPDMSGFEIAQYLRENYENGIYDFLPPMIAFTANVMQSEQEYLEMGMDGVLRKPISIKDLHHCLQQFFADESESIIEMNDDNELSEQFDLALIETLGKSQILENLSLFKQTMPNYLAQLSKDNMKETEDTAHKIKGAAASVGLNHLRQLADTLESAAKNSDVFNCGELIDKIGNLWLEDVEDLLKFCKF

SEQ ID NO: 6183 - protein, 469 aa, Salmonella typhimurium LT2
MVDQVKVAADEQAPAEQSLRRNLTNRHIQLIAIGGAIGTGLFMGSGKTISLAGPSIIFVYMIIGFMLFFVMRAMGELLLSNLEYKSFSDFASDLLGPWAGYFTGWTYWFCWVVTGMADVVAITAYAQFWFPGLSDWVASLAVVILLLSLNLATVKMFGEMEFWFAMVKIVAIVALIVVGLVMIAMHFKSPTGVEASFAHLWNDGGWFPKGISGFFAGFQIAVFAFVGIELVGTTAAETKDPEKSLPRAINSIPIRIIMFYVFALIVIMSVTPWSSVVPDKSPFVELFVLVGLPAAASVINFVVLTSAASSANSGVFSTSRMLFGLAQEGVAPKAFAKLSKRAVPAKGLTFSCICLLGGVVMLMVNPSVIGAFTMITTVSAILFMFVWTIILCSYLVYRKKRPHLHEKSIYKMPLGKLMCWVCMAFFAFVLVLLTLEDDTRQALIVTPLWFIALGLGWLLIGKKRMAGMR

SEQ ID NO: 6184 - protein, 507 aa, Pirellula sp. 1
MNIVYLTTEAVPFAKTGGLADVCGTLPKVVAAQGHRCAVIMPAFSSIERSLQPIETTDISFAVPMSDQKLIGCRLLKSHLPKDPNDPEDSAEVPVYFIDQPQYFRRPSLYGDANGDYHDNAERFIFYCRAAIIAMTRLGYPVDLVHCNDWQSALVPALLRAASDNVAKTQPIATMLSIHNMAYQGNFGFDAFPWTGLSWDHFRPESFEYYNQLNFLKTGVVTSDVVSTVSPTYALEIQTPEYGCGLDSILQGIPQPVAGIINGIDTNIWNPETDPHLKRNYSVVDWADAKIDNKLALQAEVGLPQDPDVPLLGLIGRLADQKGWDLILPVLKQHLAEARPTQWVVLGSGDPKIEEQLRELTEQHPEQLAAYIGFSDALAHRIEASSDMFIMPSHYEPCGLNQLYSLRYGTPCVVTKTGGLADTIVDATPENVAANLATGFHLNDSSAGALDHAINRALQLRYHSPEKWKNLVEFGMSQDWTWRKSADQYIQLYARTISLNRRRRSGS

SEQ ID NO: 6185 - protein, 312 aa, Glycine max
MSNEIRFFELNTGANIPSLGLGTWLADPGVVGDVIAHAVEVGYRHIDCAQIYGNQEEIGLALKKLFEEGVVKREDLWITSKLWCTDHAPEDVPEALDRTLRDLQLDYIDLYLIHWPIRMKKGSVGFKAENIVPSDIPNTWKAMEALNKSGKARAIGVSNFSTKKLGELLEYARVTPAVNQSECHPAWRQDKLKAFCKSKGVHFSGYSPLGSPAWLEGDFLNHPVINMIAKKLGKTPAQVALRWGLQMGHSVLPKSSNPARIKENFDIFDWSIPEDMLDKFFEIQQERLLKASFFHEPNGGYLPEDELWDGGI

SEQ ID NO: 6186 - protein, 644 aa, Idiomarina loihiensis L2TR
MPTRISNENLAALLNVGSHLSLFIWEDAPGWPVRFVSDNIQDLLGYKKTRLESHEIQYRDLINQDDLPRVMEEVNSLLSKESGSSLTHQDYRVKHAKGHDVWVSDTTVLLRYEDGKNHLYGYLIDVTERKQLQIALEMERNRLQLILDATRLGTWEWNPQTGVTIFNQRWASMFGWDVCELETNVESWSSRLHPEDYDDVWQAIKNHLDGVTPFYESLHRIRHRDGHWVYVLDRGKIIERDNQGRAIRYTGTVTDVTEQKKAELNALKAAHAKNVFLANMSHEIRTPLHGILGIASVLESTDLNPYQQQLLGTIKNSGDYLLTTLNDVLDLTQAEEGQLKVKRGVHSPAKVLGHVIQLFEQPVKDKGLEFIIDIDADIPERTLMDRARIAQVISNLVSNALKFTERGSIAIKASWEVDSEKQSEGDLIVKVQDTGVGIYDTQRIWQLFEQEQDGLNRPEGGSGLGLAIVRNLVQLLSGTIQVDSEPEQGSCFTLCIPMSVQSESAHQPEQNVLPKLTKKQVLVVDDNKINQLIIKEMLLSLNQYVDLVSDAHNALKMMQARDYDVLFMDLHMPHMDGMEATRALRDMHIHQPYVIALTADAYPETRTQALRSGMDDYVTKPFVKADIARVLERFDMLLSRKPTD

SEQ ID NO: 6187 - protein, 331 aa, Crocosphaera watsonii WH 8501
MARMYYDADANLDLLADKTVAIIGYGSQGHAHALNLKDSGIKVVVGLYPGSKSRQKAEEAGLKVLSVAEAASAADWIMILLPDEVQKTIYKEEIEPNLRDGKVLSFAHGFNIHFGQIVPPETVDVVMVAPKGPGHLVRRTYEQGEGVPCLFAVYQDASGQARDRAMAYAKGIGGTRAGILETTFREETETDLFGEQVVLCGGLSALIKSGFQTLVEAGYQPELAYFECLHEVKLIVDLIVEGGLAKMRDSISNTAEYGDLTRGPRIVTDETRAEMKQILAEIQSGQFAREFVLENQSGKPGFTAMRRQEAEHSIEEVGKDLRAMFSWLKEG

SEQ ID NO: 6188 - protein, 133 aa, Pseudomonas putida KT2440
MEQPLKVMVIDDSRTIRRTAQMLLGEAGCEVITASDGFDALAKIVDHQPSIIFVDVLMPRLDGYQTCAVIKHNSAFKDTPVILLSSRDGLFDKARGRVVGSDQFLTKPFSKEELLDAIRAHVPGFAAPQQHAP

SEQ ID NO: 6189 - protein, 328 aa, Sinorhizobium meliloti 1021
MVAPRILVTGGAGYIGSHTAKLLRLEGIEPVVYDNLTTGNRSAVRWGPFVQGDILDGRRLIEVIEAHQPDAVIHFAASAYVGESVADPAKYYNNNVRGTLSLLDACRQTGVDKVIFSSSCATYGVPAVLPIDEATPQAPINPYGKTKLVAEHMLADYAAAFALNYVSLRYFNACGADPEGDLGEWHDPETHLIPRALMAAAGRIPHLEIFGEDYDTPDGTCVRDYIHVADLASAHVLAYRHLAKGGGNVALNLGTGRGFSIKEVLRTIGEITGHDVPVVFRRRRAGDPPALYADAGLACRTLGFLPRYSDLETIVRTAAPFFGLEVRS

SEQ ID NO: 6190 - protein, 463 aa, Clostridium tetani E88
MTVEKTMDKIVALAKNRGFIFPGSEIYGGLANSWDYGPLGVEFKNNVKKAWWKKFVQESPYNVGIDAAILMNREVWVASGHVGGFSDPLMDCKECKARCRADKLIEDYMQDKDENFESADGWSNEQLKDFIDKNNIACPKCGEHNFTDVRKFNLMFKTFQGVTEDAQSEIFLRPETAQGIFVNFKNAIRTTRRKMPFGMAQIGKSFRNEITPGNFTFRTREFEQMELEFFCKPGTDLEWFEYWRDYSWNFLLSLGLAKDNLRIREHAKEELAFYSKATVDIEYLFPFGWGELWGIADRTDYDLKQHMNHSGKDLTYLDPETNEKYLPYCIEPSLGADRVALAFLVDAYDEEELDGGDSRTVLRLHPALAPFKAAILPLTKKLKDKSLEVYSMLSKYFNVDYDEAGTIGKRYRREDEIGTPYCITIDYDTLEDNTVTIRDRDSMDQIRINIDELVKYISEKVEF

SEQ ID NO: 6191 - protein, 339 aa, Streptococcus agalactiae A909
MFLLLCILSMWLMIFGVAFYYFGSLHQSLTSRIIYQFVLTVLITTIAWFMGAYFLGFEGHFKTVFQFQEADGKQIVNCLFQLCFALYAVVMLIGSIIDRVQTKRLLLAVVSWLFLVYTPLAYLIWNSEGVFAKMGVLDFSGGMVVHLSAGLSSYILAHVIGKSEHQHNKIKNDNLFLGMILITFGWFGFNMGPVGEWNSQAIMILLNTIFAIIGGGLAWTLAAKWNGEEEKTGSLLNGIIVGLVTSTAGVGYLLTWQLLAVTFFASLFTYFVTDYVAKAFAIDDVVSSFGMNGIGGLLGSLGVGLFKLSHMPVQLLALATTILLSIIMTYIISKAIFRK

SEQ ID NO: 6192 - protein, 253 aa, Brassica napus
MLAIFQKAFAHPPEELNSPASHSSGKSPKLPGETLSDFLSLHKDTAFSMTFGDSAVLAYSRPQSSLRQRLFCGIDGIYCTFLGALTNLCTLNRQYGLTGKNTSEAMFVIEAYRTLRDRGPYPADQVLRGLEGSFAFVVYDTQTSSVFSALSSDGGESLYWGISGDGSVVMSDDVKIIKQGCAKSFAPFPTGCMFHSETGLKSFEHPRNEMKAMPRIDSEGVLCGANFKVDACSKVNGIPRRGSEANWALANSR

SEQ ID NO: 6193 - protein, 105 aa, Fusarium proliferatum
GGKAPRKQFASKAARKSAPSTGGVKKPHRYKPGTVALREIRRYQKSTELLIRKLPFQRLVREIAQDFKSDLRFQSSAIGALQESVESYLVSLFEDTNLCAIHAKR

SEQ ID NO: 6194 - protein, 473 aa, Staphylococcus aureus subsp. aureus COL
MQDIYFLEQMSQFDREVIPERRMHAKGSGAFGTFTVTKDITKYTNAKIFSEIGKQTEMFARFSTVAGERGAADAERDIRGFALKFYTEEGNWDLVGNNTPVFFFRDPKLFVSLNRAVKRDPRTNMRDAQNNWDFWTGLPEALHQVTILMSDRGIPKDLRHMHGFGSHTYSMYNDSGERVWVKFHFRTQQGIENLTDEEAAEIIATDRDSSQRDLFEAIEKGDYPKWTMYIQVMTEEQAKNHKDNPFDLTKVWYHDEYPLIEVGEFELNRNPDNYFMDVEQAAFAPTNIIPGLDFSPDKMLQGRLFSYGDAQRYRLGVNHWQIPVNQPKGVGIENICPFSRDGQMRVVDNNQGGGTHYYPNNHGKFDSQPEYKKPPFPTDGYGYEYNQRQDDDNYFEQPGKLFRLQSEDAKERIFTNTANAMEGVTDDVKRRHIRHCYKADPEYGKGVAKALGIDINSIDLETENDETYENFEK

SEQ ID NO: 6195 - protein, 461 aa, Vibrio vulnificus CMCP6
MNALHSETNNPKTLPEGLLKTITKLGFPVAIQSALVAILALADVLMVSDFGKEATAAVGIASKWHFIAIMIMAGLASANGTLVAQYWGKDDARSAKAVSLIALSFGLKVLIPVTLLITLGSQFIMMLQTNDQTVIGLGSVYLWYAFPVLLLTHIVIVIESSMRSSGDTVTPLIIGSLTIVINIALNYWLIKGGFGIPAMGVAGAALATSISRAIQVLLMLALMKLKQHWLLTTEASSERPSLWLSYRRLALPVTLGAVLWGIGTMAYQIIFGHMGTTELAVFSMLGPFESLCYAIFFGLSVACSVLIGQSLGRNEFERAQAMAAYFIKVVFIVGLSVGAFMLLNREWILAGLNLNTEELRPLAAPAVIILCCGIWIRMLNMTIINGIIRAGGDNIFCLRMDFIAMWMTGIPLCAFAAFIAGMEFKVVYSLMLAEEVVKLALCYRRYTQKFWIKNLTVVTTC

SEQ ID NO: 6196 - protein, 371 aa, Bacillus cereus ATCC 14579
MGTKTKKTLFNVDEQMKAIAAQFETLQILNENGEVVNEAAMPELSDDQLKELMRRMVYTRVLDQRSISLNRQGRLGFYAPTAGQEASQLASHFALEAEDFILPGYRDVPQLVWHGLPLYQAFLFSRGHFMGNQMPENVNALAPQIIIGAQIIQTAGVALGMKLRGKKSVAITYTGDGGASQGDFYEGMNFAGAFKAPAIFVVQNNRYAISTPVEKQSAAKTVAQKAVAAGIYGIQVDGMDPLAVYAATAFARERAVNGEGPTLIETLTFRYGPHTMAGDDPTRYRTKDIENEWEQKDPIVRFRKFLEAKGLWSQEVEETVIEEAKEDIKQAIAKADQAPKQKVTDLMEIMYEKMPYNLAEQYEIYKEKESK

SEQ ID NO: 6197 - protein, 338 aa, Pyrococcus abyssi GE5
MELPILPTSVIGSYPKPRWLLRMYKLRELGKIPEEDFKEAVKDASVAVLREHERAGVDIPWDGEMWRSEMTEHFTAKISGFKFYGPVRVWGNAYFNKAAAVDKLEYKEPLVLEEFLWVRENTTREIVKVPITGPYTIAEWSFNEYYPDKESFVMDLAKIINKELKTLEEHGATYIQLDEPAMLNHPDEVPLAVEAINRAVKGIKIKVGLHVCYSNYYLLADYFDDIRVTQFALEFANRQFRDMDFLKKLSGKELGFGVVDVHNPRIETVDEIVRAIKKAFNYLEPEWLYINPDCGLKLLDRRIAYQKLVNMVKAVRIVRKELEKEGRAETEFRTLNDI

SEQ ID NO: 6198 - protein, 407 aa, Aeropyrum pernix K1
MRSDMVDYDRLFSEITRRFRASDVRELLKLTEGKRVISFAGGLPDPRVFPAEELADIARNVVSELGDKALQYSPTPGVSIFRERALSFLERMGLKTSDRQLLVTTGSQEALFLTALSTLSPGDVVIMEEPGYLAAINVFKALGARIVPVPVDDKGLNTGVLAETLDRLDAEGVKPKLVYTNPTCNNPNGTTMPLDRRRELLQLASNYDMLVIEDDPYSHIAFEKTGEEVPLQALDSEGRVVYVTTFSKILAPGLRLGLTLAPSEVTARIELLKQIVDLHTSTLDQYIAAEALERGIVDKVISRAVSIYRRKRDIMIESLEENMSGVATWTKPIGGFFIFLRINGPVDMRALMPKAVERGVAYVPGDAFHVTPGAGRNTARLSYSFNTEEEIPEGISILSKLVKEVLS

SEQ ID NO: 6199 - protein, 539 aa, Pseudomonas syringae pv. syringae B728a
MKLLAVRRLFRIQRVVIRYRLDDLLFALPLPWWMLALRFVLPWRWLPRRKSELSRGVRFRLALQDLGPIFIKFGQLLSTRRDLLPEDIADELMLLQDRVPPFDQQLAIKLIEEQLGARICDVFSRFDEKPLASASVAQVHAACLKTGEEVVVKVVRPGLKPIIGQDLAWLFILARMAERVSADARLLHPVQVVMDYEKTIYDELDLLREAANASQLRRNFEGSDLLYVPQVYWDWCRPKVLVMERIYGLQVTDMAGLADQRTDMKLLAERGVEIFFTQIFRDSFFHADMHPGNIFVSTVNPWAPKYIAIDCGIVGSLTPEDQDYLARNLFAFFKRDYRRVAQLHIDSGWVPAETKLNEFEAAIRTVCEPIFEKPLKDISFGQVLMRLFQTARRFNMEVQPQLVLLQKTLLNIEGLGRQLYPELDLWSTAQPYLERWMRERVSPKTLLGNLQSQVEQLPHIAGMTRDLLERMSRPHASDPPRPWHDRKDEPVLRLIGAALLVGGAIQGWVMSEAATQLLTLTAWPAAIMLIAGLYLIVRR

SEQ ID NO: 6200 - protein, 376 aa, Streptomyces avermitilis MA-4680
MEPVSEESIAVTHPFLDLAPLSAAHFASIEDRVARLLATEQDVVIMQGEALLPLEGAIRAAAGPGTTALNVITGPYGQTFGNWLRDCGATVIDLAVPFHTAVTAARIREAFAAHPEIDFVSLVHAEAATGNTNPVAEIGAAVREHGALFYLDAVASIGAEPVLPDAWGVDLCVIGAQKAMGGPAGVSAVSVSERAWARMAANPAAPRRSYLSLLDWKERWVDGGRKALLHAPAQLEMLALEACVERIEAEGLEAVMARHASAAAATRAGAVALGGGLEPYVHEAADAAPVATTLRTPAGIDASELVAKALASDPVLPLVAGGGALAREMVRVNHYGPGATRGVVQSCLGALGAALAEFGVPVDLEGARRAVAEAWA

SEQ ID NO: 6201 - protein, 464 aa, Trichodesmium erythraeum IMS101
MTELKLILNQPKLWKYSIMIVTAISGLWLWRSLSILTELKAKTQASVTLSGHKTPIYAVAISADGKTLTSSSHDGKIKVWNLTNGQLFHTINAHADAIESLVISPDGKFIISGSWDNDIKLWNITNGKFIQTLKSHADDVKAIAMSKDGQTLASGSYNGVIKIWNLKTGSLKMKIKQPYPIIALAFSPDGEILASGCKKGNIKTWELNTGKELHSFAAHTKTIWAIAFSPDGKILASGSQDQKVKLWEIEKGQLHSTLENHDQAVLSVDFSPDSKIVAGSSYDSKIHLWQVETGKLLETFTGHSQAVWSLKFTPDGQTLVSGSTDRNIKLWCLSNLNTQQLQNTTFRPVVKEEADKIFISEIIDTQKLEELNQILYHQINQSWQQTPTWSENLVYQATVNNNGVILSLEPINRSARDYFQQTPLPKLLNSSDAHGSHQKSFALFKTVMTPTGVLEVSPWRGWEN

SEQ ID NO: 6202 - protein, 376 aa, Bacillus cereus ATCC 14579
MTVSKFVQIRRDLHRIPEIGFKEWKTQQYILDYIGTLSHEFVEVKTWKTGVIVKVNGKNPEKIIGYRADIDGLPITEETGYEFASIHEGMMHACGHDVHTTIGLGLLTKAVSERIDDDLVFLFQPAEEGPGGALPMLESEELKEWKPNIILGLHIAPEYAVGTIATKEGLLFANTSELYIDLKGKGGHAAYPHTANDMIVAASHLVTQLQSVISRNVNPLDSAVITIGKITGGTVQNIIAEKSRLEGTIRTLSVESMKRVKSRIESIVAGIEASFQCEVIIDYGAMYHQVYNHEELTREFMEFVHKQTDMNVITCTEAMTGEDFGYMLREIPGFMFWLGVNSEYGLHHAKLKPDEEVIEKAITFLSQYVKWKGNRK

SEQ ID NO: 6203 - protein, 620 aa, Polygonum tinctorium
MRYNPKNPFWFNRDRFVLSAGHGCMLQYALLHLAGYDSVKEEDLKQFRQWGSKTPGHPENFETIGIEVTTGPLGQGIANAVGLALAEKHLAARFNKPDSEIVDHYTYVILGDGCQMEGIANEACSLAGHWGLGKLIAFYDDNHISIDGDTEIAFTESVDKRFEALGWHVIWVKNGNTGYDEIRAAIEEAKKVKDKPTMIKVTTTIGFGSPNKSNSYSVHGAALGAKEVEATRKNLGWPYEPFHVPEEVEKHWSRHVPEGAALEAEWNAKFAEYKSKYPTEAAELKSIIEGEFPAGWEKALPTYTPESPGDATRNLSQTCLNALAPVVPGLLGGSADLASSNMTLLKSFGDFQKDTPEERNVRFGVREHGMGAICNGIALHSPGFVPYCATFFVFTDYMRGAIRISALSLARVIYVMTHDSIGLGEDGPTHQPIEHLASFRAMPNILMMRPADGNETAGSYRVAVLKKQTPSILALSRQKLPNLPGTSIEGVEKGGYTITDNSTGNKPDVILIGTGSELEIAAKAGDELRKAGKAVRVVSFVCWELFEEQSDEYKESVLPAAVTARVSIEAGSTFGWEKIVGSKGKAIGIDRFGASAPAGRIYKEYGITVEAVIEAANSVS

SEQ ID NO: 6204 - protein, 391 aa, Tropaeolum majus
MSLKLNPFLFQSQHLPSMTTFRSPKFIMASTLSSGSKSVENLKKPFAPPKEVHVQVTHSLPPQKIEIFKSLEDWALDNILVHLKPVEKCWQPQDFLPDPSSDGFEEQVREIRERAKEIPDDYYVTLVGDMITEEALPTYQTMLNTLDGVRDETGASPTSWAVWTRAWTAEENRHGDLLNKYLYLSGRVDMRQIEKTIQYLIGSGMDPGTENNPYLGFIYTSFQERATFISHGNTARHAKDHGDLKLAQICGIIAADEKRHETAYSKIVEKLFEIDPDGTVMCFADMMKRKISMPAHLMYDGRDDNLFEHFSAVAQRLGVYTAKDYADILEFLVGRWKVGDLTGLSGDGRKAQDFVCGLAPRIKKLEERAQARAKQGPRIPFSWVYDREVQL

SEQ ID NO: 6205 - protein, 212 aa, Salmonella typhimurium LT2
MSLFDKKHLVTQADALPGRNTPMPIATLHAVNEHSMTNVPAGMEIAYFAMGCFWGVERLFWQLPGVYSTAAGYAGGYTPNPTYREVCSGQTGHAEAVRIVYDPAVISYEQLLQTFWENHDPTQGMQQGNDHGTQYRSAIYPLTPEQNAAAHASRERFQSAMTAAGDHRPITTEIAHATPFYYAEDEHQQYLHKNPYGYCGIGGIGVCLPPDA

SEQ ID NO: 6206 - protein, 492 aa, Arabidopsis thaliana
MSDLQAKNDVVAVDRQSSSSLADLDGPSPLRKMISVASIAAGIQFGWALQLSLLTPYVQLLGVPHKWSSFIWLCGPVSGLLVQPSVGYFSDRCTSRFGRRRPFIATGALLVAVAVVLIGYAADFGHSMGDKIDKPVKMRAVVIFALGFWILDVANNTLQGPCRAFLGDLAAGDAKKTRTANAFFSFFMAVGNVLGYAAGSYTNLYKIFPFTMTKACDIYCANLKSCFFLSITLLLVVTIIALWYVEDKQWSPKADSDNEKTPFFGEIFGAFKVMKRPMWMLLIVTALNWIAWFPFLLYDTDWMGREVYGGDSKGDDKMKKLYNQGIHVGALGLMLNSIVLGIVSLGIEGISKKIGGAKRLWGAVNIILAVCLAMTVLVTKKAEEHRRIAGPMALPTDGIRAGALTLFALLGIPLAITFSIPFALASIISSSSGAGQGLSLGVLNMAIVIPQMIVSFGVGPIDALFGGGNLPRFVVGAIAAAISSVVAFTVLP

SEQ ID NO: 6207 - protein, 346 aa, Arabidopsis thaliana
MVTSSDQIQNGSEEQSKRSEIYTYEAPWQIYAMNWSIRRDKKYRLAITSLIEQYPNRVEIVQLDESNGEIRSDPNLCFEHPYPPTKTSFIPDKECQRPDLLATSSDFLRLWRISDDESRVELKSCLSSDKNSEFSGPITSFDWNEAEPRRIGTSSIDTTCTIWDIEREVVDTQLIAHDKEVYDIAWGGVGVFASVSEDGSVRVFDLRDKEHSTIIYESGEPSTPLVRLSWNKQDPRYMATVIMGSAKIVVLDIRFPALPVVELQRHQASVNAIAWAPHSSSHICSAGDDSQALIWDISSMGQHVEGGLDPILAYTAGAEVEQLQWSSSQPDWVAIAFSNKLQILRV

SEQ ID NO: 6208 - protein, 397 aa, Arabidopsis thaliana
MDEALTNASAIGDQRQKIEQYKLILSSVLSSNDLLQAQRFIDHILSDDVPLVVSRQLLQSFAQELGRLEPETQKEIAQFTLTQIQPRVVSFEEQALVIREKLAGLYESEQEWSKAAQMLSGIDLDSGMRAVDDNFKLSKCIQIARLYLEDDDAVNAEAFINKASFLVSNSQNEVLNLQYKVCYARILDMKRKFLEAALRYYGISQIEQRQIGDEEIDENALEQALSAAVTCTILAGAGPQRSRFLATLYKDERCSKLKIYPILQKVYLERILRRPEIDAFSEELRPHQKASLPDKSTVLDRAMIEHNLLSASKLYTNIRFDELGTLLAIDPRKAEKIAANMIGQDRMRGSIDQEEAVIHFEDDVEELQQWDQQISGLCQALNDILDGMAKKGMSVPV

SEQ ID NO: 6209 - protein, 344 aa, Geobacter sulfurreducens PCA
MAIRLPAEWEEQDGVLIAWPHPGSDWYPWLRLVEPVFAQIVREITRFETALVVAADGERTAALLEAVGARMERVAIVELPTNDTWARDFGPVTVERDGRPVLLDFGFNGWGLKFAADRDNLVTRRLRHLGIFGDIPAEMVGLVLEGGSIESDGRGTVLTTAECLLNPNRNPHLSRAEIEEALARYLGTERVLWLENGFLAGDDTDSHVDTLARLAPDDTIVYVRCDDATDEHYAALFMMEKELANLRTREGSPYRLIPLPWPRACFDHEGQRLPATYANFLVINGAVLVPVYDDPADEAALEAIGRAFPGREIVGIDCRPLIIQHGSLHCVTMQLPKGVLPCPN

SEQ ID NO: 6210 - protein, 200 aa, Brassica napus
MMPKANVIFSSTITIFLLLSISHFPGALSQFDKECTPEYDNTCTDKNKAFNLKLVAVFTILVTSLIGVCLPLFARSVSAFQPERSLFLIVKSFASGIILATGFIHVLPDSFEMLSSHCLNDNPWHKFPFTGFVALISAVFTLMVDSITTSLISKSGKRDPCADVASAGSPDEEMGHVSHYGHGLHHSNGKKLGSNLQLLR

SEQ ID NO: 6211 - protein, 353 aa, Zea mays
ICVCCFADELIKNAAYIGTPGKGILAADESTGTIGKRLSSINVENVEENRRALRELLFCCPGALQYISGVILFEETLYQKTKDGKPFVDVLKEGGVLPGIKVDKGTIEVVGTDKETTTQGHDDLGKRCAKYYEAGARFAKWRAVLKIGPNEPSQLAIDLNAQGLARYAIICQENGLVPIVEPEILVDGPHDIDRCAYVTETVLAACYKALNEHHVLLEGTLLKPNMVTPGSDSKKVTPEVIAQYTVRTLQRTVPAAVPAVVFLSGGQSEEEATLNLNAMNKLSTKKPWALSFSFGRALQASTLKAWAGKVENVEKARAAFLARCKANSEATLGTYKGDAAADTESLHVKDYKY

SEQ ID NO: 6212 - protein, 348 aa, Thermus caldophilus
MKGLILAAGRGTRLRPLTHTRPKPAIRVAGRPIIHYAVENLLEAGVREIGVVVSPETERDLKVALEGYPVRYVFQEEPQGLAHAVDVARGFLGESPFVLYLGDNLFQKGIRRFLEAFKPGVSAVIALVRVEDPRQFGVAVLEGNRVVRLLEKPKEPPSDLAVAGVYVFSPEVLEVVRGLKPSARGEYEITDAIQGLIDRGKTVVGVEVEGWWKDTGRHQDLLDANRLLLEELTPKVEGDVVESQLTGRVVVEKGAKVVRSTVIGPAHIGAGAVVEEAFVGPFTSVGPRARVARSEVEYSLLEEEAVVEEVRLRLQECILGVRAEVKSRDGLPRAHRLILGDLSQVELA

SEQ ID NO: 6213 - protein, 327 aa, Salmonella enterica subsp. enterica serovar Paratyphi A str.
MATRIEFHKHGGPEVLQTVEFTPTEPAEHEIQVENKAIGINFIDTYIRSGLYPPPSLPAGLGTEAAGVVSKVGNGVEHIRVGDRVVYAQSTLGAYSSVHNVPADKAAILPDAISFEQAAASFLKGLTVFYLLRKTYEVKPDEPFLFHAAAGGVGLIACQWAKALGAKLIGTVGSAQKAQRALDAGAWQVINYREESIVERVKEITGGKKVRVVYDSVGKDTWEASLDCLQRRGLMVSFGNASGPVTGVNLGILNQKGSLYATRPSLQGYITTREELTEASNELFSLIASGVIKVDVAENQRYALKDARRAHEVLESRATQGSSLLIP

SEQ ID NO: 6214 - protein, 543 aa, Arabidopsis thaliana
MRRFVIGQAKNLIDQSRRRQLHHHKNLSFVSLIPPFSAPSDSSSRHLSSSSSSDMSASDSSSSLPVTLDTINPKVIKCEYAVRGEIVNIAQKLQEDLKTNKDAYPFDEIIYCNIGNPQSLGQQPITFFREVLALCSYTALLDESATHGLFSSDSIERAWKILDQIPGRATGAYSHSQGIKGLRDAIADGIEARDGFPADPNDIFMTDGASPGVHMMMQLLITSEKDGILCPIPQYPLYSASIALHGGTLVPYYLDEASGWGLEISELKKQLEDARSKGITVRALAVINPGNPTGQVLSEENQRDVVNFCKQEGLVLLADEVYQENVYVPDKKFHSFKKVARSMGYGEKDLALVSFQSVSKGYYGECGKRGGYMEVTGFTSDVREQIYKMASVNLCSNISGQILASLIMSPPKPGDDSYESYIAEKDGILSSLARRAKTLEEALNKLEGVTCNRAEGAMYLFPCLHLPQKAIAAAEAEKTAPDNFYCKRLLKATGIVVVPGSGFRQVPGTWHFRCTILPQEDKIPAIVDRLTAFHQSFMDEFRD

SEQ ID NO: 6215 - protein, 384 aa, Oxyrrhis marina
LYCLEHGIQPDGQMPSDKTIGGGDDAFNTFFSETGAGKHVPRCVFVDLEPTVVDEVRTGTYRQLFHPEQLISGKEDAANNFARGHYTIGKETVDLVLDRIRKLADNCTGLQGFLMFHSCGGGTGSGLGCLLLERLSVDYGKKSKLSFTIWPCPQVSTAVVEPYNCVLCVHSLLEHTDVTTQLDNEAMYDICRRNLDIERPTYTNLNRLVAQVISSLTASLRFDGALNVDVTEFQTNLVPYPRIHFMLASYAPIISAEKAYHEQLSVAEITNSVFEPASMMIKCDPRHGKYMACCLMYRGDVVPKDVNASVATIKTKRTIQFVDWSPTGFKCGINYQPPTVVPGGDLAKVMRAVCMISNTTAVAEVFSRIDHKFDLMYAKRAFVH

SEQ ID NO: 6216 - protein, 376 aa, Bacillus thuringiensis serovar konkukian str. 97-27
MAVSKFVQIRRDLHKIPEIGFEEWKTQQYILDYIGTLLNEHVEVKVWRTGVIVKVKGKNPEKVIGYRADIDGLPITEETGYEFASVHEGMMHACGHDLHTTIGLGLLTAAVTERIDDDLVFLFQPAEEGPGGALPMLESEELKEWKPNIILGLHIAPEYPVGTIATKEGLLFANTSELYVDLKGKGGHAAYPHTANDMIVAASHLVTQLQSVISRNVNPLDSAVITIGKITGGTVQNIIAEKSRLEGTIRTLSVESMSRVKSRIEAIVAGIEASFQCEAVIDYGAMYHQVYNHEALTREFMQFVSEQTDMKVITCTEAMTGEDFGYMLQEIPGFMFWLGVNSEYGLHHAKLKPDEEAIEKAIVFLDQYVKWKGTRK

SEQ ID NO: 6217 - protein, 397 aa, Salmonella enterica subsp. enterica serovar Paratyphi A str.
MFQKVDAYAGDPILSLMERFKDDSRHDKVNLSIGLYYNEDGIIPQLKTVAEAEARLNAQPHGASLYLPMEGLNTYRHTIAPLLFGADHPVLQQQRVATIQTLGGSGALKVGADFLKRYFPDAGVWVSDPTWENHIAIFAGAGFEVSTYPWYDDATNGIRFNDLLATLNTLPARSIVLLHPCCHNPTGADLTPSQWDAVIEIVKARDLIPFLDIAYQGFGAGMDEDAYAIRAIASAGLPALVSNSFSKIFSLYGERVGGLSVVCEDAEIAARVLGQLKATVRRIYSSPPCFGAQVVATVLGDEALKASWLAEVDAMRTRIISMRQTLVKELKAEMPDRNFDYLLQQRGMFSYTGLSEELVERLRDEFGVYLIASGRMCVAGLNASNVHRVAKAFAAVM

SEQ ID NO: 6218 - protein, 390 aa, Oxyrrhis marina
IGAKFWEVLSDEHGIDPTGTYHGDSDLQLERINVYYNEATGGRYVPRAILMDLEPGTMDSVRAGPFGQLFRPDNFVFGQTGAGNNWAKGHYTEGAELIDSVLDVVRKEAEGCDCLQGFQITHSLGGGTGSGMGTLLISRIREEYPDRIMASFSVIPSPKVSDTVVEPYNAVLSFHQLVENADEVMTMDNEALYDICFRTLKLTTPTYGDLNHLVSAAMSGITSCIRFPGQLNCDLRKLAVNMIPFPRLHFFMVGFAPLTSRGSQQYRALTVPELTQQMFDAKNMMCAADPRHGRYLTACAMFRGRMSTKEVDEQMLNVQNKNSSYFVEWIPNNIKQSVCDIPPKGLKMSVAFLGNSTAIQEMFKRVAEQFTAMFRRKAFLHWYTGEGMDE

SEQ ID NO: 6219 - protein, 203 aa, Triticum aestivum
  misc_feature (26)..(26): Xaa can be any naturally occurring amino acid
  misc_feature (31)..(31): Xaa can be any naturally occurring amino acid
  misc_feature (56)..(56): Xaa can be any naturally occurring amino acid
  misc_feature (108)..(108): Xaa can be any naturally occurring amino acid
  misc_feature (137)..(137): Xaa can be any naturally occurring amino acid
  misc_feature (157)..(157): Xaa can be any naturally occurring amino acid
  misc_feature (179)..(179): Xaa can be any naturally occurring amino acid
  unsure (1)..(203): unsure at all Xaa locations
EHDCTRWQQVCDPRSVQSVVSLVHAXHLRTXDKAFSRLNMRDDVTAVDASFAYMMXATTDQISYHETLARMPRQDITISTGYGKEEAWGPQYMGIRVEHQVAGAPLVXISPAGRCTHEDVHEVIKDLSEHGRQNVRXESSVGLAVIYRVEESSTWGXKEMQIVRTGSTKSDRVWLLGSXISCRSQMNSILKRQCLQTIRGVSR

SEQ ID NO: 6220 - protein, 387 aa, Amphidinium corpulentum
IGAKFWEVISDEHGIDPTGTYHGDSDLQLERINVYFNEATGGRYVPRAILMDLEPGTMDSVRAGPFGQLFRPDNFVFGQTGAGNNWAKGHYTEGAELIDSVLDVVRKEAEGCDCLQGFQMCHSLGGGTGSGMGTLLISKVREEYPDRIMETFSVIPSPKVSDTVVEPYNAVLSFHQLVENADECFLLDNEALYDICFRTLKLTTPTYGDLNHLVSAAMSGVTTCLRFPGQLNCDLRKIAVNLIPFPRLHFFMTGFAPLTSRGSQQYRALTVPELTQQMFDAKNMMCAADPRHGRYLTAAALFRGRMSTKEVDEQMLNVQNKNSSYFVEWIPNNIKASVCDIPPKGLKMAVAFAGNSTAIQEMFKRVAEYFTAMFRRKAFLHWYTGEG

SEQ ID NO: 6221 - protein, 282 aa, Colwellia psychrerythraea 34H
MSNSNIQQAGARYQASFASLKEKNEQAFIPFVMIGDPNAEQSIAVIKSLIDAGADALELGIPFSDPSADGLTIQNAALRALGAGINTDICIDILKRVREYAPQIPIGLLLYGNLVFARGIDAFYRDMSAAGVDSVLIADVPIRESEPFREAALKYGIAPIFIAPPNASDETLREVSSYSRGYTYVLSRAGVTGVDTAESPKNTVTTTANKLIDSLAKYHAAPPVLGFGISTPQQVKDALKAGALGAISGSAVVKIIEDNLADESKMLIDLTHFVKDMKAATR

SEQ ID NO: 6222 - protein, 330 aa, Ustilago maydis 521
MSKPQVLICGTIVHAHDELKNDLGSIAEILHLDTPTRAEFFQACSAGGKYANIIAIYRHNDSVDKVGLFDAELINALPASLKSICHNGAGYDQIDVHAAKAKGITVSHTPAAVDDATADTAMFLVLSSLRQYYRAEINARSGKWKSGLKPAHDPEGKTLGIIGMGGIGSALAKRAAAFDMKIIYYNRNPNPNADASYTYVESQQQLLAQSDVVSLNLPLNKQTEKSFGKAQFDQMKDGAILVNTARGGVVDEEALIEALSSGKLSSAGLDVYPAEPKIDERLVKMDNCILLPHMGTETVETQKKMEVQVFGSIKTAIQTGKPSYIVKEHK

SEQ ID NO: 6223 - protein, 384 aa, Amphidinium herdmanii
LFCLEHGIQPDGQMPSDKTIGGGDDAFNTFFSETGAGKHVPRCVMVDLEPTVVDEVRTGTYRQLFHPEQLITGKEDAANNFARGHYTIGKEIVDLVLDRIRKLADNCTGLQGFMVFNACGGGTGSGLGCLMLERLSVDYGKKSKLSFTIWACPQVATAVVEPYNTVLCVHSLLEHTDVTIMYDNEALYDICRRNLDIERPTYTNLNRLLAQIISSLTASLRFDGALNVDITEFQTNLVPYPRIHFMLSSYAPIISAEKAYHEQLSVAEITMSVFEPSSLFVKCDPRHGKYMACCMMYRGDVVPKDVNASVATIKTKRTIQFVDWSPTGFKCGINYQPPTVVPGGDLAKVMRACCMISNSTAIAEVFSRIDHKFDLMYSKRAFVH

SEQ ID NO: 6224 - protein, 229 aa, Alkalilimnicola ehrlichei MLHE-1
MKADLSRIRAVLYDLDGTLVDSAPDLAVAVNRVLADLGQQPREENEIRRWVGNGARRLIMRALTGEHEGDPGDEHTDPALEQFFEYYGERVAERSRLYPGVAEGIAGVAELGIAQAVVTNKPRRFAEPLLETLGIRRYMATVVGGECAPVKKPDPAPLRLALERLGVEPAQALMVGDSAVDVGAARNTGMKVICVPYGYNAGNAIEDAFPDAMVKSLAEIPAMLRSRAA

SEQ ID NO: 6225 - protein, 479 aa, Alkalilimnicola ehrlichei MLHE-1
MGDATLVWLRRDLRLTDNPALDQAARRGGPVIAVYLHAPEETPQYPPGAASHWYLHHSLKALGPALAQAGIPLVLRRGPALATLRALIRATGAGAVYWNRLYEPDAVARDRTVKQALRTEGLDCRSFPTALLHEPWAVRNQADRPYRAFTPFWRACRRQPPPAAPLPAPDLRDRPVPAVEGLDLAALGLLPRTPWDTGLRNTWQAGESAALARLEAFAADRLARYAQDRDRPAEPGTSGLSPALHFGELSPRQVWWQVMAAREAGVPEDACETFLSELGWREFAHHLLWSHPDLGDAPVDDRFGAFPWRPDPGDGWLHAWQAGRTGIPLVDAGMHELWQTGWMHNRVRMVTGSFLVKHLRLPWQRGERWFRDTLVDWDAASNAMGWQWVAGCGADAAPYFRIFNPVRQGERFDPQGRYVRRWLPALANLPDKYIHAPWTAPEAVLRRAGVTLGSDYPCPLIDLRLGREQALSAFQAIKG

SEQ ID NO: 6226 - protein, 495 aa, Pirellula sp. 1
MLGMGEPGRVRASKSKIVLSDRRMWVPLIVACMTQGYTTSVTPKTSRQLVHCIYRSPMSSSSSLEIQRADTVRVQFGDTNLELPLVEGSEGEKAIDISRLRADTGVITLDDGFVNTGSTRSAITFLDGEKGILRYRGYPIEELAKSCDFVEVAYLLIFGDLPNAEEIETFRSGIRDHTMIHEDMRSFYNGFPRDAHPMAILSSVVGALSTFYQDSMDLNDPRQVEISLYRLIAKLPTIAAYSYKKSMGQPFMYPKNELDYCENFLHMMFATPTSDYLVDPDFAEALNLLFIVHADHEQNCSTSTVRMVGSSNANLFASISAGIGALWGPLHGGANEACVNMLEQIAADGGDVKKYVDMAKDKSNDFRIMGFGHRVYKNSDPRATIIRASCDKLLAKLNLDDPLFEVAQKLEEVALKDEYFIERKLYPNVDFYSGVIYRALGIPVQMFTVLFAIGRLPGWLAHWREMHANPASRINRPRQIYTGATQRDVVPVDQR

SEQ ID NO: 6227 - protein, 477 aa, Salmonella typhimurium LT2
MSTSDSCYNTGYILRICAIAALGGILFGYDTAVISGAIGSLTSYFHLSPAETGWAVSCVVVGCVIGSFSAGYLSKRFGRKKSLMVSALLFTISAVGTSLSYTFTHFVIYRIIGGLAVGLAATVSPMYMSEVSPKNMRGRALSMQQFAIVFGQILIFYVNYKIASIAADTWLIELGWRYMFAAGIIPCILFCILVFLIPESPRWMMMIGREEETLKILTKISNEEHARHLLADIKTSLQNDQLNAHQKLNYRDGNVRFILILGCMIAMLQQVTGVNVMMYYAPIVLKDVTGSAQEALFQTIWIGVIQLIGSIIGAMIMDKMGRLSLMRKGTIGSIIGLLLTSWALYSQATGYFALFGMLFFMIFYALSWGVGAWVLISEIFPNRMRSQGMSISVGFMWMANFLVSQFFPMINENPYLLSHFHGAFPMWIFAICCIFSYFFICRYLPETKGISLEKMESVVLAKRRKKLQPIQTERYSD

SEQ ID NO: 6228 - protein, 764 aa, Magnetococcus sp. MC-1
MLIMLLLTRTLMGSLESNYLLAKQRQANENNIEILLASATEALENRNIIGLKKIFAQALRSQPQLLELTILNDDGKPLFSSTREQAPNTTLTHFRTPIMVQGSFQGILVGAWDLAPDLRAIDTHVNHILLLTSLLFGLITLMVIFMVHRLAIQPVDAIYNRLIKQISPPQSKPETFHAARELRRLHQTVESFSRTAASHLENARTLQESEALLKQRVERRTRELRLAKEAAEQANLAKTEFLATMSHEIRTPLNGVLGMSDLLLESDLNSYQRHHVETIHRSGRTLLRVINDILDLSRIQAGRMPLEVTAFKLRACLEDVQALFKDQARRKGLSFSINCQEELPQRLLGDATRLNQILFNLVGNALKFTERGFVRVSVQAEQVREADLLLRIQVEDSGIGISDEYKNRLFEIFSQQDSSISRRYGGSGLGLVITRKLAQIMGGKLGFSSRSGAGSTFWVTARFGRVPDTLPDHPLLPREEQQSNLLNQRFRAHILLAEDNPVNQDVARLNLERLGCRVTLVENGQQAVTVFQENRFDLVLMDCEMPIMDGYTATRTIRDLERQQGRRATPIIAVTAHALASHRNKAIATGMNDFLSKPFSTTKLIKLLATYLPPHTVIAQPDPAPPVVTQETAPSADPAHKTLDHRALDQIRALDPADPQGMLNRMIDLYFEQSAKDFKAIENGLATQNAELIRFHAHKLKSSSAQMGGQQLSLLCRTIEEQCHTFTRVEESMSQASKAQHELCAALHALRQTAPPTPPSEGEI

SEQ ID NO: 6229 - protein, 423 aa, Haemophilus influenzae 86-028NP
MNLDLNQLVKWRREFHRFPEIGWSEFWTTSRIADYLEDLDCFEIFLGKQIINPDFVRGRKQAVVDKGLANAKAYGANEKWLEKMEGYTGCVALFDSGKPGKTIALRFDIDCVNVTETRSPEHIPNKEGFASINDGFMHACGHDSHITIGLGVALWIAQNKDKLTGKVKIVFQPAEEGVRGAAAIAQSGIIDDADYFASSHISFCANTGTVIANPRNFLSTTKIDIRYKGKPAHAGAAPHLGRNALLAAAHTVTQLHGIARHGEGMTRINVGVLKAGEGRNVIPSSAELQLEVRGENKAINEYMTEQVMQIAKGISISFDVAYETEIVGEAVDMNNDVELIKLIEEISLKQPQINNVNSDYAFNASEDATILGRRVQEHGGKAIYFILGADRTAGHHEAEFDFDENQLLTGVNIYTSLVQKLLS

SEQ ID NO: 6230 - protein, 226 aa, Clostridium tetani E88
MVIIDLLKGVVYMKFFIDTANVEEIKKVAKWGVLDGVTTNPTLIAREGRDLKEVIEEICSIVDGPISAEVISLESEKMVEEAKELIKIHKNIVIKVPMCEEGLKAVSELTKLGIKTNVTLIFSAQQALLAAKAGATYVSPFLGRIDDIGSFGIQLVEDIVTIFTNFGIESEIICASIRTPIHVLECARVGGDIATVPYKVFAQMLKHPLTDRGIEQFLEDYKSMNK

SEQ ID NO: 6231 - protein, 707 aa, Brucella melitensis 16M
MLCVPLPSGASSRKAADGFRWRLCSGKRHRRNPVKPSQGKTAETMTNTDKQNQMANAIRFLSMDAVEKANSGHPGLPMGAADIATTLYTRFLSHDPKNPHWPDRDRFVLSAGHGSMLLYSLLYLSGYEDITIDEIKKFRQLGSRTAGHPEYGHAAGIETTTGPLGQGIANAVGMAISERILNAQFGDSLVNHYTYALVGDGCLMEGISQEAIALAGHLKLNKLIVLWDDNNISIDGPITLSDNTDQPARFAASGWNTMAVDGHDQDAIAKAIELARVSDRPTLIACKTTIGFGAPNKAGTNKVHGSPLGAEEIAATRKALGWSSEPFVVPAEVLDAWRVAGLNAAKKRLEWEKRLSAVEAETRAEFERRMRGELPSGFDAAIVEYKKKLSADKPKVATRKSSEMALEVINGVVPETVGGSADLTGSNNTKTSQTKAVTPENYDGRYIHYGIRELGMAAAMNGITLHGGLIPYSGTFLCFSDYARPAMRLSSLMGIRVVYVMTHDSIGLGEDGPTHQPVEHLAALRAIPNHNVFRPADAVETAECWQLALHSRKTPSTLALTRQNLPTVRTEHREENLCAFGAYELAAASSDAKVTIFATGSEVEIALKARDLLEGKGIATRVVSVPCFELFEQQSDTYKEATIGDAPVKLAIEAAISLGWERFIGENGIFIGMKGFGASGEINDLYKHFGITAEHAVEAAEKKLNAA

SEQ ID NO: 6232 - protein, 361 aa, Prochlorococcus marinus str. MIT 9313
MSLWVVKVGTSLLRGNEKQSTAEVIESYSACLSASLKRGDHVVLVTSGAVGLGCNRLGLSQRPVDVVALQGTAAIGQGQLMALYEAAMSRRGHTVAQVLLTRSDLGSRQRYRNASSTLKQLLDWGVLPVVNENDALSPEELRYGDNDTLSALVATAVEADQLIMLTDVDRLYSSDPRINASAEPISDVYHPHELTALEVAAGEGGAWGTGGMTTKLAAARIATASGITVLLADGRDPQVLDGLLQGRRSGTVFHPHPQPLGNRKSWLAHALKPLGTLQLDEGACDALQHRGASLLLVGVKEVEGNFEANQPVRLINPEGNELARGLCSLSSKELREAIETQMSTNRSPVVVHRDVLVLRNA

SEQ ID NO: 6233 - protein, 453 aa, Prochlorococcus marinus subsp. marinus str. CCMP1375
MNYSFDLIVLGAGSGGLAAAKRAASYGARVAIVEGDRVGGTCVIRGCVPKKLLVYGSQYGEYLKNAPSFGVKLTASKIEPSILLKNVRNEVDRLNKLHIDLLEKSNVVLIKGWGSIAGPNSVVVKSKDVQDQAIELFAEKILIAVGGRPSFPEIPGASLGWTSDDVFLQEGFPDKVVVVGAGFIACEFACILNGLGVKVKQLVRGRNLLKNFDNEVAFNLQQSMESSGIEFQFASEVNSIEGEIGDLNLVVNHDSNIKSGAVIFATGRKPFIEGLNLEKVDIRTSNNRINVDNKNSTNISNIFAIGDVTDKVNLTPVAIEEGRVFADNNYSDKNRYVNYEFIPKAVFSQPELAYVGKTEEESKRIYGESNIKIYRANFKPMSKMLVKSKEKCFLKLIIEKNSNKVVGCHMLGEHASEIIQMAAISMNMGATKLDFDQTMALHPTISEEFVTMK

SEQ ID NO: 6234 - protein, 97 aa, Salmonella enterica subsp. enterica serovar Typhi Ty2
MSIRPLHDRVIVKRKEVESKSAGGIVLTGSAAGKSTRGEIIAVGKGRILDNGTVQPLDVKVGDIVIFNDGYGVKSEKIDNEEVLIMSESDILAIVEA

SEQ ID NO: 6235 - protein, 229 aa, Akebia trifoliata
MQKREGDMGRGKIEIKRIENTTNRQVTFCKRRNGLLKKAYELSVLCDAEVALIVFSSRGRLYEFSNSSIKSTIERYKKASADSSNTTSIIEANAHYYQHEATKLRQQIQNLQIANRQLMGDSLSSLTVKELKQLENRLERGLTRIRSKKQEIMFAEIEYMQKREVELQKENMYLRAKIAENENAQQTSMVPAQEFDAIQTFDSRNYFQMNMLEGGAAYSHADQTALHLG

SEQ ID NO: 6236 - protein, 548 aa, Salmonella enterica subsp. enterica serovar Typhi Ty2
MAAKDVKFGNDARVKMLRGVNVLADAVKVTLGPKGRNVVLDKSFGAPTITKDGVSVAREIELEDKFENMGAQMVKEVASKANDAAGDGTTTATVLAQSIITEGLKAVAAGMNPMDLKRGIDKAVAAAVEELKALSVPCSDSKAIAQVGTISANSDETVGKLIAEAMDKVGKEGVITVEDGTGLQDELDVVEGMQFDRGYLSPYFINKPETGAVELESPFILLADKKISNIREMLPVLEAVAKAGKPLLIIAEDVEGEALATLVVNTMRGIVKVAAVKAPGFGDRRKAMLQDIATLTGGTVISEEIGMELEKATLEDLGQAKRVVINKDTTTIIDGVGEEAAIQGRVAQIRQQIEEATSDYDREKLQERVAKLAGGVAVIKVGAATEVEMKEKKARVEDALHATRAAVEEGVVAGGGVALIRVASKIADLKGQNEDQNVGIKVALRAMEAPLRQIVLNCGEEPSVVANTVKGGDGNYGYNAATEEYGNMIDMGILDPTKVTRSALQYAASVAGLMITTECMVTDLPKSDAPDLGAAGGMGGMGGMGGMM

SEQ ID NO: 6237 - protein, 267 aa, Prochlorococcus marinus subsp. marinus str. CCMP1375
MESSILERCFSQSKKEGRIALMPFIMAGDPDVNTSAEILIMLEKKGADIIELGIPYSDPLADGPIIQKAASRALNSGTSPKSVLEMLSTLKTKLSVPIILFTYSNPLLNYGMEEFCIDASKAGAAGLVVPDLPLEETEKLSSIALSKNLDLVLLVAPTTPKERMRKISQRSNGFTYLVSVTGVTGERSALENRVQLLINELRGFSSTPVAVGFGISDTKHVIQVKRWGADGAIIGSALVKRISNATTGQEAEEAGKFCSELYKATSL

SEQ ID NO: 6238 - protein, 384 aa, Amphidinium herdmanii
LFCLEHGIQPDGQMPSDKTIGGGDDAFNTFFSETGAGKHVPRCVMVDLEPTAVDEVRTGTYRQLFHPEQLITGKEDAANNFARGHYTIGKEIVDLVLDRIRKLADNCTGLQGFMVFNACGGGTGSGLGCLMLERLSVDYGKKSKLSFTIWACPQVATAVVEPYNTVLCVHSLLEHTDVTIMYDNEALYDICRRNLDIERPTYTNLNRLLAQIISSLTASLRFDGALNVDITEFQTNLVPYPRIHFMLSSYAPIISAEKAYHEQLSVAEITMSVFEPSSLFVKCDPRHGKYMACCMMYRGDVVPKDVNASVATIKTKRAIQFVDWSPTGFKCGINYQPPTVVPGGDLAKVMRACCMISNSTAIAEVFSRIDHKFDLMYSKRAFVH

SEQ ID NO: 6239 - protein, 387 aa, Gyrodinium instriatum
IGAKFWEVISDEHGIDPTGTYHGDSDLQLERINVYFNEATGGRYVPRAILMDLEPGTMDSVRAGPFGQLFRPDNFVFGQTGAGNNWAKGHYTEGAELIDSVLDVVRKEAEGRDCLQGFQMCHSLGGGTGSGMGTLLISKVREEYPDRIMETFSIIPSPKVSDTVVGPYNAVLSFHQLVENADECFLLDNEALYDICFRTLKLTTPTYGDLNHLVSAAMSGVTTCLRFPGQLNCDLRKIAVNLIPFPRLHFFMTGFAPLTSRGSQQYRALTVPELTQQMFDAKNMMCAADPRHGRYLTAAALFRGRMSTKEVDEQLLNVQNKNSSYFVEWIPNNIKASVCDIPPKGLKMAVAFAGNSTAIQEMFKRVAEYFTAMFRRKAFLHWYTGEG

SEQ ID NO: 6240 - protein, 578 aa, Debaryomyces hansenii CBS767
MTVIELNKALKPSWWKETTVYQVYPSSFQDSNGDGIGDLPGITSRLDYIKSLGVDAIWLSPCFDSPQVDMGYDISDYKKIYPAYGTMEDADELIKGVHERGLKILMDLVVNHTSDQHPWFKKSRSSIENSYRDWYIWRKPRYDSEGNRQPPNNWAAAFGGSAWTFDETTQEYYLHLFAVEQPDLNWENENVRAAVHDIMRFWLDKGADGFRMDVINFISKDQRFPDAEVKHPNAKYQDGSPYFACGPRLHEYLQGIGQILIEYDAFSVGEMPACNDPEEIIKAVNIDRHELNMIFNFELVDIDHGNEGKFTAGSWKLADAYKIINKWQTFMQENGGWNAIYLENHDQPRSVSRFAEDSPEFRKISAKMVSTFLALQQGTLFVYQGQELGLKNVPETWDISNYRDLEVLNHYNELKEDGASPEILKAAMAEYQKKSRDNARYPVQWDTSANAGFSSSTPWIDVNEDYLEWNAAEEEKDPESVLNYWRSILKIRKEWKDILIYGRFEMVTSIEDEKVLAFKRTTSDKSAIVICNFSSDAVLWTIPEEFENSKVILSNYDRSKVSGPSVELKPYEAFTLLK

SEQ ID NO: 6241 - protein, 382 aa, Bacillus anthracis str. A2012
MGEFSGKGENVMTVIRGLEGVVATTSSVSSIIDDTLTYAGYNIDDLAENATFEEVVYLLWHRKLPNEQELAKFNEIVSEYYKVPGEILAYLKQVDLKIAHPMSVLRTAISMLSLYDESAEIMDEKSNYLKAVKLQAQVGTLVAAYARIRKGLDVVEPRNDLSLAANFLYMLNDREPNEVEIEAFDKALVLHADHELNASTFTARVCVATLSDVYSGITAAIGALKGPLHGGANENVMKMLTEIGEEENVESYIHNALQNKVKIMGFGHRVYEQGDPRAKHLREMSKRLCVLLGEEKWYNMSIKIEDIVTKEKGLPPNVDFYSASVYHCLGIDHDLFTPIFAISRMSGWLAHILEQYENNRLIRPRADYNGPTHQVYVPIAQR

SEQ ID NO: 6242 - protein, 251 aa, Lotus corniculatus var. japonicus
MPIRNIAIGAPQEATHPDTLRSALAEFISTFIFVFAGSGSGIAYNKLTDDGAATPAGLISASIAHAFALFVAVSISANISGGHVNPAVTFGLFVGGNISFLRGVIYIIAQLLGSIVASLLLAFVTGLAVPAFGLSAGVGVGNALVLEIVMTFGLVYTVYATAVDPKKGSLGTIAPIAIGFIVGANILLGGAFDGASMNPAVSFGPAVVSWSWSNHWIYWVGPLVGGGIAGLIYEVVFIGSQTHEQLPTTDY

SEQ ID NO: 6243 - protein, 384 aa, Heterocapsa rotundata
LFCLEHGIQPDGQMPSDKTIGGGDDSFNTFFSETGAGKHVPRCVMVDLEPTVADEVRTGTYRQLFHPEQLISGKEDAANNFARGHYTIGKEIVDLVLDRIRKLADNCTGLQGFMIYNAVGGGTGSGLACLMLERLSVDYGKKPKISFTVWACPQISTAVVEPYNTVLAVHSLLEHTDVTIMYDNEALYDICRRNLDIERPTYTNLNRLLAQIISSLTASLRFDGALNVDITEFQTNLVPYPRIHFMLSSYAPIISAEKAYHEQLSVAEITMSVFEPAAMFVKCDPRHGKYMACCMMYRGDVVPKDVNASVATIKTKRTIQFVDWCPTGFKCGINYQPPTVVPGGDLAKVMRACCMISNSTAIAEVMGRIDHKFDLMYSKRAFVH

SEQ ID NO: 6244 - protein, 449 aa, Streptococcus pneumoniae TIGR4
MLDLLKQTIFTRDFIFILILLGFILVVTLLLLENRRDNIQLKQVNQKVKDLIAGDYSKVLDMQGGSEITNITNNLNDLSEVIRLTQENLEQESKRLNSILFYMTDGVLATNRRGQIIMINDTAKKQLGLVKEDVLNRSILELLKIEENYELRDLITQSPELLLDSQDINGEYLNLRVRFALIRRESGFISGLVAVLHDTTEQEKEERERRLFVSNVSHELRTPLTSVKSYLEALDEGALCETVAPDFIKVSLDETNRMMRMVTDLLHLSRIDNATSHLDVELINFTAFITFILNRFDKMKGQEKEKKYELVRDYPINSIWMEIDTDKMTQVVDNILNNAIKYSPDGGKITVRMKTTEDQMILSISDHGLGIPKQDLPRIFDRFYRVDRARSRAQGGTGLGLSIAKEIIKQHKGFIWAKSEYGKGSTFTIVLPYDKDAVKEEVWEDEVED

SEQ ID NO: 6245 - protein, 585 aa, Bacillus anthracis str. A2012
MRKTKIVCTIGPASESIEKLEQLIEAGMNVARLNFSHGSHEEHGARIKNIREASKKTGKTVGILLDTKGPEIRTHDFVDGQAELVTGAEVVLSTEQVLGTAEKFSVSYAGLYDDVDPGSRILIDDGLIELEVIEKADGNIRTKVLNSGTVKNKKGVNVPNVSIKLPGITEKDVKDIIFGIEQKVDFIAASFVRKAADVLEIRELLEEHNAQYIQIVPKIENQEGIDNIDSILEVSDGLMVARGDMGVEIPPEEVPLVQKRLIKKCNVLGKPVITATQMLDSMQRNPRPTRAEASDVANAIFDGTDAIMLSGETAAGQYPVEAVTMMANIAVRVEKSLQYEDMFKKRIKEFTPTITDAISQSVAHTALALDVAAIVAPTESGYTAKMISKYRPKSPIVAVTSDEQVGRRLALVWGVQAFMAEKRAASTDEMLDTAIQTGMDAGLIGLGDTVVITAGVPVAETGTTNLMKIHVVGEEVAKGQGIGRKAAKGKVVVAKTAAEAVANVNEGDILVTTSTDKDMIPAIEKAAALVVEEGGLTSHAAVVGVSIGIPVIVGVNGVTATLKNGQEVTVDAARGIVYNGHAEVL

SEQ ID NO: 6246 - protein, 270 aa, Lotus corniculatus var. japonicus
MGESSAPNGLNGAHEVVVNVNKDASKTIEVSDTNFTVSFLQKVIAELVGTYFFIFAGCASIVVNKNNDNVVTLPGIALVWGLAVMVLVYSLGHISGAHFNPAATIAFASTKRFPWKQVPAYVSAQVLGSTLASGTLRLIFSGKHNQFAGALPTGSNLQAFVIEFIITFFLIFILFGVATDDRAIGEVAGIVVGSTVLLNVLFAGPITGASMNPARSIGSAFVHNEYRGIWIYLLSPTLGAVAGAWVYNIVRYTDKPLREITKNVSFLKGI

SEQ ID NO: 6247 - protein, 373 aa, Arabidopsis thaliana
MAARKLGSLLRQYFFSLCFLFLGCFFFPKDADYKQKRRKKKLRRVSSSSGSSLSSSWTYLKRVFLSTTRISKSRNQTHPNVTLTSARSSQNSLVTLVQPDTTNQPDPETRIHQQTEFEISSSDEIFPCNSCGEIFPKINLLENHIAIKHAVSELIAGESSTNIVKIIFKSGWPEQGNYKSPVINRILKIHNSSKILTRFEEYREFVKAKAARSNGGGRRWDDERCVADGNELLRFYCSTFMCDLGQNGKSNLCGHQYCSICGIIGSGFSPKLDGIATLATGWRGHVAVPEEVEEEFGFMNVKRAMLVCRVVAGRVGCDLIDDDDVDKSDGGGYDSLVGQSGNKSGALLRIDDDELLVFNPRAVLPCFVIVYTV

SEQ ID NO: 6248 - protein, 666 aa, Alkalilimnicola ehrlichei MLHE-1
MPTRRDLANAIRALSMDAVQRAHSGHPGAPMGMADIAEVLWNDYLRHNPANPHWWDRDRFVLSNGHGSMLLYSLLHLSGYELGIDDLKAFRQLHSRTPGHPEYGYTAGVETTTGPLGQGLANAVGLALAERTLAAQFNRPGHELVDHWTYCFLGDGCLMEGVSHEACSLAGTWKLGKLIGFYDDNGISIDGKVEGWFTDDTPGRFEAYGWHVVREVDGHDSEAIKRAIDEARAVTDRPSLICCKTVIGFGAPNVCGTHGVHGAPLGDEEIQATREFLKWEHGPFEIPREIYSGWDARARGKQLEAAWHERLAAYRKAHPEMAAEFERRMKGALPERFAQHAEEALAEAVDESAKVATRKASEQALNRLGPYLPELLGGSADLSGSNNTKWEDCAVIGGAKADADGNYLHYGVREFGMSAIANGLALHGGFIPYTGTFLVFSDYARNAIRMAALMGIQQIFVHTHDSIGLGEDGPTHQPVEHLGSLRMIPGLDVWRPCDAIETQAAWQAALERRDGPSLLALSRQGLVAQQRTDEQVALIRRGGYVLAEPKQGEAELILMATGSEVAIMVEAAERLADRGRRVRVVSMPCLEVFQSQPADYREAVLPAGVPVIAMEAAHPMPWQALLGDRGRVIGIDTFGESAPGPALYEHFGINVDAVVKASTTVI

SEQ ID NO: 6249 - protein, 628 aa, Francisella tularensis subsp. tularensis SCHU S4
MCGVVGFYSFNKEEGFDSIINQSLLSIKHRGSDDSGYWCDNQVTLGHTRLSIHDITNAGHQPMLSNSGNTAIVFNGEIYNYLSIKNQLLSEYSNLKFKSNSDTEVLVNAIELWGIDKTLEKCIGMFAFGVYSRKTSCLILARDRFGEKPLYFGIQNGILGFASELKALKPLKECGWRFDIDRDALATYMRYAYVPTPYSIYKNISKLNVGSYIKFDAKGNSKEYKYWDSKKVLDSEKYKDSYDQAILDLEIKLKSTLSIQMQSDVPLGAFLSGGIDSTTVVALMQSMSKDKINTFSIGFNQKEYNEAEHARAVAKHIGTNHTDMYVTERDALDVIPKLAGIYDEPFADSSQIPTYLVSKIAKSKVTVALSGDAGDELFGGYNRYFLAPNIAKKIKFAKLLKYAPDAWIKKAEILNFGKFALLADKLLKLKRVLEKAKTNKELYVLLCSQINDTSFVLGAKEYDILRDKNIYDIPQLSFQEWMMFVDSNTYMIDDILVKVDRAAMANSLETRVPFLDHNIYEFAYSLPIDYKIQRGNGKRILKDLLYKYVPESLVNRSKMGFGIPLAKWLREDLREWADNLLDYSKIDKQGYLSPEVVQKYWQEHLSGKRNWQAILWNILIFQEWLDNE

SEQ ID NO: 6250 - protein, 446 aa, Coprinopsis cinerea
MREVISVHVGQAGVQIGNACWELYTVEHGLSPDGRLLEGSPSTNDSGFSTFFSETASGKHVPRSLYIDLEPNVIDEVKAGPYRSLFHPETLVTGKEDAASNYARGHYTIGKEQIDTVMDKVRRLADNCNGLQGFFVFHSFGGGTGSGFGALILERLSTDYGKKSKLEFSVYPAPTLANSVVEPYNSVLTTHTTLEHSDCSFMVDNEAIYDICKKNLNIVSPSLTNLNRLIAQVVSSITASLRFDGSLNVDLNEFQTNLVPFPRIHFPLATFAPIISAEKAHHEQNSVADMTFSCFEPGNQMVKCDPREGKYMACALLYRGDVVPKDVNAAVAIIKTKRTIQFVDWCPTGFKLGICNEPPAHVPGGDLAKVSRSMCMLSNTTAISSAWSRLDHKFDLLYSKRAFVHWYVGEGMEEGEFSEAREDLAALEKDYEEVGIDSADVEEVEY

SEQ ID NO: 6251 - protein, 369 aa, Ashbya gossypii ATCC 10895
MSELVEKTSTLLKYLDLDQRGAVIAEYIWVDSAGHLRSKGRTLQRRVESVDELPEWNFDGSSTGQAPGHDSDVYLKPVAFYPDPFRRGDNIIVLAECWNNDGTPNKYNHRHEAAKLFEAHRAADIWFGLEQEYTLFDHNDNVYGWPKGGFPAPQGPYYCGVGAGKVYARDVVEAHYRACLYAGLRISGINAEVMPSQWEFQVGPCTGITMGDELWVGRYLLHRVAEEFGVKVSFHPKPLKGDWNGAGCHTNVSTREMRQPGGMRYIEEAIDKLSKRHKEHIKLYGSDNELRLTGRHETASMATFSSGVANRGASIRIPRSVSKEGFGYFEDRRPASNIDPYLVTGIICETICGAIENADMSKEFERESS

SEQ ID NO: 6252 - protein, 686 aa, Zea mays
MAAAEARGGEFPVGMKVLVVDDDPTCLVVLKRMLLECRYDVTTCPQATRALTMLRENRRGFDVIISDVHMPDMDGFRLLELVGLEMDLPVIMMSADSRTDIVMNGVKHGACDYLIKPVRMEELKNIWQHVIRKKFNENKDHEHSGSLDDTDRNRPTNNDNEYASSANDGGDGSWKSQRKKREKEDDETDLENGDPSSTSKKPRVVWSVELHQQFVNAVNHLGIDKAVPKKILELMNVPGLTRENVASHLQKFRLYLKRIAQHHAGIPHPFVAPVSSANVAPLGGLEFQALAASGQIPPQALAALQDELLGRPTSSLALPGRDQSSLRVAATKGNKHHEEREIAFGQPIYKCQNNAYGAFPQSSPAVGGLQPFAAWPNNKVGMPDSTSTLGNVGNSQNSNMLLHELQQQPDTLLLGTLHNIDAKPSGVVMSSQSLNTFPASEGISPNQNPLIIPSQPPSFVSSIPPSMKHESLLGLPSTSTSLLGGLDMVNQASTSQALISSHGTNLPGLMNRSSNAIPSPGISNFQSGNIHYVVNQNAMGVSSRPPGVLKTESTDSLSCSYGYIGGSTSVDSGLFSSQSKNPQYGLLQNQNDVNGSWSPSQDFDSFGNSLGQGHPGTTSSNFQSSALGKLPDQGRGRNHGFVGKGTCIPSRFAVDEVESPTNNLSHSIGNSGDIVNPDIFGFSGHM

SEQ ID NO: 6253 - protein, 189 aa, Leptospira interrogans serovar lai str. 56601
MKEGASFMYSKYFIWFMTLGIFLPLAGIFAKGSFYDFKVKDIKGNEVSLSKYKGKVVMVVNVASKCGYTYQYEHLEKVYKKYKDQGFAVVGFPANNFGGQEPGTDQEIETFCRIQKGASFDMMSKISVKGKDIHPLYSYLIQNSPNPGEVEWNFEKILISKNGTIEARYRSSVEPDSSAVTQKIETLLK

SEQ ID NO: 6254 - protein, 229 aa, Polaromonas sp. JS666
MIQFYFHPSPNPLKVALFLEESGLPYEVVPVDTRKGEQHLPAFLRINPNAKTPAIVDGDATVFDSNAILLYLAEKSGQFLPESTPAARGQMLSWLMFVATGIGPYSGQAVHFKHFAPEPKEYAVNRYLFEAERHYGLLDAQLAKHPYMLGETYTLVDMAVWGWARALPFILGPDAWAKLPNLKRHFDGITARPAAQRAEALKSRFSFKAEMDDAARKHLFPQNARLAGY

SEQ ID NO: 6255 - protein, 1118 aa, Magnetococcus sp. MC-1
MDHRNSLLTLYMVMVVAVVAVAAGLLLLLYQDSFAKKQAHLQDLATNQARLIDEVANFNHSYRHDYPTGAVEATISQIRDAHGKSIGFGQTGEFIIAYRKSGHSHVHFIVAHRFTQAVTPSFRENPNHLHPAMARAMAGESGFMEGTDYRGKQVLIAYAPVVKLRMGVVAKMDVQEVLAPFERILKIGLSITLLLIGGGSVAYLWVAKGVAGRMEWQHQRLAMLVEGMPAVIYTEDLRTQLPYYVSPQAVVLLGGQGCQADEPLDVWWNRHVWAEDWETLQHARQMLKKHKRPMQVEYRMVRQDGQLIWVRDVARLVCDEQGLPLLVQGMVMDVSEARHTHEKLIASEVRFRQLYENAPIAYQSLNTEGVIQNVNQAWLKKTGYELSQVLDHSLFEFLVVGQEQEVAKKFEAFLQAGYVQDLHYELRCADGRALKVSINGQVSRDRSGRLVKTHCVLTDITEQDRAAQALQESESRLRLILASTGEGLFGLDLQGNFIFANPACLRMMGYRDDRQLLGKPMLEIVSCCSSQFVRRGKGSCPISQILKTGLPNHAEGELFRRADGSFFSTEFWSHPIQQNGELVGAVVTFIDISQRVLNQTALKASELKYRTIFESVPTPLLILDTSGVVRDVNSAHQSTFGRFAGGSLMGVSIREHPGVAGSLLAESFLALAKGEPMPLQQASYTMEAEGEAIHFNVRGVPFVTRDGEGREDLQGALVIHENITDLKQTELKLRKAVEEADCATHAKGDFLAVMSHEIRTPMNLVVGMAELLLETDVNAEQKHYLEKLQKAGDTLLSLINNILDLTKLDEGQLKLLDEPFAPQALLDEVSGIISLAAEAKGLTLSCEIQEGVPERVLGDSVRIKQVLLNLLSNALKFTQQGFIRLSLTVEGAEGAQQLCYAVSDSGMGIPDYHLDEVFERFSQGDSSMTRRFGGSGLGLAICKKLVILMQGQIQVSSQVDVGAIFQIRLPLRAAALAPASSQQQVKRRLNQGVRVLLAEDAVDNRMLIQAYLRNSPHDLVMVEDGQQALQLIEEGTDFNLILMDVQMPVMDGYSATRAILAELGAQQRPPCPIVALTAHALEGDQARSLQAGCVAHLTKPIKKKILLEAIQTYARLAP

SEQ ID NO: 6256 - protein, 516 aa, Kluyveromyces lactis NRRL Y-1140
MPPKRRHHGAGRVQNKRGKVDTVKEEIKPKDEPVETEIDGGSAVDEDVTDDLEHKTSKEDQKEDQKEEDGPIDAQNGTSETKVAGESVKTVEDKIESVTTNEEVVESPVNDYNASSTTTKAEEKQLEEEANEKTDTSPIVENEVVDEEAGTTKFDFDGQEYSYKDRPSVIEEKEGKIEFRVVNNDNSKENMMVLTGLKNIFQKQLPKMPKEYIARLVYDRSHLSMAVVRKPLTVVGGITYRPFDKREFAEIVFCAISSTEQVRGYGAHLMNHLKDYVRATSPIKYFLTYADNYAIGYFKKQGFTKEITLDKNVWMGYIKDYEGGTLMQCSMLPRIRYLDAAKILLLQEAAIRRKIRSISQSHIVRPGLKQFLDLDNIKPIDPMTIPGLKEAGWTPEMDELAQRPKRGPHYAAMQNLLTELQNHAAAWPFLQPVNKEEVPDYYEFIKEPMDLSSMEMKLNGNRYEKMENFIYDARLIFNNCRAYNGENTSYFKYANRLEKFFNSKVKEIPEYSHLVD

SEQ ID NO: 6257 - protein, 625 aa, Oryza sativa
MYPVVMGRPPARLPASTRVDKATSHLLQGPDWAINLEICDTLNADRWQTKDVVKAVKKRLQHKDPRVQFFTLTLLETMMKNCGEYVHFEVVEQHILQEMVRIVQKKRDTQVRDKVLILLDSWQEAFGGPGGKYPQYYWSYIELKRSGIMFPRRPVDAPPIFTPPATHHTQSYGSPTYPAGSLNERMTSDVETLSLGDLNNIRDTTELLCDMVNALNPSDRMAVKDEIISELVTQCRSNQQKLMRFVSSTGNEELLKQGLEINDHLQSVLAKHDAIASGAPLPVETPRKDEIPREDPKIKPSAPPIAPPSAPPVEEDEDDEFAQIARRKNKSVISSDEASSSAGDQALVPVDPVTSEASSSVASNAVVPVDSSPASGTRTREQDMIDLLSLTLYSPPEASTDSSSQTQNGTQQSVTSNGPELPPNYQPAASNGSHYSSNQQAYPTNQAYTPYNNYVVPWAQAGQGTQAGGAYQTQPMQQYGSSYPAPPWAMPASVNSTNPFQPATYQMQNPPVASVAPTNTYPAPSSPYAAPPRQQVPSPATKPMQQYNSFVSQTRSGPAMAQDVRMNGNPRPSETTAAAAKPYYMPDNLFGDLIDVKSYGGGKMSRTASMPSPNGSGQPLLGGKK

SEQ ID NO: 6258 - protein, 70 aa, Aquilegia formosa
SALFLILLLAATEMGPKVAEARDCESQSHKFKGTCIRKSNCASVCQSEGFNGGHCRGVTRRCYCTAKCHE

SEQ ID NO: 6259 - protein, 535 aa, Streptococcus agalactiae A909
MKKHWWHKATIYQIYPRSFMDSDGDGVGDIKGITSKLDYLEKLGITAIWLSPVYQSPMDDNGYDISDYQAIADIFGDMNDMDQLLQEANQRGIKIIMDLVVNHTSDEHAWFVEARENPNSPERDFYIWRDEPNDLTSIFSGSAWEYDKASGQYYLHLFSKRQPDLNWENEALRHKIYDMMNFWIDKGIGGFRMDVIDLIGKIPDKGITGNGPKLHDYLKEMNRASFGKHDLLTVGETWGATPDIAKQYSNPDNEELSMVFQFEHVGLQHKPDAPKWDYSDGLDVPALKDIFTKWQTQLELGQGWNSLFWNNHDLPRVLSIWGNDSDNRKQSAKALAILLHLMRGTPYIYQGEEIGMTNYPFECLADVDDIESLNYAKEAMDNGVSEATILDSIRKVGRDNARTPMQWSQGHQAGFTNGTPWLAVNPNYQEINVEAALNDTESIFYTYQKLVALRKEHDWLVDADFKLLETADKVFAYVRQTDKERYLIVANLSDQNQSFEFPEAVKETIISNTEVQEVLSSNTLKPWDAFCIELF

SEQ ID NO: 6260 - protein, 70 aa, Aquilegia chrysantha
  misc_feature (20)..(20): Xaa can be any naturally occurring amino acid
  misc_feature (38)..(38): Xaa can be any naturally occurring amino acid
  misc_feature (46)..(46): Xaa can be any naturally occurring amino acid
  unsure (1)..(70): unsure at all Xaa locations
SALFLILLLAATEMGLKVAXARDCESQSHKFKGTCIRXSNCASVCXSEGFNGGHCRGVTRRCYCTAKCHE

SEQ ID NO: 6261 - protein, 205 aa, Emericella nidulans
MSSRKKVMLKVIILGDSGVGKTSLMNQYVNKKFSGSYKATIGADFLTKEVLVDDRLVTMQIWDTAGQERFQSLGVAFYRGADCCVLVYDVNNSKSFEALDSWRDEFLIQASPRDPESFPFVVIGNKIDMEESKRMISSKRAMTFCQSKGNIPYFETSAKEAVNVEQAFEVIARSALAQEEAEEYGGDYTDPINIHDTTERDGCAC

SEQ ID NO: 6262 - protein, 316 aa, Salmonella typhimurium LT2
MSMNKAVSSEQKPLDVICLGRVAVDLYGQQIGSRLEDMTTFAKYLGGSSGNVAYGTAIQGLRSAMLARVGDEHMGRFVREELNRVGVDTQCLLSDRDRLTALVILGIKDQDTFPLIFYRDNCADMALTPEDIREDYIASSRALAVTGTHLSHPNTRAAVLKALEYAQKHGLRRALDIDYRPVLWGLTSLGDGETRFIASSQVTEQLQQVLRHFDLIVGTEEEFHIAGGSTDTLTALRRVRQLTQAVLVCKRGALGCSVFEGNIADDWSQVKIHSGVRVDVLNVLGAGDAFMSGLLRGYLNDESWEQACRYATPAAR

SEQ ID NO: 6263 - protein, 194 aa, Arabidopsis thaliana
  misc_feature (184)..(184): Xaa can be any naturally occurring amino acid
  unsure (1)..(194): unsure at all Xaa locations
MALKALDYDTLNENVKKCQYAVRGELYLRASELQKEGKKIIFTNVGNPHALGQKPLTFPRQVVALCQAPFLLDDPNVGMLFPADAIARAKHYLSLTSGGLGAYSDSRGLPGVRKEVAEFIQRRDGYPSDPELIFLTDGASKGVMQILNCVIRGNGDGILVPVPQYPLYSATISLLGGTLVPYYXDEFENWGLDV

SEQ ID NO: 6264 - protein, 338 aa, Aspergillus oryzae
MATPKVGINGFGRIGRIVFRNAIASGDVDVVAVNDPFIETHYAAYMLKYDSTHGRFQGTIETYDEGLIVNGKKIRFFAERDPAAIPWGSAGAAYIVESTGVFTTTEKASAHLKGGAKKVIISAPSADAPMFVMGVNNKEYKTDINVLSNASCTTNCLAPLAKVINDNFGLVEGLMTTVHSYTATQKTVDAPSAKDWRGGRTAAQNIIPSSTGAAKAVGKVIPSLNGKLTGMSMRVPTANVSVVDLTCRTEKAVTYEDIKKTIKAASEEGELKGILGYTEDDIVSTDLIGDAHSSIFDAKAGIALNEHFIKLVSWYDNEWGYSRRVVDLIAYISKVDGQ

SEQ ID NO: 6265 - protein, 409 aa, Rhodobacter sphaeroides 2.4.1
MRDAQRPDLSTTFTVLLAGGRGSRLHELTSRECKPALPFAGPRRIVDFTLANAARSGLTRMIVATQYRPETLAHHLESRWASRFAGGSLRLREGTAVTGSPQGYGGTAAAVAANLAELQSEGVRELVVLAADHVYEMDYADMVAAHRASGASATVAVDTVPTDRASEFGVVRTSEGGRIESFLEKPAVVPADPAIPGRAQVSMGIYVFDLDWLASVLRIIPGATQDFGHDILPLAVALGEAHAYRVPGDNFYWRDVGTLDAYRLAQLEFQTGEAPCALPPRIAASEHEMKAATGELIQFAFRMQTGGIALHSPRLGGDLPGRWTMLDESVLLPGARVAPGVRLTRTIVAPGTSVPAGLVIGEDPDEDARWFRRTEEGTVLVTTPMLARRAADRGRLVAPFADSRMGRSA

SEQ ID NO: 6266 - protein, 406 aa, Lycopersicon esculentum
VEVWPYVETFIEDVGKEITAELQAKPDLIIGNYSEGNLAASLLAHKLGVTQCTIAHALEKTKYPDSDIYLNKFDEKYHFSAQFTADLIAMNHTDFIITSTFQEIAGSKDTVGQYESHMAFTMPGLYRVVHGIDVFDPKFNIVSPGADVNLYFPYSEKEKRLTTFHPEIEDLLFSDVENEEHLCVLKDRNKPIIFTMARLDRVKNLTGLVEWYAKNPRLRELVNLVVVGGDRRKESKDLEEQAEMKKMYELIKTHNLNGQFRWISSQMNRVRNGELYRCIADTRGAFVQPAFYEAFGLTVVEAMSCGLPTFATNQGGPAEIIVHGKSGFQIDPYHGEQAADLLAEFFEKCKVDPSHWEAISKGGLKRIQEKYTWQIYSDRLLTLAAVYGFWKHVSKLDRLEIRRYLG

SEQ ID NO: 6267 - protein, 121 aa, Brassica napus
  misc_feature (110)..(110): Xaa can be any naturally occurring amino acid
  misc_feature (112)..(112): Xaa can be any naturally occurring amino acid
  unsure (1)..(121): unsure at all Xaa locations
GHLSEWITDLGCRDYVSILLGDPNPELADLIENVCGEKSWQVSLKYASSESYFGLNLEPLSKPQHVSYTFLPNMSYFEFIDVDGEIVDPVNVKLGHYYEPLVTNFSGLHXFXVGDVLQVTG

SEQ ID NO: 6268 - protein, 176 aa, Rhodobacter sphaeroides 2.4.1
MDQKQFEKIRGIFDRSGVALTLVDMSLSEQPLVLANPPFLRMTGYTEGRILGFNCRFLQREGENEQARADIREALSKGQETQVVLRNYRFSGERFDNLLFLHPVGGSIGHPDYFLGSQFELGRSGSSEQEAAAGHAGALTRELARIGAVAARLEMDSRRQLADAAAALVRAWQRRT

SEQ ID NO: 6269 - protein, 294 aa, Klebsiella pneumoniae
IVFRAAQKRSDIEIVAINDLLDAEYMAYMLKYDSTHGRFDGTVEVKDGHLVVNGKKIRVTAERDPANLKWDEVGVDVVAEATGIFLTDETARKHITAGAKKVVLTGPSKDNTPMFVRGANFDAYAGQDIVSNASCTTNCLAPLAKVINDNFGIVEGLMTTVHATTATQKTVDGPSHKDWRGGRGAAQNIIPSSTGAAKAVGKVLPELNGKLTGMAFRVPTPNVSVVDLTVRLEKAASYEEIKKAIKAASEGAMKGVLGYTEDDVVSTDFNGEVCTSVFDAKAGIALNDNFVKLV

SEQ ID NO: 6270 - protein, 369 aa, Prochlorococcus marinus str. MIT 9313
MNPIRPPIGVAIAGLGFGESVHLPALKANPDLQPVALWHPRRERLEKASNQHELIGYSDWSALLTDPKIEAVILATPPGPRFELALEALKAGKHLLLEKPVALHADQVAELQRLAIKQRLSVAVDFEYRAVPLFMQAKRLLDQGIVGTPWLVKLDWLMSSRANASRPWNWYSQSEAGGGVIGALGTHAMDMLHWLCGPTRQVSALLSTSIQTRPDPFSGELRDVSSEDVTLAQLKLGGNERPEIPAQVSLTAIALQGRGCWLEIYGSNGSLLLGSDNQKDYVHGFGLWAAAAGEPLRSISADLDLAFPTTWTDGRIAPVARLQGWWAESMRSGQPMLPGLAEGWASQHVCDKIRDSARSGQRLEIQSTL

SEQ ID NO: 6271 - protein, 646 aa, Brucella melitensis 16M
MIFASLTVFKRKISVHALSCGFRKTAFSAVKARVEQPRSDRQSIEIDMNRELTAEEGRKRRSLKPLKRMMPFLAPYKVLVAGALFSLVLAAVTTLAVPVALRRMIDHGFTGSNAVFVNNYFGMLVLLAFALALASGLRYFFVISLGERVLADLRNAVFSHVTALSPEFFDRSQSGEIVSRLSSDTTQIKSVVGATASVALRNMILGIGALAMMVVTSPKLSALVIAAIPIIVIPLIAFGRSVRRRSRMTQDMLARANAYASEQIGAMRTLQAFTNESMVVGSFAHAVEKAYQAARSSIQARAILTAFAIFLVFSSIVAVLWFGSRDVLAGTMSAGTLGQFVLYAVFAGSSFGALSEVGGELAQAAGATERLVEILDEKPGITAPAHPVALPKPPRGEIAFENVYFSYPTRPDAPSLNGLGFTVKPGETVAIVGPSGAGKSTIFSLVMRYYDPQSGRVLMDGVALPNADPHDVRSRIAMVPQDVAIFATTIRENIGFGKPGASDAEIIAAAKAALAHEFIMALDNGYDTEVGERGITLSGGQCQRIAIARALLRDAPILLLDEATSALDAESEMLVQKALDGLMADRTTLVVAHRLATVLKADRILVLDHGRIVEEGTHESLVAKGGIYARLAKLQFEAGAGAFAAQ

SEQ ID NO: 6272 - protein, 308 aa, Klebsiella pneumoniae
INGFGRIGRIVFRAAQKRSDIEIVAINDLLDAEYMAYMLKYDSTHGRFDGTVEVKDGHLVVNGKKIRVTAERDPANLKWDEVGVDVVAEATGIFLTDETARKHITAGAKKVVLTGPSKDNTPMFVRGANFDAYAGQDIVSNASCTTNCLAPLAKVINDNFGIVEGLMTTVHATTATQKTVDGPSHKDWRGGRGAAQNIIPSSTGAAKAVGKVLPELNGKLTGMAFRVPTPNVSVVDLTVRLEKAASYEEIKKAIKAASEGAMKGVLGYTEDDVVSTDFNGEVCTSVFDAKAGIALNDNFVKLVSWYDN

SEQ ID NO: 6273 - protein, 160 aa, Klebsiella aerogenes
MDQTCTLEGFLTRVQQRDPHQTEFAQAVREVMTTLWPFLEENPRYRQLALLERLVEPERVIQFRVVWVDDRNQVQVNRAWRVQFNSAIGPYKGGMRFHPSVNLSILKFLGFEQTFKNALTTLPMGGGKGGSDFDPKGKSDGEVMRFCQALMTELYRHLGP

SEQ ID NO: 6274 - protein, 451 aa, Magnetospirillum magnetotacticum MS-1
MPDYDYDLITLGAGSGGVRACRMAAAAGRKVAVVESSRVGGTCVMRGCVPKKLLVYGARFAEDLADSLGFGWSLEGADFDWARLVAAKNVELQRLEGVYMRLLKEPGVTVVEGKGHLLDAHTVQVGLQVLSAETILVATGGRPSLPDVPGIEHAVTSDQALDLMQLPERVVIVGGGYIAVEFAGIFNALGVGVTLVLRGDTLLRGFDADIRATLAEEMGKKGVELRTTTQVRAIERRGHGYCVLLSDGDSLEADLVMYATGRVPNTEGLGLEKAGVVLNSKGAVMVDALSRTSVRNIWAVGDVTDRVNLTPVAINEAMAFVRTAFLGQSTAMDYDNIPSAVFSLPPVGTVGLTEAEASKRYGAIDVYLSRFKLMRNILAGREERTMMKLVVDRASDRVLGVHMVGSDAPEIVQGFAVALKCGATKAQFDATVGIHPTAAEELVTMRDKRAD

SEQ ID NO: 6275 - protein, 141 aa, Burkholderia fungorum LB400
MAIERTLSIIKPDAVAKNVIGQIYTRFENAGLKIVASRMVHLSRADAEKFYAVHAARPFFKDLVDFMISGPVVVQALEGENAILKHRDLMGATDPKKAEKGTIRADFADSIDANAVHGSDAPETAAVEIAFFFPQVNVYSR

SEQ ID NO: 6276 - protein, 596 aa, Salmonella enterica subsp. enterica serovar Typhi Ty2
MQTFQADLAIIGAGGAGLRAAIAAAQANPNAKIALISKVYPMRSHTVAAEGGSAAVAQDHDSFDYHFHDTVAGGDWLCEQDVVDYFVHHCPTEMTQLEQWGCPWSRRPDGSVNVRRFGGMKIERTWFAADKTGFHMLHTLFQTSLQFPQIQRFDEHFVLDILVDDNHARGLVAMNMMEGTLVQIRANAVVMATGGAGRVYRYNTNGGIVTGDGMGMALSHGVPLRDMEFVQYHPTGLPGSGILMTEGCRGEGGILVNKNGYRYLQDYGMGPETPLGEPKNKYMELGPRDKVSQAFWHEWRKGNTISTPRGDVVHLDLRHLGEKKLHERLPFICELAKAYVGVDPVKEPIPVRPTAHYTMGGIETDQNCESRVKGLFAVGECSSVGLHGANRLGSNSLAELVVFGRLAGEQAMERAATAGAANSAALDAQVADIEQRLKNLVNQEGNENWSKIRDEMGLSMEEGCGIYRTPELMQKTVDKLAELQERFKRVRISDTSSVFNTDLLYTIELGHGLNVAECMAHSALARKESRGAHQRLDEGCTERDDVNFLKHTLAFRDADGTTRLEYSDVKITTLPPAKRVYGGEAEAADKKEKANG

SEQ ID NO: 6277 - protein, 391 aa, Heterocapsa triquetra
ELFCLEHGIQPDGQMPSDKTIGGGDDAFNTFFSETGAGKHVPRCVMVDLEPTVVDEVRTGTYRQLFHPEQLISGKEDAANNFARGHYTIGKEIVDLVLDRIRKLADNCTGLQGFMIYNAVGGGTGSGLGCLMLERLSVDYGKKSKISFTVWACPQVATAVVEPYNTVLCVHSLLEHTDVTIMYDNEALYDICRRNLDIERPTYTNLNRLLAQIISSLTASLRFDGALNVDITEFQTNLVPYPRIHFMLSSYAPIISAEKAYHEQLSVAEITMSVFEPASMFVKCDPRHGKYMACCMMYRGDVVPKDVNASVATIKTKRTIQFVDWCPTGFKCGINYQPPTVVPGGDLAKVMRACCMISNSTAIAEVFSRIDHKFDLMYSKRAFVHWYVGEG

SEQ ID NO: 6278 - protein, 387 aa, Heterocapsa triquetra
IGAKFWEVISDEHGIDPTGTYHGDSDLQLERINVYYNEATGGRYVPRAILMDLEPGTMDSVRAGPFGQLFRPDNFVFGQTGAGNNWAKGHYTEGAELIDSVLDVVRKEAEGCDCLQGFQMTHSLGGGTGSGMGTLLISKVREEYPDRIMETFSVIPSPKVSDTVVEPYNAVLSFHQLVENADECFLLDNEALYDICFRTLKLTTPTYGDLNHLVSAAISGVTTCLRFPGQLNCDLRKIAVNLIPFPRLHFFMTGFAPLTSRGSQQYRALTVPELTQQMFDAKNMMCAADPRHGRYLTAAALFRGRMSTKEVDEQMLNVQNKNSSYFVEWIPNNIKASICDIPPKGPKMAVAFVGNSTAIQEMFKRVAEYFTSMFRRKAFLHWYTGEG

SEQ ID NO: 6279 - protein, 447 aa, Coprinopsis cinerea
MREVISLHVGQAGVQIGNACWELYTLEHGLNPDGRLAEGSPSASDSGFSTFFSETGSGKHVPRSLYIDLEPGCIDEVKSGPYRSLFHPETMIAGKEDAANNYARGHYTVGKELIDPVMDKLRRLADNCDGLQGFFVFHSFGGGTGSGFGALLMEKLSTDYGKKSKLEFCVYPAPQLSSSVVEPYNSVLTTHTTLEHSDCSFMVDNEAIYDICKKKLGVTSPSFSNLNRLIAQVVSSITASLRFDGSLNVDLNEFQTNLVPFPRIHFPLATYAPLISADKAGHEQNTVSEMTFSCFEVGNQMVKCDPREGKYMACCLLFRGDVVPKDVQAAVATIKTKRTIQFVDWCPTGFKLGICNEPAACVPGGDLAKTSRSLCMLSNTTAISAAWSRLDYKFDLMYSKRAFVHWYVGEGMEEGEFSEAREDLAALEKDYEEVGTDSADVEEDVEY

SEQ ID NO: 6280 - protein, 203 aa, Zea mays
  misc_feature (63)..(64): Xaa can be any naturally occurring amino acid
  misc_feature (77)..(77): Xaa can be any naturally occurring amino acid
  misc_feature (79)..(79): Xaa can be any naturally occurring amino acid
  unsure (1)..(203): unsure at all Xaa locations
GPSVQACIFTGYWEDVGTIKSFFGANLALTEQPSKFDFYDPKTPFFTAPRCLPPTQLDKCKEXXERGGKKRTGKKRXGXRKYAFISDGCLLRECNIEHSVIGVCSRVSSGCELKDSVMMGADTYETEEEASKLLLAGKVPVGIGRNTKIRNCIIDMNARIGKNVVITNSKGIQEADHPEEGYYIRSGIVVILKNATINDGSVI

SEQ ID NO: 6281 - protein, 387 aa, Heterocapsa triquetra
IGAKFWEVISDEHGIDPTGTYHGDSDLQLERINVYYNEATGGRYVPRAILMDLEPGTMDSVRAGPFGQLFRPDNFVFGQTGAGNNWAKGHYTEGAELIDSVLDVVRKEAEGCDCLQGFQMTHSLGGGTGSGMGTLLISKVREEYPDRIMETFSVIPSPKVSDTVVEPYNAVLSFHQLVENADECFLLDNEALYDICFRTLKLTTPTYGDLNHLVSAAISGVTTCLRFPGQLNCDLRKIAVNLIPFPRLHFFMTGFAPLTSRGSQQYRALTVPELTQQMFDAKNMMCAADPRHGRYLTAAALFRGRMSTKEVDEQMLNVQNKNSSYFVEWIPNNIKASICDIPPKGLKMAVAFAGNSTAIQEMFKRVAEYFTSMFRRKAFLHWYTGEG

SEQ ID NO: 6282 - protein, 762 aa, Bacillus cereus ATCC 14579
MAIQTSNLGYPRIGLQREWKKTLEAFWSNKIDEEQFLTTMKEIRLQHVKVQQEKGIELIPIGDFTYYDHVLDTAYMLGFIPSRFSEFTSYLDVYFAMARGSKDHVASEMTKWFNTNYHYIVPEYEEGLQISLKDNRPLRLYEEAKQELGVDGKPVILGPYTFLKLAKGYTQEQFPTILKQLVAPYVQLLSELHAAGAPAIQVDEPIFASLTKKEVQQAKEIYEAIRKEVPNATLLLQTYFDSVEENYEEIITFPVSGIGLDFIHGKEGNLNAISKYGFPADKTLAVGCIDGRNIWRADLDEVLELFTTLQKQVQTKDIIVQPSCSLLHTPIDKTEETHLSTELFDALAFANQKLEELVLIHSALTQGTESISNELETYRNVHHTIRSSAARNREDVKAARTALKEEDFSRPLPFEKRYELQQVALELPLLPTTTIGSFPQTTEVRQTRKEWRNGVISNEQYEQFIEKETEKWIRYQEEIGLDVLVHGEFERTDMVEYFGERLAGFSFTKNGWVQSYGSRCVKPPVIYGDVAFINGMTIKETVYAQSLTEKVVKGMLTGPVTILNWSFVRNDIPRKEVSYQIALALRHEIELLESSGIRVIQVDEPALREGMPLKEKDWDAYITWAVQSFLLATSSVANETQIHTHMCYSNFEDIVDAIRALDADVISIETSRSHGEFIDTLKHTTYEKGIGLGVYDIHSPRVPSKDEMYKIVEQSLEVCDPKYFWINPDCGLKTRRTEEVIPALEHMVQAAKDARSLLKTNA

SEQ ID NO: 6283 - protein, 96 aa, Saccharophagus degradans 2-40
MKIRPLHDRVVVRRKEEEATTASGIVLPGSAKEKPNQGEVIAIGSGRVLDSGDVRPLDVKVGDVVVFGKYAGSDTIEVDGEELVILSESDIKAIVE

SEQ ID NO: 6284 - protein, 319 aa, Fragaria x ananassa
MAKVPSVTLSSCGDDIQTMPVIGMGTSSYPRADPETAKAAILEAIRAGYRHFDTAAAYGSEKDLGEAIAEALRLQLIKSRDELFITTKLWASFAEKDLVLPSIKASLSNLQVEYIDMYIIHWPFKLGKEVRTMPVERDLVQPLDIKSVWEAMEECKKLGLARGIGVSNFTSSMLEELLSFAEIPPAVNQLEMNPAWQLKKLRDFCKAKGIHVTAYSPLGAARTKWGDDRVLGSDIIEEIAQAKGKSTAQISLRWVYEQGVSIVTKSYNKERMRQNLDIFDFCLTEEELEKMSHLPQRKGVTFASILGPHDIVLEVDEEL

SEQ ID NO: 6285 - protein, 1149 aa, Ashbya gossypii ATCC 10895
MGAAMMNNVEQDILRKIERERNIIQGASNLKKRTDNVMVIQKCNTNIREAQQNIQYLEDTLKKLHLESQAVAVSQVYPGYRQLSTMAPHEHRFSRLDLSKYDCPSLSQRIQYMLQQLEFKLRVERQYQEANDKLTKLYQIDGDQRSSSAAQGGAQESKQRIQLLTKALKKYQALNVDMEQLKEQADDALNSQQKFRRKQLTGEFTIGLTAIRDIDHIQSPLFSKNPETIITVKVDDVVRAKTKPTRTDRWHEEFTIHVDKGNELEITVYDRINDRIVPVAVMWLLLSDVAEEIRKKKVGQVGSPTWLEAASQLPDASDPYLNTSTAHLPLGGLPLATLDQPPPESAPDTAHAQPITTSAWFVLEPAGQIMLTLGFSKSNQNVRKDIPGGLRRHGAIVNRKDDVYEKHGHHFVQKSFYNIMCCAYCGDFLRYSGFQCQDCKFLCHKKCYNNVVTKCIAKTSTDGDPEEAKLNHHIPHRFEPVSNRGTKWCCHCGYILPWGKKNVRKCSECSIMCHTQCAHLVPDFCGMTMEMANKILTTIQDTKRNQQQRQKSSPAGQMLEDASKMIPYNTTGSSIEARGGAAFSKRPTASTETSPTSQLLAEDHSVQPYPDISNLPSATSSSEPQDKHSKRQTRLIYDDDDTTEDSAYYRFSEMTGQKEAQAESATLDPGSVYLLNDELLDDHPTTALMWQTMKEEEEQRWLLEQKKKEISKQINQEAPSQWDPQQNPFNSDPSESITQRTLAAEAETSVQLSEAPKSLSSANYDNYVNCASNLELPSEEMESIPQHPPAPLSPPKAQPVQPASGRHKRKTPKRRKVSLDDFILLKVLGKGNFGKVLLARSKNTDRLCAIKVLKKDHIIQNHDIESARAEKKVFLLATKAKHPFLTNLYCSFQTENRIYFAMEFIGGGDLMWHVQNQRLSVRRAKFYAAEVLLALKYFHDNGIIYRDLKLENILLTLEGHIKIADYGLCKDEMWFGNRTSTFCGTPEFMAPEILREQAYTKAVDWWAFGVLLYQMLLCQSPFSGDDEDEVFNAILTDEPLYPIDMAGDIVQIFQGLLTKDPEKRLGAGSRDALEVMEEPFFRNINFDDILNLRVEPPYIPTIKAADDTSYFEKEFTAAPPTLTPLPSILSSNLQEEFRGFSFMPDDLVL

SEQ ID NO: 6286 - protein, 556 aa, Leuconostoc mesenteroides subsp. mesenteroides ATCC 8293
MEKVQWWQNTVVYQIYPRSFQDSNGDGVGDIPGIIERLPYLKALGVQVIWLSPIYQSPNDDNGYDISDYRKVLPEFGTMADVQEMLEVAHHLGLKIMMDLVVNHTSDEHQWFKESRKNKDNPYRNYYIWRDPVDGHEPNNWLSDFGGSAWEFDNNTQQYYLHLFSKKQPDLNWDNPDLRQDIYDTMKWWLDQGVDGFRMDVINLISKPSDLPNDPNVTLENHGSSMDFVANGPNIHDYLQEMNQEVLSKHDIITVGETPGVSTKDAMKYAGFDSHELQMIFQFEHTEVDNSHEGLGKWSDERFNLVDLKRILSRWQNELYGKAWNSLYWNNHDRPRVVSRFGNDSDEYRVLSAKMLAATLHFMQGTPYIYQGEEIGMTNIDLPSIKDYRDIDTLNAYDDLVVQQRRVTADKMMSYVHHSSRDNARTPMQWDNTKNAGFTESHPWLSVNPNYQTINVADSLTDQQSVFHFYQKLIALRQELSIITTGKYEVLDLEDESVYAYKRIDKDTQLLVISNFTDQKQTRHYDRTQSAQLVISNYSDDQGDTLRPYESKVYLF

SEQ ID NO: 6287 - protein, 408 aa, Pseudomonas syringae pv. syringae B728a
MKRVVVTGMSGITSVGSDWPTIDARFTANRSGIRRMDEWNRFAELNTRLAGPIDDFAVPGHWTRKQLRSMGRVSRLAVAAAEQALIDAGLLNDPIIRDGRMGTACGSSTGSTDEIKAFGNMLINSVAVGLNANSYVRMMPHTTAANISIFFGLTGRLIPTSSACTSGSQGIGYAYEAIKFGRLPLMLAGGAEELCPTEAMVFDALYATSLKNDAPHTTPRPYDSGRDGLVIGEGGGMLVLEELEHAQARGAHIYAEIVGFGSNADGAHSTRPEQTTMRRAMELALEDANLSPDAIGYVNGHGTATEQGDIAETLATSSLFGPRMPLSSQKSFLGHTLGACGALESWFSIEMLNSDRYIHTLNLVDIDPQCGELDYIVGEPRHMSNEYVMNNNFAFGGVNTSLIFRRWG

SEQ ID NO: 6288 - protein, 535 aa, Bacillus cereus ATCC 10987
MTKYIFVTGGVVSSLGKGITAASLGRLLKNRGLNVTIQKFDPYINVDPGTMSPYQHGEVFVTDDGAETDLDLGHYERFIDINLNKYSNVTTGKIYSSVLQKERRGEYLGGTVQVIPHITNEIKERVYRSGRETNADVVITEIGGTVGDIESLPFLEAIRQIKSDIGRDNVMYIHCTLIPYLKAAGEMKTKPTQHSVKELRSLGIQPNIIVVRTEMPVSQDMKDKLALFCDIDTKAVIEARDADTLYAVPLSLQEQNMDQIVCDHLKLDNPAADMTEWTALVEKVRNLSKKTKIALVGKYVELQDAYISVVEALRHAGYSFDTDVEVKWVNAEHVTAENVQELVGDTDGILVPGGFGDRGVEGKIVAIQYARENKVPFLGICLGMQLASIEFARNVLGLEGANSSEINPDTPYAIIDLLPEQKDVEDLGGTLRLGLYPCKLAEETNAYNAYNEPVVYERHRHRYEFNNQFRPDMEKAGFVFSGTSPDGRLVEIVELKDHPWFVAAQFHPELVSRPNRPQPLFHDFVRASITNKESK

SEQ ID NO: 6289 - protein, 137 aa, Nicotiana tabacum
IFDPFEGFPFSGTVANVPSSARETSAFANARIDWKETPDSHIFKMDVPGIKKEEVKVEVEEGRVLQISGERSREQEEKNDTWHRMERSSGKFMRRFRLPENAKMEEIKAAMENGVLTVTVPKEEEKKSEVKAIDISG

SEQ ID NO: 6290 - protein, 305 aa, Arabidopsis thaliana
MAPGGSALKEALESNSTGVDYEVKMAKVEANSKPTKSGSGSIGKFHSSNGVYELLECPVCTNLMYPPIHQCPNGHTLCSSCKLRVQNTCPTCRYELGNIRCLALEKVAESLEVPCRYQNLGCQDIFPYYSKLKHEQHCRFRSYSCPYAGSECSVTGDIPTLVDHLKDDHKVDMHDGCTFNHRYVKSNPHEVENATWMLTVFNCFGRQFCLHFEAFQLGMAPVYMAFLRFMGDENEAKKFSYSLEVGAHSRKLTWQGIPRSIRDSHRKVRDSQDGLIIPRNLALYFSGSDKEELKLRVTGRIWKEE

SEQ ID NO: 6291 - protein, 296 aa, Colwellia psychrerythraea 34H
MVKLKEQKKTIESKEDAPSNLDATQIYLSEIGFSPLLTAEEEVYFSRLALKGDEPSRKRMIESNLRLVVKIARRYNNRGLPLLDLIEEGNLGLIRAVEKFDPERGFRFSTYATWWIRQTIERAIMNQTRTIRLPIHVVKELNIYLRASRELIQKLDHEPTAEDIAQHLDRPVADVNKMLRLNERIASVDTPFAGESDKALLDVIADEKSTGPESDLQSEDMSNNIIHWLNELNTKQREVLARRFGLLGYEASTLENVGREIGLTRERVRQIQVEALKRLRDILSQQNLSIEAIFQA

SEQ ID NO: 6292 - protein, 560 aa, Leuconostoc mesenteroides subsp. mesenteroides ATCC 8293
MTEDIKWWQKAVAYQVYPRSFQDANGDGIGDLQGIEQRLDYIKKLGADVIWLNPIYASPDKDNGYDISDYEDINAKFGTMQDFDRLLQKAHDKGIKILMDLVVNHTSDQHQWFIESRSSKDNDKRDFYIWRDPVDGHEPNNWGSFFSGPAWKFDEETGQYYLHLFVEGQPDLNWVNPEVRQAVFDMMNFWVDKGIDGFRMDVISLISKPDGLPDGEVPEGGEYGNSDKAVANGPHVHEYLQEMREKVLKRADMMTVGEASGVDINNAIKYANTNESELNMVFQFEHMGLDNNPNPALGKWYDQKVSLVDLKENLSKWQNDLAGKAWNSLYWDNHDQPRAVSRYGDDRAAYRVVSAKMVATLLHFMQGTPYVYQGEEIGMTNAYNLQREDFDDVEIKNAFKYLIDKDHLIDEDTMLKYVHAKGRDNARTPMQWDSTANAGFTTGTPWLKLNDNYDTINVEQALADKSSIFYYYQKLIQLRHDLPIITTGKYQLLDPKDEQVYAYRRVGNNEQLLVINNFTDNIVTRDYSVPTNAKILVSNYADDKAETLRPYESKVYQFEK

SEQ ID NO: 6293 - protein, 358 aa, Synechocystis sp. PCC 6803
MVNTLEKPGFDEIRPGVKTPAKETILTPRFYTTDFDEMAKMDISPNEDELRAILEEFRVDYNRHHFVRNESFNKSWDHIDGEKRQLFVEFLERSCTAEFSGFLLYKELGRRLKNKNPLLAECFNLMSRDEARHAGFLNKAMSDFNLSLDLGFLTKSRKYTFFKPKFIFYATYLSEKIGYWRYITIYRHLEKNPNDCIYPIFEFFENWCQDENRHGDFFDAIMRAQPHTLNDWKAKLWCRFFLLSVFATMYLNDTQRADFYACLGLEARSYDKEVIEKTNETAGRVFPIILDVNNPEFYNRLETCVSNNEQLRAIDASGAPGVIKALRKLPIFASNGWQFIKLYLMKPIAVDQLAGAVR

SEQ ID NO: 6294 - protein, 323 aa, Triticum aestivum
MSSALDQLKATGTTVVSDSGDFASIGKYKPQDATTNPSLILAASKKEEYAKLIDVAIDYAKQKGGSVDQQVDDALDRLLVEFGKEILKIIPGKVSTEVDARYSFDTEASVNKALHLIELYGEQGISKDRILIKIAATWEGIKAAEILQRDHGINTNLTLMFSLVQAIGAAEAGAYLISPFVGRILDWFKASTKKEYTKEEDPGVLSVKQIFNYYKKFGYNTIVMGASFRNTGEITELAGCDYLTISPNLLEDLLNSSDSVPKKLDASQASSLDIEKKSYIKDEALFRFDFNEDQMAVEKLREGISKFAADAVTLKGILKEKLS

SEQ ID NO: 6295 - protein, 659 aa, Synechocystis sp. PCC 6803
MGEEPVPADKALGKKFKKKNASWSIEESEALYRVEAWGAPYFAINAAGNITVSPNGDRGGSLDLLELVEALRQRKLGLPLLIRFSDILADRLERLNSCFAKAIARYNYPNTYQAVYPVKCNQQRHLVEALVRFGQTSQCGLEAGSKPELMIALATLPPPLDRQDKHTKPLIICNGYKDQDYLETALLAKRLGHRPIIIIEQLRELEWVLHISQQLNIKPMLGVRARLSCQSLKSSEISSGNGDRAKLGLTMPDIVTVIHRLEENNCLDCLKMLHFHLGTQVSDIALIKEAMREASQLYVELVKLGAKMRYLNVGGGLAVDYDGSKTNYPASKNYNMQNYANDIVAAIQDACELGQVSPPILVSESGRAIMAHQSVLVFDVLGSNQTGFSEPHPPDENAHPLLKNLWECYETITAEQYQEQYHDALQLKTEASSLFNFGYLSLTERGQAEQIHWACCRKIFEITRQLEYIPEDFQALDKIMTDIYYVNLSVFQSAPESWSLDQLFPILPIHHLNEKPSQRVILADLTCDSDGKIDRFIDLWDVKSYLEVHPLENDGNPYYLGMFLVGAYQEIMGNLHNLFGDINVVHIATTPQGYQIESVVRGDTMTEVLGYVQYDSDDLLEGLRRHTELALSNGQITLEESRRLLEDYEQSLRRYTYLS

SEQ ID NO: 6296 - protein, 327 aa, Chlamydomonas reinhardtii
MQSARVSRTARHTRPSCRPQRAVAVRVSAKVNVEQLKALKAELYNYINSRGCNPISVRLGWHDSGTYDKNIAEFPARGGANGSIRFKPEIDHGANKGLAIALAILNPIKKKYPDVSYADLFQMASATAIEASGGPKIPMRYGRKDAKGPEECSPDGRLPGAAHPFADGSGSPAEHLRRVFYRMGLNDQDIVVLSGGHTLGRARPERSGFGAEKTKYTDVGPGTSTASPSGATDRPVTPKPVGQQGTSWTVNWLEFDNSYFKEIKAKRDSDLLVLPTDACIFEDDQFRPYAEKYAADQAAFFADYCVSHQKLSELGVEWEEGAPVTLD

SEQ ID NO: 6297 - protein, 544 aa, Zea mays
MGNQCPNGTLGSDYYNRPASRFADGCLEDDRYSDLKKFDKPWPEVNSFKPTAVGILKRGLDPTSITVLERKTADVREHYIIGRRLGQGQFGTTFLCTEISTGCEYACKTIPKRKLITKEDVEDVRREIQIMHHLSGHKNVVSIKDVYEDGQAVYIVMELCAGGELFDRIQEKGHYSEQKAADLIRIIISLVAMCHSLGVMHRDLKPENFLLWDKEDDLSIKAIDFGLSVFFKPGQVFTELVGSPYYVAPEVLHKRYGPEADVWSAGVILYVLLSGVPPFWAETQQGIFDAVLKGHIDFDSDPWPKISESAKNLIRKMLCPCPSERLKAHEVLRHPWICENGVATDQALDPGVLSRLKQFSAMNKLKKLALRVIAERLSEEEIAGLRQMFKAVDVQNRGVITFGELRQGLKRYGSELENREISDIMEVADNDNNVTINYEEFIAATVPLNKIEREEHLMAAFTYFDKDGSGYITVDKLQRACGEHDMDDTFLEEIILEVDQNNDGQIDYAEFVAMMQGNKVGLGWQQMETTLNVTLRDAPQVHCH

SEQ ID NO: 6298 - protein, 181 aa, Zea mays
  misc_feature (162)..(162): Xaa can be any naturally occurring amino acid
  unsure (1)..(181): unsure at all Xaa locations
MVRGKTQMKRIENPTSRQVTFSKRRNGLLKKAFELSVLCDAEVALVVFSPRGKLYEFASGSAQKTIERYRTYTKDNVSNKTVQQDIERVKADADGLSKRLEALEAYKRKLLGERLEDCSIEELHSLEVKLEKSLHCIRGRKTELLEEQVRKLKQKCKKQPPXVPMASAPPRAPAVDKRRTV

SEQ ID NO: 6299 - protein, 523 aa, Arabidopsis thaliana
MDSSYSFALGTSSSILPKLSFRNVENRFYGEKNNNNGLCKRFGSDLGSKKFRNQKFKHGVVYAVATSDNPKKAMTVKTSMFERRKVDPQNVAAIILGGGNGAKLFPLTMRAATPAVPVGGCYRLIDIPMSNCINSCINKIFVLTQFNSASLNRHLARTYFGNGINFGGGFVEVLAATQTPGEAGKKWFQGTADAVRKFLWVFEDAKNRNIENILILSGDHLYRMNYMDFVQSHVDSNADITLSCAPVSESRASNFGLVKIDRGGRVIHFSEKPTGVDLKSMQTDTTMLGLSHQEATDSPYIASMGVYCFKTEALLNLLTRQYPSSNDFGSEVIPAAIRDHDVQGYIFRDYWEDIGTIKTFYEANLALVEERPKFEFYDPETPFYTSPRFLPPTKAEKCRMVDSIISHGCFLRECSVQRSIIGERSRLDYGVELQDTLMLGADYYQTESEIASLLAEGKVPIGIGKDTKIRKCIIDKNAKIGKNVIIMNKGDVQEADRPEEGFYIRSGITVIVEKATIQDGTVI

SEQ ID NO: 6300 - protein, 171 aa, Spinacia oleracea
MASDSSAQPKSVHEFVVRDARGNDVDLSIYKGKVLLIVNVASQCGLTNSNYTEMTELYEKYRELGLEILAFPCNQFGNQEPGSNEEVLEFACTRFKAEYPIFDKVDVNGSNAAPIYKFLKSSKGGLFGDGLKWNFTKFLVDKDGNVVDRYAPTTSPKSIEKDVKKLLGIQK

SEQ ID NO: 6301 - protein, 269 aa, Aquilegia formosa
DNLKKVQHLLDLPYAKTNLTLWKADLVDEGSFDDAIEECTGVFHVATPMDFESKDPENEVIKPTIEGMLNIMRSCLKAKTVRRLVFTSSAGTVNVEEHQQPEYDENCWTDIDICRTKKMTGWMYFVSKTLAEKAAWEFAEQNNIDFISIIPTLVVGPFLMSSMPPSLITALSPITRSEAHYSILKQIQLVHLDDLCNAHIFLFEHPEAKGRYICSAYNATIMDVANLLRNKFPEYNVPTKFKDVDENLKAVSFSSKKLTDLGFSYKYTE

SEQ ID NO: 6302 - protein, 340 aa, Thellungiella salsuginea
MAVYDHSGDINRTQLDTSRKRKSRSRRDGTTVAERLKIWKEYNDTVEAASTKKRKVPAKGSKKGCMKGKGGPDNGRCSFRGVRQRIWGKWVAEIREPNRGSRLWLGTFPTAEEAASAYDEAAKAMYGPSARLNFPESTVSDVTSTSSQSEVCTIEPSGDVHVKTEDADCESKPFFSDAWTMHHMEENGACGGVEEIMKDVKADANVGVTDKDWLSEYEHKYWSAVLKEREKHKEQAVADTCQQQPLDSLSVSDYGWPDDLAQGHWDSSEMFDVAELLGDLNGDIFTGLNPGNNVVSGLCELEKQQIGLQGLNSDYGLPPLQLEAQDGNELFDLSFLDMAK

SEQ ID NO: 6303 - protein, 264 aa, Brassica napus
SVKHSKCIQIARLYLEDDDAVNAETYINKASFLGRPTRPEVLNLQYKVCHARILDMKRKFLDAALRYYSISQIEKRQIGDEEIDENALEQALSAAVTCTILAGAGPQRSRVLATLYKDERCSKLKIYPILQKVYLERILRKPEIDAFAEELRPHQKASLPDKSTVLARAMIEHNLLSASKLYTNIRFDELGTLLGIDPTKAEKIASNMIGQDRMRGSIDQEEAVIHFEDDIEELQQWDHQISGLCQALNDILDEMAKKGLPVPV

SEQ ID NO: 6304 - protein, 170 aa, Gossypium hirsutum
MASQSSKPQSIYDFTVKDAKGNDVDLSIYKGKVLIIVNVASQCGLTNSNYTDLTEIYKKYKDQGLEILAFPCNQFGGQEPGSIEESIQNMVCTRFKAEYPIFDKVDVNGDNAAPLYKFLKSSKGGFFGDSIKWNFSKFLVDKEGNVVDRYSPTTTPASMEKDIKKLLGVA

SEQ ID NO: 6305 - protein, 623 aa, Neurospora crassa
MGKAAHESYGAGAGAGGPRTASTHKNHNDENVGLLSGGSPNLLDDDGYDGDSTTLTGNGVGAGPGPGTGTAGEQREEGSNTSPPVVDPRPAPAPAPVPAPAPGHIKLPRRQSALSAPRTPRTPRTPNRVRFDLRPTTFGDNSPTTTAPNGNNGGAPEDHHHHARDSFDSYFDIDDSSSDQQPLTSFSDYHRQGRVPLLTGIEAPSVTVANNGPWGSDEDVASWAETERSRPKSGLRMAFMNMANSIIGAGIIGQPYAFKQAGLLSGIVLLVGLTVVVDWTIRLIVINSKLSGANSFQGTVEKCFGRSGLIAISVAQWAFAFGGMVAFGVIVGDSIPNVLRAIWPGLREEGVEGTLVGWLVGRQGVILVCTLGVSYPLALYRDIAMLAKASTLALVSMAVILVTVLVQGGLAPEEDKGTLASWNLLIINDGIFQAIGVISFAFVCHHNSLLIYGSLKTPTIDRFSLVTHISTGVSMIACLLMALVGFLTFGDRTLGNVLNNFPADNTMVNVARLCFGLNMLTTLPLEAFVCREVMLNYWFPGDPFNMNLHLLFTSSLVVSAMVLSMITCDLGTVFELVGATSAAAMAYILPPLCYLKLTKETGGWKRAAAWATAAFGTLVMGIM

SEQ ID NO: 6306 - protein, 465 aa, Solanum tuberosum
MKLLSKKAMCNSHGQDSSYFLGWEEYEKNPYDETRNPKGIIQMGLAENQLSFDLLESWLTQNPDAAAFKRNGNSIFRELALFQDYHGLPAFKDALVQFMSEIRGNKVSFDSNKLVLTAGATSANETLMFCLADPGDAFLLPTPYYPGFDRDLKWRTGAEIVPIQCTSSNGFRITESALEEAYKEAERRNLRVKGVLVTNPSNPLGSTLTKKELQLLLTFVSTKQIHLISDEIYSGTVFNSPKFVSVMEVLIENNYMYTEVWDRVHIVYSLSKDLGLPGFRVGAIYSNDDMIVSAATKMSSFGLISSQTQYLLSALLSDQKFMKNYVSENQKRLKKRHEMLVGGLKQIGIRCLESNAGLFCWVDMRHLLSSNTFDGEMELWKKIVYEVGLNISPGSSCHCTEPGWFRACFANMSEDTLNIAIQRLKAFVDSRDNKDDIQNQKHSNKKKSFSKWVFRLSFNERQRER

SEQ ID NO: 6307 - protein, 384 aa, Karenia brevis
LFCLEHGIQPDGQMPSDKTIGGGDDAFNTFFSETGAGKHVPRCVMIDLEPTVVDEVRTGTYRQLFHPEQLITGKEDAANNFARGHYTIGKGIVDLVLDRIRKLADNCTGLQGFLVFNACGGGTGSGLGCLMLGRLSVDYGKKSKLSFTVWACPQVATAVVEPYNTVLCVHSLLEHTDVTIMYDNEALYDICRRNLDIERPTYTNLNRLLAQIISSLTASLRFDGALNVDITEFQTNLVPYPRIHFMLSSYAPIISAEKAYHEQLSVAEITMSVFEPSSMFVKCDPRHGKYMACCLMYRGDVVPKDVNASVATIKTKRTIQFVDWSPTGFKCGINYQPPTVVPGGDLAKVMRACCMISNSTAIAEVFSRIDHKFDLMYSKRAFVH

SEQ ID NO: 6308 - protein, 465 aa, Solanum tuberosum
MKLLSKKAMCNSHGQDSSYFLGWEEYEKNPYDETRNPKGIIQMGLAENQLSFDLLESWLTQNPDAAAFKRNGDSIFRDLALFQDYHGLPAFKDALVQFMSEIRGNKVSFDSNKLVLTAGATSANETLMFCLADPGDAFLLPTPYYPGFDRDLKWRTGAEIVPIQCTSSNGFRITESALEEAYKEAERRNLRVKGVLVTNPSNPLGTTLTKKELQLLLTFVSTKQIHLISDEIYSGTVFNSPKFVSVMEVLIENNYMYTEVWDRVHIVYSLSKDLGLPGFRVGAIYSNDVMIVSAATKMSSFGLISSQTQYLLSALLSDKKFTKKYVSENQKRLKKRHEMLVGGLKQIGIRCLESNAGLFCWVDMRHLLSSNTFDGEMELWKKIVYEVGLNISPGSSCHCTEPGWFRACFANMSEDTLNIAIQRLKAFVDSRDNKDDIQNQKHSNKKKSFSKWVFRLSFNERQRER

SEQ ID NO: 6309 - protein, 632 aa, Rhizobium tropici
MPYPFSISPHDMEEHLVQEDKGPVLRFITCGSVDDGKSTLIGRLLCDAQLVFEDQLADLRHGGIRGGNGEEIDFSLVLDGLEAEREQGITIDVAYRYFSTSKRKFIVADTPGHFEYTRNMATGASTADLAVILVDSRQGILQQTRRHSYLASLLGIRHVVLAVNKIDLIDFSEPIFDAIVAEYVRFSAKLGFASVMAIPMSARFGDNVVSKSGKLPWYQGSPLLEYLETVELDAPDRQEPFRFPVQLVMRPNADFRGYAGRIASGKIAVGDPVIVAKSGLRSSVRAIIAPDGNQISAAEGEPVTLVLADEVDVSRGDMLVDPASRPFVSDQFQAHLIWFDANPMLPGRSYLLRTETDSVSATVTVLKHQLNVDSFVREPAKLLQMNEVGVCNIMTQRPIVFDAYKENRSTGNFIIVDRVSSATVGAGMIDFPLRRADNVHWQALDVDKAARSALKNQKPAVLWLTGLSGSGKSTIANALEALLHTCGKHTYLLDGDNVRHGLNRDLGFTAVDRVENIRRVAEVAKLMADAGLIVICSFISPFRDERRMARELMGEGEFIEIFVDTPLDECARRDPKGLYKKAFAGNIANFTGVSSPYEAPENPELHLKTMGQEPARLALQIEEFLRSRMEEK

SEQ ID NO: 6310 - protein, 530 aa, Ashbya gossypii ATCC 10895
MSQHIFQTKSLKRKNLKKLTLEAGGSEELEGAARGDILRATEDRLSGAPTLLKAGARPMRSPEPVWGLGSVPGPASVQGVLDMASSQRAAEPATQRPGLFHNGTPDNQLRGGKPCMTLRMKRMQKPLNLNIEPEGVKSKVVIAQPSPTNSDSSTSVSPIVPSKITSNKRDNRLSTKFSRLSIFQDDNNDIQLEDLVQLGKIGAGNSGTVVKTLHVPDSRIIAKKSIPVENSELVKNQLMRELTIMKNVKEQKNIVGFYGAYYTAIKNHEIIILMEYMDCGSLDKISSTYRRYCSRNKVPMNASTSWFTELSLSKISYAVLNGLSYLYQDYKIIHRDIKPSNILINSKGFVKICDFGVSKKMIDSIADTFVGTSTYMSPERIQGSCYNTKGDVWSLGLMIIELVTGEFPLGGHNDTPEGILDLLQRIVNEEPPSLPASGDFSADIMDFVNCCCVKDERKRSSLQELMTHRYITKYNDSDDYQRTFRHWCKKIKKRIKADKMIQREEMERARLVNRQLERSAQAAMAARSGR

SEQ ID NO: 6311 - protein, 387 aa, Peridinium willei
IGAKFWEVISDEHGIDPTGTYHGDSDLQLERINVYFNEATGGRYVPRAILMDLEPGTMDSVRAGPFGQLFRPDNFVFGQSGAGNNWAKGHYTEGAELIDSVLDVVRKEAEGCDCLQGFQMAHSLGGGTGSGMGTLLISKVREEYPDRIMETFSIIPSPKVSDTVVEPYNAVLSFHQLVENADECFLLDNEALYDICFRTLKSTTPTYGDLNHLVSAAMSGVTTCLRFPGQLNCDLRKIAVNLIPFPRLHFFMTGFAPLTSRGSQQYRALTVPELTQQMFDAKNMMCAADPRHGRYLTACCLFRGRMSTKEVDEQMLNVQNKNSSYFVEWIPNNIKVSICDIPPKGLKMAVAFAGNSTAIQEMFKRVAEYFTAMFRRKAFLHWYTGEG

SEQ ID NO: 6312 - protein, 94 aa, Brevibacillus choshinensis
MLKPLGDRVVIEAISKDEMTASGIVLPDSAKEKPQEGRVIAVGSGRVADNGERIALEVKDGDKVIFSKYAGTEVKVDNKEYLVLRESDILAIIG

SEQ ID NO: 6313 - protein, 543 aa, Brevibacillus choshinensis
MAKQVKFSEDAPRSMLRGVETLPNAVKVTLGPKGRNVVLEKKFGSPLITNDGVTIPKEIELEDAYENMGAQLVKEVATKTNGIAGDGTTTATVLAAAMIREGLKNVAAGANPMVIRRGMEKAVGAAVEEIKSIAKPVENKSSIAQVAAISADDQEVGNLIAEAMEKVGKDGVITVEESKGFVTELEVVEGMQFDRGYASPYMITDTDKMEAVLNNPFILITDKKISNIQEVLPVLEQVVQSGKPLLIIAEDVEGEALATLVVNKLRGTFTAVAVKAPGFGDRRKAMLQDIAALTGGEVITEELGLDLKSTKLEQLGRAGKIVVTKENTTVVEGAGDKANIESRVAQIRQQIEDTTSDFDREKLQERLAKLAGGVAVIKVGAATETELKEKKLRIEDALNSTRAAVEEGIVPGGGTTLINAIKAVEGVKVEGEEAVGVHIVLRSLEEPVRQIAANAGLEGSVIVERLKKEPVGIGFNAATEEYVNMLEAGIVDAAKVTRSALSNAASVAAMFLTTEAVIADKPEENKAPMGMPDMGGMGGMGMM

SEQ ID NO: 6314 - protein, 435 aa, Zea mays
GRVGCIPVMGGVLELGTTDTVPEAPDLVSRATAAFWEPQCPTYSEEPSSSPSEANETGEAAADDGTFAFEELDHNNGMDIEAMTAAGGHGQEEELREAEALPDDASLEHITKEIEEFYSLCEEMDLQALPLPLEDGWTVDASNFEVPCSSPNPAPPPVDRATANVAADASRAPVYGSRATSFMAWTRSSRQSSCSDEAAPAVVPAIEEPQRLLKKVVAGGGGAWESCGGATGAAQEMSATKNHVMSERKRREKLNEMFLVLKSLLPSIHRVNKASILAETIAYLKELQRRVQELESGREPASRPSETTTRLITRPSRGNESVRKEACAGSKRKSPELGRDDVERPPVLTMDAGTSNVTVTVSDKDVLLEVQCRWEELLMTRVFDAIKGLHLDVLSVQASAPDGFMGLKIRAQFAGSGAVVPWMISEALRKAIGKR

SEQ ID NO: 6315 - protein, 258 aa, Zea mays
PGDSIAAGSFPEWTLYVQVMDPDTEEQYDFDPLDDTKTWPEDLLPLRPVGRLVLDRNVDNFFNENEQLAFGPGLVVPGIYYSDDKMLQCRVFAYADTQRYRLGPNYLMLPVNAPRCAHHNNHYDGAMNFMHRDEEVDYYPSRHAPLRQAAPPTPLPPRPVAGRREKATIRKPNDFKQPGERYRSWDADRQDRFVRRFADSLGHPKVSQELRSIWIDLLAKVCGWHGMPVAHVFSFDLSYSCMIYVRLLCICSATRRWG

SEQ ID NO: 6316 - protein, 236 aa, Streptomyces avermitilis MA-4680
MTEPTHDEAHGGALGSRLNWLRAAVLGANDGIVSTAGLVVGVAGATGARSALLTAGLAGLLAGSMSMAAGEYVSVSTQRDSEKAALALEKRELTEQPEAELEELTELLEERGLSRDVAREAAQQLTERDALRAHARVELGIDPDELANPWHAAWASFLAFTVGALLPLLAIVLPPADWRLPVTVLSVLAALVVTGWVSARLGAARPGRAVLRNVGGGALAMGVTYAAGALLGAAGV

SEQ ID NO: 6317 - protein, 482 aa, Escherichia coli K12
MKLNDSNLFRQQALINGEWLDANNGEAIDVTNPANGDKLGSVPKMGADETRAAIDAANRALPAWRALTAKERATILRNWFNLMMEHQDDLARLMTLEQGKPLAEAKGEISYAASFIEWFAEEGKRIYGDTIPGHQADKRLIVIKQPIGVTAAITPWNFPAAMITRKAGPALAAGCTMVLKPASQTPFSALALAELAIRAGVPAGVFNVVTGSAGAVGNELTSNPLVRKLSFTGSTEIGRQLMEQCAKDIKKVSLELGGNAPFIVFDDADLDKAVEGALASKFRNAGQTCVCANRLYVQDGVYDRFAEKLQQAVSKLHIGDGLDNGVTIGPLIDEKAVAKVEEHIADALEKGARVVCGGKAHERGGNFFQPTILVDVPANAKVSKEETFGPLAPLFRFKDEADVIAQANDTEFGLAAYFYARDLSRVFRVGEALEYGIVGINTGIISNEVAPFGGIKASGLGREGSKYGIEDYLEIKYMCIGL

SEQ ID NO: 6318 - protein, 332 aa, Candida glabrata CBS138
MVRVAINGFGRIGRIVLRIAMKRDGIDVVAINDPFITNDYAAYMFKYDSTHGRYDGEVTHDDKDLIIDGKAIKCYQERDPADLPWGDNDIDIVIEATGVFTAKDLAEKHITAGAKKVVITGPSATAPMFVKGVNDDKYTSDVTVISNASCTTNCLAPLAKVLQDNFGIEEALMSTVHSQTATQKTVDGPSKKDWRGGRTASANIIPSSTGAAKAVTKVLPELEGKLTGMAFRVPTVDVSVVDLTVRFAKDVTYDEIKAAIKKASEGEMKGILAYTEDAVVSTDFLGDTHSSIFDASAGIQLSPRFVKLVSWYDNEYGFSARVVDMVELVSKA

SEQ ID NO: 6319 - protein, 462 aa, Alkalilimnicola ehrlichei MLHE-1
PQHNGDVTRGRALAGVTAAGILTGALGRRGETPISKRSLMFLECNPRFVSRLTRDTLALIMAGGRGGRLSNLTDWRTKPAVPFGGKFRLIDFPLSNCINSGIRRIEVLTQYKAHSLIQHIQRGWGFLRGEFGEFVELVPAQQRMDKPLWYAGTADAVYQNIDIIKAHNPSYVLVLAGDHVYKMDYGGMIARHAESGAAMTVGCVEVPRKRASAFGVMSVNEERQVLAFNEKPKDPTPMPGNPDRALVSMGIYVFDRDYLFQLLREDAENFDSSRDFGKDVIPNAIANHKVQAYPFSDPVSGQQAYWRDVGTVDAFFQANMELIGEDPELNLYDEEWPIWTYQAQLPPAKFIQGRDGRHGTAINSMVSGGDIIHGAEVRDSLLFSQVVVQPGATVHEAVILPDVRVGEGCRIRKAVIDEGCRIPAGTVIGEDPAEDRRRFFVTPKDVVLVTAEMLGQEVAHVR

SEQ ID NO: 6320 - protein, 402 aa, Sinorhizobium meliloti 1021
MDRRVVITGMGGLCGLGTDTTSIWKWMREGRSAIGPLLNTELHGLKGIVGAEVKALPDHNIDRKQLVSMDRISVLAVIAAHEAMRQAGLSCNEGNALRFGATVGVGLGGWDATEKAYRTLLVDGGTRTEIFTGVKAMPSAAACQVSMSLGLRGPVFGVTSACSSANHAIASAVDQIKCGRADVMLAGGSDAPLVWIVLKAWEAMRALAPDTCRPFSAGRKGVVLGEGAGMAVLESYEHATARGATILAEVAGVGLSADAFHITAPAVHGPESAMRACLADAGLNAEDVDYLNAHGTGTKANDQNETTAIKRVFGDHAYSMSISSTKSTHAHCIGAASALEMIACVMAIQEGVVPPTANYREPDPDCDLDVTPNVPRERKVRVAMSNAFAMGGTNAVLAFKQV

SEQ ID NO: 6321 - protein, 466 aa, Escherichia coli K12
MGQSSQPHELGGGLKSRHVTMLSIAGVIGASLFVGSSVAIAEAGPAVLLAYLFAGLLVVMIMRMLAEMAVATPDTGSFSTYADKAIGRWAGYTIGWLYWWFWVLVIPLEANIAAMILHSWVPGIPIWLFSLVITLALTGSNLLSVKNYGEFEFWLALCKVIAILAFIFLGAVAISGFYPYAEVSGISRLWDSGGFMPNGFGAVLSAMLITMFSFMGAEIVTIAAAESDTPEKHIVRATNSVIWRISIFYLCSIFVVVALIPWNMPGLKAVGSYRSVLELLNIPHAKLIMDCVILLSVTSCLNSALYTASRMLYSLSRRGDAPAVMGKINRSKTPYVAVLLSTGAAFLTVVVNYYAPAKVFKFLIDSSGAIALLVYLVIAVSQLRMRKILRAEGSEIRLRMWLYPWLTWLVIGFITFVLVVMLFRPAQQLEVISTGLLAIGIICTVPIMARWKKLVLWQKTPVHNTR

SEQ ID NO: 6322 - protein, 388 aa, Burkholderia sacchari
MSETDNTTQAAGAIKPKKSVALSGVCAGNTALCTVGRTGNDLHYRGYDILDLATACEFEEVAYLLVHGKLPNIAELAAYKTKLKALRGLPANVKAALEWVPASAHPMDVMRTGVSVLGTVLPEKDDHNLPGARDIADRLMASLGSMLLYWYHNSHNGKRIEVETDDDSIGGHFLHLLHGREPSKSWVDAMHVSLNLYAEHEFNASTFTGRVIAGTGSDMYSAITGAIGALRGPKHGGANEVAFEIQSRYDTPDQAESDIRRRVEAKAVVIGFGHPVYTISDPRNKVIKEVAKKLSKEQSNLKLFDIAERLESTMWEIKKMFPNLDWFSAVSYHMMGVPTAMFTPLFVISRTAGWSAHIIEQRIDNKIIRPSANYTGPENLKFTLIGKR

SEQ ID NO: 6323 - protein, 275 aa, Prochlorococcus marinus str. MIT 9313
MNSSSSTVAATYYDSSDADRFYAEIWGGEDIHIGLYETADQAIASASERTVQALMELATQPPAKGCVVDLGSGYGGAARRIAKQWQVNVHAVNISAVENMRHRDLNNAAGLAKLIEVHDASFEEVPLPDGIADVVWSQDAILHSGNRLQVMNEVSRLLKPGGVFVLTDPMACDGIEANALQPILDRIHLSDLASPDRYRTWAEASGMTRDVWQERTEMLVRHYTRVREELRRRHQELASVISTDYLSRMDAGLGHWIEGGSQGRLCWGLMRFTKH

SEQ ID NO: 6324 - protein, 412 aa, Magnetospirillum magnetotacticum MS-1
MDYEHYFTKRISDLKSEGRYRVFADLERQKGRFPIALNYRDGEVREVVVWCSNDYLGMGQHPEVIAAAHEALERCGAGAGGTRNISGTNHYHVLLEEELAAFNAKESALLFTSGYVANQTTLSTLGATIPGCVVFSDELNHNSMIEGIRHGRSAKQVFRHNDPEHLEQLLSAYPKETPKLVAFESVYSMDGDIAPIAEICDVAEAHNAMTYLDEVHAVGMYGEQGSGVAERDGVRDRITIIQGTLAKALGVVGGYIAASASCVDYVRSFGPGFIFSSSMPPATAAAALASIRFLRAHPEIRDRHQERAATAKRLLAERGIPVLPSVSHIVPVMVGNAALCKQASDLLLDEYGIYVQPINYPTVPVGTERLRITPTPLHDDAMMAHLVESFSAVWDRLDLHKAHHPKAVKAAE

SEQ ID NO: 6325 - protein, 207 aa, Bradyrhizobium sp. BTAi1
MTQRRLYHFALSGHAHRARLMLHLLGLDCDYVEVDLSGGAHKRPDFLALNPFGQVPVLVEGDAVIPDSNAILVYLARRYDESGRWLPRDPLGQAQVQRWLSAAAGPLAFGAAAARVATLFGAPLDIARAHQLANGLFAVMEQELGRRPFLVGDVPTIADIAHYSYTAHAPEGGIALAPYPHVTAWLARIAALPGFVPMQASPVAGPA

SEQ ID NO: 6326 - protein, 146 aa, Glycine max
MSMVDEPLYPIAVLIDELKNDDIQLRLNSIRKLSTIARALGEERTRRELIPFLGENNDDDDEVLLAMAEELGVFIPFVGGVEHAHVLLPPLEMLCTVEETCVRDKAVESLCRIGLPMKESDLVEYFIPLVKRLASGEWFTARVSLC

SEQ ID NO: 6327 - protein, 557 aa, Burkholderia fungorum LB400
MTKYVFVTGGVVSSLGKGIAAASLAAILESRGLKVTLLKLDPYINVDPGTMSPFQHGEVFVTEDGAETDLDLGHYERFISTKMRKANNFTTGQIYESVIRKERRGDYLGKTVQVIPHITNEIQAFIERGAASATCGEPDVAIVEVGGTVGDIESLPFLEAARQMSLRMGRNSACFVHLTLVPWVATAGELKTKPTQHSVQKLREIGISPHVLLCRADRRIPDDERAKISMFSNVPEDAVISVWDADSIYKIPQMLHDQGLDAIICEELKLEPKAADLSMWSDLVEKLEHPRHEVTIGMVGKYVDLTESYKSLIEALRHASMHTSTKVNIEYIDSEEIETHGVESLKHLDAVLVPGGFGRRGTEGKIAAIRYAREAKVPYLGICLGMQLAVIEFARDVVGLKDANSTEFDQETPNRVVALITEWYDREGRVEKRTEESDLGGTMRLGSQRCPIKPGTMAEEIYGKDVNERHRHRYEVNNRFVPQLEAGGLIISARTPSEDLPEMMELPRSMHPWFVGVQFHPEFTSTPRDGHPLFKSFVEAALAHQQSRTAAEVGEKA

SEQ ID NO: 6328 - protein, 284 aa, Vibrio fischeri ES114
MRQNKQHTLFGECLAEFIGTGLLIFFGVGCVAALVLTGAEFGQWEVSIIWGFGVAIAIYCTAGVSGAHINPAVTIALAAFHGFDKAKVIPYIISQMLGAFCSAALVYSLYSNLFADYEIANGFLRSSEAALSTAGIFSTYPHPSLSILGAFAVEFVITAVLMFGILALGDEHNGASRGPMNPLLIGILIAVIGGSLGPLTGFAMNPARDFGPKLFAYLAGWDYALTGAKEIPYFIIPILAPIAGACFGGWAYPKMIGAYLPTAGQGCTIPNQCDKDEDSKTAEA

SEQ ID NO: 6329 - protein, 535 aa, Oryza sativa (japonica cultivar-group)
MEEGRRGDREGKSAAGWTALSTTKTTLEEKRRLQANGSVGGDAGTSGFRRIVRLFFACMVAGGIQYGWALQLSLLSPYSQTLGISHSYVSLTWICGPIAGFVVRPIVGYYSDRCTMKMGRRRPFILVGCLIICISVMIIGFSADIGRHLGDTKEHCSTYTGPRWSAAMAYIVGYWFLDFANNTVQGPARAMMADLSAGHHGPNVGQSIFSLWMAIGSVLGYLSGANGKWHEWFPWLKTAACCDACANLKGAFFTAVLLIVVSMTVTMYLADEMPLDKQDVDTSGGGGCAVFVDLFKSLRNLPPAMFKVLAVTAVTWLSWFPFIQYNTDWMGREIYHGEPQGTAAKADVYDAGVRKGAMGLLFCSVALGVTSFVIPKLCRRLTSKVVWSISNFLVFALMAVMVAVGMVSMRGYRPSLATGLTGPDPTLKAVALVVFALIGIPQAVLFSVPWAVASEVTAEEGGGQGLAIGVLNIAIVVPQLVIALTAGPIDGAFNKGNTPAFGIGGAFAFICGVLALIWLPKTRGVSNAAVVAGGH

SEQ ID NO: 6330 - protein, 621 aa, Legionella pneumophila str. Lens
MTMNDQDQQSSQITKVISLGKEQGYLTYSQINDLLPNIVDTEHFDVIISMLEGMNIKVFELPPSEDELALLLNTEEVPDIEEAAMVLASVDKETGRTTDPVRMYMREMGTVELLTREGEIRIAKRIEEGIYQVLKSLAHYPETVQLVLEDYDRFLAEEIRLNEIISGFADVDEEIAPATNIGSMLDEEQQEEILLDVDEEDEDGEGGISDVDDGPNPEQAKIYFDELREAFEKAMKALKEHGRTNKKTVELLDSMSESFLKLKLTSRQVDKLTRHFRQLRNHIREFERSIMRLCIEKARIPRKLFIDTFPGQETDLGWLETIISKHAKKLDLQRIEENREEILRLQSKLASFEIEYGLTISEIKDINRKMSIGEAKARRAKKEMVEANLRLVISIAKKYTNRGLQFLDLIQEGNIGLMKAVDKFEYRRGYKFSTYATWWIRQAITRSIADQARTIRIPVHMIETINKLNRISRQILQETGREATPEELAEKMELSEDKIRKVLKIAKEPISMETPVGDDDDSHLGDFIEDNNIESPIDMATAEGLREATLEILETLTPREAKVLRMRFGIEMNTDHTLEEVGKQFDVTRERIRQIEAKALRKLRHPSRSEKLRSFLEGDEG

SEQ ID NO: 6331 - protein, 390 aa, Woloszynskia tenuissima
IGAKFWEVISDEHGIDPTGTYHGDSDLQLGRINVYFNEATGGRYVPRAVLMDLEPGTMDSVRAGPFGQLFRPDNFVFGQTGAGNNWAKGHYTEGAELIDSVLDVVRKEAEGCDCLQGFQLCHSLGGGTGSGMGTLLISKVREEYPDRIMETFSVIPSPKVSDTVVEPYNAVLSFHQLVENADECMLLDNEALYDICFRTLKLTTPTYGDLNHLVSAAISGVTTCLRFPGQLNCDLRKIAVNLIPFPRLHFFMTGFAPLTSRGSQQYRALTVPELTQQMFDAKSMMCAADPRHGRYLTAAALFRGRMSTKEVDEQMLNVQNKNSSYFVEWIPNNIKASVCDIPPKGLKMAVAFLGNSTAIQEMFKRVAEYFTAMFRRKAFLHWYTGEGMDE

SEQ ID NO: 6332 - protein, 338 aa, Pseudomonas aeruginosa UCBPP-PA14
MRVFYDKDCDLSIIQGKKVAIIGYGSQGHAHACNLKDSGVDVTVGLRSGSATVAKAEAHGLKVADVKTAVAAADVVMILTPDEFQGRLYKEEIEPNLKKGATLAFAHGFSIHYNQVVPRADLDVIMIAPKAPGHTVRSEFVKGGGIPDLIAIYQDASGNAKNVALSYACGVGGGRTGIIETTFKDETETDLFGEQAVLCGGCVELVKAGFETLVEAGYAPEMAYFECLHELKLIVDLMYEGGIANMNYSISNNAEYGEYVTGPEVINAESRAAMRNALKRIQDGEYAKMFITEGAANYPSMTAYRRNNAAHPIEQIGEKLRAMMPWIAANKIVDKSKN

SEQ ID NO: 6333 - protein, 387 aa, Dinophyceae sp. CCMP421
IGAKFWEVIADEHGIDPTGTYHGDSDLQLERINVYFNEATGGRYVPRAVLMDLEPGTMDSVRAGPFGQLFRPDNFVFGQTGAGNNWAKGHYTEGAELIDSVLDVVRKEAEGCDCLQGFQLCHSLGGGTGAGMGTLLISKVREEYPDRIMETFSVIPSPKVSDTVVEPYNAVLSFHQLVENSDESFLLDNEALYDICFRTLKLTTPTYGDLNHLVSAAMSGVTCCLRFPGQLNCDLRKIAVNLVPFPRLHFFMTGFAPLTSRGSQQYRALTVPELTQQMFDAKNMMCAADPRHGRYLTAAALFRGRMSTKEVDEQMLNVQNKNSSYFVEWIPNNIKASVCDIPPKGLKMAVSFAGNSTAIQEMFKRVAEYFTAMFRRKAFLHWYTGEG

SEQ ID NO: 6334 - protein, 145 aa, Brassica napus
  misc_feature (50)..(50): Xaa can be any naturally occurring amino acid
  misc_feature (68)..(68): Xaa can be any naturally occurring amino acid
  unsure (1)..(145): unsure at all Xaa locations
NGIVEAVKYLNRVGDRRTVYIKILVTVPGILSIRDVIVFGLRVNVTLLFXIARSKAGINAYLDGLGEXGLDDFFRVTRVASFFGSQGDTLMDKMLEKMGTPKALNLRGKAVGAKAELAYKLYQKKFSGPRWEALVKKGAKKQRLF

SEQ ID NO: 6335 - protein, 413 aa, Pyrococcus abyssi GE5
MKAVILAGGFGTRLRPISSTRPKPMVPVLGKPNLQYILEALEKVKEIDEVILSVHYMRGEIREFIQEKMRDYPKDIRFVNDPMPLETGGALKNVEEYVSDDFLVIYGDVFTNFDYSELIEAHKKNDGLVTVALTKVYDPERFGVVITDEEGKIVEFEEKPRKPKTNLVDAGIYMVNKDVLKEIPKNKEVYFEREILPKFVSQGLVYGYKMPKHYYWVDLGTPEDFFYAHQIALDEMARENGYMILGENVEIPEDVEVQGPVYIDDNAKIGHGVKIKAYTYIGPNTMIEDKAYIKRAILLGNDIIKERAELKDTILGEGVVVGKNVIIKENAVIGDYAKIYDNLVIYGAKVLPWKKVEEYEAYIRIKLDPAKVRPELTPDRCPLGLPECIYKKFKAIAGEKPPCDECIENQWLF

SEQ ID NO: 6336 - protein, 499 aa, Leuconostoc mesenteroides subsp. mesenteroides ATCC 8293
  misc_feature (342)..(475): Xaa can be any naturally occurring amino acid
  unsure (1)..(499): unsure at all Xaa locations
MKAAVWHGVKDVRVEDVELKPTKSNEVVVRVAYAGICGSDLHEYLEGPVFIPVDQPDELTGGQAPLTMGHEFSGVIEKVGPDVANFKVGDHVSINPTVTKGISSDDLDVYDGYSFIGLSTDGGFTSYVNVPEDNLYHLPEEFSLKLAATIEPTAVAVQAIKEADLRFGEKVVIFGAGPIGVLVAAAAKAAGATKIVAVDLSEIRLRKALEMGATDVINPSQVPDTVAAIKNIIPGGADASFEVAGVQPTFEQAIDATRPRGSVVIVSIFAKPISFNPMQLMNAGVKLTTTIAYSKETFQQTVALVSSGQINVEPVITDTISLDSIVSDGFESLTSDKSQAKXXXXXXXXXXXXXXXXXXXXXXXXXXXXXXXXXXXXXXXXXXXXXXXXXXXXXXXXXXXXXXXXXXXXXXXXXXXXXXXXXXXXXXXXXXXXXXXXXXXXXXXXXXXXXXXXXXXXXXXXXXXXXXXXXXXXXXLEHKAIISWHNGFYRCFITDCFCW

SEQ ID NO: 6337 - protein, 152 aa, Zea mays
MSSSSLSPAGRTSGSDGDSAADTRRREKRRLSNRESARRSRLRKQQHLDELAQEAALLQAENARVAARAADVASQNARVEQENAVLRARAAELGARLRSVNEVLRVVEEFSGVAMDIQEEVPPADDPLLRPWQLPCYPAAAMPIGAPHMLRY

SEQ ID NO: 6338 - protein, 641 aa, Sinorhizobium meliloti 1021
MSYVQSIPPHDIEAHLAEHDNKSILRFITCGSVDDGKSTLIGRLLYDAKLVFEDQLANLGRVGSPGAANGKEIDLALLLDGLEAEREQGITIDVAYRYFATSKRKFIVADTPGHEEYTRNMVTGASTADLAIILIDSRQGILQQTRRHSYIASLLGIRHVVLAVNKIDLVDFKQQVYEEIVADYMAFAKELGFASIRPIPISARDGDNVISASANTPWYRGAALLEYLETVELDPTDQAKPFRFPVQMVMRPNADFRGYAGQISCGRISVGDPVVVAKTGQRTSVKAIVTYDGELATAGEGEAVTLVLSDEVDASRGNMLVAPGARPFVADQFQAHVIWFDANPMMPGRSYILRTETDSVSATVTTLKHQVNINSFIREAAKSLQMNEVGVCNISTQAPIAFDAYNDNRATGNFIIVDRVTNATVGAGLIDFPLRRADNVHWHALEVNKSARSAMKNQLPAVLWFTGLSGSGKSTIANELDRILHAQGKHTYLLDGDNVRHGLNRDLGFTEEDRVENIRRVAEVAKLMADAGLIVLVSFISPFRDERRMARELMEEGEFIEIFVDTPLDECARRDPKGLYEKALAGKIANFTGVSSCYEAPENPELHIRTVGHQPNDLALAIEEFLDRRIGGQMTPLQRPT

SEQ ID NO: 6339 - protein, 52 aa, Escherichia coli K12
MGFWRIVITIILPPLGVLLGKGFGWAFIINILLTLLGYIPGLIHAFWVQTRD

SEQ ID NO: 6340 - protein, 629 aa, Ashbya gossypii ATCC 10895
MKPIGLTGMGLQSAGDSGEELKSGWMPAEMPLGEYMFRRLMSAGTKTVFGVPGDFNMGLLEHMYGEAVCAEGLQWIGTCNELNAAYAADGYSRYCNKIGCVVTTLGVGELSALNGVAGAFAEHVKVLHIVGVSMRAAQTHPELHGNVHHLVPRLRNSNFKAPNHKVYSEMVSGRVSCCCEFLEDLETACDQIDHVIREIWRHGKPGYLFVPADMPNMKVSSRNLVQAPTIMLESAVLERTNLAACDRIGIEILQHLYQSSTPAILCDGLCDRFGLTGDVRRLVELTGMWNFSTIMGKSILDETQPHYKGVYYGAGSKERNALLQECDLILYLGPVKDEVNTWKYTFQFNPQSMIIELHPEYVSLTRNGEQTILNSGHLLPVLRSILAHLNVANLSFNYPTAKKRVPREHQYAADEPITQGMLQHMIPECLNPGDVMVVDTGTFQFSVFDMKFPTDLKCISQSFYLSIGMALPAALGVACAMREFPRLHLGPKLANEGYTPRLVLCEGDGAAQMTIQELSTFIRYELPVEVLLWNNDGYTVERVIKGPTRSYNDIMSWDWTKLLRVFGDFDGTRSESVRVKDFNSLIEHLSSWKSDKKRSKIRLMEVILDKMDISATLKELAKQFQHNAA

SEQ ID NO: 6341 - protein, 481 aa, Candida albicans SC5314
MRTKQQQQQQQQSNSSSGVANNQKSYGYTTRIKSNSSVTNGGNVGATLTESRIITNINELLPGLNDISDAFEALPIDLIRYFTLLKEIDAKCINTIPQINHLINQYITNLHQDKNVTTTTTTTTNDDNTIDLNKKLETRRLNLIKNKINEVIPCLEEKMHVTSVASDLLKKHMYRINQDYKLILLNNEIPQSIRIGPLNHPAMINDTHTTSSSSTTSTGNGTGGGGGTNNNHGGNNSVQSQRSESRREALAARKANKEDDRENNTATGGSGRKKKKEQNNNNNSTASGADGNNGSNGKKRNRDDKSNNTGSGNDLKKKKKSNNNDQSDNRRRGEDENGKGDGETSFNSGNAKNDPHGKLKTTTTGNLVGGSSTTTTVSSSSTTSSSATTTTTSSTTTTKNSGSTGASTATATGASGAKGSSSSSSGNNEPTYCYCNQVSFGEMVGCDGDDCKREWFHLPCIGFKNPPKGKWYCDDCLKKLK

SEQ ID NO: 6342 - protein, 364 aa, Zea mays
MGSTAGDVAAVVDEEACMYAMQLASSSILPMTLKNAIELGLLEVLQKEAGGGKAALAPEEVVARMPAAPGDPAAAAAMVDRMLRLLASYDVVRCQMEDRDGRYERRYSAAPVCKWLTPNEDGVSMAALALMNQDKVLMESWYYLKDAVLDGGIPFNKAYGMTAFEYHGTDARFNRVFNEGMKNHSVIITKKLLDFYTGFEGVSTLVDVGGGVGATLHAITSRHPHISGVNFDLPHVISEAPPFPGVRHVGGDMFASVPAGDAILMKWILHDWSDAHCATLLKNCYDALPENGKVIVVECVLPVNTEATPKAQGVFHVDMIMLAHNPGGKERYEREFRELAKGAGFSGFKATYIYANAWAIEFIK

SEQ ID NO: 6343 - protein, 147 aa, Brassica napus
VSGFPTLKFFPKGNKAGEEYESGRELDDFVKFINEKSGTSRDSKGQLTSEAGLVASLDALVKEFHSAADDKRKEILSKIEEEAAKLSGPAVKHGKIYVNVAKKILQKGSDYTKKETERLHRLLEKSISPSKADEFAIKKNILSAFSS

SEQ ID NO: 6344 - protein, 342 aa, Polaromonas sp. JS666
MKVVYSDQHKDHDPQLFMVRGRLKRSNEQPERAFRLLSAVQEGGHDVIACEDFGAGPRAAIHTPEYLRFLETAYERWQGLDDPSQEVMPNIHPFPGEPCTYPESVVGQAGFHMGDNACSIGPHTWQAATASAHVATHAAQLVADGERAAYALCRPPGHHAYADRANGFCYLNNVAIAAQHLRRVHDRVAILDIDVHHGNGTQGIFYRRPDVLTISLHGDPRNFTPFFTGHAHERGEGAGLGYNINKPLALGTGIDGYLPALRDACLSVRAFAPGALVVALGLDAHEHDPYKGMKITTPGFALLLAEIARLGLPTVLVQEGGYLSDDLGPNLASALRGFAGVA

SEQ ID NO: 6345 - protein, 917 aa, Alkalilimnicola ehrlichei MLHE-1
MSEWLLVFTSFGYVGLLFAIAYSADKLGDTGRSLVNNPYVYTLSIAVYCTAWTFYGSVGRATEAGVSFLTIYLGPTLMAVLWWLILRRIIRISKLYRITSIADFIASRYGKSMALGGLATFIAVVGITPYIALQLKAVSDSFVVMLSFPEPEVAATPLRFWDDKAFWVAGLLAIFAILFGTRHIDATERLEGMVVAVAFESVIKLLAFLAAGFFVTFMLFDGPRALFEQAAEVDQIRDLMLLSSLPGGYVNWLSLTLLSMLAIIFLPRQWQVTVVENVNEDHLRTAAWLFPLYLLVINLFVLPIAFAGMLYFSEGTVNPDSFVLALPLAEGYNWLALFIYIGGFSAATGMVIVATIALSIMVSNDLVVPALLRMRGFRLSADADLSRFIVNLRRGIICLILLLGYFYYLLIADTYALVSIGLISFVAVAQFAPPILIGIFWKGASRKGAMAGLIAGFVIWAYTLLLPSFVDSGLIPRALLEQGPAGIAWLNPYGLFGLTDLDPITHTVFWSLLANIGLLVGVSLFARQSDIERIQGALFVDVFLRSERDTRFWEGTATVGDLQDLLGRFIGQERSRAAFTSYAEEHGLQLHERDHARPELVGYAERLLSGSIGSASARVMVSSIIKGEALSFEGVMEILDATSRAIEYSRRLEQKSRELEMATDELRRANERLKELDHLKDEFVSMVSHELRTPLTSIRAFGEILLSNPELDAEQRKEFLQVVVKESERLTRLINQVLDLSKIESGAAEWHLETLDLNQVVQEAADATRQIFHDTRVDLQVKAPEQPTIITGDHDRLIQLVINLLSNAAKFTDPDNGRVEVSVVPVSARKLELRVQDNGPGISEAEQRKIFDKFHQVSSQQAGKPKGSGLGLAICKLIMDAHSGDIRVESEPGAGATFICEFPVGDRRAATGEDESP

SEQ ID NO: 6346 - protein, 427 aa, Arabidopsis thaliana
MSSSSLRKKSDLRVIQKVPYKGLKDFLSNLQEVILGTKLAILFPAIPAAIICTYCGVSQPWIFGLSLLGLTPLAERVSFLTEQLAFYTGPTLGGLLNATCGNATELIIAILALTNNKVAVVKYSLLGSILSNLLLVLGTSLFCGGIANIRREQRFDRKQADVNFFLLLLGFLCHLLPLLVGYLKNGEASAAVLSDMQLSISRGFSIVMLISYIAYLVFQLWTHRQLFDAQEQEDEYDDDVEQETAVISFWSGFAWLVGMTLVIALLSEYVVATIEEASDKWNLSVSFISIILLPIVGNAAEHAGAVIFAFKNKLDISLGVALGSATQIGLFVVPLTITVAWILGINMDLNFGPLETGCLVVSIIITAFTLQDGSSHYMKGLVLLLCYFIIAICFFVDKLPQKQNAIHLGHQAMNNVVTATGGGVFSS

SEQ ID NO: 6347 - protein, 353 aa, Polaromonas sp. JS666
MQAFFADDQLLHDPQQFMRLGRICKPTDLPARAHALQAALAAHGIAVATPPDYGRAPLETVHSTDYLDFLEGAYARWTAVKLPGLEPGIEVLPNLSPYCSGHVNAARGPCPSPSVVAQAGYYLRDLSCPIGPHTWHSVLRSAHSAVAAADAVCQTGDAAYALCRPSGHHACRDSASGFCYVNNSACAAHRLLQHYGRVAVLDVDAHHGDGTQHIFYDSADVLTVSMHADPAGYYPFYSGYAHERGAGAGAGCNLNLPLPHGAGSEPFLQALDAGLAALRDFAPRALVLPLGFDTYKDDPVSVLKVEIDAYRQVGERAGALGLPTVIVQEGGYKVDAMGMALDAFLGGFQAGRS

SEQ ID NO: 6348 - protein, 456 aa, Polaromonas sp. JS666
MNAFTHAENAAHDIAAHLHPFTNLATHPQVGPLVIQRGDGIFVEDDQGRRYLEAMSGLWCASLGFSNARLAKAGCDALHALPYYHTFNHRSNPAAIELAQRLLDIAPVPMSKVFFANSGSEANDTAVKLVWYYHNAIGKPDKKKIIARKNAYHGVTVAAASLSGLAPNHRDFDLPIARILHVDCPHHYRYGLPGETEEAFATRLAEALEQRILAEGPDTVAAFFAEPVMGAGGVIVPPASYFEKIQAVLRKYEVLLVADEVICGFCRTGEMFGSTTFGMQPDILTSAKALSSGYMPISAVMVSGKVHAAVAANSGKIGTFGHGFTYSGHPVAAAVALETLKVYEDEQLLAHVQSLAPQFQRGLQRHASRPLVGEVRGVGLIGAIELVADPASRTPFDPAKKVGARLAELALEQGLIVRAMGDAVAFCPPLIITAAQVDEMFARFDRAMVRLEQEQP

SEQ ID NO: 6349 - protein, 467 aa, Listeria monocytogenes EGD-e
MLYSEDDKRKQESYRIPLFGSEEESTSIPKYVLKKEPMEPRIAYQLVKDQLMDEGNARQNLATFCQTYMEKEAEILMAETLEKNAIDKSEYPQTAELENRCVNILADLWNAPKDMSYLGTSTVGSSEACMLGGLAMKFRWRNNAEKRGLDIQAKRPNLIISSGYQVCWEKFCVYWDVDMRVVPMDKNHLSLDVDKVFDLVDEYTIGVVGILGITYTGKFDDIQLLDEKVEAYNETNEHQLVIHIDGASGAMFTPFVNPELPWDFRLKNVVSINTSGHKYGLVYPGVGWILWKDKEYLPKELIFEVSYLGGSMPTMAINFSRSASQIIGQYYNFLRYGFEGYREIHEKTKKTAIYLAKTVEKSGYFEIINDGANLPIVCYKMKEGLDVEWTLYDLADQLLMKGWQVPAYPLPADLSDTIIQRFVCRADLGYNVAEEFAADFADAIHNLEHARVLYHDKERNDSYGFTH

SEQ ID NO: 6350 - protein, 380 aa, Glycine max
  misc_feature (160)..(160): Xaa can be any naturally occurring amino acid
  unsure (1)..(380): unsure at all Xaa locations
MTEDKEMSSSVTNGDDSLTGHIISTTIGGKNGEPKQTISYMAERVVGTGSFGIVFQAKCLETGEAVAIKKVLQDRRYKNRELQLMRVLDHPNVISLKHCFFSTTSTDELFLNLVMEYVPESMYRVIKHYTNANQRMPIIYVKLYMYQIFRGLAYIHTGAXVCHRDLKPQNILVDPLTHQVKLCDFGSAKVLVKGEANISYICSRFYRAPELIFGATEYTSSIDIWSAGCVLAELLLGQPLFPGENAVDQLVHIIKVLGTPTREEVRCMNPNYNDFRFPQIKAHPWHKIFHKKMPPEAIDLASRLLQYSPSLRCTALEACAHPFFDELREPHARLPNGRPFPPLFNFKQELSEASPVLVNKLIPDHVKRQIGLQFVPPAGS

SEQ ID NO: 6351 - protein, 236 aa, Prochlorococcus marinus str. MIT 9313
MTTYKVERASDPEDLARRAAQKLASHIDLVLDQRDRVQIALSGGSTPAIAYRLLGQERLPWDRVDVFLGDERWVDARDDASNARMLRTTLLAEGPGSQAAFHPVPTVELPNPEASAEAYAKLVQETCAGDPPVFDLMVLGLGEDGHTASLFPGTDAPAVVDRWATVGKGKGLERITLTAPVLSSAREVIFLVSGVGKQVALKRLLDSAESAERTPARLVQPRSPILVLADEAALLG

SEQ ID NO: 6352 - protein, 440 aa, Oryza sativa
VSIFRTSVLATSVAMEVVSSSHSCLAFNRTPSSAWRFPGNGLGPGHAKLTRPRSAILCVRSGTASNPADSGKVHASHGFYVSDVDAALQGIPKKVGEIEKMIIPSLPEGPESSLISTGFWEWKPKLSVYYEKSGIDNSKAPSVLFLPGFGVGTFHFEKQLKDLGRDYKVWTMDFLGQGMSLPCEDPAPKSTSGELDEDTYWGFGQELQPWAEELVYSIDLWRDQVQHFIEEVIGEPVYIVGNSLGGFVSLYLAASCPHLVKGVTLLNATPFWGFLPNPATSPRLSKIFPWAGTFPLPSFVRKLTETVWQKISDPRSIQGILKQVYADHSTNVDMVFSRIIETTQHPAAAASFASIMCAPKGQISFEEALSRCQRQGIPISLMYGREDPWVRPIWGIKVKQQVPESPYYEISPAGHCPHDEVPEVPGKSLAWWITGRLQAS

SEQ ID NO: 6353 - protein, 431 aa, Prochlorococcus marinus str. MIT 9313
MKRVLAIILGGGAGTRLYPLTKMRAKPAVPLAGKYRLIDIPISNCINSSINKMYVLTQFNSASLNRHLGQSYNLSAAFGQGFVEVLAAQQTPESPSWFEGTADAVRKYQWLFQEWDVDEYLILSGDQLYRMDYSLFVEHHRRSGADLTVAALPVDAEQAEGFGLMRTDSDGNIQEFREKPKGESLKAMAVDTSRFGLSAESARNKPYLASMGIYVFSRATLFDLLHKNPSHKDFGKEVIPEALARGDRLQSYVFDEYWEDIGTIGAFYEANLALTQQPNPPFSFYDEKFPIYTRPRYLPPTKLVDAQITESIIGEGSILKSCSIHHCVLGVRSRVESDVVLQDSLVMGSDFYESSEERTLLRQGGGIPLGVGQGTTVKGAILDKNTRIGNNVTIVNKDHVEEADRADEGFYIRNGIVVVVKNATISDGTVI

SEQ ID NO: 6354 - protein, 1643 aa, Anabaena variabilis ATCC 29413
MKTVENQEPLDGVAIVGMVGRFPGAKNVQEFWGNLCAGKESTTFFQDEELDPSIDPHLVQDPSYVKARGIIPGGETFDAAFFGINPREAEVMDPQSRVFLELVYEALENAGYDAEAYSGLIGLYAGCGQNTYFANHICGRQEIIDRVGEFQTMLANEKDFLTTRAAHKLNLKGPAVSISTACSTSLVAVIQACQSLSNYQCDMALAGGVSMTTPQNSGYIAQEGTMLSGDGHCRPFDAKSQGTMFNNGAGLVVLKRVEDAIQDGDRIYAVIRGFGINNDGADKVSFTAPSVDGQAEAIAMAQAYANFHPETISYIEAHGTATSLGDPIEIEALTQAFRIHTNSKQFCAIGSLKSNVGHLVAAAGVAGLIKTALALYHQQIPPSLNFEAPNPNIDFANSPFYVNTQLTPWPQGETPRRAGVSSFGVGGTNAHIVLEEAPAILPSNLSRPSQLLLLSAKTSTALETATVNLQEHLRNNASINLADVAHTLQRGRKAFNYRRFVVCQNTKEAITTLQSLEPKRVFTRHTQVRDPEIAFMFPGQGSQYVNMGFNLYSREIVFRQVVDQCAEILKPILGRDLREIIYPVATDIETASTALQQTCFTQPALFVVEYALAQLWQSWGVKPQAMIGHSIGEFVAACLAGVFSLEDALMLVANRGRLMWELPRGAMLSVRLSAPEVEKRLAGELAIAAINSPSLCVVSGTTEAIAAWQTQLETAEIVCRLLHTSHAFHSPMMEAIVAPFAELVGKVKLSPPQIPFVSSVTGDWITPEEATNPMYWAQHLRQTVRFADGVKTLWQQPERLLLEVGPRTTTTTLARQQAKDIKQQITIASLSDNADNEAEWTALLQAMGQLWLAGVTINWNNFYQEERRQRIPLPNYPFERQRFWIDPLPHPNRNTNHKPAHYQLEKTQTMSAQTTLISLLKEIIEETSGLEIASVDASTTFLEMGLDSLSLTQVGLALKKKFKVKVSLRHLLEVYPNLATLADFLQQNLSAEALSALVPSETTSPSATLSLQEVSTNGSNGKNGKNGSTPSPMLLVPPTSTNGNGSKNGSLPQVSLPNVASSALEGVINQQLQIMAQQLALLGNNSQPVTVPAVNGQNNGVKSEKPVTQSNQKPEPQDSTENLPKKVFGAGARIETTQTKTLTPQQRTYLDSIIQRYTQRTQKSKEYTQTNRPHLADPRSVSGFNPTMKEMVYPIVVSRSSGSKLWDIDGNEYVDLSNGFGLNLFGWSPAFVTEAIEAQLKLGMEIGPQTPLVGEVAKLMCEITNFDRAAFCNTGSEAVLGAMRLARTITGRNLIAIFSGGYHGILDEVIVRGTKKLRSIPAAPGIPQEKVDNILVIDYDAPDALDILKSRADELAGVMVESVQSRRPEYQPREFLQQLRQFTEQEDIALIFDEIVTGFRIHPGGAQAHFGIKADIATYGKIVGGGLPIGVIAGKSKYMDALDGGFWQYGDDSVPEVGVTYFAGTFVRHPLALAAAKAVLQHLLKNGPSLQQQLNAKTDQFVVELTDYFQQMQAPYTVHNFGSLFMVKSAPEFLYGDLLFYLMRDKGVHIWDHRPCFLTTAHSDADLSLAMAAFKESIAEMQSAGFFSAPTPTTKGSPESSKNLRNRPPQPGAKLGRDPEGNPSWYVPDPQRPGKYLQVSSVS

SEQ ID NO: 6355 - protein, 310 aa, Brassica rapa subsp. pekinensis
MMKRLSSSDSVGGLISLCPTTSTDQPSPRRYGREFQSMLEGYEEEEEEAVTEERGQTGLAEKKRRLSINQVKALEKNFELENKLEPERKVKLALELGLQPRQVAVWFQNRRARWKTKQLEKDYGVLKTQYDSLRHNFDSLRRDNESLLQEIGKLKAKLNGEEEVEKMMKMENNAVTMECDVSVKEEEVSLPEELTDPPSSPPQALEHSDSFNYRSFTDLRDLLSLKAAASSVAAAGSSDSSDSRAVLNEESSSNVTAGPVTVPQGGFLQFVKMEQTEDHDDFLSGEEACGFFSEEQPPSLHWYSTVDQWN

SEQ ID NO: 6356 - protein, 477 aa, Bacillus cereus ATCC 14579
MTTDKKVPKYQQIIDYMKEKIENGEWPIGSKIPSQRQLAKLFHVNRSTVITALDELIADGLIQGQIGAGTIVTNNTWSLLATNPPPDWSEYVKAGIHKPSKLMVREINEAEANKTLIHLSKGELAPHLFPLETMQSIIKNVSEELDYFGYEEQKGIYPLREAISKYVRSFGIHASPDSILIVSGALQALQLISIGLLHRKSTVLLEQPSYLYSLHIFQSANINLSGISMDHHGILPNDLLKRIKYSQKNNILYSIPCFQNPTGILMSKERRKEILKICEKEQLPIIEDDIYRELWLDESPPAPLKSMDKHGHVLYIGSLSKTLSPGLRIGWIIGPEPVIDRLSDIKMQTDYGSSSLSQRVAAEWINEGFYEEHVANVRMHLKERRQIMIRALNKYCADIASWDIPSGGFFIWLKVIHNIPMKKLFSEALSKGILLNPGRIYEEESDQYIRLSYGYATPEQMTNGIRLLSELIRKLTA

SEQ ID NO: 6357 - protein, 232 aa, Methanococcoides burtonii DSM 6242
MLKALIFDMDGVLVDSMPYHTEALSHVFAEMGFSMDARHVYNMEGSKTVEIVRFLLEKDGIDLLEVDVDELIHRYRDEFARIVELKAFSEVLECLPILKERFMLAVVSGADRNIVQDIITNLYGGIFDVVISGEDVDNGKPAPDPFLSAADMFGLDANECLVVENAAMGVEAANRAGMFCLAVPTYVSKESLKNADRLVDDHRMLRDFLLELDHLEKEAVEFLRLKFNLAHK

SEQ ID NO: 6358 - protein, 143 aa, Schizosaccharomyces pombe
MSLQPFFGFPPTVNDLFSDFVSYSPRLNNQIPGELSPSIDVHEGKDTVSVDVELPGVKKEDVQVHYDSGKLTISGEVVNERKNESTEGNQRWSERRFGSFSRTITIPAKIDADRIEANFSNGLLTVTLPKVEKSQTKKQIAIK

SEQ ID NO: 6359 - protein, 66 aa, Flaveria pringlei
AYTLKRTRDPNYHVTLRPHISKEYAEPSKPADELIHLNPTSEYAPGLEDTLILTMKGIAAGMQNTG

SEQ ID NO: 6360 - protein, 315 aa, Triticum aestivum
  misc_feature (297)..(297): Xaa can be any naturally occurring amino acid
  unsure (1)..(315): unsure at all Xaa locations
MSVSVSAAASSSLPPLLARRRSPPASLAPVRSLRSRSRLLSSARTTPVLLPAAAMAAPAPAASSKRDLLIFDAEENLAVALAKYTADLSAKFAAERGAFTVVLSGGSLIYALRKLTEAPYLETVDWSKWHVFWVDERVVPKDHEDSNYKLALDGFLSKVPIPAGQVYAINDALSAEGAAEDYETILKQLVKNGVLAMSKTTGFPRFDLQLLGMGPDGHIASLFPGHPLVKENTKWVTHILDSPKPPPQRITFTFPVINSSAYVAMVVTGAGKAGAVQKAISDKKTSDLLPVEMAILXDGEFTWFTDKEAVSMLQN

SEQ ID NO: 6361 - protein, 92 aa, Flaveria pringlei
MANRNLEKLASIDAQLRLLVPGKVSEDDKLIEYDALLLDKFLDILQDLHGEVQECYELSAEYEGKRDPKKLEELGSVLTSLDPGDSIVIAKA

SEQ ID NO: 6362 - protein, 498 aa, Lycopersicon esculentum
MAIVTVIGATIGILIALFFVKSFYTLWWWPKMIEKKLKKEGIHGQPYQFLFGNLKEMTRMSREAKKKPLVNHDIVPWVNPFILHLSKTYERLFVMWAGPTPRITVTDPKLIKEVVNRHNEFQKPQANAFIDMFVTGLASYNGQKWDHHRKILNPAFHIEKIKRLYPAFCECCDEMINRWEDLVSKTGSCELDVADEFLNVGGDVISRAAFGSNIEEGRTIFILQKEQCDLILASPFTLFFPLLRFFPTESNRRARYIYKKVLSLIKGIIEKKEDAMRRGVSESDDILGLLLKGGLSTTEIIEECKEFYLAGQDTTTALLSWTLVALSMHPEWQDKARNEVFQVLGKNKPKFEDLNQLKIMNMIFQEVLRLYPALTLMRSTSKDTKLGEMTIPAGVQIFVPIYIAHRDPQVWGDDALIFNPNRFSEGVSKAAKEPLYFPFGWGPRMCIGNNFGMAEAKLVLSQILQRFWFKLSPSYVHAPQAILVMKPQYGAQIILNKL

SEQ ID NO: 6363 - protein, 198 aa, Triticum aestivum
GTRQKISDPKSIQDILKQVYADHSTNVDKVFSRIVEITQHPAAAASFASIMFAPRGQISFQEAISRCQSQGVPLSLMYGREDPWIRPFWGIKVKQQVPEAPYYEISPAGHCPHDEVPEVVNYLLRGWLKNLESEGSIDLPFLEEPSYAEHGVSRELEFVREGSRKSVSVRLYGTKISLWSQLSSFLNTRVPNSRVVLR

SEQ ID NO: 6364 - protein, 315 aa, Oryza sativa (japonica cultivar-group)
MMKESYMEVLPPAPAHYFVGQAAAAGGWFLPDRRGGGGAWSQEENKVFEQALAALDRNDPERWERVALLLPGKTVADVMTHYDDLENDVCFIEAGLVPFPHYGAAGGGGGSGFTLDWDGGDDPAGLGFKRSCYMVGGKRARGPDQERKKGVPWTEEEHKLFLMGLKKYGRGDWRNISRNFVTSRTPTQVASHAQKYFIRLNSGGKDKRRSSIHDITTVNLPDDDHGNPSPSPPPSVLTAHSSSSAAAVSEQFGVLVDGKPPPPPLGRGAGHHHFMPHPYAQVKIEAGNSHVAGGGRLDDSVLVQMQCGQLMQPLG

SEQ ID NO: 6365 - protein, 76 aa, Glycine max
FCYDVTACETTGNPGEYGFVAHLNEGRHLKKRPTEFRVDKVLLPFGENKFYFTQVGPEKGLFPFEACEDGQVHFFP

SEQ ID NO: 6366 - protein, 418 aa, Oryza sativa
MAGVGFVEDMLREQSLLEATCGDLFDHIDDLLDFPKEESAADVLLLDAPAPGSPLSSRIIGGHATMAAAPPPPPQMMALPPPPAPAKDDASALFDAAGALGAEVFDRKDAHIGPCDELDMDMAQLEWLSGLFDDGTIPHEPSFPGVNCAAPIKASALTANAGVVLPDKAEEALFRSSSPISVLEHSGFNVATNGGSSSSSSSSASSSSESFSGSGRAWSAPVSPRPEPPVLVIPARARSKRSRPSAFPAVRGAPAATETTILVPTPMYSSTSSHSDPESIAESNPHPPPMKKKKKAKKPAAPAAASDAEADADAADADYEEGGALALPPGTVRRCTHCQIEKTPQWRAGPLGPKTLCNACGVRYKSGRLFPEYRPAASPTFMPSIHSNSHKKVVEMRQKATRTADPSCDLLQYIRRRD

SEQ ID NO: 6367 - protein, 163 aa, Anabaena variabilis ATCC 29413
MLHFRGDIMAITRWEPFREIERLEPFREIDTLQRQINRLFDRLMPTNGGEKVGFAFVPAAELEEKDDAIHLKLEVPGLEANDIHVEATPESISITGERKSETKMEENGITRSEFRYGKFQRVIPLPSLIQNDKVQAEYKNGILRLTVPKAESERNKVVKVNIG

SEQ ID NO: 6368 - protein, 457 aa, Wolbachia endosymbiont of Drosophila melanogaster
MNEYDITVIGSGPGGYIAAIRAAQLGFKTAIVEKEKNLGGICLNWGCIPTKSLLRASEVYRLIKRSKEFGIEVKGANFDIQSIVKYSRNVVDKLSSGVAYLMKKNNIKVHQGFGKLAGNGTIKVVSDKEEQEIVSKHIILATGVRARNLPGIEADGDLIWNAQHAMTPERLPKSLLIIGSGAIGIEFASFYSTLGVDVTIIEIKSTILPLEDKDISDLAQEIFTKQGIKIYTNSSVKALTKSKDSAQVLLSSGESKEFERVIVAVGIQANIENIGLENTKIKLSPSGFIETNEWYETSESNVYAIGDVAGPPCLAHKASHEAVICIEKIAGKNAHALKKECIPNCTYSHPQIASIGLTEEQAIKGGYDIKIGKFHSNFNGKSVALSETEGLVKTIIDKKTGEILGSHMIGAEVTELISNFALAKQLEGTDFDIKSTIFPHPTISEMIHESVLAADVK

SEQ ID NO: 6369 - protein, 500 aa, Debaryomyces hansenii CBS767
MNINPHLQYLQQQQQSQQPMNASVQSPQISQLQLQQQQQLQQQRQQLLNHHLQQQPQQQLGTPNASQVSTNPLLSAINASNQSGGSVNAGAGTSSNQTVNTALQIQLQQQLQQHQQQIFQQQLQGQHNHPVQQQQVPIIKEVWSHNLEQEFHALRSFVNDNKSSPVYIAIHQEIPGIVARPVGTFKSSSDYHFQTLRSNSDLLNLIQLSLCVTKVNKNNEIRSSIIWQFNFLYDLTKEMYNEEHLTMLSQTSQINFQLHMTQGIPHFAFAELITESGLLLDTSINWISYHAGYDLGFLISLLINDNLPLDEKDFYWWCSKYFPNFYDLKLIGNQLVNNFSNNNSNSNNSKSNGNSINNGPSNSVEMPTGGSNSDSSKNMISNNKPSIEYLAEELHLLPISPVIRQYFASSNSHFPGQQHQQMTSTLHAYLSMECFKELLRQAGYDNSILEKFKGVIWGLGSVYGSSTSEMTQQNGSVSNTTPSTPGTSAKSGVVHFGRPL

SEQ ID NO: 6370 - protein, 297 aa, Arabidopsis thaliana
  misc_feature (76)..(76): Xaa can be any naturally occurring amino acid
  misc_feature (182)..(182): Xaa can be any naturally occurring amino acid
  misc_feature (286)..(286): Xaa can be any naturally occurring amino acid
  misc_feature (292)..(292): Xaa can be any naturally occurring amino acid
  unsure (1)..(297): unsure at all Xaa locations
KQKKKWRNLTILFGFALRALLLVSAVADDVVVLTEDSVEKEVGKDKGALVEFYAPWCGHCERRAPEYEEGGASFKXKAKSVLIAKVDCDEQESVCTKGGVSGYPTIQWFPKGSREPQEYEGPRDAEALAEYVNEEGGTNVRGAAVPQDVVVLTPENVDEIFLDQDKDVLVEFYAPWCGHCEXRAPTYEKVATMFKQEEGVVIANVDADAQKALGEKYGVSGFPTLRCFPKDNKAGHDYDGGRHLDDFVSVINEKAGTSRDSEGQRTSKAGIVESVDALVKELVAAXEDEKKXVLSRI

SEQ ID NO: 6371 - protein, 584 aa, Zea mays
MSAAVACAERATNDMLIGPDWAVNIELCDIINMDPGQAKDTLKLLKKRLASKNSKVQILTLYVLETLSKNCGDIVHQQIVERDILSEMVKIVKKKPDLSVREKILSLIDTWQVAFGGPSGKYRQYHAAYQELRAAGVDFPPREENSVPLFTPPQTQPLRHPHLYTPPGQSYEDAAIQASLQSAPPAPALSLSEIQSARGIVDVLDEMLNALDHRHPEGVREEVIVDLVGQCRSYQSRVMDLVNSTGDESLLFQALGLNDELQRVVQRHDDIAKGIPPGTGAPLPASGNVNQGTAPPRPTAVSFSPLLNVHEDDEPEDEFSVLSRRSARDGAVAQNNVPSAPRNERPYPSPLLPPPPASKRPVYTEASSVDYLSGDSYKSEKVSDDFINPTAPANISTSSHSKAEAHPPPSYGGRPDRVSDDFINPTAPSFSAPSRPTNEEPARPSVKRQESLPDDDFINPTALPGFSSSSATKESGEDLPKAPWEAQAAAGSLPPPPARYGQRQQYFEQNVYSGGSNEGGYNGLTTQTEGLSLNPRSSENERSAARPAASRPAKPEDSLFKDLVDFAKTKPSSPSKPANSRRTR

SEQ ID NO: 6372 - protein, 283 aa, Triticum aestivum
  misc_feature (210)..(210): Xaa can be any naturally occurring amino acid
  misc_feature (231)..(231): Xaa can be any naturally occurring amino acid
  unsure (1)..(283): unsure at all Xaa locations
MQIFVKTLTGKTITLEVESSDTIDNVKGKIQDKEGIPPEQQRWILAGKQLEDGRTLADYNIQKESTLHLVLRLRGGMQILVKTLTGKTITLEVESSDTIDNVKAKIQDKEGIPPDQQRLIFAGKQVEDGRTLADYNIQKESTLHLVLRLRGGMQIFVKTLTGKTITLEVESSDTIDNVKAKIQDKEGIPPEQQRLIFAGKQIEDGRTLAXYTIQKESTLHLVPRLRGGMEXFVRTLTGKTITLGGEFLDPMDILKARIKDRGGIHRDRGGSILVGNSLGLAHP

SEQ ID NO: 6373 - protein, 470 aa, Bifidobacterium longum NCC2705
MRMYAAPSSEGAALISPAIFGAIWVETGNAAHCGLLLFFMSDELSPEVFDAVCRQADQAARAQERLAQANTEAKNELLLAIADALDEHAADIEAANALDMLESKENGMDAGKLDRLLFDVPRVAAAAQGVRHVATLPDPVGEIVRGYNLPNGLRLTQTRVPMGVIGMIYEARPNVTVDVASLCLKSGNAALLRGGHAAERTNAATLGVIAPVLEAHGFESALVQSVDQYGRAGATAMMEARGHIDVLVPRGGAGLIQAVVRNSKVPVIETGAGNVHIYIDKSGDLAKAIPIIINAKTQRVGVCNAAEKLLVHKDVAAEFLPQIAAALAEANVVLQTDTTSYGIISGAAIEGLDLNHAAEEDWDTEYLALKMGIKVVSDLDAAIDHINTHSTGHTESIIAEDYAAIEEFTKRIDSAVVMVNASTRFTDGGVFGFGAELGISTQKMHARGPMGLREMTTTKWIGYGTGQVRA

SEQ ID NO: 6374 - protein, 570 aa, Arabidopsis thaliana
MESFRRFSLLSFIALLAYFAFLASAEHHVHQFVITPTPVKRLCRTHQSITVNGQYPGPTLVVRNGDSLAITVINRARYNISIHWHGIRQLRNPWADGPEYITQCPIRPGQTYTYRFKIEDQEGTLWWHAHSRWLRATVYGALIIYPRLGSPYPFSMPKRDIPILLGEWWDRNPMDVLKQAQFTGAAANVSDAYTINGQPGDLYRCSRAGTIRFPIFPGETVQLRVINAGMNQELFFSVANHQFTVVETDSAYTKPFTTNVIMIGPGQTTNVLLTANQRPGRYYMAARAYNSANAPFDNTTTTAILQYVNAPTRRGRGRGQIAPVFPVLPGFNDTATATAFTNRLRYWKRAPVPQQVDENLFFTVGLGLINCANPNSPRCQGPNGTRFAASMNNMSFVLPRSNSVMQAYYQGTPGIFTTDFPPVPPVQFDYTGNVSRGLWQPIKGTKAYKLKYKSNVQIVLQDTSIVTPENHPMHLHGYQFYVVGSGFGNFNPRTDPARFNLFDPPERNTIGTPPGGWVAIRFVADNPGAWFMHCHIDSHLGWGLAMVFLVENGRGQLQSVQAPPLDLPRC

SEQ ID NO: 6375 - protein, 162 aa, Glycine max
MNREKLMKMAGSVRTGGKGTVRRKKKAVHKTTTTDDKRLQSTLKRIGVNAIPAIEEVNIFKDDVVIQFLNPKVQASIAANTWVVSGSPQTKKLQDILPSIIHQLGPDNLENLKKLAEQFQKQAPEGAAGSTTAQEENDDDDVPELVPGQDFETAAEETKAAS

SEQ ID NO: 6376 - protein, 256 aa, Chlamydia muridarum Nigg
MATLISLNDANRMLIAESQEDFLQIACYDWISTANKAIQKRGAFYVALSGGKTPLQIFQEIVKKRAAISDCSKIFVFWGDERASEDTEAGSNYLKAMDILKWLRIPDTQIFRMDTANPKGDEIYENLIREHVPDTIFDMVMLGVGEDGHTLSLFPGTAALEEKDRLVVFNEVPQLQTRRMTLTFPIVRQARHLVAYIQGTAKQDLCHKLLHPLGRDTFPIERVGTPLNPLQWVLSSDCCRAADLADIPAECKLEMF

SEQ ID NO: 6377 - protein, 402 aa, Glycine max
MAIQHHNDQLEHNENVSSVLDALYCDEGKWEEEEEEKEEEEDEGENESEVTTNTATCLFPLLLLEQDLFWEDEELNSIFSKEKVQHEEAYGYNNLNSDDDNNNNNNTSNNNVHLDSCLSQPRREAVEWMLKVNAHYGFSALTATLAVTYLDRFLLSFHFQREKPWMIQLVAVTCISLAAKVEETQVPLLLDLQVQDTKYLFEAKTIQRMELLVLSTLKWKMHPVTPLSFLDHIIRRLGLRTHLHWEFLRRCEHLLLSVLLDSRFVGCLPSVLATATMLHVIDQIQHSGGIEYKTQLLSVLKISKEKVDECYNAILQLSKANKYGHNNINNTSKRKYEQIPSSPSGVIDAAFCSDGSNDSWAVGSSLLYSPPEPLFKKSRTQGQQMNLSPLKRFIIGIVGTSP

SEQ ID NO: 6378 - protein, 340 aa, Colwellia psychrerythraea 34H
MSLLITGGTGYIGSHTVVELLQSTKEQEIVIVDNLSNSSTKVLERIKQITNKTVTFIKADVCDENALEQVFNEHKIEAVIHFAGLKAVGESNEIPLAYYQNNVSGTITLLRVMAKYQVKNLVFSSSATVYGNNVSPLNETMATSATNPYGQTKLMVEHVLFDLAKSDASWSIACLRYFNPIGAHQSGLIGENPNGIPNNLLPYVAQVAVGRLEQLQIFGDDYDTQDGTGVRDYIHVVDLAQGHVKALESLGHAKGTVKGCQAINLGTGNGTSVLEIVNTFKDISKQDIPYQVVPRRAGDLATVYADASLANELLDWQAKLDLTAMIQDTWRWQSENPNGF

SEQ ID NO: 6379 - protein, 66 aa, Flaveria trinervia
AYTLKRTRDPKYHVTLRPHISKEYAEPSKPADELIHLNPTSEYAPGLEDTLILTMKGIAAGMQNTG

SEQ ID NO: 6380 - protein, 540 aa, Streptococcus agalactiae A909
MAKDIKFSADARSAMVRGVDILADTVKVTLGPKGRNVVLEKAFGSPLITNDGVTIAKEIELEDHFENMGAKLVSEVASKTNDIAGDGTTTATVLTQAIVREGLKNVTAGANPIGIRRGIETAVSAAVEELKEIAQPVSGKEAIAQVAAVSSRSEKVGEYISEAMERVGNDGVITIEESRGMETELEVVEGMQFDRGYLSQYMVTDNEKMVSELENPYILITDKKISNIQEILPLLEEVLKTNRPLLIIADDVDGEALPTLVLNKIRGTFNVVAVKAPGFGDRRKAMLEDIAILTGGTVVTEDLGLDLKDATMQVLGQSAKVTVDKDSTVIVEGAGDSSAIANRVAIIKSQMEATTSDFDREKLQERLAKLAGGVAVIKVGAATETELKEMKLRIEDALNATRAAVEEGIVSGGGTALVNVIEKVAALKLNGDEETGRNIVLRALEEPVRQIAYNAGYEGSVIIERLKQSEIGTGFNAANGEWVDMVTTGIIDPVKVTRSALQNAASVASLILTTEAVVANKPEPEAPTAPAMDPSMMGGF

SEQ ID NO: 6381 - protein, 56 aa, Flaveria trinervia
MANRNLEKLASIDAQLRLLVPGKVSEDDKLIEYDALLLDKFLDILQDLHGEGLKET

SEQ ID NO: 6382 - protein, 460 aa, Trichodesmium erythraeum IMS101
MRILFVSAEATPLAKVGGMADVVGALPKVLRKMGHDVRIFMPYYGFLGDKMEVPEEPIWEGTAMYQNFKIYETVLPKSDVPLYLFGHPAFWPRHIYYGDDEDWRFTLFANGAAEFCWNGWKPEIVHCNDWHTGMIPVWMHETPDIKTVFTIHNLAYQGPWRWYLERITWCPWYMEGHNTMAAAVQFADRVTTVSPTYASQIQTPAYGENLDGLMSFITGKLHGILNGIDMNFYNPANDRYIPQTYDVNTLEKRVDNKIALQEEVGFEVNKNSFLMGMVSRLVEQKGLDLMLQVLDRFMAYTDTQFILLGTGDRFYETQMWQIASRYPGRMSVQLLHNDALSRRIYAGTDAFLMPSRFEPCGISQLLAMRYGSIPIVRRTGGLVDTVSFYDPINNVGTGYSFDRYEPLDLLTAMVRAYEGFRFKDQWQELQKRGMRENFSWDKSAQGYIKMYKSMLGLPEE

SEQ ID NO: 6383 - protein, 402 aa, Acinetobacter sp. ADP1
MMSEAYIIDAIRTPRGKGKKDGSLYEVKPITLLTTLLNELQQRHQLDTAKVDDIVLGCVTPIGDQGGDIAKTAAIAAGWNDDVAGVQINRFCASGLEAVNLAAQKVRSGWEDVVVAGGVESMSRIPMGSDGGPWALDPETNLKSSFVPQGIGADLIATLDGYSRADVDAFAVSSQQKAAAAQANGYFDKSIVPVKDHSGVMILEKDEFIKANTSVEGLAKLNASFEMMGQMGFDAVALQKYPEAQKINHVHHAGNSSGIVDGAAVVLLASEKAVKEQGLKPRAKVLATALVGTDPTIMLTGPAPAARKALQKAGLTIDDIDLFEVNEAFAAVVMRFINELQVPEDKVNVNGGAIAMGHPLGATGAMILGTLLDELERQGKKRGLATLCVGGGMGIATIIERV

SEQ ID NO: 6384 - protein, 492 aa, Haemophilus influenzae 86-028NP
MANYFNTLNLRQKLDQLGRCRFMDREEFADEANFLKGKKIVIVGCGAQGLNQGLNMRDSGLDISYALRPEAIAEKRASFQRATENGFKVGTYEELIPTADLVVNLTPDKQHSKVVADVMPLMKKDSAFGYSHGFNIVEVGEEIRKDITVVMVAPKCPGTEVREEYKRGFGVPTLIAVHPENDPKGEGLAIAKAWAAATGGHKAGVLESSFVAEVKSDLMGEQTILCGMLQAGSIVCYDKLVADGKDPAYAGKLIQYGWETITEALKQGGITLMMDRLSNSAKLRAFELAEQIKESLGFLYYKHMDDIISGHFSATMMADWANGDKDLFAWREATGKTAFENAPKYDGKISEQEYFDNGVLMIAMVKAGVELAFDAMVASGIYEESAYYESLHELPLIANTIARKRLYEMNVVISDTAEYGNYLFSNVATPILAKEIIPNLQKGDLGEPTPAVEIDNITLRDVNDAIRNHPVELIGQELRGYMTDMKRIAVAG

SEQ ID NO: 6385 - protein, 612 aa, Nitrosomonas europaea ATCC 19718
MNPTTHTLPTHNLDMISVETARTLDGLFRERVRRSPHATAYRDYDVSEEIWRDYTWDDMANAVKRWQMALSQENLSPGDRVAVMARNCPQWVMFEQAALGLGLVVVPLYTEDRAENAAWCLDNAGTALLLLENMTRWEAMNEAMTGLQQLKRIVILDASPEDVRQTGDKRAIALQDWLPETPGDIPSVQNDPHVLATIIYTSGTTGRPKGVMLSHNNILSNAYSSAQVVTVRPDDVLLSFLPLSHTFERTAGYYVPMLCGATVAYARSIRQLQDDLLIIRPTILISVPRIYERIYAGIQAKLAEGPAISRLLFKLAVDIGYSRFERQQKRVGWRISHLLWPLLDKLVARKVMEKLGGRLWQVMSGGAALSPEISRVFIGLGLPILQGYGLTETSPVVCANRLDDNLPSSVGRPAPGVEVRLGEQNALLIRGPNVMLGYWNNPEATHAILSADGWLNSGDTASIDAQSRVTITGRLKDIIVTSTGEKIPPADMEAAILRDPIFEQVMIVGEGRSYLSALTVLSKRGWEVVATHCNAKNDPHALACDEYAEEIILEKIARQISGFPGYAKVHRALLISEPWTVENEMLTPTLKLKRKKIYEHYQGEIDQLYASR

SEQ ID NO: 6386 - protein, 386 aa, Dactylis glomerata
MEGVEESNREAVQSCHRVLSLLSNPHGQLVPHKELVEATGEAVSKFGSVATKIATNGNGRQGHARVRKKINQPMPMFDSSLFLETTASAADAAAAKTSQPGPDTILRLFPRYQQVEGSSSKDPVRIPAQFPRRLLLENPSVGSNGPARGPPVQLVQPVSVAPPAGTPAPALPAAHLHFIQQQQSYQRFQLMHQMKLQSEMMKRGGLGEQGGSNGGVNLKFASSNCTGSSSRSFLSSLSMEGSMASLDVSRSSRPFQLVSGSQTSSTPELGLMQRKRCAGKEDGSGRCATGGRCHCAKKRKLRIRRSIKVPAISNKVADIPADEFSWRKYGQKPIKGSPHPRGYYKCSSVRGCPARKHVERCVDDPAMLIVTYEGDHNHNRAAAQPA

SEQ ID NO: 6387 - protein, 264 aa, Haemophilus influenzae 86-028NP
MDKSLKANCIGEFLGTALLIFFGVGCVAALKVAGASFGLWEISIMWGMGVALAVYATAGLSGAHLNPAVTIALWKFACFDGKKVIPYIISQMLGAFFAAALVYALYRNVFIDYETVHNIVRGTQESLSLAGTFSTYPHPSLSIGGAFAVEFVITAILMALIMALTDDGNGVPRGPLAPLLIGILIAVIGGAMGPLTGFAMNPARDFGPKFFAYLAGWGELALTGGRKIPYFIVPMVAPVLGALAGAWLYKKAIGGNLPCNCGCE

SEQ ID NO: 6388 - protein, 375 aa, Glycine max
  misc_feature (329)..(329): Xaa can be any naturally occurring amino acid
  unsure (1)..(375): unsure at all Xaa locations
MKKHIHIALFLLLVSPLIPIAVAQAQSQPNDFSDANLNQFSPSIAIIIVILVAALFLMAFFSIYVRHCADSPSTTVSPLTTARSRRAARGLDPAVIQTFPILEYSEVKIHKIGKEALECAVCLCEFEDTETLRLIPKCDHVFHPECIDEWLGSHTTCPVCRANLVPTDSEDAIANGNANGVVPVPETFTRDIEAQNDAVEAAPEQQNAEADPVLPEPEVVSLDKTLNRNRTRGSRSNRPRRFPRSHSTGHSLVQPGENTDRFTLRLPLEVRKQLINRQLQRASSLIVLPREGSLRQGYRTGGEGSSRGKISRRLDRSLKSDRWIFSMAXPFFARALSIRSPRVRNNDVEGTASSSSSSTAPILPPTAVDSARPLV

SEQ ID NO: 6389 - protein, 514 aa, Arabidopsis thaliana
MEISQRVKARLAVLTAHLAVSDTVGLEQVLPAIAPWCTSAHITAAPHGSLKGNLTIVDERTGKKYQVPVSEHGTVKAVDLKKITTGKDDKGLKLYDPGYLNTAPVRSSICYIDGDEGILRYRGYPIEELAESSTFIEVAYLLMYGNLPSQSQLADWEFTVSQHSAVPQGVLDIIQSMPHDAHPMGVLVSAMSALSIFHPDANPALSGQDIYKSKQVRDKQIVRILGKAPTIAAAAYLRTAGRPPVLPSANLSYSENFLYMLDSMGNRSYKPNPRLARVLDILFILHAEHEMNCSTAAARHLASSGVDVYTACAGAVGALYGPLHGGANEAVLKMLAEIGTAENIPDFIEGVKNRKRKMSGFGHRVYKNYDPRAKVIKKLADEVFSIVGRDPLIEVAVALEKAALSDEYFVKRKLYPNVDFYSGLIYRAMGFPPEFFTVLFAVPRMAGYLSHWRESLDDPDTRIMRPQQAYTGVWMRHYEPVRERTLSSDSDKDKFGQVSISNASRRRLAGSSAL

SEQ ID NO: 6390 - protein, 62 aa, Atropa belladonna
IKCGTGCGGCGMYPDVEKSTTFSVVQGVAPMNNYGRVEESAAAKGGNGCKCGSSCTCDPCNC

SEQ ID NO: 6391 - protein, 386 aa, Debaryomyces hansenii CBS767
MSSPCPYKQPEHKLTMIPGPIEFSDPVLYAMSTPSQAHTSPEFIKTFQTTLQNLRKLFKSTDSKAQPYVLAGSGTLGWDVVGANLVNPGDKVLVLSTGFFSDSFADCLKVYDANVDVITADVGDVLPLDKIAEKLKSEKYTAITITHVDTSTAVVSDIKAISDVVKKESPETLIVVDGVCSVGVENLEFDAWGIDFALTASQKAIGVPAGLSIFYASERAVTKALDRKKDSSFFASMKKWTPIMKAYESGSGAYFATPAVQTITALKVSLDEILGESLKTRFAKHEEISSQFKNHLAKSGLKILPVNDKVAAHGLTAVYFPEGINGADFLGKVAGKGFTIAGGIHKALVGKYFRVGHMGFSVYEGHVDKLTKAIDEALAEVGYKKQ

SEQ ID NO: 6392 - protein, 467 aa, Salmonella enterica subsp. enterica serovar Typhi Ty2
MVDQVKVAADEQAPAEQSLRRNLTNRHIQLIAIGGAIGTGLFMGSGKTISLAGPSIIFVYMIIGFMLFFVMRAMGELLLSNLEYKSFSDFASDLLGPWAGYFTGWTYWFCWVVTGMADVVAITAYAQFWFPGLSDWVASLAVVVLLLSLNLATVKMFGEMEFWFAMVKIVAIVALIVVGLVMIAMHFKSPTGVEASFAHLWNDGGWFPKGISGFFAGFQIAVFAFVGIELVGTTAAETKDPEKSLPRAINSIPIRIIMFYVFALIVIMSVTPWSSVVPDKSPFVELFVLVGLPAAASVINFVVLTSAASSANSGVFSTSRMLFGLAQEGVAPKAFAKLSKRAVPAKGLTFSCICLLGGVVMLMVNPSVIGAFTMITTVSAILFMFVWTIILCSYLVYRKKRPHLHEKSIYKMPLGKLMCWVCMAFFAFVLVLLTLEDDTRQALIVTPLWFIALGLGWLFLRKNKLAK

SEQ ID NO: 6393 - protein, 357 aa, Oryza sativa
MANLTDLVNLNLSDCSDKIIAEYIWVGGSGIDLRSKARTVKGPITDVSQLPKWNYDGSSTGQAPGEDSEVILYPQAIFKDPFRRGDNILVMCDCYTPQGEPIPTNKRHSAAKIFSHPDVVAEVPWYGIEQEYTLLQKDVNWPLGWPVGGFPGPQGPYYCAAGAEKAFGRDIVDAHYKACIYAGINISGINGEVMPGQWEFQVGPSVGIAAADQVWVARYILERVTEVAGVVLSLDPKPIPGDWNGAGAHTNFSTKSMREPGGYEVIKKAIDKLALRHKEHIAAYGEGNERRLTGRHETADINTFKWGVANRGASIRVGRDTEKEGKGYFEDRRPASNMDPYVVTGMIAETTLLWKQN

SEQ ID NO: 6394 - protein, 480 aa, Saccharophagus degradans 2-40
MSKCPYQTTSAGSPVADNQNSQTAGPRGPVLMQDYQLLEKLAHQNRERIPERVVHAKGWGAFGTFTVTKDISKYTRAKIFDTVGKQTPLLTRFSTVAGELGAADAERDVRGFAVKFYTEEGNWDLVGNNTPVFFIRDPLKFPDFIHTQKRHPKTNLRSPTAMWDFWSQSPESLHQITILMSDRGLPTDVRHINGYGSHTFSFWNNDGERFWVKFHFKTQQGHRHWTNEEAEKVVGKTRESTQEDLFSAIENGNYPKWTVNVQIMPEADAEKTSYNPFDLTKVWPHSEYPLIEVGEMELNRNAENYFAEIEQAAFSPSNVVPGIGFSPDKVLQARIFSYADAHRYRIGTHYEALPVNAPKCPVHHYHKDGSMNFFGNKSGSTDAYYEPNSFGGAVQNPDVAEPPLKISGDADRYNHREGNDDFSQPAALFNLFDDGQKQRLFNNIAGAMQGVPQNIIDKQLALFDKVDPAYGAGIRAALKA

SEQ ID NO: 6395 - protein, 300 aa, Triticum aestivum
MATAEEGEGGEVQPPGLGRGRCPRFRRSEATRDMAGGGGVGGKEDGGTEPLLLSVLALPATALPAVVSRLEAAVPRKARSYLPRNVPSAWWSLRIPFIQPLPPAGDPANEEEGRSPIWEPEAPPSVHLPRKPSKKKKRRRSRSEAPSAPWPANKGKRCQHCGSSETPQWREGPKGRATLCNACGVRYRQGRLLPEYRPMASPTFVPTKHANSHRKVLQLHRTRQSNDEHPSPLPADSVTNLPPIRDELPTTSTAGLASEDPTDAPGYTDNPINVPSSLDSLLLDGPSAPLIVESEDFAIS

SEQ ID NO: 6396 - protein, 124 aa, Zea mays
MKVFYDKDCDLSLIKGKTVAIIGYGSQGHAHAQNLNDSGVKVVVGLRKGGASWDKVGKAGLTVKEVNDAVKEADVVMILLPDEQIAEVYKNNVEPHIKQGASLAFAHGFNVHYNQVVPRADLDD

SEQ ID NO: 6397 - protein, 441 aa, Solanum tuberosum
MAIEIEQRPTVVRLSNVATSDTHGEDSPYFAGWKAYDENPFDEVHNPSGVIQMALAENQVSFDLLEEYLEKKKDDGIAEISRFRENALFQDYHGLVCFRKAMATFMEQVRGGRARFDPDRVVITAGATAANELLTFILADPGDALLVPTPYYPGFDRDLRWRTGVKIIPVHCDSSNNFQVTLQALEEAYKDAESNNIKVRGVLITNPSNPLGTTVQRCVLEEILEFVARKNIHLVSDEIYSGSAFCCSEFVSIAEILESRNYKDSERVHIVYSLSKDLGLPGFRVGTIYSYNDKVVTTARRMSSFTLISSQTQQLLASMLSDEKFTENYIKKNRERLRRRYEMMIEGLRSAGIECLRGNAGLFCWMNLSTLLEKPTKECELEVWNTILHEVKLNISPGSSCHCSEPGWFRVCFANMSENTLEIALKRIHHFMETRGILQKY

SEQ ID NO: 6398 - protein, 455 aa, Schizosaccharomyces pombe
MGRPLTEVKYLLINSAPVILGYALQNSLQTSSVIVTGRLGPSELSVAAFAYMFAMSTGWLIALGGTTAFDTLGSNLWGAGKKQELGILLQTGFIVLSILYLPICLVWWYSKPILIFLHQTPELAEASQKFLRYLIPGGLGYVCFELLKKFLQTQEITRAGSYILLVTSPLNVALNFLLVHYYGLGLKGAPLATGLSYWLSFILLTQYAKYVKGAEAWNGWNKRCLENFGPFVKLSLLGIVMVGTEWWAFEIVALVAGKLGAVPLAAQSVIMTTDQLLNTIPFGLGIITSNRVAYYLGAGLPDNASLTAKVAAIVGVAVGSVIMITMIAVRNIYGRIFTNDPDVIQLVALVMPLVAAFQISDSLNGTMGGALRGTGRQKVGAIVNITAYYLFALPLGIYLAFHGKGLVGLWIGQVIALSIVGILELKIVMATDWISQSRKAISRFGDSSELTALLN

SEQ ID NO: 6399 - protein, 267 aa, Bordetella pertussis Tohama I
MTIPSFGVGTFRLTGQTVIDSVRNAIDLGYRAVDTAQIYGNETEVGQTIAESGVARSELFVTTKIWTDNYARAKLLPSLRASLEKLRTDYVDLTLIHWPAPGNGVALPEHMEALAEAKALGLTRRIGISNFNIALTRQAIAAVGQGEIATNQIELSPYLQSARLTAFLREQGIAVTSYMTLAYGKVLKDPVLARIADKHRSTVAQVALAWALQQGYAVIPSSTKRENLASNLLARGLALDADDMARIAALERNGREVDPEGLAPAWD

SEQ ID NO: 6400 - protein, 163 aa, Ralstonia metallidurans CH34
MLLAIKDFFNSLLLKELFKGMALTGRYLFARKITVQFPEEKTPMSPRFRGLHALRRYPNGEERCIACKLCEAVCPALAISIESDVRNDGTRRTTRYDIDLTKCIFCGFCEEACPVDAIVETHILEYHGEKRGDLYFTKDMLLAVGDRYEPQIAAAKAADAKYR

SEQ ID NO: 6401 - protein, 161 aa, Arabidopsis thaliana
  misc_feature (25)..(25): Xaa can be any naturally occurring amino acid
  misc_feature (65)..(65): Xaa can be any naturally occurring amino acid
  unsure (1)..(161): unsure at all Xaa locations
VSCVHTYTLLAKSGKVLSEKLHWKXTCRRSMISRREHAIITSALHTVSDHGIGCLLHTGNYPEWXLRIQTMDPADDDKCDFDPLDVTKIWPEDIMPLQPVGSLVLNMTIDSFFNETEQLASNPDLEAPGMYYSDDKLLQRTIFAYGDTHRHRLEPNYLQLA

SEQ ID NO: 6402 - protein, 322 aa, Schizosaccharomyces pombe
MSSLEQLKATGTVVVSDTGDFESIAKYKPQDATTNPSLILAASKKPQYAALVDAAVDYAKAKGGSINSQIEIAFDRLLIEFGTKILAIVPGRVSTEVDARYSFDTQTTIEKARHLIKLYEAEGIGRERVLIKIASTYEGIQAAKQLEEEGIHCNLTLLFSFVQAVACAEANVTLISPFVGRILDFYKAKNNRDYTAQEDPGVVSVSNIFNYYKKFGYKTIVMGASFRNVGEIKELAGVDFLTISPALLEQLNNSTDAVPKKLDASKASSLNLEKVSYLTDEPKFRFDFNNDEMAVVKLSTGIAAFAKDADTLRTILKAKLEA

SEQ ID NO: 6403 - protein, 526 aa, Candida albicans SC5314
MSAQFITPKKRPHSPLDSNELLPSFEDPQDMINAVVSTLSAPEEKTNVSIAYANEKNQATEIQAYAKIAGKDWTFYVKSLAVSIGRNIELSAPSNTNITTPLIDIDLGPAKVVSRSHAAITYNLDLRCWELKVLGRNGARIDGQKVNVDSPNVNALHSGAILDIGGTQMMFILPDAPAVVAPKMLEKCLLRYKEQQQQQNKRISSGPGIGGSTSFQMFDKAHLTHSPSSISANSLQSNLDQDLSKEEAKDIKPPYSYATMITQAILSNPQGVMSLSEIYNWIADHYAYYKYSKTGWQNSIRHNLSLNKAFEKVPRRPNEPGKGMKWQISESYKEEFLNKISDGTISKTRRGSSVSRQLSLHLATHNQLPESHKYTMDQQIHNGTAASIPQQQKQQQQQQKRPPQQQNSQPHLSQPHYTIPSNPMQTNSMGYIPQSNIYNMSNSDRRYTPYQQSQNPLMYQHQQQHIGQTYNQLGRPQGQLGQPMMQPQQQSYTSSNIKTEPSSPKRNPSISNNTPKMAKGTGMYFK

SEQ ID NO: 6404 - protein, 250 aa, Bacillus caldolyticus
MKKKCIAMLLAGGQGSRLRSLTKNIAKPAVPFGGKYRIIDFTLSNCTNSGIDTVGVLTQYQPLLLHSYIGIGSAWDLDRRNGGVTVLPPYSASSGVKWYEGTANAIYQNMNYIEQYDPDYVLVLSGDHIYKMDYQQMLDYHIAKQADATISVIEVPWEEASRFGIMNTNENMEIVEFAEKPANPKSNLASMGIYIFNWPLLREYLQIDNADPHSSHDFGKDVIPRLLRENKRLVAYPFKGYWKDVGTVKS

SEQ ID NO: 6405 - protein, 322 aa, Oceanobacillus iheyensis HTE831
MSKPKVFVTRKLSSQFVKEYEEILDIRMWDKEEEPVPEEILRSQAKEVDALFTVLGDRIDETLLAEAKNLKVVANMAVGYDNIDIDAASKHGITVANTPDVLSETTADLGFSLLAATARRITEASTYVKEDNWKQWGPFLLAGTDIHHKTLGIVGMGRIGEALAKRATGFNMKIQYHNRSRKPEAEEKLQASYVSFEELLETSDFVVTVVPFTKETEELFNESAFKKMKASAIFINISRGKVVDETALIDALNHGEIKAAGLDVFYEEPIRADHPLVNMDNVVCLPHIGSASTETRTEMIHLCMKNIVEVTAGRVATTPVNN

SEQ ID NO: 6406 - protein, 437 aa, Corynebacterium glutamicum
MTHMTSSNTARSAEWFEKAQKLTPGGVNSPVRAFGSVGGQARFIEKAHGSTLIDVDGNEYVDLVCSWGPMLMGHAHPAVVEAVQKAVVDGLSFGAPTIGEVELAQDIVKRTSVEEVRLVNSGTEATMSAVRLARGYTQRSKILKFEGCYHGHVDALLASAGSGVATFALPDSPGITGAQTSDTIVVPYNDIEAVRNAFAEYPGEIACIIAEAAGGNMGTVAPKDNFNDKLLAIAHADGALLILDEVMTGFRTSYRGWFGIDKVAADLVTFGKVVSGGLPAAAFGGKAEIMNMLAPQGPVYQAGTLSGNPVAVAAGRASLKLADESLYTTINANADRLHGLISDALTHEGVAHHIQRASNMLSIRFAEGEGHNFSDMKAADTFRFAPFFHTLLDNGVYAPPSVFETWFVSSALTDDDFSKIEQALKPAARAAAEAKAS

SEQ ID NO: 6407 - protein, 318 aa, Oryza sativa (japonica cultivar-group)
MASAKAMAQDEHHFVLKSGHAIPAVGLGTWRAGSDTAHSVQTAITEAGYRHVDTAAQYGIEQEVGKGLKAAMEAGINRKDLFVTSKIWCTNLAPERVRPALKNTLKDLQLDYIDLYLIHWPFRLKDGAHQPPEAGEVLEFDMEAVWREMERLVTDGLVKDIGVCNFSVTKLNRLLQSANIPPAVCQMEMHPGWKNNKIFEACKKHGIHVTAYSPLGSSEKNLAHDPVVEKIANKLNKTPGQVLIKWALQRGTSVIPKSTKDERIKENMQVFGWEIPEEDFQVLCGIKDEKRVLTGEELFVNKTHGPYKSASEVWDNED

SEQ ID NO: 6408 - protein, 392 aa, Deinococcus radiodurans R1
MTEVTSVRPSSIKNAAVNLPYGGGKGGIRIDPRKYSQGELERVTRRYTTEIGLIIGPEKDIPAPDVNTGPQTMAWMMDTYSMNVGRTATGVVTGKPVSLGGSLGRADATGRGVFVTGAEAMKKLGMPLEGARIAVQGFGNVGEAAARIFHQHGAKIVAIQDVTGTIHSAAGIDPGKALAHLRQTGKITGLEGSEEMQKDDFWSVDCDVLIPAALEKQITLQNADKIRARLVVEGANGPTIPAADDLLAQKGVTVVPDVLANAGGVSVSYFEWVQDFSSFFWTEDEINERLDRIMREAFQSLWDVKEQHGVTLRTAVYIVACTRVLEARACAGCIRKSTREKGRFLDGAALFVGCWGAFRTFDRKRHPPPLFARPSPIKVKGQRQNRSFCQML

SEQ ID NO: 6409 - protein, 168 aa, Triticum aestivum
  misc_feature (133)..(133): Xaa can be any naturally occurring amino acid
  unsure (1)..(168): unsure at all Xaa locations
MAMPFASLSPAADHHRSSPIFPFCRSSPLYSVGEETAHQQQQQHTMSGARWAAMRPATFTAAQYQELEQQALIYKYLVAGVPVPPDLLLPIRRDFDSLASRFYHHHALGYGSYFGKKLDPEPGRCRRTDGKKXWRCSKEAAQDSKYCERHMHRGRNRSRKPVETQLVA

SEQ ID NO: 6410 - protein, 493 aa, Mesorhizobium sp. BNC1
MSTSARNRFPGVSFDPKALRSNLFIGGAWKEGATGNRIPVYDPSTGTVIAEVADAEVEDVMGAIDAAHEALPGWAATPPRHRSEVLRRCFELMIENRDMLAELISLENGKTLADAQGEVAYAAEFFRWFAEETVRLNGELYKAPSGANRILVQHQPIGVSVLVTPWNFPAAMATRKIGPALAAGCTVILKPATETPLTAYALAALCAEAGVPDGVVNVYTSSRSGKTVSAMLHDPRVRKLSFTGSTEVGRILLREAADKVISCSMELGGNAPFIVFDDADLSAALDGAMVAKMRNGGEACTAANRFYVQSGIADAFAKGLAERMKALAIGKGYETGSQCGPLINKDAVERISGLVEEAQSRGARVLAGGKALNREGYYFPPTVIDNVDPASAIMSEEIFGPVAPIIRFDSEDEVLSAANGTEYGLMAYVYTQDLSKGLRVSEKIESGMVGLNRGLVSDPAAPFGGVKQSGLGREGSHHGILEFTETKYIATNW

SEQ ID NO: 6411 - protein, 394 aa, Prochlorococcus marinus str. MIT 9313
MATTQTLPQVDQSHKTVLEPIATPSRLLFGPGPSNADPKVLQALARSPIGHLDPLYLELMGEVQELLRYTWQTDNRFTLPMSGTGSAAMEATLANTVEPGDTVLVAVNGYFGNRLADMAARYRANVQLIEKPWGEAFSLAELEAALSEHRPAILALVHAETSTGVCQPMDGVGDLCHKHDCLLLLDTVTSLGAVPVFLDQWKVDLSYSCSQKGLSCPPGLGPFTMGPRAEEKLVARSSKVPNWYLDVSLLNQYWGSDRVYHHTAPVNMNFGMREALRLLADEGLENAWDRHRCNAEVLWAGLESLGLELHVPEALRLPTLTTVCIPNGVDGNAFRLHLLNEHGIEIGGGLGSLAGKIWRIGLMGYNSTPKNVELLLNLFESELPRFRENVAVAA

SEQ ID NO: 6412 - protein, 215 aa, Clostridium perfringens str. 13
MKIFIDTANVEEIRKASKLGVLAGVTTNPSLIAKEGRDIKEVIEEICSIVDGPISAEVMALECDEMVREGRELAKIHKNIVIKIPMCEEGLKAVKVLASEGIRTNVTLIFSPLQALLAARAGASFVSPFLGRLDDIGNPGIEIVTQIAEMFALHGIDTEIISASVRNPMHVLDSAMAGSHIATIPYNVILQMVKHPLTDAGMKKFIEDYNKAFNK

SEQ ID NO: 6413 - protein, 81 aa, Atropa belladonna
MSCCGGNCGRGSGCKCGNGCGGCKMYPDMSYTESTTTETLVLGVGPEKTSFDAMEFGESLIAENGCKCGSDCKCDPCTCSK

SEQ ID NO: 6414 - protein, 363 aa, Arabidopsis thaliana
MEESINQNPEAMEALISNLFGNISSLKSAYIELQSAHTPYDPEKIQAADKVVISELKNLSEMKHFYRENNPKPVCVSPQDSRLAAEIQEQQSLLKTYEVMVKKFQSEIQNKDSEITQMLQKIEEANQKRLKLEKNLKLRGMSTNQGSGGDGNLQFPDLTTELFVSTYEAAAKVVHDFSKPLINMMKAAGWDLDTAANSIEPDVVYAKRPHKKYAFESYICQRMFSGFQQKNFSVNSESAAVMANDDTDTFFRQFLALKDMDPLDALGTNPDSNFGIFCRSKYLLLVHPKMEASFFGNLDQRDYVTGGGHPRTAFYQAFLKLAKSIWILHRLAYSFDPAAKIFQVKKGSEFSDSYMESVVKNIH

SEQ ID NO: 6415 - protein, 634 aa, Methanococcoides burtonii DSM 6242
MCGICGYAGFDDEDLLGKMCDAIVHRGPDDSGSFTDKGIGLGHRRLSIIDLEGGHQPVCNEDGTIYVVYNGEIYNFLSLRDELEKRGHRFQTSSDTEVIVHLYEEYGKDLVHHLRGMFAFALWDSNTRTLLLARDRLGVKPLYYTTIDNRLLFASEIKSIVQYSGYEKAVDIGTLHDYLTFRHALGTETMFAGIKKLLPGHVMTYREGEVNISEYWDVPLVTVGNESEDFYIKKTRLLLEESVKMRLMSEVPLGIYLSGGIDSGIVTGLMSKMVDEPIETFSVGFGERGEIGELSQAQEAADFFGTNHHEIIVDQGAFKQNLKDIIWHNDEPIADPSALAMFQLSKMASKHVTVVLNGAGGDEVFGGYISYKVGLANQKYHKIVPKVIRQGLVRPFVNAISPHLSSKMYVGIQSATQEVEEHGFLFTKSVFSEEDKEDIYTDKIKDKIHHNTFEKATTSLFRGKRYSGAIDERSSAKNTDLLSKMMYADTKSYLVDHILLETDKLTMSSSIEARVPIIDHKVVEFAASIPQELKLRGMTEKYILKKVGQGMLPPAAQNRKKRPFRIPIDTWFKDELHEMSQQVLDESSIVEQGYFRPEVVKDIMKKHERAELLYNHQMYALLVFEMWHERFMKM

SEQ ID NO: 6416 - protein, 303 aa, Methanococcoides burtonii DSM 6242
MRIWSKNMNNDSIAITGSRGFIGTRLTAQLRLKGLDLLEISHSLDSIDITNWEQVKTIPKRDVLVHLAGMTNIPESFNHPRDVYTINTFGTLNMLEWCRLNDVKRFIYASTFVYGNPQYTPVDEKHPTLPNNPYSQSKLIGEELCNAYCRDYGIDVISLRLFNVYGPHQKGDYLIPHIIRQLESGKVSLKDPLPKRDFVYIDDVIDSFECALDSGLGGCNVFNIANGKSNSVREIADMLAETYFFEKGQRADIDYTCEKRQSEVSDTIANIEKAKNIIKWEPKTDIKTGLAQTLRTYLNEYKK

SEQ ID NO: 6417 - protein, 510 aa, Sorghum bicolor
MERATQQQDDPRPHFVLVPWQGGISHIIPMTDIGRLLASHGAAVTIITTPANAPLVQSRVDDDDDLVTTPPEGAITVTAIPFPAAEAGLPPDDGCERLDLLRSPADVPRFFAANRHFGEAVASYCRAGEAMPRRPSCVVAGMCHTWALGMARELAVPCYIFHGFGAFALLCIEYLYKHRPHEAADDDDGLVVNIPALPAPFDDCCRLSRAQLPPHFAPSTAVGGGAMQEIREFDVAVDGVVVNTFDELEHGSCELLAAATGKAVVAVGPVSLCRRRSPDLDPQAMADDDARRVMEWLDAKETTRSVVYVSFGSAGCMPPAQVRQLGMALASCPWHVVWVVKGADAMPGDVKKWLSESFDSDKCLVVRGWAPQVAILAHRTVGGFLTHCGWGSTLEAIAAGVPMATWPLFAEQFLNERLIVDVLGVGVSVGVTRPTENVLSAGKLNGGGADVEAEVGMEQVMKALERLMDEGDEGEQRRKKAQELKAKANGALEKGGSSYMNLEKLIQCAS

SEQ ID NO: 6418 - protein, 238 aa, Methanococcoides burtonii DSM 6242
MLFNNMQAVILAGGKGTRLAPYTTVLPKPLMPIGDMPILEIVIRQLKKNGFTDIVLAVGHLAGLIEAYFGDGSKWGVNITYSIEDEPLGTAGPLSLIDDLDENFLVMNGDLLTNVNYSDLMRFHLENDALSTVSVYTKDVPISLGVLELDDNGKITDYIEKPTLKYKVSMGIYVFNRKILEHIKKGEYLDFPDLIKNLISLNENVSGYMFEGYWMDIGRYEDYSKVLEEFESMKDELL

SEQ ID NO: 6419 - protein, 558 aa, Bacillus cereus
MEKQWWKESVVYQIYPRSFMDSNGDGIGDLRGIISKLDYLKELGIDVIWLSPVYESPNDDNGYDISDYCKIMNEFGTMEDWDELLHEMHERNMKLMMDLVVNHTSDEHNWFIESRKSKDNKYRDYYIWRPGKEGKEPNNWGAAFSGSAWQYDEMTDEYYLHLFSKKQPDLNWDNEKVRQDVYEMMKFWLEKGIDGFRMDVINFISKEEGLPTVETEEEGYVSGHKHFMNGPNIHKYLHEMNEEVLSHYDIMTVGEMPGVTTEEAKLYTGEERKELQMVFQFEHMDLDSGEGGKWDVKPCSLLTLKENLTKWQKALEHTGWNSLYWNNHDQPRVVSRFGNDGMYRIESAKMLATVLHMMKGTPYIYQGEEIGMTNVRFESIDEYRDIETLNMYKEKVMERGEDIEKVMQSIYIKGRDNARTPMQWDDQNHAGFTTGEPWITVNPNYKEINVKQAIQNKDSIFYYYKKLIELRKNNEIVVYGSYDLILENNPSIFAYVRTYGVEKLLVIANFTAEECIFELPEDISYSEVELLIHNYDVENGPIENITLRPYEAMVFKLK

SEQ ID NO: 6420 - protein, 766 aa, Mycobacterium bovis AF2122/97
MAIAETDTEVHTPFEQDFEKDVAATQRYFDSSRFAGIIRLYTARQVVEQRGTIPVDHIVAREAAGAFYERLRELFAARKSITTFGPYSPGQAVSMKRMGIEAIYLGGWATSAKGSSTEDPGPDLASYPLSQVPDDAAVLVRALLTADRNQHYLRLQMSERQRAATPAYDFRPFIIADADTGHGGDPHVRNLIRRFVEVGVPGYHIEDQRPGTKKCGHQGGKVLVPSDEQIKRLNAARFQLDIMRVPGIIVARTDAEAANLIDSRADERDQPFLLGATKLDVPSYKSCFLAMVRRFYELGVKELNGHLLYALGDSEYAAAGGWLERQGIFGLVSDAVNAWREDGQQSIDGIFDQVESRFVAAWEDDAGLMTYGEAVADVLEFGQSEGEPIGMAPEEWRAFAARASLHAARAKAKELGADPPWDCELAKTPEGYYQIRGGIPYAIAKSLAAAPFADILWMETKTADLADARQFAEAIHAEFPDQMLAYNLSPSFNWDTTGMTDEEMRRFPEELGKMGFVFNFITYGGHQIDGVAAEEFATALRQDGMLALARLQRKMRLVESPYRTPQTLVGGPRSDAALAASSGRTATTKAMGKGSTQHQHLVQTEVPRKLLEEWLAMWSGHYQLKDKLRVQLRPQRAGSEVLELGIHGESDDKLANVIFQPIQDRRGRTILLVRDQNTFGAELRQKRLMTLIHLWLVHRFKAQAVHYVTPTDDNLYQTSKMKSHGIFTEVNQEVGEIIVAEVNHPRIAELLTPDRVALRKLITKEA

SEQ ID NO: 6421 - protein, 356 aa, Helminthosporium solani
QLERMNVYFNEASGNKFVPRAVLVDLEPGTMDAVRAGPFGQLFRPDNFVFGQSGAGNNWAKGHYTEGAELVDQVLDVVRREAEGCDCLQGFQITHSLGGGTGAGMGTLLISKIREEFPDRMMATFSVMPSPKVSDTVVEPYNATLSVHQLVENSDETFCIDNEALYDICMRTLKLNNPSYGDLNHLVSAVMSGVTTCLRFPGQLNSDLRKLAVNMVPFPRLHFFMVGFAPLTSRGAHSFRAVSVPELTQQMFDPKNMMAASDFRNGRYLTCCGIFRGKVSMKEVEDQMRNVQNKNSSYFVEWIPNNVQTAICSIPPRGLKMSATFVGNSTSIQELFKRVGDQFTAMFRRKAFLHWY

SEQ ID NO: 6422 - protein, 574 aa, Aspergillus niger
MANTPHGGVLKDLLARDAPRHDQLAAEAEILPALTLTERQLCDLELIMNGGFSPLEGFMNQKDFDGVCENCRLADGNVFSMPITLDASQKTISELKLQAGSRLTLRDFRDDRNLAILTIDDIYRADKQKEAKLVFGGDPEHPAIKYLNNTVQEFYIGGKIEAVNKLNHYDYVALRYTPAELRVHFDKLGWSRVVAFQTRNPMHRAHRELTVRAARARQANVLIHPVVGLTKPGDIDHFTRVRAYQALLPRYPNGMAVLGLLGLAMRMGGPREAIWHAIIRKNHGATHFIVGRDHAGPGKNSKGEEFYGPYDAQHAVEKYKDELGIEVVEFQQVTYLPDTDEYRPKDEVPAGVKTLDISGTELRKRLRTGAHIPEWFSYPEVVKILRESNPPRASQGFTIFLTGYMNSGKDAIARALQVTLNQQGGRSVTLLLGDTVRHELSSELGFSREDRHTNIQRIAFVAGELTRAGAAVIAAPIAPYEESRKAAREAVAGSGGNFFLVHVATPLEHCEKTDKRGIYAKARRGEIKGFTGVDDPYEAPANADLTVDVSKQSVRSIVHEIILMLESEGYFERL

SEQ ID NO: 6423 - protein, 68 aa, Oryza sativa
MISCFSHVNILLFEMVPAAQARECETPTNEFKGICMMVANCANVCLTEGFSGGKCSGFRRRCMCTKDC

SEQ ID NO: 6424 - protein, 572 aa, Oryza sativa (japonica cultivar-group)
MTAAPGSLPLVNSRPVSLSLAASRSSFSSLLSGGAGSSLNLMTPPSSLPPSSPSSYFGGVSSSGFLDSPILLTPSLFPSPTTTGALFSWITTATATAAIAPESQVQGGVKDEQQQYSDFTFLPTASTAPATTMAGATATTSNSFMQDSMLMAPLGGDPYNGEQQQPWSYQEPTMDADTRPAEFTSSAAAGDVAGNGSYSQVAAPAAAGGFRQQSRRSSDDGYNWRKYGQKQMKGSENPRSYYKCTFPGCPTKKKVEQSPDGQVTEIVYKGAHSHPKPPQNGRGRGGSGYALHGGAASDAYSSADALSGTPVATPENSSASFGDDEAVNGVSSSLRVASSVGGGEDLDDDEPDSKRWRRDGGDGEGVSLVAGNRTVREPRVVVQTMSDIDILDDGYRWRKYGQKVVKGNPNPRSYYKCTTAGCPVRKHVERASNDLRAVITTYEGKHNHDVPAARGSAAAALYRATPPPQASNAGMMPTTAQPSSYLQGGGGVLPAGGYGASYGGAPTTTQPANGGGFAALSGRFDDDATGASYSYTSQQQQQPNDAVYYASRAKDEPRDDGIMSFFEQPLLF

SEQ ID NO: 6425 - protein, 625 aa, Oryza sativa (japonica cultivar-group)
MYPVVTGPPPARLPASTRVDKATSHLLQGPDWAINLEICDTLNADRWQTKDVVKAVKKRLQHKDPRVQFFTLTLLETMMKNCGEYVHFEVVEQHILQEMVRIVQKKHDTQVRDKVLILLDSWQEAFGGPGGKYPQYYWSYIELKRSGIMFPRRPVDAPPIFTPPATHHTQSYGSPTYPAGSLNERMTSDVETLSLGDLNNIRDTTELLCDMVNALNPSDRMAVKDEIISELVTQCRSNQQKLMRFVSSTGNEELLKQGLEINDHLQSVLAKHDAIASGAPLPVETPRKDEIPREDPKIKPSAPPIAPPSAPPVEEDEDDEFAQIARRKNKSVISSDEASSSAGDQALVPVDPVTSEASSSVASNAVVPVDSSPASGTRTREQDMIDLLSLTLYSPPEASTDSSSQTQNGTQQSVTSNGPELPPNYQPAASNGSHYSSNQQAYPTNQAYTPYNNYVVPWAQAGQGTQAGGAYQTQPMQQYGSSYPAPPWAMPASVNSTNPFQPATYQMQNPPVASVAPTNTYPAPSSPYAAPPRQQVPSPATKPMQQYNSFVSQTRSGPAMAQDVRMNGNPRPSETTAAAAKPYYMPDNLFGDLIDVKSYGGGKMSRTASMPSPNGSGQPLLGGKK

SEQ ID NO: 6426 - protein, 449 aa, Streptococcus agalactiae A909
MTSGKTYVASVLEKVKKQNEHEEEFLQAVEEVFESLVPVFDKYPQYIEENLLERLVEPERVISFRVPWVDDKGQVQVNRGYRVQFSSAIGPYKGGLRFHPTVTQSIVKFLGFEQIFKNSLTGLPIGGGKGGSNFDPKGKSDNEVMRFTQSFMTELQKYIGPDLDVPAGDIGVGGREIGYLYGQYKRLNGYQNGVLTGKGLTYGGSLARTEATGYGAVYFAKEMLAACGQDLTGKVALVSGSGNVAIYATEKLQELGATVVAVSDSSGYVYDPDGIDLETLKQIKEVERARIVKYTEKHPKANFTPADQGSIWSIKADLAFPCATQNELDEEDAKLLVENGVLAVTEGANMPSTLGAIKVFQKAGVAFGPAKAANAGGVAVSALEMAQNSSRRAWTFEEVDQELQRIMKTIFVNASKAADEFGDSGNLVLGANIAGFLKVAQAMSAQGIV

SEQ ID NO: 6427 - protein, 391 aa, Deinococcus radiodurans R1
MTGTVGVMSDPLPAHLPLNRERLIAPGPVEVAPDVLLALAQPQMHHRAPQGVAKLMEAREKLTRLLGDPYDAVITTSSGTGAFEGALVSTTPTGAKVVNAQAGKFSERWGDMAKRFSYDTQIVAKPWGEMLDPDEVADACRGAHTLTITHSETSTGALHDLEAIAGAAKAQNPDLIIIADCITSYGNAELRPAAWGVDVVVSGSQKGTATPPGLGFVLFSPEVQGRMIKNTPHGFYLDMTRELAGQKAGSTPQTPAINLIYALSVALDHLLRVPLEVLWAEQRRKTDALIAAGTALGAPAWAARPSAAVAVLRPPEGIGGKQVAARLAEMGQRALPGQAPHEDTVFRVSTMGYADRYDTLGIAGMLEDCFASLGVQFERGAGVQAAWEVLR

SEQ ID NO: 6428 - protein, 278 aa, Streptococcus agalactiae A909
MIVGEQEARALIKPRPKSSHKGDYGSVLLIGGFYPYGGAIIMAALACVKTGAGLVTVATQSCNIPSLHSQLPEVMAFDSDDYKWLEKSIVQSDVIVIGPGLGVSESSRKILNQTMEKIQSHQSVILDGSALTLLSEGAFPQTKAKNLVLTPHQKEWERLSGIAVSQQTKENTQTALKSFPKGTILVAKSSHTRIFQDLDEKEIIVGGPYQATGGMGDTLCGMIAGMLAQFKEASPLDKVSVGVYLHSAIAQGLSKEAYVVLPTTISDEIPKEMARLSK

SEQ ID NO: 6429 - protein, 487 aa, Brucella melitensis 16M
MLALKDPSLLKSQCLVNGRWIDAADGTTIKVTNPADGSVIGTVPSLSVATIKEAIDASAKALSGWAAKTAKERAGILRKWFDLIIANADDIALIMTSEQGKPLAEARGEVLYAASFIEWFAEEAKRVYGDTIPAPQNGQRLTVIRQPVGVTAAITPWNFPAAMITRKAAPALAAGCTMIVRPADLTPLTALALGILAEKAGIPAGVLQIVTGKAREIGAELTSNDTVRKLSFTGSTEVGRLLMAQCAPTIKRISLELGGNAPFIVFDDADLDAAVDGAMVSKYRNAGQTCVCANRIYVQRGVYDKFAEKLAAKVKELKVGNGTEPGVVIGPMIEEKAITKVKAHIEDAVSKGAKLITGGKELGGLFFEPGILTGVTSDMLVAKEETFGPLAPLFAFDTEEEVIAQANDTIFGLAAYFYTENFSRAIRVSEALEYGMVGHNTGLISNEVAPFGGVKQSGLGREGSKYGIEEYLETKYICSAYKRGAKK

SEQ ID NO: 6430 - protein, 308 aa, Burkholderia sp. 383
MTAAFPEILALGEAMIEFNQSQPGRPEFLQGFGGDTSNFCIAAARQGASTGFVSAIGDDPFGRLLADMWRAEQVDTTYVRVDRSAPTGVYFVTHGADGHQFDYLRAGSAASRYAVGDLPLDALAAAKAVHLSGISLAISTAACDAAFAGIDHARRNGAKVSFDTNLRLKLWPLPRARAVMREALRQTDICLPSWDDVTALTGANDRDAIVDAMLEHGPQVVALKLGKEGAYVATPNERRVVPGFAVEAVDATGAGDCFGGAFVARIVAGDDPFAAARYANAAAALSTTGYGAVAPIPHRDAVERLMQG

SEQ ID NO: 6431 - protein, 395 aa, Vibrio fischeri ES114
MLQNIATPAKDPILSLSIEYRADDRDNKVDLGIGVYRNDQGLTPIMKAVSDSVKSIAAEQTTKAYVGLAGCEVFNQSMVDLLLRDTSAYERVSAIQTPGASGALRMLADLIKSTEPGATVWISNPSYVNHQPVMEAAGLNVRHYTYFNPLTKQVDSEAMLADLANAGPKDIILLHGCCHNPTGADIRLSDWIAITELALKNGFIPFVDIAYQGFGDGLEADAAGLRFMADRVPQMFIATSCSKNFGLYRERTGAAMVIAGNIEIAMNAKAKLLQMARATYTMPPDHGAAIVGRILNDEQLTLSWRTELDEMQKRLVGLRTNLCEALRNETQSETFDFIEQHKGMFSVIGFTPEQMASLKSEHGIYAVGDGRINIAGMQEKHIEYIAKSVASVANK

SEQ ID NO: 6432 - protein, 411 aa, Glycine max
MNALAATNRNFKLASRLLGLDSKLEKSLLIPFREIKVECTIPKDDGTLQSYVGFRVQHDNARGPMKGGIRYHPEVDPDEVNALAQLMTWKTAVANIPYGGAKGGIGCDPAELSISELERLTRVFTQKIHDLIGTHTDVPAPDMGTGPQTMAWILDEYSKFHGYSPAVVTGKPIDLGGSLGRDAATGRGVLFATEALLNEYGKSVSGQRFVIQGFGNVGSWAAQLISNKGGKVVAVSDITGAIKNSNGLDIPSLLEHSKVHRGVKGFNGSDPIDPNSILVEDCDVLVPAALGGVINRENANEIKAKFIVEAANHPTDPEADEILKKKGVVILPDIFANSGGVTVSYFEWVQNIQGFMWDEEKVNNELKTYMTKGFKDVKEMCKTHECDLRMGAFTLAVNRVARATVLRGWEA

SEQ ID NO: 6433 - protein, 526 aa, Nicotiana tabacum
MDSARGWFQKLSSTKKDPMASGREDGKPVSAEEASNITKQRVAAAKQYIEKHYREQMKNLQERRERRILLEKKLADADVSEEDQNNLLKFLEKKETEYMRLQRHKMGADDFELLTMIGKGAFGEPICMIGFSVITGQNCREKTTGQVYAMKKLKKSEMLRRGQVEHVKAERNLLAEVDSDCIVKLYYSFQDDDYLYLVMEYLPGGDMMTLLMRKDILTEDEARFYVAETVLAIESIHKHNYIHRDIKPDNLLLDRYGHLKLSDFGLCKPLDCSTLEEKDFSVGDNANGGSRSDSPPAPKRTQQEQLEHWQKNRRMLAYSTVGTPDYIAPEVLLKKGYGMECDWWSLGAIMYEMLVGYPPFYSDDPMSTCRKIVNWKNHLKFPEEAKLSPEAKDIISRLLCNVTERLGSNGADEIKVHSWFKGIDWDRIYQMEAAFIPEVNDELDTQNFEKFEESESHSQSGSRSGPWRKMLSSKDINFVGYTYKNFKVVNDYQVPGMVELKKTNTKPKKPTIKSLFGDESEASEDN

SEQ ID NO: 6434 - protein, 499 aa, Oryza sativa (japonica cultivar-group)
MGRKPDPSKPHYGGGASPRAARRTQPSPVFLGTALFVLGFVSLFTGHIVTDADWSRIRSRWRSKQVRNNEPINIWKSRYSNLYYGCSRRSVNFRSAVPENSSTGYLLIGTSGGLNQQRIGITDAVVVARILNATLVVPELDHHSFWKDDSDFSDIFDVDWFISYLSKDVTIVKRIPYEVMMSMDKLPWTMRAPRKSMPDFYIDEVLPILMRRRALQLTKFDYRLTNELDEELQKLRCRVNFHALRFTNSIQTLGEKLVRKLRSMSSRYVAVHLRFEPDMLAFSGCYYGGGDKERRELGEIRKRWDTLPELSAEDERSRGKCPLTPQEIGLMLRALGFSNDTYLYVASGEIYGGEETLQPLRDLFPNYYTKEMLAGNDLKPFLPFSSRLAAIDFIVCDGSDVFVTNNNGNMAKVLAGRRRYMGHKRTIRPNAKKLNLLFKRRKQMGWDIFSQKVKKVQRGLMGEPDDIRPGRDDFNEFPSSCICQRIPVNRSVTARAENL

SEQ ID NO: 6435 - protein, 116 aa, Zea mays
MYNISLYYSYGEGLAQDPVRAKRWLPLAADCGHKKALYECDIKLCAVAVQCAQELGRPQPDGLSLCLCSTEFQVSNYLPYEPVKQIIPYLITCIEENKGLLSVSSFDMPRARRLFG

SEQ ID NO: 6436 - protein, 139 aa, Glycine max
GLRKGSRSFAEARAAGFSEENGTLGDIWETVSGSDLVMLLISDSAQADNYEKILSHMKPNSILGSPFTFATTLEQEYRSDIFGERGILLGAVHGVVESLFRRYTDNGMNEDLAYKNTVESITGIISKTISTKGMLAVYN

SEQ ID NO: 6437 - protein, 317 aa, Methanococcoides burtonii DSM 6242
MKVFVSTHPFSSTSQTPLELLKSNEIDVILNSHERKITTRELASDIGNSDVLIAGTERITEEVIKNAPNLKLISRVGVGLDGVNFELCNKYGIKVTYTPDAPTMAVAELCVGIILDLSRKISYTDRNVRKGVWDRYMGNLLYGKTVGIFGMGRIGKSLVHLLSSFNVKFLVNDITPDFSFGRLYNIEFVSKNDVLEKSDIISINIPLKKDTYDFITLNEIKKMRSNAILINTARGGIVNESDLYEALKNSMISGAGIDVFEEEPYKGKLTELGNCVLTCHVGASTINSRTEMETQAVEEVIRFKNERPLKNEVFANE

SEQ ID NO: 6438 - protein, 488 aa, Psychrobacter arcticus 273-4
MLKTTLNLSNPDLIKQQCLIKDGWYAANDEATIEVSNPFNGDVIGTVPSLTTADVNDAVTYSHEAQITWAAKTPQERAQLLQKWADLIDANKEDLAIIMTAEQGKPLAESRGEIGYANSFIRWFAEEGKRVYGDVIPATNSQLRYVVLKQPVGVCAAITPWNFPAAMITRKAAPALAAGCTIIIKPATETPFSALALGALAEQAGIPAGVIQVVTGKSSTIGDILTGDARIHKLSFTGSTEVGRTLMAQCAPTIKKLSLELGGNAPFIVFDDADLEKAADGLIASKYRNAGQTCVCANRVYVQDSIKDEFLGIFIKKVAELKVGNGMEEGVNVGPLINEKALQKVQALLKDALDKGATLIAGGSTNNASALAYNPTVITDISADMDIASEEIFGPIAPVFTFSSEEEVIRAANDTIYGLAAYFYSSDYARAWRVTEGLEYGMVGHNTGMLSTEVAPFGGVKQSGFGREGSKYGIEEYVVTKYWCSDVS

SEQ ID NO: 6439 - protein, 453 aa, Sinorhizobium meliloti 1021
MLVQATNRLRQASARSRSKHLFDRAKGVFTDGTTRASVERDPFPIYAQRGEGAYLVDVDGNRLLDLNNNFTTLIHGHGFAHVSEAVVDLLRLGTCFANPTEHEIALAELLTARIPAMERVRFVNSGTEAVMFAIKAARAFTARPAIARIEGAYHGAYDWAEAGQGVSPGKDGWDPIPIPTPTYRGTPSSVADEVHLLRFNDVEGLERRLSAASDRIACVLIDPMPSRAGLLHPEPTFIEALSETAHKYGILIVADEVLNLRQGYAGASPRYGLKPDLVTAGKIIGGGFPIGAIGGREEVMRVFGTENARPLLPQGGTFSANPVSMAAGLAAMEAMTPDAFDRLEAMGERLRAGLRASIASRDARFSVTGAASLFRIHPKRVAPLEYRDAHLSAEEAWIMRTMSRYFLEAGILLPYGAAACLSTPMVHSDIDRILSAFDEFLEAKIGPEKERAK

SEQ ID NO: 6440 - protein, 163 aa, Candida albicans SC5314
MSDFYEFAPNDIKGTPYSFKKLQGKVVLIVNVASKCGFTPQYKGLQDLKQKFADQPVEILGFPCNQFGHQEPGTNEEIEKYCREYFGVTFPVLSKVETNGKNAEPVYKFLKSQKPGLLGLHRIMWNFEKFLIDQDGNVVARFSSFTKPETIGLRIEEMLKHQA

SEQ ID NO: 6441 - protein, 140 aa, Carboxydothermus hydrogenoformans Z-2901
MTKLNGTGLLKGLAITFKELWKKPVTLEYPEHKEKLPPRFHGSFTLHSEKCIACGLCQQACPNKVIKVGSIKDENNKRKLASYEMEMKYCLFCGLCVEACPTNALVFNQEYELAKYRIEDIKLTLFKREEITTGEGSENA

SEQ ID NO: 6442 - protein, 347 aa, Xanthomonas campestris pv. campestris str. ATCC 33913
MTGMTDSVRFPAEWESQSAILIAWPHAGTDWAERLAEVEDTYIALVTAITRFQPVIICVADDDLQIYAEARLRSARVEMAQVRFVVAAYNDTWLRDSGPITLRHGDGFRLMDFRFTGWGGKFEASLDDQLVSSLDAASVFVPADVQTVDFALEGGAIETDGAGTLLTTWKCLHERHPQRSRDSLSSDLATWLAQDRVLWLDHGYLEGDDTDAHIDTLARFAGADAIVYQGCAVPSDSHYAELQAMGEELAALRKADGQPYRLFVLPWAEPILDQGRRLAASYANFLIVNGAVLMPAYGDAADAAAQAVLADAFPQHQIVPVPCRPLIWQNGSLHCLTMQLPAGLLAA

SEQ ID NO: 6443 - protein, 161 aa, Candida albicans SC5314
MSQFYELAPKDAKGEPYPFEQLKGKVVLIVNVASKCGFTPQYKGLEELNKKFADQPVQILGFPCNQFGHQEPGSNEEIGSFCSLNYGVTFPVLDKIEVNGDNTDPVYKYLKSQKSGVLGLTRIKWNFEKFLIDQNGKVIERFSSLTSPESIGTKIEELLKK

SEQ ID NO: 6444 - protein, 274 aa, Acinetobacter sp. ADP1
MTLLSVAQMNSQNDIEVNFGVVEHLIKQSKAKDAELIVFPENFICFAAGKQRETAAQFEVIQQRLEKLAHQYNIWIIAGTLPCPFRPDGSIISDGRVRTVSLCITPEKTEARYDKIHLFDVQVGDAVGGYQESRFFEPGDQIVIAKTPFGNIGMMVCYDLRFPELALNLRAQGARILTAPAAFTYTTGQMHWQLLLQARAMDSQCVVLGAAQQGWHGEKRQTWGHTAATNSRGQLLEMVHEEGTALITVTFDQTEQDHVRESMPLMQHRRLLKL

SEQ ID NO: 6445 - protein, 417 aa, Sinorhizobium meliloti 1021
MEGKALRQGSIAGKGAPRNTASLIQYAQDHFDAAHFQGLMAIYGRPLADRAVALTHDRGRRVVDFVRCSYLGLDNHPQIVAGAVEAMKEYGTLHWSCARTRLNFSILGDLEAALSELFDARVITYTTVLAANMGALPLIASGHLTGGVKPLMVFDRLAHATLAFHKGTIAAETRVETIAHNDLEALEMLCRTNGSVAFVCDGVYSMGGSADLARLRRLQERYGLFLYIDDAHGVSIFGKHGEGFARSQMSGPLGERTIVAASLGKGFGASGGLIMLGTARQEELFRRFAVAHAFSASLNVAAIGAARASQQLHLTEELTELQQRLRSRTALFDSLVPTEQQGSPLPIRTVEIGDEMTAIGAARALLDRGFYTSAIFFPTVARGRAGLRLCPTAGHSEDDIRGLGIAIQDVLKEISGR

SEQ ID NO: 6446 - protein, 142 aa, Oceanobacillus iheyensis HTE831
MSLNNLDTLYRQVIMDHYKNPRNRGSLEGDSVTVDMNNPTCGDRIQLQLHVEDGIVQDAKYEGEGCSISMSSASMMTQAIKGKKIEEALEMSQTFSDMMLGNDVDTEEMGDIEALQGVSKFPARIKCATLAWKAMEKGVHDQ

SEQ ID NO: 6447 - protein, 212 aa, Sulfolobus solfataricus P2
MYRAIFLDFGNTLVGFKPAFYEKLQIILKEHGYDVEIRKVFRAYVKAMAINNYAQPTDIKEFLYNLSIPPDEKLINSIMSSDIRDGEAFVYDEVIEFLETIRSANLKLILVSNSSPRTKKLLEELGLVKYFDNLVLSHEIGIVKPNPKIFAIAISKGGYPALHIGDIYEIDYIGARRSYLDAVLLDRYDFYPEIKEKVRDLREIIPTIMKNL

SEQ ID NO: 6448 - protein, 290 aa, Arabidopsis thaliana
  misc_feature (203)..(203): Xaa can be any naturally occurring amino acid
  misc_feature (210)..(210): Xaa can be any naturally occurring amino acid
  misc_feature (234)..(234): Xaa can be any naturally occurring amino acid
  unsure (1)..(290): unsure at all Xaa locations
MAKDVEAVPGEGFQTRDYQDPPPAPFIDGAELKKWSFYRAVIAEFVATLLFLYITVLTVIGYKIQSDTDAGGVDCGGVGILGIAWAFGGMIFILVYCTAGISGGHINPAVTFGLFLARKVSLPRALLYIIAQCLGAICGVGFVKAFQSSYYTRYGGGANSLADGYSTGTGLAAEIIGTFVLVYTVFSATDPKRSARDSHVPVXLAPLPIXGFAVFMVHLATIPITGTGINPARXSFGAAVIYNKSKPWDDHWIFWVGPFIGAAIAAFYHQFVLRASGSKSLGSFRSAANV

SEQ ID NO: 6449 - protein, 228 aa, Agrobacterium tumefaciens str. C58
MRRGGTGRTEDRMFLFDTLSKKTTMPTEETALPGREEALAVPETHFVNGRPLKGPYPDGLEIIYLGMGCFWGAERLFWKTPGVWVTAVGYAGGFTRNPTYHETTTGQTGHAEVVKVVYDPAVISLSGLLKIFFEEHDPTQGMRQGNDVGTTYRSAIYATTEGQLQQAQKARDAFQQALDEAGHGHAITTEIGPLETFYYAEDYHQQYLAKNPGGYCGLRGTGVSCNIG

SEQ ID NO: 6450 - protein, 175 aa, Triticum aestivum
MAPAVMASSATTVAPFQGLKSTAGLPVSRRSGSAGLSSVSNGGRIRCMQVWPIEGIKKFETLSYLPPLSTEALLKQVDYLIRSKWVPCLEFSKVGFVFREHNSSPGYYDGRYWTMWKLPMFGCTDATQVLSEVEEVKKEYPDAYVRVIGFDNMRQVQCVSFIAFRPPGCEESGKA

SEQ ID NO: 6451 - protein, 154 aa, Mesorhizobium sp. BNC1
MTFTIRSALAYDLALLLFRPQDAIKFPDIIHAVKPEPDRGFPQAQSAHDTFWDFISLTPESMHMIMWVMSDRAIPRSFRFMEGFGVHTFRFVNAKDESTFVKFHWKPKLGLQSVAWNEAVKINGADPDFHRRDLWQAIELAREICTAGISGVSA

SEQ ID NO: 6452 - protein, 470 aa, Malus x domestica
MMPLSVLQVRRLQLELITPAKPTPQETKFLSDIDDQEGLRFQVPVIMCYKDNPSLNKNCNPVKVIREALSRALVYYYPLAGRLKEGPNRKLMVDCNGEGILFVEASADVTLEQLGDKILPPCPLLEEFLFNFPGSDGIIGCPLLLVQVTCLTCGGFILALRANHTMCDAPGLLLFLTAIAEMARGAHAPSILPVWERELLFARDPPRITCAHHEYEDVIGHSDGSYASSNQSNMVQRSFYFGAKEMRVLRKQIPPHLISTCSTFDLITACLWKCRTLALNINPKEAVRVSCIVNARGKHNNVRLPLGYYGNAFAFPAAVSKAEPLCKNPMGYALELVKKAKATMNEEYLRSVADLLVLRGRPQYSSTGSYLIVSDNTRAGFGDVNFGWGQPIFAGPAKALDLISFYVQHKNNSEDGILVPMCLPFSAMERFQQELERITLEPKEDICNNLRLTRIMSMIVSVKRNALSVM

SEQ ID NO: 6453 - protein, 231 aa, Bacillus cereus ATCC 14579
MMGYKAMLFDLDDTLLDRDKAVEALFLIVLEKCYENVDGAAKSNMLQKFKEYDKREYGISNKTTVLESLFDEFTPRYRLPRNYIQDFWNNNFPRCFSIDQNTIHFLNQIKKHCKVGIITNGSTQRQKAKIFNTNLNKYFETIIISEEVGFSKPDKRIFELALNKLNLQPENTLFVGDDLEKDIAGPQNANIKGVWFNPQKIKNTTKIQPYAEINTLDSLLSYVTPQYFYNK

SEQ ID NO: 6454 - protein, 398 aa, Puccinia triticina
MCGTSSAMDPVFQSINPSLYDPQRVLDSEEFEILTDMNKVKAYSDDNKNIACCYNDKQQLNMVKKPMPEVHPGQVLVRVRATGICGSDIHFWKHSRVGEKMVVKHECGAGHESAGEVIALGEGVTDLEVGDRVAIETGIPCSKPTCEMCRTGQYNACPEIMFWFTSPYHGLMTRYHAHPSCWLHKLPPNVSYEEGSLLEPLAVALAGIERAGVRLGDPVLICGAGPIGLVTLLACHAAGACPIAITDLSEGRLDCAKRLVPSVSTFKISLGESETDVAGQIQAAMGCKPRVAMECTGFESSIATAIFSVKFGGKVFVIGVGKDKQTLPFMHMAENEIDLQFQFRYANQYPKAIRLVSTGLIDVKPLITHRFVLEKAIEAFNTAADPKSGSMKVQVVDY

SEQ ID NO: 6455 - protein, 334 aa, Clostridium perfringens str. 13
MALMSDKFLSIVIPAYNSEKYIEKNLMFLSRQTSNNFEVIVVDDGSTDNTCEVSEACLENFKINHRVIRCEENRGQSVARNIGINYSRGKYILFLDSDDFAENNLVQILERNMFNEPDIVFFDYKRIKEGDSVNVNIAQNFEFGKIKSGEEVFNAYKDNKIRLWTGSLVYNKEFLNKNKLRFLEGAHGAEDLNFIFKALLSSKKVRGIEDSLVFYCQRGDSLTNNPDIYKNITVVESMEDVAKFIDENKLDKKLKEAIEKEFTCEHIMYQILGYLNSETKKDTLSVLKNKNVKKYLKKATIKTNRYGRSMYTYMKMAAYFPNLFIKTYLKNTGK

SEQ ID NO: 6456 - protein, 234 aa, Arabidopsis thaliana
  misc_feature (86)..(86): Xaa can be any naturally occurring amino acid
  unsure (1)..(234): unsure at all Xaa locations
MATNEPEHEHRDEEEAGANEDEDTGAQVAPIVRLEEVAVTTGEEDEDAVLDLKSKLYRFDKDANQWKERGAGTVKFLKHKNTGKIXLVMRQSKTLKICANHFVKSGMSVQEHVGNEKSCVWHARDFADGELKDELFCIRFASIENCKTFMQKFKEVAESEEEKEESKDAADTAGLLEKLTVEETKTEEKTEAKAVETAKTEVKAEEKKESEAEKSGEAKKTEESGSLNIRSVII

SEQ ID NO: 6457 - protein, 496 aa, Bifidobacterium longum NCC2705
MSEQFDLVIIGAGPGGYSTALRAAELGMKVALVERDATVGGTCLNRGCIPSKALITATHTIDTVHRAAELGVNASVNGIDFGTLRDYRLRVVKTMVGGLAGLLAHRGITVFRANAAFHADETAPATSNHIVHLVPSPDQSDILTYHKADVPEPSGPTMDLTATNIVIATGAKPRPLPGNPFAGALIDSTQALEVNEFPSSAVIIGAGAIALEFASMWNAAGSKVTLLIRKDRVLSAWDRRAGTTLTRELKRHGVNIITRASVTHVDTGANLGATVHYTCEGQDGEQSVWGEIALVAIGRDPITDPAWGVTIDDHGHVATDAYGRTDKPGVWAVGDVTAGHALAHRAFEQGIVIAETIAGLNPKPVDEATVPQIVFSFPEAASVGLTVEQAQAREDLIEIKETNYPMLANARMLMSGTAGSLTIVSGCDAANPDTPRVLGVHMVSQMASDIIAEAEQLVGNHVPLADAARLVHPHPTFSETLGEALLKADGRPLHTR

SEQ ID NO: 6458 - protein, 970 aa, Arabidopsis thaliana
  misc_feature (356)..(356): Xaa can be any naturally occurring amino acid
  misc_feature (411)..(411): Xaa can be any naturally occurring amino acid
  misc_feature (724)..(724): Xaa can be any naturally occurring amino acid
  misc_feature (749)..(749): Xaa can be any naturally occurring amino acid
  misc_feature (777)..(777): Xaa can be any naturally occurring amino acid
  misc_feature (786)..(786): Xaa can be any naturally occurring amino acid
  misc_feature (794)..(794): Xaa can be any naturally occurring amino acid
  misc_feature (814)..(814): Xaa can be any naturally occurring amino acid
  misc_feature (857)..(857): Xaa can be any naturally occurring amino acid
  unsure (1)..(970): unsure at all Xaa locations
MAARNLEKMASIDAQLRLLAPGKVSEDDKLIEYDALLLDRFLDILQDLHGEDVREFVQECYEVAADYDGNRNTEKLEELGNMLTSLDPGDSIVVTKSFSNMLSLANLAEEVQIAYRRRIKKLKKGDFADEASATTESDIEETLKRLLQLNKTPEEVFDALKNQTVDLVLTAHPTQSVRRSLLQKFGRIRDCLTQLYAKDITPDDKQELDEALQREIQAAFRTDEIRRTPPTPQDEMRAGMSYFHETIWKGVPKFLRRVDTALKNIGINERVPYNAPLIQFSSWMGGDRDGHPRVTFDTSSLVPPPPPPMAANLYFSQIEDLMFEMSMWRCNEELRVRAERQRCAKRDAKHYIEFWXKQIPANEPYRAILGDVRDKLYNTRERARQLLSSGVSDVPEDAVFTSVDQFLEPLXELCYRSLWDCGDRPIADGSLLDFLRQGATFGLALGKLDIRQESERHSDVLDAITTHLGIGSYKEWSEDKRQEWLLSELSGKRPLFGPDLPKTEEVADVLDTFKVISELPSDSFGAYIISMATAPSDVLAVELLQRECGITDPLRVVPLFEKLADLEAAPAAVARLFSIEWYRNRINGKQEVMIGYSDSGKDAGRLSAAWQLYKAQEELVKVAKEYGVKLTMFHGRGGTVGRGGGPTHLAILSQPPDTIHGHLRVTVQGEVIEQSFGEEHLCFRTLQRFTAATLEHGMHPPVSPKPEWRVLMDRNGLSVCPLKXYRSGCLTREPRFLEYFRLATPEPEXGRMNIVRRPSKRKPIGGIESLRAIPRMXAWNQTRFHXPLWLDRGXGFRRVIQKDTKNFNMLKEMXNVWSSLHIEVNPVILVYHVSHPANHFLRWMSRIAQTNYRPLSXLNPDLTNKRQDASTSRLHFNKDVLEGDPYLRQRLQLRDPYITTLNVCQAYTLKQIRDPSFHVKVRPHLSKDYMESSPAAELVKLNPKSEYAPGLEDTVILTMKGIAAGMQNTG

SEQ ID NO: 6459 - protein, 229 aa, Candida albicans SC5314
MVKSNVESAWETMEDTFSEIQNKFHQIYKPIDTGKPDEDDETTKKESLDITDDSTLSVSPITQLLYLARSKFYDLTPLDNSKSPFPFKNLRGKVVLIVNVASRCGFSFQYNGLEQLNKRFANDDFVLLGVPCNQFLWQEPGTNDQIVTKCKKKYDVSFQILDKINVNGEQADPVYKFLKAQKEGLWGTNRVKWNFEKFLIDKNGRVVERYSTFTRPVAITPRIEQLLES

SEQ ID NO: 6460 - protein, 423 aa, Fusarium proliferatum
LRQLETFEMDGVNGVTQCPIAPGDSYTYTFRAVQYGTSWYHSHYSLQYADGLAGPITIYGPSSAPFDEGRNPILITDWSHRSAFQSWQRELVPNPTRPMMNGVLINGVGNFAGSFPRERFNMTVTKGKKYVLRVINTSVDTTWIFSIDNHNFTVMSTDFVPIQPYSVSHLVLGIGQRYHIVLDANPTNTTKMPANPDGNYWVRTVGATGCKGFEPGNEPDERQGILRYNASSKLVPTTFRENYSLECRDEAYDRLSPVYEWNVDKVKINYTKSQFDIGLSKFAHRPELMDNFTWWAFGENPLWLNFSNPTILNLKNTTWNPDYAVDLVVPDEKKDKWVYIAITAPPAPMKTKPNRAFAPVAHPLHLHGHDFALLAQGTNFSDLDTGKVNLKFDNPPRRDVALLPAGGYLVVAFKADNPGSWLF

SEQ ID NO: 6461 - protein, 400 aa, Candida albicans SC5314
MSFRTTSMRMARLATAKATLSKRTFSLLANATTRYTAASSAAKAMTPITSIRGVKTINFGGTEEVVHERADWPKERLLDYFKNDTFALIGYGSQGYGQGLNLRDNGLNVIIGVRKGSSWEAAVEDGWVPGENLFEVDEAISRGTIIMDLLSDAAQSETWFHIKPQLTEGKTLYFSHGFSPVFKDLTHVEPPSNIDVILAAPKGSGRTVRSLFKEGRGINSSYAVWNDVTGKAEEKAIAMAIAIGSGYVYKTTFEREVNSDLYGERGCLMGGIHGMFLAQYEVLRENGHTPSEAFNETVEEATQSLYPLIGKYGMDYMYDACSTTARRGALDWYPRFKDALKPVFEELYESVKNGSETKRSLEFNSRSDYKERLEEEFQTIRNMEIWRVGKEVRKLRPENQ

SEQ ID NO: 6462 - protein, 436 aa, Fusarium proliferatum
MSVHWHGLRQLETFEMDGVNGVTQCPIAPGDSYTYTFRAVQYGTSWYHSHYSLQYADGLAGPITIYGPSSAPFDEGRNPILITDWSHRSAFQSWQRELVPNPTRPMMNGVLINGVGNFAGSFPRERFNMTVTKGKKYVLRVINTSVDTTWIFSIDNHNFTVMSTDFVPIQPYSVSHLVLGIGQRYHIVLDANPTNTTKMPANPDGNYWVRTVGATGCKGFEPGNEPDERQGILRYNASSKLVPTTFRENYSLECRDEAYDRLSPVYEWNVDKVKINYTKSQFDIGLSKFAHRPELMDNFTWWAFGENPLWLNFSNPTILNLKNTTWNPDYAVDLVVPDEKKDKWVYIAITAPPAPMKTKPNRAFAPVAHPLHLHGHDFALLAQGTNFSDLDTGKVNLKFDNPPRRDVALLPAGGYLVVAFKADNPGSWLFHCHIES

SEQ ID NO: 6463 - protein, 645 aa, Leptospira interrogans serovar Copenhageni str. Fiocruz L1-130
MEKTSLYHLIRDVASVYSDRPMYWIREESGDFRGISYKDWYENLKNLSTFLIDLGMHKGNTAGLICDNRYEWSLCSLSLVTIGCVDVPRGCDATIEDLKYILEHSEAKILFLENEKVLKKLLENKSSLAKVKTILLIDPPTKWKDLENSRALLSGIQFLFLEDALLEGEKSRIKKGDKTYDQRGESLGGKDLATIIYTSGTTGAPKGVMLNHRSFTWGIHQIQEFIPGSYNDRTILFLPPWHIAERLLETTLIAWGASMACSSIPTIPADMQKVKPTVLVSVPRLWEGLYKRIYDTVRKSSPFKQKLFHFAVKMAEITTSLQDTIRDSYATTETENPNQKLLDRFIASVFLLSLVPIKILSNKILERVRNLFGGKIRFALCGAGAMPSHIQFFFRSAGIHIIETYGMTETTGIGAIGEFPIPKNGAIGAPLPGTAIKLVGENGKVVTTPGEKGVAWHKGPHVTMGYYKEPEKTSKALQDGWLDSGDILTWTHTGELKFAGRAKDTIVLSGGENLEPAPIEAKLTESEFINQVIVVGQDQKNLGVLIVPFFDRVQEEFQNQAVKIPKDPTEWSSSKEVTTFFKNIVKDKISTKAGFKSFEKIAHVHILSKEFEKGKEMTETMKLKRNVIFDLYQDVIQSLYDHDED

SEQ ID NO: 6464 - protein, 397 aa, Triticum aestivum
  misc_feature (158)..(158): Xaa can be any naturally occurring amino acid
  unsure (1)..(397): unsure at all Xaa locations
MTSAMSWWWAGAVGAVKKSQDESAASSFQSVALVVGSTGIVGTSLVDILPRQDTPGGPWKVYAVSRRPLPPWCPPPSPAVTHLQIDLADPAAVAEALTPLADITHVFYAAWSSHPTEAQNREANSAMLRNVLSVVVPGCPALAHVCLQTGRKHYVGPXEAVGKLGVPDPPYTEDMPRLDHPNFYYDLEDVLFDHVSGRDGAVTWSVHRPTVIFGFSPRSAMNVVGSLCVYAAICRKEGATLRWPGCKVAWEGFTDASDADLVAEHEIWAAVDPFAKNEAFNCSNGDVFKWKQLWPMLAERFGVEWAGYEGEDSRFALADAMTGKEAVWTEILQENELVTTELEEITSWGFVDAMFNIDIEHLDNMNKSKEHGFLGFRNTVNSFNAWIDKMKASKVVP

SEQ ID NO: 6465 - protein, 230 aa, Ralstonia metallidurans CH34
MIDAYTWPTPNGHKVHIMLEECGLEYRVHPINIGAGDQFGEDFLKISPNNKIPAIVDTDGPDGQPISLFESGAILLYLAGKTGKFLPEDVRGKYEALQWLMFQMGGVGPMLGQAHHFRIYAPEKIEYAVNRYTNEAKRLYGVIDKQLSTHKYLAGDTYTVADIATFPWLRSWQNQGVELDDYPHLKRWFNDIAERPAVKRGVEVLASARKPLQGDKEREVLFGATQYQRR

SEQ ID NO: 6466 - protein, 483 aa, Oryza sativa
  misc_feature (286)..(286): Xaa can be any naturally occurring amino acid
  unsure (1)..(483): unsure at all Xaa locations
MAAPSVAVDNLNPKVLNCEYAVRGEIVIHAQRLQQQLQTQPGSLPFDEILYCNIGNPQSLGQKPVTFFREVIALCDHPCLLEKEETKSLFSADAISRATTILASIPGRATGAYSHSQGIKGLRDAIAAGIASRDGYPANADDIFLTDGASPGVHMMMQLLIRNEKDGILCPIPQYPLYSASIALHGGALVPYYLNESTGWGLEISDLKKQLEDSRLKGIDVRALVVINPGNPTGQVLAEENQRDIVKFCKNEGLVLLADEVYQENIYVDNKKFNSFKKIARSMGYXRDDLPLVSFQSVSKGYYGECGKRGGYMEITGFSAPVREQIYKVASVNLCSNITGQILASLVMNPPKAGDASYASYKAEKDGILQSLARRAKALENAFNSLEGITCNKTEGAMYLFPQLSLPQKAIDAAKAANKAPDAFYALRLLEATGIVVVPGSGFGQVPGTWHIRCTILPQEEKIPAIISRFKAFHEGFMAAYRD

SEQ ID NO: 6467 - protein, 345 aa, Kluyveromyces marxianus
MTFTVVTGANGYIAKHILKSLLEDGHRVIGTVRNSKKAEELKRTVNDENLIVELVPDMLVENAFDELFKKYNTQIKYVFHTASPVLETSKDYEKSLIEPAITGAKSMVEAIRKYSLTSVEHIVYTSSIAASSLESEFTDPTLVVSEDSWNPQGLEEAKTEFFTAYSYSKKIAEKTMWDFVEEYKGTEHEIKLTTVNPCFNIGPQAYEADVTETMNFTAELINHVVKSKVGDPLPPTRIVPYVDVRDTARAHVDALKNEKLAFQRLLVVGPFLSSQQIYDIVNERFPQLRGKIARGEPGSDKLDPAKLAKFDHARTTQALGWEFTPIEKAIADEVAQILRVGAYRG

SEQ ID NO: 6468 - protein, 324 aa, Glycine max
  misc_feature (108)..(108): Xaa can be any naturally occurring amino acid
  misc_feature (295)..(295): Xaa can be any naturally occurring amino acid
  misc_feature (306)..(306): Xaa can be any naturally occurring amino acid
  unsure (1)..(324): unsure at all Xaa locations
MASSVLSAASHSVSPSCSLSTTHKGKPMIRDNTLGFHRGPNSFSSSRSRGRISMAVAVNVSRFEGIPMAPPDPILGVSEAFKADNSDVKLNLGVGAYRTEELQAYVLXPGAKVLISAPTWGNHKNIFNDASVPWSEYRYYDPKTVGLDFEGMIEDIKSAPEGSFILLHGCAHNPTGIDPTPEQWEKIADVIQEKNHIPFFDVAYQGFASGSLDEDAASVRLFVARGMEVLVAQSYSKNLGLYAERIGAINVVSSSPESAARVKSQLKRIARPMYSNPPVHGARIVADVVEPSLFXEWNRMEMMAGXKDVDTLLMYTSKQEGCIL

SEQ ID NO: 6469 - protein, 474 aa, Agrobacterium vitis
MFIRSNRRAKIVATVGPASSSPAILRSLFLAGVDTFRLNFSHGSRDDHAAAYRHIRALEKELGTSIGILQDLQGPKIRIGVLHEGRLQLTKDAEIRFVCGTEPGRGLMDIPLPHREIFAAVKPGDDLLIDDGRVRVRALGVSDEFIDAKVIVAGPISNRKGVNLPGTVLDISPLTPKDRKDLEFGLELGVDWIALSFVQTARDMIEARSLVSDRAGLIAKIEKPSALDEIDDIVALSDAIMVARGDLGVEIPPEDVPGRQKELIRACRIAAKPVIVATQMLDSMVTSPTPTRAEASDVAGAIYDGADAVMLSAESATGAFPVETVEIMSRIIEKTEKHKFYRPILEATEPQIAHTPPHAVATAAADVALALKAPVIVAFTVSGTTASRISRARPPLPILALTPSEQTARQLGLMWGVVSLLSPTVDTYEQSVDRATQAAVQTGLAEKSDQIVVVTGFPFATAGSTNNLRVTQAG

SEQ ID NO: 6470 - protein, 552 aa, Cucurbita pepo var. melopepo
SQIRHYKWEVEYMFWAPNCNENIVMGINGQFPGPTIRANAGDSVVVELTNKLHTEGVVIHWHGILQRGTPWADGTASISQCAINPGETFFYNFTVDNPGTFFYHGHLGMQRSAGLYGSLIVDPPQGKKEPFHYDGEINLLLSDWWHQSIHKQEVGLSSKPIRWIGEPQTILLNGRGQFDCSIAAKYDSNLEPCKLKGSESCAPYIFHVSPKKTYRIRIASTTALAALNFAIGNHQLLVVEADGNYVQPFYTSDIDIYSGESYSVLITTDQNPSENYWVSVGTRARHPNTPPGLTLLNYLPNSVSKLPTSPPPQTPAWDDFDRSKNFTYRITAAMGSPKPPVKFNRRIFLLNTQNVINGYVKWAINDVSLALPPTPYLGAMKYNLLHAFDQNPPPEVFPEDYDIDTPPTNEKTRIGNGVYQFKIGEVVDVILQNANMMKENLSETHPWHLHGHDFWVLGYGDGKFSAEEESSLNLKNPPLRNTVVIFPYGWTAIRFVADNPGVWAFHCHIEPHLHMGMGVVFAEGVEKVGRIPTKALACGGTAKSLINNPKNP

SEQ ID NO: 6471 - protein, 391 aa, Oceanobacillus iheyensis HTE831
MKEAVIVAGARTPVGKANKGSLANVRPDDLAALTIKETLKRAGNYDGNIDDVIIGCATPEAEQGMNMARNVAGLAGLKNDVPGITINRYCSSGLQSIAYGAERIMVGASDAIIAGGAESMSMLPMGGHVLKPNPKLVESAPGYYMGMGHTAEEVANRFNISREDQDAFAVQSHQRAAKALEEGKFDDEIVPVEVSQRLVGQNNKVEEKSFIFDQDEGVRAGTTSEILSKLRPAFHVKGSVTAGNASQMSDGAASVLLMERGKAEAEGLTPLLKFRSFAVAGVEPEIMGVGPVEAIPKALKIAGLELSDIGLFELNEAFASQSLRVIQALDLNMDKVNVNGGAIALGHPLGCTGTKLTLSLMHEMKRRNEQFGVVTMCIGGGMGAAGVFELL

SEQ ID NO: 6472 - protein, 482 aa, Agrobacterium vitis
MFIRNNRRSKIVATVGPASSSPDMLRSLFLAGVDTFRLNFSHGARADHAEVYRNIRALEQEHDAAIAVLQDLQGPKIRIGVLAHGRLDLARGSTIGFILGREGGEGMNDIPLPHREIFEVAVPGMDLLIDDGRIKVRIMEVMDGRLVCEVLNGGALSNRKGVNVPGAVLDISPLTAKDREDLEFGLELGVDWVALSFVQRARDMIEARSLVGDRAGLIAKIEKPSALDDIEDIVRLSDSVMVARGDLGVEIPPEDVPGKQKEIIRACRLAAKPVIVATQMLDSMVSSPTPTRAEASDVAGAIYDGADAVMLSAETATGAYPVEAVEIMNRIIEKTEKHKHYRPILEATEPDVAQSPPHAVATAAANVAVALGSPVVVAYTSSGTTAARISRARPALPILALTPSEQVARRLNMFWGVVGVRSQDVHTYEASLIHAQQAVQEAKLASPSDHIVIVAGFPFAQQGSTNNLRVVQIAATDNLEIA

SEQ ID NO: 6473 - protein, 241 aa, Raphanus sativus
SWIIKLLLERGYTVKGTVRNPDDPKNTHLRELEGAKERLILCKADLQDYDALKEAIDGCDGVFHTASPVTDDPEEMVEPAVNGAKFVINAAAETKVKRVVITSSIGAVYMDPNRDPEAVVDESCWSDLEFCKNTKNWYCYGKMVAEQAAWETAEEKGVDLVVLNPVLVLGPPLQPTINASLFHVLKYLTGSAKTYANLTQAYVDVRDVALAHVLVYEAPSASGRYLLAESALHRGEVVEIL

SEQ ID NO: 6474 - protein, 623 aa, Melanocarpus albomyces
MKTFTSALALVVGMLAPGAVVAAPPSTPAQRDLVELREARQEGGKDLRPREPTCNTPSNRACWSDGFDINTDYEVSTPDTGVTQSYVFNLTEVDNWMGPDGVVKEKVMLINGNIMGPNIVANWGDTVEVTVINNLVTNGTSIHWHGIHQKDTNLHDGANGVTECPIPPKGGQRTYRWRARQYGTSWYHSHFSAQYGNGVVGTIQINGPASLPYDIDLGVFPITDYYYRAADDLVHFTQNNAPPFSDNVLINGTAVNPNTGEGQYANVTLTPGKRHRLRILNTSTENHFQVSLVNHTMTVIAADMVPVNAMTVDSLFLAVGQRYDVVIDASRAPDNYWFNVTFGGQAACGGSLNPHPAAIFHYAGAPGGLPTDEGTPPVDHQCLDTLDVRPVVPRSVPVNSFVKRPDNTLPVALDLTGTPLFVWKVNGSDINVDWGKPIIDYILTGNTSYPVSDNIVQVDAVDQWTYWLIENDPEGPFSLPHPMHLHGHDFLVLGRSPDVPAASQQRFVFDPAVDLARLNGDNPPRRDTTMLPAGGWLLLAFRTDNPGAWLFHCHIAWHVSGGLSVDFLERPADLRQRISQEDEDDFNRVCDEWRAYWPTNPYPKIDSGLKRRRWVEESEWLVR

SEQ ID NO: 6475 - protein, 181 aa, Triticum aestivum
  misc_feature (122)..(122): Xaa can be any naturally occurring amino acid
  misc_feature (143)..(143): Xaa can be any naturally occurring amino acid
  unsure (1)..(181): unsure at all Xaa locations
MAPTVMASSATSVAPFQGLKSTAGLPVSRRSNGASLGSVSNGGRIRCMQVWPIEGIKKFETLSYLPPLSTEALLKQVDYLIRSKWVPCLEFSKVGFIFREHNASPGYYDGRYWTMWKLPMFXGCTDATQVINKWRSQEGVPDXYVRIIGFTTSPSECVSSCLKQRAARSARLNTHTAHIMH

SEQ ID NO: 6476 - protein, 128 aa, Raphanus sativus
ENEVIKPTVNGVLGIMKACDKAKTVRRIVFTSSAGTVNAEEHQKNVYDENDWSDLDFIMSKKMTGWMYFMSKTLAEKAAWDYAKEKGIDFISIIPTLVIGPFITTSMPPSLITALSPITRNEAHYSII

SEQ ID NO: 6477 - protein, 477 aa, Bacillus cereus ATCC 14579
MKIVLRKESNIPYYKQIYMQIVERVQSGMLSHGESLPSLRCMATDLQINVLTVRKAYKQLETKGYIRIEQGKGAYIYKRVKKDFKPIPYKWQQSRSINVMRSQYAMNKHRKYYDFSQAILYPRLLPNPFLADEMHKLLDKNPMLLATYGPVQGDYELRVEIANYLNEHQKLVTDPSQLLITSGAQQGIDLIAQTLLKPGDTVLVESPCYSAALDVFINKGVQIIPVSLDNHGVRSDLIDDICQSKNPVLLYTNPTFQNPTGTVMSKERRMELIELAGLYQFFIIEDDSFGEIYFEDAIIPPPIKSFDKDGHVIYIKGFSKTLAPGLRIAALIADGPIFEWLYAVKGSMDIGSPLLTQKALLPFLRAERMKNHLEKLRTALQMRRDLTIDILSPLKELHFEIPNGGFNLWVTLPDSIDPFTLLQKANEVDVSFLPGTACLLNYETNDNQLRISYSMLNEKDMEIGLEKLHDTIRKSIC

SEQ ID NO: 6478 - protein, 319 aa, Legionella pneumophila str. Lens
MGILIDGIWHDENNINTDKEGRFVRAESGFRQHITANGESGFKAEPDRYHLYLSYACPWACRTLIMRKLKGLEKIISVSFSDPVMGKNGWSYGESGNETADEINHIHYLKELYLVARKDYTGRVTVPVLWDKKKKTIVNNESSEIMRMLNSEFNAFSSTDHDYYPKQWRQKIDEINQLVYENINNGVYKCGFAKSQKAYEEAFDALFNTLNQIENLLATQRYLIGEQLTEADWRLFTTLIRFDAVYHGHFKCNLQQIADYPHLSNYLRELYQCPGIKETVNFNHIKQHYYRSHLSINPTGIVPKGPKLNLDEPHNRYEF

SEQ ID NO: 6479 - protein, 125 aa, Brassica napus; identical to SEQ ID NO: 1442

SEQ ID NO: 6480 - protein, 343 aa, Arabidopsis thaliana
MERYEIVKDIGSGNFGVAKLVRDKFSKELFAVKFIERGQKIDEHVQREIMNHRSLIHPNIIRFKEVLLTATHLALVMEYAAGGELFGRICSAGRFSEDEARFFFQQLISGVNYCHSLQICHRDLKLENTLLDGSEAPRVKICDFGYSKSGVLHSQPKTTVGTPAYIAPEVLSTKEYDGKIADVWSCGVTLYVMLVGAYPFEDPSDPKDFRKTIGRILKAQYAIPDYVRVSDKCRHLLSRIFVANPEKRITIEEIKNHSWFLKNLPVEMYEGSLMMNGPSTQTVEEIVWIIEEARKPITVATGLAGAGGSGGSSNGAIGSSSMDLDDLDTDFDDIDTADLLSPL

SEQ ID NO: 6481 - protein, 690 aa, Wolbachia endosymbiont of Drosophila melanogaster
MNHSHLKSMANAIRFLSIDAVQKANSGHPGMPLGMADVATVLFAKYLNHNPDDSKWFNRDRFVLSNGHGSMLLYSILYLTGYISVDELKNFRQMGSKTPGHPEFGLTSGVEATTGPLGQGFAAAVGMALAESILEKQFRINHYTYVMLGDGSLMEGISHEAASLAGHLKLNKLIALFDDNDISIDGATCLSCSDDVEKRFLAYGWNVDKIDGHDFDAISLAIEQAKKSDKPTMICCKTIIGKFSSRAGTSSAHSGAFSEEDIKQMREKLNWNYEPFHVPEDVKNAWKKTVERAKQNYTMSFQRVTLESRKEEKEWIPVSSTGMTRESTGMTEENAGMTGYHAELQRRLDKHLPDNIAGVLADLKKQICELMPNEATRSSFGRVMELLTESMPELIGGSADLTGSNCTKYEHMQVINSNNYSGSYVHYGVREHAMAACMNGMALHGAILPYGGTFLVFSDYCRPAIRLSALMKQQVMYVMTHDSIGVGEDGPTHQPIEHLASLRAIPNLYVFRPADAVETLECVSIALEKKESPALFALSRQNVSYMRKFYSDIDQSANLSKFGAYILCECSKELKVTIFATGSEVEIAVEAREKLQEKGIGTRIVSMPCWRLFDEQSDEYKAAILNNDSIKVAIEAGSEMGWHKYIGSNGIFIGMKSFGESAPYKTLYEHFNISADHVVKCVCEKLVYIQ

SEQ ID NO: 6482 - protein, 342 aa, Zea mays
  misc_feature (66)..(66): Xaa can be any naturally occurring amino acid
  misc_feature (95)..(95): Xaa can be any naturally occurring amino acid
  misc_feature (106)..(106): Xaa can be any naturally occurring amino acid
  unsure (1)..(342): unsure at all Xaa locations
QQRSRTRPRTAHGRTPPGALVSLSVSRLPPPPQRGARGGGALAILVSIPAAGVPFPPLAVARASRXRAPEPEPRRESRVASASPPPPETPSGRNXDEGNRRQRLRXGRPLVECAGDRSVEEQPEHAGVEGQALKMSSTVPKSSNIFWHDCLVGKTDRQKLLNQKGCVVWITGLSGSGKSTLACTLGRELHTRGKLAYVLDGDNLRHGLNKDLGFKAEDRAENIRRVGEVAKLFSDAGLVCIASLISPYRRDRESCRALLSDGSFIEVFLNMSLELCEARDPKGLYKLARAGKIKGFTGIDDPYEAPLNCEIEIKEIDGVCPSPSDMAGQVVTYLEEKGFLHE

SEQ ID NO: 6483 - protein, 256 aa, Mycobacterium bovis AF2122/97
MNHPDLAGKVAIVTGAGAGIGLAVARRLADEGCHVLCADIDGDAADAAATKIGCGAAACRVDVSDEQQIIAMVDACVAAFGGVDKLVANAGVVHLASLIDTTVEDFDRVIAINLRGAWLCTKHAAPRMIERGGGAIVNLSSLAGQVAVGGTGAYGMSKAGIIQLSRITAAELRSSGIRSNTLLPAFVDTPMQQTAMAMFDGALGAGGARSMIARLQGRMAAPEEMAGIVVFLLSDDASMITGTTQIADGGTIAALW

SEQ ID NO: 6484 - protein, 266 aa, Medicago sativa subsp. X varia
MANQSSELAIEQLKKLLREKEELNEVATTKIEELIVELQGCHPQPIDPAEQRIIDGFTYFKLNNFNKNPELYDRLAKGQSPKFMVFACSDSRVSPSIILNFQPGEAFKVRNIANMVPPFNQLRYSGVGATFEYAITALKVESILVIGHSRCGGISRLMSHPEDGSAPYDFIDDWVKIGLSSKVKVLKGHECNDFKEQCKFCEMDSVNNSLVNLKTYPYVDSEIRNENLALLGGYYDFVNGEFKLWKYKTHVTKSVTIPLNGFDMTK

SEQ ID NO: 6485 - protein, 158 aa, Glycine max
  misc_feature (24)..(24): Xaa can be any naturally occurring amino acid
  misc_feature (30)..(31): Xaa can be any naturally occurring amino acid
  misc_feature (37)..(37): Xaa can be any naturally occurring amino acid
  misc_feature (41)..(41): Xaa can be any naturally occurring amino acid
  misc_feature (49)..(49): Xaa can be any naturally occurring amino acid
  misc_feature (121)..(121): Xaa can be any naturally occurring amino acid
  unsure (1)..(158): unsure at all Xaa locations
TGETQWRDTRRARQSKPQATRQSXQAVLDXXAPGLPXFLGXSADLTPSXNTQFKNAVTITPEDFKGNYLHYGVREFGMTAALNGMALHGGFVPYGGTFLTFSDYARNAVRLACLMNTHTIXVYTHDSIGLGEDGPTHQPVEHLASLRAMPNMTLWRAL

SEQ ID NO: 6486 - protein, 416 aa, Zea mays
  misc_feature (202)..(202): Xaa can be any naturally occurring amino acid
  unsure (1)..(416): unsure at all Xaa locations
MERLSTNQLYSSGVPVTVPTSLPCIPVSLDESFPRLPDAQSVLMERELRSTPLPPHQTTVAPIRGLFHSNTGSVGPLCSPPSVRFSSHSNPEQYPNHNSYNSQVPSTASSSTLNYGSQYGGFEPSITDFPRDIEPTWCPDPVESILGYSGDVPAGNNLTGTTAIGASDDLTKQTEWWTEFMNEDWKDMVDNPTSTETQPVGXPVQSSNSVHQSATQQTVSSQSVEPLAVVAPSPTAGSNTGKARMRWTPELHERFVDAVNILGGSETTPKGVLKLMKADNLTIYHVKSHLQKYRTARYRPELSEGSSEKKVASKEDIPSIDLKGSFDLTEALRLQLELQKRLHEQLEIQRSLQLRIEEQGKCLQMMLEQQCIPGAEKAQDASTAADELRSPSEIPESSTLKEVPENSQNGSTKQTK

SEQ ID NO: 6487 - protein, 384 aa, Vibrio vulnificus CMCP6
MEIARSLQQIQSSYIREILAAASDPSVISLAGGLPDEQTFPIELMKPTLEKLSEMPQVFQYGATAGYAPLLNFLKTYMSLPETHMAMACTGSQQGLDLIARAYINPGDTVVMEAPSYLGAMQVFGLVSANIVTVSQTEAGPNLDELEACFKQHSPKMFYAVPDFHNPTGVCWSLETRKQVAKLCIEHKVAFIEDAPYRELRFQGEALPLVSDFCPQDSIVLRSFSKIASPGLRIGIVTGKVSYLEPLIKVKQGADLHSSVPMQALLLGLLEHEKFPEHMEKIRTLYQSRYQVLAEALQTQLPENCQLKSVDGGMFVWVTLPECDTFALAKSLLGNGVAVVPSPVFYPAGQKAQAALRLNFTNATPEQLKEAVTRLAEGLKLALV

SEQ ID NO: 6488 - protein, 415 aa, Ehrlichia ruminantium str. Welgevonden
MIKKAAVELDDQKITLPILYDTEGNEVLDITSLYKNTGVLTYDPGFMSTAACESKITFIDGNKGILRYRGYDIADLVYNNKSFIEVVYLLFYGVFPNAEQLQEFILHISQEYVLPQMVRDVITSFPQNSHPMAILIASFSSLAAYYCDQKTDGELECKLAVAKVASIVALIYRHITNQDFIQADVGLSYSKNFIHMMFDISSYKFTEIVDKALDVIFVLHADHEQNASTATVRMTGSSGPNLFACLAAGAATLWGPAHGGANEAVINMLMNIGKPENVKQFIQKVKDSNKSTKLMGFGHRVYKNYDPRARIMCTICKEILKDFGLNDPLLEVAVELENIALQDDYFIARNLYPNVDFYSGIVLKTIGIPVKMFTTLFALARTSGWSAQWYEMVSSKNYKISRPRQLYTGNPVQKV

SEQ ID NO: 6489 - protein, 347 aa, Bifidobacterium longum NCC2705
MSETMKAAIFVEPGKMTVEEVPKAMLEQDDDIVIRVVRTCVCGSDLWFFRGLSGQAAHSQVGHESIGVVEEVGAAVESVKPGDFVVVPFPYSCGKCPVCKAGFESVCPHGGYFSACQAEYLRVPEADGTVVKVPGSPEDYSDEQLASLLTISDVMSTGYHAAVSAEVKPGDTAVVMGDGAVGLCGVIAAKMRGATRVIAMSRHEDRAALAREFGATDIVPERGQEAIDKVLEMTGGYGADAVLECVGSKQSFDTAIGLIRRGGVIGRVGLPHDVEISAEGTFYGNIGIKGGPAPVRHYDLDEGLLDAVLKGEINPGRVFTAEYDLDHIQDAYEAMDQRKVIKALIRF

SEQ ID NO: 6490 - protein, 371 aa, Vibrio vulnificus CMCP6
MEIEMKNEYLLLTPGPLSTSETVREAMLKDWCTWDDEYNKDIVEVIRTKLVKLATQQDGYTSVLMQGSGTASVEATIGSAIAKEGKLLVVDNGAYGARIAQIADYLNIPCHVVSPGETSQPHLNEVETALASDPAITHVAIVHCETTTGMLNPIEAFASVAKAHGKVVILDAMSSFGGIPIDIAELGIDFMISSANKCIQGVPGFGFVIAKQTELEKCQGQARSLSLDLYDQWHCMEVNHGKWRFTSPTHTVRAFYQALLELEQEGGIEARHNRYQTNQKTLVAGMRSLGFEPLLNDELHSPIITSFYSPTHSDYQFKAFYTRLKEQGFVIYPGKVSNADCFRIGNIGEVYPADIERLIGAIEKAMYWQVA

SEQ ID NO: 6491 - protein, 420 aa, Sulfolobus solfataricus P2
MMEEVLSSSLYTQQVKKLYKVGELLGLDNETLETLSQPERIIQVKIQIRGSDGKLKTFMGWRSQHNSALGPYKGGVRYHPNVTQDEVEALSMIMTWKNSLLLLPYGGGKGGVRVDPKKLTREELEQLSRKYIQAIYKYLGSELDIPAPDVNTDSQTMAWFLDEYIKITGKVDFAVFTGKPVELGGIGVRLYSTGLGVATIAKEAANKFIGGVEEARVIIQGFGNVGYYAGKFLSEMGAKIVGVSDSKGGVINEKGIDVGKAIEIKEKTGSVINYPEGRKVTNEELLISDCDILIPAALENVINKFNAPKVKAKLIVEGANGPLTADADEIMRQRGIAVVPDILANAGGVVGSYVEWANNKMGEIISDEEAKKLIVDRMNNAFNTLYDYHQKKLEDHDLRTAAMALAVDRVVRAMKARGIL

SEQ ID NO: 6492 - protein, 229 aa, Oryza sativa
WCQIHDRRGVGLALGVGGVAGAAAVGTGQHFRGVRKRPWGRYAAEIRDPAKKSRVWLGTFDTAEEAARAYDAAAREYRGAKAKTNFPYPNGAPAAGVNSGSSNSSTVESFGSDVQAPMKAMPIPPSLELDLFHRAAAAAAAGAGGMRFPFEGYPVSHPYYFFGQAAAAAAASGCRMLKIAPAPVTVAALAQSDSDSSSIVDLAPSPPAALAKKAIAFDLDLNCPPPMEV

SEQ ID NO: 6493 - protein, 127 aa, Haemophilus ducreyi 35000HP
MAYSDKVIDHYENPRNVGTFDKEATDVGTGMVGAPACGDILRLQIKVNDDGIIEDARFKAYGCGSAIASSSLITEWVKGKSLDEAGAIKNSDIAEELELPPVKVHCSILAEDAIKAAIADYKEKQAK

SEQ ID NO: 6494 - protein, 399 aa, Shigella flexneri 2a str. 301
MNLFSYHSGTRAGIMKKQTQLLSALALSAGLTLSASFQAVASIPGQVADQAPLPSLAPMLEKVLPAVVSVRVEGTASQGQKIPEEFKKFFGDDLPDQPAQPFEGLGSGVIINASKGYVLTNNHVINQAQKISIQLNDGREFDAKLIGSDDQSDIALLQIQNPSKLTQIAIADSDKLRVGDFAVAVGNPFGLGQTATSGIVSALGRSGLNLEGLENFIQTDASINRGNSGGALLNLNGELIGINTAILAPGGGSVGIGFAIPSNMARTLAQQLIDFGEIKRGLLGIKGTEMSADIAKAFNLDVQRGVFVSEVLPSSGSAKAGVKAGDIITSLNGKPLNSFAELRSRIATTEPGTKVKLGLLRNGKPLEVEVTLDTSTSSSASAGRCNVERWSAKRWRQRY

SEQ ID NO: 6495 - protein, 318 aa, Arabidopsis thaliana
MAKETVCVTGANGFIGSWIIRTLIEKGYTKIHASIYPGSDPTHLLQLPGSDSKIKIFEADLLDSDAISRAIDGCAGVFHVASPCTLDPPVDPEKELVEPAVKGTINVLEAAKRFNVRRVVITSSISALVPNPNWPEKVPVDESSWSDLDFCKSRQKWYPISKTLAEKAAWEFSEKHGTNIVTIHPSTCLGPLLQPNLNASCAVLLQLLQGSTETQEHHWLGVVHVKDVAKGHVMLFETPDASGRFLCTNGIYQFSEFAALVSKLFPEFAVHKFDKETQPGLTSCNDAAKRLIELGLVFTAVEDAVKETVQSLRDKGFL

SEQ ID NO: 6496 - protein, 355 aa, Shigella flexneri 2a str. 301
MFVKLLRSVAIGLIVGAILLVAMPSLRSLNPLSTPQFDSTDETPASYNLAVRRAAPAVVNVYNRGLNTNSHNQLEIRTLGSGVIMDQRGYIITNKHVINDADQIIVALQDGRVFEALLVGSDSLTDLAVLKINATGGLPTIPINARRVPHIGDVVLAIGNPYNLGQTITQGIISATGRIGLNPTGRQNFLQTDASINHGNSGGALVNSLGELMGINTLSFDKSNDGETPEGIGFAIPFQLATKIMDKLIRDGRVIRGYIGIGGREIAPLHAQSGGIDQLQGIVVNEVSPDGPAANAGIQVNDLIISVDNKPAISALETMDQVAEIRPGSVIPVVVMRDDKQLTLQVTIQEYPATN

SEQ ID NO: 6497 - protein, 141 aa, Burkholderia sp. 383
MAIERTLSIIKPDAVAKNVIGQIYSRFEGAGLKIVASRMAHLSRADAEKFYAVHAARPFFKDLVDFMISGPVMIQVLEGEGAILKNRDLMGATDPKKAEKGTIRADFADSIDANAVHGSDAAETAAVEVAFFFPEMNVYSR

SEQ ID NO: 6498 - protein, 438 aa, Arabidopsis thaliana
MGRDRISELPDGLLNHILMYLHIEESIRTSVLSSRWRKLWLKVPGLDVNVHDFPADGNLFESLMDKFLEVNRGRLQNFKLNYESNLYYLMDRFVPWIATVVDRGIQHLDVTATDCPPWTIDFMPANICKSKTLVSLKLVNVGLDTPKFVVSLPCLKIMHLEDIFYSPLIAENLISGCPVLEDLTIVRNHEDFLNFLRVMSQTLKNFRLTFDWGMGSNDFSVEIDAPGLKYMSFRDSQSDRIVVKNLSSLVKIDLDTEFNLKFGLGSPLEPEDLTKRDIIRDFLTGISSVKHMIISHPTLEVLYRYSKIGQLPKFHNLYHLQAVFSSSLLQLLPAFLEICPNLKNLILDYSISAEPEQIDFTNLPRCLISTLEYVEIKQLTMREESGIKLVKYFLENSAVLKKLTLSFIDSPMTNQESEIYMQLLTSTKRSRGCHVLIL

SEQ ID NO: 6499 - protein, 277 aa, Nicotiana tabacum
MDSSSCSSHFFYPMNSDLSSDSSWEWSNLNSTSLPFNVNDSEEMLLFGVLTNTAQETTSETVTSYHVKEEEVSSKSKVIKEIEEKPAKEKSFRGVRRRPWGKFAAEIRDSTRNGVRVWLGTFDSPEAAALAYDQAAFLMRGTSAILNFPVETVQESLRDMKCHVDEECSPVVALKKRHSLRKKSLSSKKSNSSSNSKVVREVKMENVNVVVFEDLGPDYLEQLLSSSSSDHSSCNEAFYHVNQRFTQLCIYLFIYLYYFCLFSFRGREIGEFHLFVL

SEQ ID NO: 6500 - protein, 190 aa, Triticum aestivum
  misc_feature (114)..(114): Xaa can be any naturally occurring amino acid
  misc_feature (124)..(124): Xaa can be any naturally occurring amino acid
  misc_feature (151)..(151): Xaa can be any naturally occurring amino acid
  misc_feature (161)..(161): Xaa can be any naturally occurring amino acid
  unsure (1)..(190): unsure at all Xaa locations
MAPTVMASSATSVAPFQGLKSTAGLPVSRRSNGASLGSVSNGGRIRCMQVWPIEGIKKFETLSYLPPLSTEALLKQVDYLIRSKWVPCLEFSKVGFIFREHNASPGYYDGRYWXTMWKLPMFGXCTDATQVINEVEEVKKEYPDAYVRIIXGFDNMRQVQXASGFIPFKPTGLRRSPAKAKTAHSTRGHI

SEQ ID NO: 6501 - protein, 1226 aa, Arabidopsis thaliana
  misc_feature (227)..(227): Xaa can be any naturally occurring amino acid
  misc_feature (708)..(708): Xaa can be any naturally occurring amino acid
  unsure (1)..(1226): unsure at all Xaa locations
MAARNLEKMASIDAQLRLLAPGKVSEDDKLIEYDALLLDRFLDILQDLHGEDVREFVQECYEVAADYDGNRNTEKLEELGNMLTSLDPGDSIVVTKSFSNMLSLANLAEEVQIAYRRRIKKSLKGDFADEACATTESDLEETLKRLLQLNKTPEEVFDALKNQTVDLVLTAHPTQSVRRSLLLDLASVRECLTQLYAKDITPDDKQELDEALQREIQAAFRTDEIRXRTPPTPQDEVRAGMSYFHETIWKGVPKFLRRVDTALKNIGINERVPYNAPLIQFSSWMGGDRDGNPRVTPEVTRDVCLVPRMMAANLYFSQIEDLMFEMSMWRCNEELRVRAERQRCAKRDAKHYIEFWKQIPANEPYRAILGDVRDKLYNTRERARQLLSSGVSDVPEDAVFTSVDQFLEPLELCYRSLCDCGDRPIADGSLLDFLRQVSTFGLALVKLDIRQESERHSDVLDAITTHLGIGSYKEWSEDKRQEWLLSELSGKRPLFGPDLPKTEEVADVLDTFKVISELPSDSFGAYIISMATAPSDVLAVELLQRECGITDPLRVVPLFEKLADLESAPAAVARLFSIEWYRNRINGKQEVMIGYSDSGKDAGRLSAAWQLYKTQEELVKVAKEYGVKLTMFHGRGGTVGRGGGPTHLAILSQPPDTIHGQLRVTVQGEVIEQSFGEEHLCFRTLQRFTAATLEHGMHPPVSPKPEWXRVLMDEMAIIATEEYRSVVFKEPRFVEYFRLATPELEYGRMNIGSRPSKRKPSGGIESLRAIPWIFAWTQTRFTYPKNLNMLKEMYNQWPFFRVTIDLVEMVFAKGDPGIAALYDRLLVSEELQPFGEQLRVNYQETRRLLLQVAGHKDILEGDPYLRQRLQLRDPYITTLNVCQAYTLKQIRDPSFHVKVRPHLSKDYMESSPAAELVKLNPKSEYAPGLEDTVILTMKGIAAVMGSGKERDTFVYLAKLSEQAERYEEMVESMKSVAKLNVDLTVEERNLLSVGYKNVIGSRRASWRIFSSIEQKEAVKGNDVNVKRIKEYMEKVELELSNICIDIMSVLDEHLIPSASEGESTVFFNKMKGDYYRYLAEFKSGNERKEAADQSLKAYEIATTAAEAKLPPTHPIRLGLALNFSVFYYEIMNAPERACHLAKQAFDEAISELDTLNEESYKDSTLIMQLLRDNLTLWTSDISEEGGDDAHKTNGSAKPGAGGDDAEDTLICNSLLSSYYLSLWIQS

SEQ ID NO: 6502 - protein, 203 aa, Glycine max
MVSLKLQKRLASSVLKCGKGKVWLDPNEVNEISMANSRQNIRKLVKDGFIIRKPQKIHSRSRARRAHEAKQKGRHSGYGKRRGTREARLPTKILWMRRMRVLRRLLRKYREAKKIDKHMYHDMYLKVKGNMFKNKRVLMESIHKSKAEKAREKTLSDQFEAKRAKSRQQEEKALPGREERLAQGPRDHAPAPAGAPPQKSWAP

SEQ ID NO: 6503 - protein, 305 aa, Schizophyllum commune
MQIFVKTLTGKTITLEVESSDTIDNVKAKIQDKEGIPPDQQRLIFAGKQLEDGRTLSDYNIQKESTLHLVLRLRGGMQIFVKTLTGKTITLEVESSDTIDNVKAKIQDKEGIPPDQQRLIFAGKQLEDGRTLSDYNIQKESTLHLVLRLRGGMQIFVKTLTGKTITLEVESSDTIDNVKAKIQDKEGIPPDQQRLIFAGKQLEDGRTLSDYNIQKESTLHLVLRLRGGMQIFVKTLTGKTITLEVESSDTIDNVKAKIQDKEGIPPDQQRLIFAGKQLEDGRTLSDYNIQKESTLHLVLRLRGGL

SEQ ID NO: 6504 - protein, 389 aa, Candida albicans SC5314
MSVTATSHDILKSIDDSILPPEDTLSEAMYNNVKLDHYFNKLPKSSEENNINDQTNQLIVSAAPESEDSPAAEWKLLRTLAGAHQGWIRAIALDEITNKWYVTGSADSTIKIWDFENNSLKAVLTGHVLGIRSLCISKRHPYLFSGGEDKSLRCWDLERSNSDAGCQIRSYHGHLGGVYSIGLHPELDVLFSGGKDCVVRVWDIRSRVEAMTLLGHTNDITSIETDYNDPQVITSSMDGTIRLWDLRKSKTELLITNHSKSIRSMKSHPKEATFVSGDSNGEIKQWLLPKGELLNEFGTSQLSPNQRDNSRIINTLAINPVTNTLFSGYDDGKLEFYNYTTGNLQQSGQSPSLAGPEQSAIYASTFDMSGLRLLTCHGDKSIRIWGTSY

SEQ ID NO: 6505 - protein, 584 aa, Corynebacterium diphtheriae NCTC 13129
MNQLATMWKLAGPARIPVVFGAVLRLAQSLCLGVAFGAAMSVVIHIVHDTTPSPREVVWIAALCVGSLIAQLCCGWAAARLSWLAAYQAVAHMRLQLLAHLREIPVNSLGKRSRGDIAALLSTDTQLIEDFLSEGLPRLGQALGIPTIVLVAVGMHNPLLALAIALPIVVVIPVMSWSSARLAQLGDRRGATQAGAAARMIDLVAAMPALRVYSTSARTQAWYGAAVEEFRALSVEMVHRLIVPSTAAGLVLMLGIPVVILTGGYSLDTLGADATLVAVVLVVVLNVYQPVQGLLSTNESWQMAQASLRRMLAVLTIEPLPTAAQPNELGKHPHGVAVELEHVSYTYPDGSLGVRDVTLSAAAGETTAIVGASGSGKSTVLNLISRFDDPSSGRVLIDGIDLRTIDPAQRSDLVTVVFQDVHLFPGTIADNIAVGRPDATRDDIIAAATLACADDFIQALPNGYDTILGEDGSGLSGGQRQRLSIARAALKDAPVVLLDEATSALDPVNEAAVQRGLAALQRGRTTIVVAHKLATIAAAHRIIVLDSGHVAESGTHDELIAHNGIYASLWNTLERSSQWRIGEE

SEQ ID NO: 6506 - protein, 281 aa, Physcomitrella patens
MGRGKIEIKKIENTTSRQVTFSKRRGGLLKKAHELAVLCDAEVALVIFSSTGKHFEFASSGSMRDIIERYRKNSDGAVKRGTNTDLLGREVIKLKQQVERLESSQRHMLGEDLSALKVSDLLELEQQLDQGASRVRARKNQLILEEIEDLRRKEHELMIANEALRKKIADAEGAAEAAARANFPDARLESPKPFASDFSRDMSVSSQLAASVYPHPNLLQAQRSQTSLQLGRLSEQQIPSTEEGCAGESSLKWDHPHFHIPNRLHANISPSVRTYKLHVDR

SEQ ID NO: 6507 - protein, 199 aa, Zea mays
MGDWDPRGRPGRASLHPSPAAANPSPAAVVATAAARRRPPIAAKMQIFVKTLTGKTITLEVESSDTIDNVKAKIQDKEGIPPDQQRLIFAGKQLEDGRTLADYNIQKESTLHLVLRLRGGAKKRKKKTYTKPKKIKHKHKKVKLAVLQFYKVDDATGKVTRLRKECPNTECGAGVFMANHFDRHYCGKCGLTYVYNQKA

SEQ ID NO: 6508 - protein, 491 aa, Deschampsia antarctica
GPKSRSVEAISACLKAGMSVARFDFSWGDAAYHQETLENLKLAIKATKKLCAVMLGTVGPELQVVNKSEVTISLEENESVVLTPHQGQEASSKLLPINFSGLAKALKPGDTIFVGQYLFTGSETTSVWLEVSEVQGDDVVCVIKNSATLAGSLFTLHCSQIHIDLPTLSDEDKDVIKKWGAPNKIDFLSLSYTRHAEDVRQAREYLSKLGDLSQTLIFAKIENVEGLNHFDEILEEADGIFLSRGNLGIDLPPEKVFLFQKSALHKCNMAGKPAVVTRVVDSMTDNLRPTRAEATDVANAVLDGSDAILLGAETLRGLYPVETISTVGRICAEAEKVFNQDLYFKRTVKYVGEPMTHLESIASSAVRAAIKVKASVIICFTSSGRAARLIAKYRPTMPVLSVVIPRLKTNQLKWSFTGAFEARQSLIVRGLFPMLADPRHPAESTSTTNESVLKVALDHGKTSGVIKSHDRVVVCQKVGDSSVVKIIELDD

SEQ ID NO: 6509 - protein, 153 aa, Deschampsia antarctica
MQIFVKTLTGKTITLEVESSDTIDNVKAKIQDKEGIPPDQQRLIFAGKQLEDGRTLADYNIQKESTLHLVLRLRGGTMIKVKTLTGKEIEIDIEPTDTIDRVKERVEEKEGIPPVQQRLIYAGKQLADDKTAKDYNIEGGSVLHLVLALRGGY

SEQ ID NO: 6510 - protein, 206 aa, Acinetobacter sp. ADP1
MIDLYYWGTPNGHKITIALEEMGLEYTIYPINILENDQFQPDFLRISPNNKIPAIVDQNGPRDQPISIFESGAILQYLGRKTGLFYPIDEQERVEVEQWLMWQMGGFGPMLGQNHHFGRFAKEKIPYAIDRYVNETKRLYKVLNTQLIGQKFVAGEYSIADMAILPWILRHEWQSVDLNDYPYVQDYVERLTARPAIQKALSIQII

SEQ ID NO: 6511 - protein, 162 aa, Saccharomyces cerevisiae
MTTSFYDLECKDKKGESFKFDQLKGKVVLIVNVASKCGFTPQYKELEELYKKYQDKGFVILGFPCNQFGKQEPGSDEQITEFCQLNYGVTFPIMKKIDVNGSNADSVYNYLKSQKAGLLGFKGIKWNFEKFLVDSNGKVVQRFSSLTKPSSLDQEIQSLLSK

SEQ ID NO: 6512 - protein, 138 aa, Cucumis sativus
MAKPIPRIGSRRNGRISSRKSTRRIPKGVIHVQASFNNTIVTVTDVRGRVISWSSAGTCGFKGTRRGTPFAAQTAAGNAIRGVVDQGMQRAEVMIKGPGLGRDAALRAIRRSGILLSFIRDVTPMPHNGCRPPKKRRV

SEQ ID NO: 6513 - protein, 594 aa, Thiomicrospira crunogena XCL-2
MSKIVDILIPDIGDFAEVDVIEVLVSAGEEIIQDDSLLTLESDKATMEIPAPYAGRVVEMNVDVGDKVKEGSVVGKIEIADVETVSSNVEESVTPEPTPEKTDQKTTETPAPKAVSAADLPDADMQCDVLVLGSGPGGYTAAFRAADLGKKVVMIERYESIGGVCLNVGCIPSKALLHMSVVLNETREMGAHGIEFAEPKIDTNKMRAFKDSVIGKLTGGLSGLAKARNVDVVQGYGKFSSANTVTVDLADGGTKTIAFENAIIAAGSRVVKLPFIPHDDPRVMDSTDALELEEVPKRMLVIGGGIIGLEMAQVYDSLGSNITVVELGDTIIPGADKDISKPLLRRIKKKYENIYLKSKVTNVEAKEEGLVVTFEGKDCPETDTFDRILVAVGRAPNGKLIDAEKAGVAVNDWGFIEVDERQKTNVDHIYAIGDIVGQPMLAHKAVHEGKVAAEVINGMPSAFTPMGIPSVAYTDPEVAWAGKTEDELKAEGIEYEKGAFPWAASGRSLSLGRDEGLTKALFCAETHRLLGCGIVGPNAGELVAEAMLAIEMGADMQDIGLTIHPHPTLSETLCFAAEMAEGTITDLMPPKKKK

SEQ ID NO: 6514 - protein, 142 aa, Saccharomyces kluyveri
NGSSVSLRSEAVSRSTSSRSITNSSNSGSTNSKLKKAKERRVKIALSGGSLIQVLHEGLLRRTDVQWGKWDIYFADERLVPFESGESNYGPAKRKIFDLIDTEKYGTPKVYHIDESLIDDPQECADDYEKVLIKGFAGRDSV

SEQ ID NO: 6515 - protein, 136 aa, Mesorhizobium sp. BNC1
MMTGETRPKIQKSDEEWRKDLTPEQYHVTREHGTERAFTGPYWDNKREGVYRCVACGRPLFSSETKYDSGTGWPSFYAPMDDDAVSLHKDQSYSMTRTEVRCAECDSHLGHVFDDGPAPTGLRYCMNGNALNFEEK

SEQ ID NO: 6516 - protein, 280 aa, Arabidopsis thaliana
  misc_feature (192)..(192): Xaa can be any naturally occurring amino acid
  misc_feature (212)..(212): Xaa can be any naturally occurring amino acid
  misc_feature (214)..(214): Xaa can be any naturally occurring amino acid
  misc_feature (227)..(227): Xaa can be any naturally occurring amino acid
  misc_feature (229)..(229): Xaa can be any naturally occurring amino acid
  misc_feature (237)..(237): Xaa can be any naturally occurring amino acid
  misc_feature (244)..(244): Xaa can be any naturally occurring amino acid
  misc_feature (257)..(257): Xaa can be any naturally occurring amino acid
  misc_feature (264)..(264): Xaa can be any naturally occurring amino acid
  misc_feature (267)..(269): Xaa can be any naturally occurring amino acid
  misc_feature (273)..(273): Xaa can be any naturally occurring amino acid
  misc_feature (275)..(276): Xaa can be any naturally occurring amino acid
  unsure (1)..(280): unsure at all Xaa locations
DAWGAFLVVLVERLIYTRKRKKKTVESEREREREREREREREMEDIQEEENGTDEEVLGSSLTMEKVAAAKQYIENHYKAQNKNIQERKERRWILERKLASSGVPKEEQINMIKDLERKETEFMRLKRNKISVDDFELLTIIGRGAFGEVRLCRERKSGNIYAMKKLKKSEMVMRGQVEHVRAERNLLAEVXSHYIVKLYYSFQDPEYLYLXMXYLPGGDMMTLLMXEXTLREDVAXFYIAQSXLAIESIHRYNYIXHRGIKPXNLXXXKVGXMXXSPFG

SEQ ID NO: 6517 - protein, 362 aa, Burkholderia sp. 383
MPKSKRHEPQAESEKISRATQASVGRAGASTDDEDDVADNERDLEARDSDSEGGDDEREGRAEAAPDVDDFRTMLQAELTADTIQHYLNRISVKPLLTVEEEQRYSRLAKAGEFEARQVMIERNLRLVVSIAKGYLNRGVPLLDLIEEGNLGLMHAIEKFDPTRGFRFSTYATWWIRQSIERAIMNQARTVRLPVHVIRELNQVLRAKRHLEKNSMSTGEAAERREASIDDIAYLTGKTAEEVTDILALNEHTASLDAPLDLDPASSLLDLLPDDQSQSPDAEVQHRELETLTRAWLSRLSDKHRHVIERRFGLNHIEPATLEELADEMGLTRERVRQIQQEALVRLKRFFASNGVRKDAVL

SEQ ID NO: 6518 - protein, 149 aa, Sonneratia paracaseolaris
MADPLTDDQISEFKEAFSLFDKDGDGSITTKELGTVMRSLGQNPTEAELQDMINEVDADGNGTIDFPEFLNLMARKMKDTDSEEELKEAFRAFDKDQNGLISAAAELRHLMTNLGEKLTDEEVDEMIREADVDGDGQINYDEFVKVMMA

SEQ ID NO: 6519 - protein, 180 aa, Nicotiana tabacum
MASSVLSSAAVATRTNVAQANMVAPFTGLKSAASFPVSRKQNLDITSIASNGGRVQCMQVWPPYGKKKYETLSYLPDLSEEQLLSEIEYLLKNGWVPCLEFETERGFVYRENNKSPGYYDGRYWTMWKLPMFGCTDATQVLAEVGEAKKAYPEAWIRIIGFDNVRQVQCISFIAYKPEGY

SEQ ID NO: 6520 - protein, 89 aa, Triticum aestivum
RRPGRCIGRSKEELPEERALDIMDLCAEQPRFTLSYSKGSSQVMAQYYQLIRLGFKGNRKMMDNCKKNAMVLKEGLERTGRFNMVSKDQ

SEQ ID NO: 6521 - protein, 447 aa, ASPERGILLUS NIDULANS FGSC A4
MPHSVLYTKIDTRPPEVIHSRGNYLHTSDGRTIFDASGGAAVACLGHNEPQVKQAIMAQLDKVAYIYSPFFTVPAAEEIATFLTESTGGAMSKVFIVSSGTEAIEAALKMTRQYFTELSKPQLQRTKFIARRQSYHGNTLGSLAAGGHKARRAIFEPILAASTSHVSPCYPYREMKKGESNEEYVSRLAEELENEFQRVGPDTVCAFIAETMSGTTLGCIPAVPGYLKAMKQVCDRHGALFVLDEVMSGMGRTGTLHAWQQEGVVPDLQTVAKGLGAGYAPVGALLVGNRVADVLSKGTGSFTHSQTYQGHPIACAAACAVQKIIQKENLLDNVRRQGEYLGRLLNERLGGHRNVGDVRGRGLFWALEFVRDKETKEPFPAEAGIAQKVHLTGLQKEHSISVIPGAGVADGRNGDIIQIAPAYNVSKEDIELIVERVEGVVHAAFGA

SEQ ID NO: 6522 - protein, 326 aa, Zymomonas mobilis
MPYHQPAEWMPHDAVWIGFPSDASLWLEDLEPAQAEVVAFAKAVAAQGEGEKVYLVAAHKEAADQAVKMAGSDIEVICHPFGDIWLRDNAPLFVKEGDKKALALFRFNGWGGKYNLDGDQTIGRDLAKDTALPVLEKNWVLEGGSIDGDGHGLVVTTEECLLNPNRNPELSRGDIARHLRNDLGYDRVLWLRKGLHNDHTDGHVDNLARFVGENHLVVPIATDQDDPNREVYDQAAQIATEFGVKVTRIPSTGRITIDDEVVPASYMNFYIGNKVVVVPVYGAKNDSAIVQAFEALFPSRKVVALPAGHILTGGGSFHCISQQWPA

SEQ ID NO: 6523 - protein, 282 aa, Zymomonas mobilis
MTEITVAALQLALTDDIQTNIDRVSVLVEEAAAQGAKIILPPELFEGHYFCATEDESCFARAKPVEKHPVVLAMQKLAKRLKVTIPTSFFESDPPHYYNSLAMINSDGEVMGVYRKSHIPDGPGYEEKFYFRPGNSGFKVWDCGGIKIGVGICWDQWYPETARAMMLMGAELLFFPTAIGNEPHDPDLDTSRLWRRAMIGHAVSNVVPVIASNRIGQEATLSFYGHSFIADQRGDLVQAFGKDESGVLVAHFDIEQIRQHRAAFGFFRDRRPELYHRISEDR

SEQ ID NO: 6524 - protein, 123 aa, Brassica napus
VCVWCFVISGDVLSGNDNGGSVHLGVLQEWFGSHWWNTRIFSLLFIYAFVLLPLVLCRRVERLAFSSAISFLLAVLFVVISSVLAISALMEGQTKNPRLFPDLTNGGSFWNLFTASPVIVTAF

SEQ ID NO: 6525 - protein, 229 aa, Aster tripolium
MQIFVKTLTGKTITLEVESSDTIDNVKAKIQDKEGIPPDQQRLIFAGKQLEDGRTLADYNIQKESTLHLVLRLRGGMQIFVKTLTGKTITLEVESSDTIDNVKAKIQDKEGIPPDQQRLIFAGKQLEDGRTLADYNIQKESTLHLVLRLRGGMQIFVKTLTGKTITLEVESSDTIDNVKAKIQDKEGIPPDQQRLIFAGKQLEDGRTLADYNIQKESTLHLVLRLRGGL

SEQ ID NO: 6526 - protein, 581 aa, ASPERGILLUS NIDULANS FGSC A4
MSLARFKHLPRATQGPIKCPYKGAALLGNANYNKGSAHSERERREFNLHGLLPPNIQTLDEQVERAYQQYKSRPDDLAKNTFMASMKSQNQVLYYRLLQTHLKEMFSVIYTPTEADAIQNYSRLFRKPEGCYLSIRDHGEKEIDECFANFSGGDDVDYIVVSDGEQWQILGIGDQGVGAILISVAKLVITTACAGIHPSRQLPVVLDCGTNNEELLNDKLYLGLRQRRAQGEEYDKFVDKFVRMARKRFPNAYIHLCSEDFGLQNAKRILDRYRSQLPCFNDDIQGTGCVTLAALMAGLHVSNVKLKDVRVVCYGSGSAGTGIADQISDAIATEAGFSKSDALKQIWCIDKQGLLLKSQGDALTASQKYFAKEDNEWPEGQDIDLYSVIKHVKPHVLIGTSTKPGSFTEETIREMAKHVDRPIIFPLSNPTRLHEAQPQDITKWTDGKALIATGSPFPPVEYNGTKTEIVSAECNNSTAFPGIGLGAVLSRASRLSEKMVVAASKALAAKAPALEDPNKPLLPDVENVRELSLNVAKAVIQTAVKEGLAQEEGIPEDEKDLEDWIRAQMWEATYRDLEKAD

SEQ ID NO: 6527 - protein, 147 aa, Deschampsia antarctica
QIFMGLMVNPPKPGDISYLKYATESKSILESLRRRAQIMTDGFNSCRNVVCNFTEGAMYSFPQIRLPQRAMDTAKSAGKAPDVFYCLMLLEATGISTVPGSGFGQKEGVFHLRTTILPAEEDMPAIMSSFKKFNDSFMEQYQDYSKL

SEQ ID NO: 6528 - protein, 388 aa, Moorella thermoacetica ATCC 39073
MTDKQILLLPGPTPVPPQVALAMARPAINHRGPEFKALWAEVTSGLKDVFQTRAEVVILTASGTGGMEAAVANLISPGEKVLVVTIGAFGERFVQICRAFNVEAEVVAFPYGQAADPEVIAERLAADTGHEIKAILVQHNETSTGVLNDIQAISRARGDHPALLIVDSISGLAAADLPMDAWHIDVVIAGSQKAFMLPPGLTMLAVGERAWQAAEKCSNQRFYLDIKKARNSGLKGQTPFTPAVPLLYGLQESLRLLKAETLAGSYARHALMRDMVRAGVRALGLKLLADEAIASPAVTAVCVPEGMKPADIINPLRERFGVVVAGGQGAVKDQVFRIGHLGYVSFNAILAGLAALEAVLADAGVPVTRGAAVAAASTILSESEAVDK

SEQ ID NO: 6529 - protein, 357 aa, Lycopersicon esculentum
MKKGSFAPNLKLSLPPPDEVALSKFLTESGTFKDGDLLVNRDGVRIVSQSEVAAPSVIQPSDNQLCLADFEAVKVIGKGNGGIVRLVQHKWTGQFFALKVIQMNIDESMRKHIAQELRINQSSQCPYVVICYQSFFDNGAISLILEYMDGGSLADFLKKVKTIPERFLAVICKQVLKGLWYLHHEKHIIHRDLKPSNLLINHRGDVKITDFGVSAVLASTSGLANTFVGTYNYMSPERISGGAYDYKSDIWSLGLVLLECATGHFPYNPPEGDEGWVNVYELMETIVDQPEPCAPPDQFSPQFCSFISACVQKHQKDRLSANDLMSHPFITMYDDQDIDLGSYFTSAGPPLATLTEL

SEQ ID NO: 6530 - protein, 328 aa, Gluconobacter oxydans 621H
MRYLVTGGAGFVGSHAVLALLDAGHDVVVLDNLSTGYREAVPDGVPFHKVDLLDYAATSAVVAQGKWDGVLHFAALSLVGDSMRDPFHYLRQNYLTALNLVQICVEHGVKKIVFSSTAALFGGPERLDPIPETAPVQPGSPYGESKFMIERVLHWADAIYGLRSACLRYFNAAGADPQGRAGEDHRPETHLIPLTIDAALGRRPALKLFGTDYPTRDGSCVRDYIHVTDLADAHVRALGQIDHRSVTYNIGNGQGYSNLEVIQSVERVSGRKVPWEAAPRREGDPALLVADSTTLRNDTGWTPRFGNIDSIVETALRWRESHPNGYGM

SEQ ID NO: 6531 - protein, 273 aa, Ralstonia metallidurans CH34
MTATAPMRVAAIQTVTGITLDDNLARADALIAEAARGGAELVLLPEYFCMMGRHETDKVAIREQDGDGPVQSFLADAARRHRVWLVGGTLPMWCNDDARVYNTSLAFDPHGRRVARYDKIHLFGFTKGTESYDESRTILAGKTPVAFDAPCGRVAMSVCYDLRFPELYRGLAGKNDVSLILMPAAFTYTTGQAHWEILLRARAIENQCYVLAAAQGGKHENGRRTWGHSMLVDPWGELMGVLPEGEGIVSGTVDPTRLAEVRQNLPALRHRVL

SEQ ID NO: 6532 - protein, 597 aa, Oryza sativa (japonica cultivar-group)
MDTTIGSVPTASDAAAPAPAANSAPREATLGRHLARRLAEVGARDVFTVPGDFNLTLLDELEAEAGAGHGGVRLVGCCNELNAAYAADGYARARGGGVGACAVTFTVGGLSAINAVAGAFSENLPVVCIVGGPNSNDYGSNRILHHTIGLPDFTQELRCFQTVTCYQAVVNNLEDAHEQIDAAISTAIKESKPVYISISCNLPSIPHPTFSRHPVPFFLSPRLSNQMNLEAAVETAAAFLNKAVKPVLVGGPKMRVAKACKSFVELADACGYPVAVMPSAKGLVPEHHPRFIGTYWGAVSTPFCAEIVESADAYLFAGPIFNDYSSVGYSLLLKKEKAIIVQPDRVVIGHGPAFGCVLMKDFLHALSARLKKNTAAYENYRRIYVPPGEPPLSEPGEPLRVNVLFQHIQKMLSANSAVIAETGDSWFNCQKLKLPEGCGYEFQMQYGSIGWSVGATLGYAKAAKDKRVIACIGDGSFQVTAQEVSTMLRWGQKSIIFLINNGGYTIEVEIHDGPYNVIKNWNYTGVVEAFHNGEGKCYTAKVRTEEELKEAIEEAQGPKKDCLCFIEVIVHKDDTSKELLEWGSRVSAANSRPPNPQ

SEQ ID NO: 6533 - protein, 175 aa, Triticum aestivum
MAMVDEPLYPIAVLIDELKNEDIQLRLNSIRRLSTIARALGEERTRKELIPFLSENNDDEDERLAAGEWFTARVSSCGLFHIAYPSATDPLKTELRTIYGQLCQDDMPMVRRAAASNLGKFAATVEQSHLKTEIMSIFDDLTQDDQDSVRLLAVEGCAALGKLLEPQDCVAHILP

SEQ ID NO: 6534 - protein, 396 aa, Yarrowia lipolytica CLIB122
MTFHSLVNKVSGQPPSYNKKADYKFGKTLGAGTFGIVKYAKQHSTGEEVAVKIIVKKNLKGNDHVVIEELSLLKECHHPHIIAFKDWFESKEKFYIVTQLATGGELFDRICDYGKFTEKDARQSVKDILEAVDYLHSKDIVHRDLKPENLLFVTPDPHASLVLTDFGIAKHLKSPDEVLHSMAGSFGYAAPEVLKGTGHGKPCDIWSLGVITFTILSGYSPFRSETVRDFLEEIEGPNALVFHKKYWQDVSEDAKDFIKSCLALDPALRPTSAELLKHEWITGDTTKSIDLLPNIREGFNARSKFRQAIEAVRLHNRIKSLNMVDSDDEDEEEEAVADTEKPSLLSVASSMRPRAHSRSKSGTGAAAFQEVVLAAKRNKELLEKEKASKQDAAEEK

SEQ ID NO: 6535 - protein, 248 aa, Triticum aestivum
MAMDAERRQAELIEQFSAQAAALSSAPQLAALVLEATSHPALFAFSELLTLPALSKLTGTQYASSLDLLRLFAYGTLKDYKSNSSALPALLPDQARKLKQLSVLTLAESTKVLPYDQLMQELDVSNVRELEDFLINECMYSGIVRGKLDQLRRCFEVQFAAGRDLTPDQLTNMIETLSDWLGTSDNLLHHIQEKIKWADTTSELNKKHQKEFEDRVEEAKKSVKKLNNVSRQTMTYGGMTTFSLNLEE

SEQ ID NO: 6536 - protein, 433 aa, Leptospira interrogans serovar Copenhageni str. Fiocruz L1-130
MIWYPFTLQFEPDSPLKIERAKGEFLYDELGNSYIDGISSWWVSIHGHNHPKIVQAVKNQLEKLDHVLLAGFTHDPAEKLAAELLKITDGLFQKVLYSDNGSTAVEIMIKLAYQYFQNIGEVDRKIFIKWNSSYHGDTIGTMSVGGNSVFNRVFQGLMFPTKEFQTPNCNFCPMGKKPESCKVECIDPIEEFFQKSPKAVAGIVIEPLILGSGGMIFYKEEVLQRLETISKKYGSLLLLDEVFTGFGRTGSVFAYQRAKIRPDFIALAKGLSAGVSAVAVTLTTDRIHSAFVTADPEKGFYHGHTMTGNPIACSAALASLKIFFEENRLEQILRLESKLNVGLKKIAKEFPKAVKNCRVLGAVGVLELEVGKASGYHYPGNKILKKKFLEKGVLLRPLGNVIYLTPPYNIENSSLEKIFSAIRETLSEISFGN

SEQ ID NO: 6537 - protein, 102 aa, Brassica napus
IRDCLAQLYAKDITPDDKQELDESLQREIQARFRTDEIRRTPPTPQDEMRAGMSYFHETIWNGVPKFLRRVDTALKNIGIDERVPYNAPLIQFSSWMGGDRD

SEQ ID NO: 6538 - protein, 88 aa, Phaseolus coccineus
MSKLQSDALREAISGIMGDSKEKNRNFVETIELQIGLKNYDPQKDKRFSGSVKLPHIPRPKMKICMLGDAQHVEEAEKIGLDYMDVEA

SEQ ID NO: 6539 - protein, 296 aa, Triticum aestivum
VTLQNKFVQKSRLVPVRNSRDIVDPRVRNNKGVRKPILNFKGFMVGNAVIDDYHDFVGTFEYWWTHGLISDDTYQKLQLACEFDSSEHASDACNKIYDVAEAEEGPIDAYSIYTPTCKKTSLHRRRQIKGRRPWLPRGYDPCTEQYSTKYYNLPEVQKAFRANVTGIPYAWTGCSDVLFEYWKDSPRSMLPIYRELIAAGIRIWVFSGDADSVVPLTGTRYSIDALYLPTVTNWYPWYDEEEVAGWCQVYKGLTLVTIRGAGHEVPLHRPRQALKLFEHFLQDKPMPRPVPSIQSF

SEQ ID NO: 6540 - protein, 414 aa, Xanthomonas campestris pv. campestris str. ATCC 33913
MTIKSLALQCRDAAQVLSQLSADAKQALLLAMANALDTDATQILQANQRDVDAAREKGTGAAMLDRLTLTPARLSAVGAALREVAVLPDPVGQVTRDDVRPNGIRVQKVRVPLGVIAMIYEARPNVTADAAALCIKAGNGVILRGGSEAIHSNTAIARALQGALREANVPEAALTLVEDLRRETMLELLQLSDIVDLAIPRGGEGLIRFVAEHARVPVIKHYKGVCHLFVDASADVDLAVRLLVDGKASRPSACNSLETLLVHADIAERFLPAAAAALRARNVELRGDAATRAVLPEIAAASDDDYAAEFLDLILAIRVVPDLDTALAHIRQYGSDHTEVIATQTPANAETFVQSLRSAVVMVNASSRFSDGGELGLGAEIGISTTRLHSYGPMGLEALTVERFVVRGEGQVRH

SEQ ID NO: 6541 - protein, 376 aa, Leptospira interrogans serovar Copenhageni str. Fiocruz L1-130
MNLSPSNFIQKTSSILESLKKDFLFRSLEIPYGVDLSSNNYLGLTHHPKLIESVKEGLDLYGAGSGASRLVSGHRNSFERAEQCCSEWIGTETSLWVSNGYSANVGLISCIANAKSEVFTDRLNHASILDGIRLSGAQKIYYKHLNLNHLEELLQKSNRKEKIIISETVFSMDGDLAPIEDLLYLKNKYDAVLILDDAHGIGVFGQKGEGRVSQVLGSEKIKEVDFITYTSGKSLGLEGAWIGTSKIGKEFLINKMRTFIYSTAPMPAIAHAVPTSISIVKSMEKERVDLLQKASRFRVSIQTKNYPKTTSESQIVPVLFSSEKEVLDAAELCRKNGLYVKAIRPPTVNVPRLRISIHSDTTESILEKLISILPEF

SEQ ID NO: 6542 - protein, 73 aa, Phaseolus coccineus
MRKSCAFFFFLLVLLFASQVVVQTEARVCESQSHGFKGACTGDHNCALVCRNEGFSGGNCRGFRRRCFCTKIC

SEQ ID NO: 6543 - protein, 351 aa, GIBBERELLA ZEAE PH-1
MSSTKDIVLVTGANGFIGARTVEAFLAADYFVRAAVRSESSASSLFSALPVYASSGYLTAAIVHDISATGAFDDAVQGATAIAHLAAPVNFSNRDIDYVIKASMQGTLSILESAIKEPGLKSFVYMSSIVTVRGQSPKYPDKGYTEEDWNDQIEDALSKAGTDATGHQIYVASKLKAERAFWEFQKTHADKVNFTMTAVNPVWVAGPPLILPDDPEKLSETAIVAYRIMNGQDMPSTGPGNGTHVDVRDVARLIVFAVEKKQVADGQRYIVGGNGNYANIQAYRDLLRKAYPGRKNIISEGEPGKGYNQDYSTPEGGFLVDGSKAVQATGQDWISFDQMTLNAAKAYERYF

SEQ ID NO: 6544 - protein, 447 aa, Nitrosomonas europaea ATCC 19718
MKYNSIEEFKNYVSERNPGQPEFLQAVSEVIESLWPFIVDHSRYAEQGLLDRLIEPERMIIFRVAWVDDRGEVKVNRGYRIQYNSAIGPYKGGTRFHPSVNLSILKFLAFEQTFKNALTTLPMGGGKGGSDFDPKGKSPGEIMRFCQAYAAELFRHVGADTDVPAGDIGVGGREVGYMAGMVKKLTNRSDCVFTGKGLTFGGSLLRPEATGYGLVYFAEEMLNHSGCSLKGMRVSVSGSGNVAQFAIDKAMSLGAKVVTVSDSSGTVVDEAGFTPEKLAILAEVKNRLYGRVNEFAERVEAQFLPGEKPWHVPVDVALPCATQNELNENDAAILIRNGANCVAEGANMPCTAGAVERFHHAKVLFAPGKASNAGGVATSGLEMSQQAMRLSWTSGEVDMRLQEIMRAIHHSCTEYGKKPDGTVNYVDGANVAGFVKVAEAMLAQGVI

SEQ ID NO: 6545 - protein, 606 aa, Zea mays
MCGILAVLGCADEAKGSSKRSRVLELSRRLKHRGPDWSGLRQVGDCYLSHQRLAIIDPASGDQPLYNEDQSVVVAVNGEIYNHLDLRSRLAGAGHSFRTGSDCEVIAHLYEEHGEEFVDMLDGVFSFVLLDTRHGDRAGSSFFMAARDAIGVTPLYIGWGVDGSVWISSEMKALHDECEHFEIFPPGHLYSSNTGGFSRWYNPPWYDDDDDEEAVVTPSVPYDPLALRKAFEKAVVKRLMTDVPFGVLLSGGLDSSLVATVAVRHLARTEAARRWGTKLHSFCVGLEGSPDLKAAREVAEYLGTLHHEFHFTVQDGIDAIEDVIYHTETYDVTTIRASTPMFLMSRKIKSLGVKMVISGEGSDELFGGYLYFHKAPNKEELHRETCRKVKALHQYDCLRANKATSAWGLEARVPFLDKEFINAAMSIDPEWKMVQPDLGRIEKWVLRKAFDDEEQPFLPKHILYRQKEQFSDGVGYSWIDGLKAHATSNVTDKMLSNAKFIFPHNTPTTKEAYYYRMVFERFFPQKSAILTVPGGPSVACSTAKAIEWDAQWSGNLDPSGRAALGVHLAAYEHQHDPEHVPAAIAAGSGKKPRTIRVAPPGVAIEG

SEQ ID NO: 6546 - protein, 252 aa, Kluyveromyces lactis NRRL Y-1140
MEVVATLAPISCDNAEQANLPPIKDVLGDIPIVSSQIDKLRKELTRNKTELQASIAKMKALIENFDYESIVAIQKECQVIREFTNKIRMRMIKHDCIDIQNNSDIYINEIIPPTWFEFKREGPKYCVHCECVETIEWRNGPWGKATLCNACGLWYRKLKKKFTAEQSAIIMEEKRLFSNKHDRKEFSKFDADDKRLKIIKDSLIDRINKFIKEVELCKSTAAKLKQIKAKEDMDQKVTPREINKYDSISRIC

SEQ ID NO: 6547 - protein, 561 aa, Burkholderia fungorum LB400
MTTLKITGMTCDSCAAHVKEALEKVPGVQSALVSYPKGTAQLAIEAGTSSDALTTAVAGLGYEATLADAPPTDNRAGLLDKMRGWIGAADKPSGNERPLQVVVIGSGGAAMAAALKAVEQGAHVSLIERGTIGGTCVNVGCVPSKIMIRAAHIAHLRRESPFDGGIAATVPAIDRSKLLAQQQARVEELRHAKYEGILDGNPAITVVHGEARFKDEQSLVVRLNDGGERVVAFDRCLVATGASPAVPPIPGLKESPYWTSTEALVSDTLPERLAVIGSSVVALELAQAFARLGSQVTILARNTLFFRDDPSIGEAVTAAFRAEGIKVLEHTQASQVAHVNGEFVLTTGHGEVRADKLLVATGRTPNTRSLALDAAGVTVNAQGAIVIDKGMRTSTPHIYAAGDCTDQPQFVYVAAAAGTRAAINMTGGDAAINLTAMPAVVFTDPQVATVGYSEAEAHHDGIETDSRTLTLDNVPRALANFDTRGFIKLVIEEGSGRLIGVQVVAPEAGELIQTAVLAIRNRMTVQELADQLFPYLTMVEGLKLAAQTFSKDVKQLSCCAG

SEQ ID NO: 6548 - protein, 559 aa, Petunia x hybrida
MERASLRIVALLLCLSIGNVVVKAEDPYLPFDWNVTYGTISPLGVPQQGILINGQLPGPTINCTSNNNIVVNVFNHLDEPLLITWNGIQQRKNSWQDGTPGTMCPIMPGTNFTYHFQVKDQIGSFFYFPTTDLHRAAGGFGPINVHSRNLIPIPFDSPAAEYNVFVGDWYNKGYKSLKKILDGGRTIGRPDGIHINGKSGKVGDNAAEPLFTMEAGKTYRYRMCNVGMRTSVNVRIQGHTMKLVEMEGSHTVQNVYESLDLHVGQCLSVLVTADQEPKGYYMVVSSRFLKQAELSSVAIVRYANGKGPASSDLPAPPPDNTEGIAWSINQFRSFRWNLTASAARPNPQGSYHYGQINITRTIKIANSRSQVGGKLRFALNGISHSPAETPFKLAEYFGATDKVFKYDLMADEPPSGDKVTVDHNIKNATYRNYVEIIFENREKTIQTYHLDGYSFFAVAIEPGKWSPEKRKNYNLVDAVSRHSIQVYPNSWAAVMTTLDNAGLWNLRSDMWERYYLGQQLYFSVLLPTRSLRDELQPSLTTTLSVVLSKGMPMPPPYKA

SEQ ID NO: 6549 - protein, 431 aa, Burkholderia vietnamiensis G4
MVSRRTFLSGSGAALLGAAMVSKAGAASLPEAPTMAHPATQPPLQPPNGRPYTPVTTLNGWSLPWRMKNGWKEFHLTAEPVVREMAPGMKANLWGYNGQSPGPTIEAVEGDKVRIFVTNKLPEHTTVHWHGMLLPCGMDGVGGLTQPQIPPGKTYVYEFQLERHGTFMYHPHADEMVQMAMGMMGTFIVHPKDRAVMPVDRDFVFLMSAYDIDPGSYTPRVNTMTEFNMWTWNSRVFPGIDSLPVRAGDRVRIRFGNLTMTNHPIHLHGYSFEVVGTDGGWIPPSARWPEVTADVAVGQMRAIEFTANRPGDWAFHCHKSHHTMNAMGHQVPNLIGVPQKDLAKRISKLVPDYMAMGSTGGAMGAMEMPLPDNTLPMMTGTGPFGPLEMGGMFTVVKVRQGLGRNDYRDPGWFKHPKGTVAYEYTGELPDS

SEQ ID NO: 6550 - protein, 455 aa, Zea mays
MLAVSPAMCPDIEDRAAVAGDAGMEVVGMSSDDMDQFDFSVDDIDFGDFFLRLEDGDVLPDLEVDPAEIFTDFEAIATSGGEGVQDQEVPTVELLAPADDVGVLDPCGDVVVGKENAAFAGAGEEKGGCNQDDDAGEANADDGAAAVEAKSSSPSSSTSSSQEAESRHKSSSKSSHGKKKAKVDWTPELHRRFVQAVEQLGIDKAVPSRILEIMGIDSLTRHNIASHLQKYRSHRKHMIAREAEAASWTQRRQIYAAGGGAVAKRPESNAWTVPTIGFPPPPPPPPSPAPMQHFARPLHVWGHPTMDPSRVPVWPPRHLVPRGPAPPWVPPPPPSDPAFWHHPYMRGPAHVPTQGTPCMAMPMPAARFPAPPVPGVVPCPMYRPLTPPALTSKNQQDAQLQLQVQPSSESIDAAIGDVLSKPWLPLPLGLKPPSVDSVMGELQRQGVANVPPACG

SEQ ID NO: 6551 - protein, 193 aa, Oryza sativa (japonica cultivar-group)
MGGLSVIAPPAGDSASPAHRRARRAFLVSNYMILGAASGCGFLTLSLRLVPSVDGFLLILLHAITVAAAVAGCAVIAAPDPPRGRVYTTHMAGTVFVSILQGAAAVLTFSRTSDFLADGLKSYVREEDGAVILRMIGGLGVAIFCLEWIALALAFVLRYYAYVDRECGGNPLRRSAKVGGEDGAGTWPWPFQV

SEQ ID NO: 6552 - protein, 338 aa, Actinobacillus pleuropneumoniae serovar 1 str. 4074
MAILVTGGAGYIGTHTIVELLNINREVVVLDNLHNSSEVSLERVKQITGKAVKFYKGDVLDREILRKIFAEHKIESVIHFAGLKAVGESVQKPLFYYENNVGGSIVLVEEMIKAGVNTIVFSSTATVYGVPEVVPVTEACRVGDTTSPYATSKYMVERVLADTVKANPQFSAVILRYFNPVGAHESGLIGEDPNGIPNNLMPFISQVAVGKLPQLSVFGGDYETHDGTGVRDYIHVVDLAIGHLKALDKHQDDAGLHIYNLGTGIGYSVLDMVTAFEKANDIKVPYQIVARRAGDIDSYYSNPQKALDELGWKTERGLEQMMKDTWNWQKNNPNGYKG

SEQ ID NO: 6553 - protein, 413 aa, Nicotiana tabacum
MPEKPLFGKYELGKLLGCGASAKVYHAREINNGQSVAIKMINKNNKDNIPNENIEREISILRQLRHPYIVKLYEVLATKSKIYFVMEYVKGGELFTKIADHGRFSEDLSRKYFQQLISALNYCHSRGIYHRDLKPENILIDENGDLKISDFGLSATTDQIQKFDGLLHTVCGSPAYVAPEILTIKGYDGAKTDIWSCGIILYVMIAGYLPFYDQNLMLMYKKIYKGEFKCPKWMSPDVIRILSRLLDTNPATRITIDEIIKDPWFRKGLKFIKFAGEEEDKYSLSSNCLNAFDLISFSQGLDISGLFKSNNPANDLERTVVEQSPESVIERVEEMAKKENFRLRKKKEWGIEMKVQNGKLTMSVDIYRLTERFVIVEVKREAGNGDLYTDLWRNKLKAVILGQQIAEIQDSGS

SEQ ID NO: 6554 - protein, 444 aa, Xylella fastidiosa Temecula1
MNHSRSHALFVQAQTRIPGGVNSPVRAFRSVGGEPFFVARADGPYLFDVDGHRYIDYVGSWGPMIVGHNHPAVREAVQVAISNGLSYGAPCAAEVTMAETIARLVPSCEMVRMVNSGTEATLSAIRLARGATGRNYIVKFEGCYHGHGDSFLVKGGSGMLTLGIPSSPGVPAELSKLTITLTYNDFDAATALFEEMGHHIAAVIVEPVIGNANCIPPQPGYLQHLRTLCTQYAVLLIFDEVMTGFRVALGGAQALYGVTPDLTTFGKIIGGGMPVGAYGGRRDLMQHIAPTGPIYQAGTLSGNPVAMAAGLAMLELIQAPDFYTHLSNAAAALCTGLQQAASQAGIAMTTQQIGGMFGLFFTDQQVETYAQATACNTDRFNRFFHAMLQRGVFFAPSAYEAGFISSAHSPNIIETTLEAARTAFQTIANEAAILSKSETPIKMR

SEQ ID NO: 6555 - protein, 609 aa, Schizosaccharomyces pombe
MIQTASTISSNGGTNQGMESSSANSPEMNGTQNSMSVGMSGSGSSQNRKITQFSNKLYNMVNDSSTDSLIRWSDRGDSFLVIGHEDFAKLVLPRYFKHNNFSSFVRQLNMYGFHKVPHIQQGVLQSDSPNELLEFANPNFQRDQPELLCLVTRKKAGSQPVEESNTSLDMSTISSELQNIRIQQMNLSNELSRIQVDNAALWQENMENRERQRRHQETIDKILRFLASVYLDGKQKPPSKVMPKSRRLLLEAKYPTVSPTNEPSAHSRPSPQGTTANSSSASISSLHNTTPDGEGKYRSVQNGRALNYVSSFNSDSHSPKDYISQSYTNEPGLKKESADSFNNSIDSYISPNQSPNTDVPSLNRDDTTDPKVVNTGDIINMLDDANSIEGSNMNSLSPLLFDYPNSLYPVNNTSSEQHHNSYRGSVSNSQPSGNLSESTNLQPVQPVDYMSNSNPSYGSYNAEDQLTNFHPGYAMDQKRISKLSDGITKQDQNIQALADILGIPLGDGKIDDAGFSANSPTNLNLPVSSDLDSVLNIPPNEDVFPDSNPVFDEFTNISNLTSPIEASNGNTFGSNPVSLPNQQKSVNPSLMTVSSPRQVRKKRKSSIGA

SEQ ID NO: 6556 - protein, 448 aa, Triticum aestivum
  misc_feature (246)..(246): Xaa can be any naturally occurring amino acid
  unsure (1)..(448): unsure at all Xaa locations
MAQWDALVDAALGELASRSLLRATRPISLALPPAPPETFPGPGPWDRAAVEIRLDRATLHQWLAEGGEASGQEEELGEKLILFSGNDYMGLSSHPAVREAAAKAAQEYGMGPRGSALICGYTTYHKLVEESLAELKKKEDCLLCPTGFSANMAVMTALGSISSLLAVGRKPAKDERIAIFSDALNHASIIDGIRLIERQQEAVVFVYKHCDMSHLDFLHSLFSMDGDFAPLPELVELRRKYGFLLXASVDDAHGTLVCGDNGGGVPELLECESGIDISVGTLSKAAGCQGGLVACSTRWKSLIQSRGRSFIFSTALPVPVVASVQAALHVSRKERWRRLLVWRHVQYFASLTKLNITSPIISIVVGSEEAALRAGRHMLRSGFHVTPIRPPTVPPNSCRLRITLSASHSSDDIKRLVDALAPWLSGKHAKQSFVEGHSEQSYVAASKL

SEQ ID NO: 6557 - protein, 419 aa, Thermococcus litoralis
MVEQDPFEIAVKQLERAAQYMDISEEALEFLKRPQRIVEVSIPVEMDDGSVKVFTGFRVQYNWARGPTKGGIRWHPEETLSTVKALAAWMTWKTAVMDLPYGGGKGGVICNPKEMSDREKERLARGYVRAIYDVISPYTDIPAPDVYTNPQIMAWMMDEYETISRRKDPSFGVITGKPPSVGGIVARMDATARGASYTVREAAKALGMDLKGKTIAIQGYGNAGYYMAKIMSEEYGMKVVAVSDTKGGIYNPDGLNADEVLAWKKKTGSVKDFPGATNITNEELLELEVDVLAPSAIEEVITKKNADNIKAKIVAELANGPTTPEADEILYEKGILIIPDFLCNAGGVTVSYFEWVQNITGDYWTVEETRAKLDKKMTKAFWDVYNTHKEKNINMRDAAYVVAVSRVYQAMKDRGWIKK

SEQ ID NO: 6558 - protein, 400 aa, Arabidopsis thaliana
  misc_feature (189)..(189): Xaa can be any naturally occurring amino acid
  unsure (1)..(400): unsure at all Xaa locations
MQIFVKTLTGKTITLEVESSDTIDNVKAKIQDKEGIPPDQQRLIFAGKQLEDGRTLADYNIQKESTLHLVLRLRGGMQIFVKTLTGKTITLEVESSDTIDNVKAKMQDKEGIPPDQQRLIFAGKQLEDGRTLADYNIQKESTLHLVLRLRGGMQIFVKTLTGKTITLEVESSDTIDNVKAKIQDKEGIXSGQQRLIFAGKQLEDGRTLADYNIQNESTLHLVLRLRGGMQIFVKTLTGKTTTLEVESSDTIDNVKAKIHDKEGIPPDQQRLIFAGKQLEDGRTLADYNIQKESTLHLVLRLRGGMQIFVKTLTGKTITLEVESSDTIDNVKAKIQDKEGIPPDQQRLIFAGKQLEDWQELLADYNIQKGHTLWFFVLWEVCKNLSVKNCSGGPFKVLNPN

SEQ ID NO: 6559 - protein, 459 aa, Bacillus cereus ATCC 14579
MSKLVVIGGGPAGYVAAITAAQNGKGVTLIDEAELGGTCLNVGCMPTKSLLESAEIHDIVRKANDYGVTLNTGSISIDWNQIQARKSQIVMQLVQGIQYLMKKNKIKVVKGKAKFETDHRVRVVQGNKEEVVDGESFIIASGSEPTELPFAPFDGKWILNSSHAMSLESVPSSLLIVGGGVIGCEFASIYSRLGTKVSIVEMAPQLLPGEDEDIANILREKLEKDGVKIFTGAVLKGLNNYKKQASFEYEGITHEVTPEFVLVSVGRKPRVQQLGLEKAGVQFSNKGISVNEHMQTNVSHIYAAGDVIGGIQLAHVAFHEGTTAALHASGEDVKVNYHAVPRCIYTAPEIASVGLSEKGAREQYGDILIGEFPFTANGKALILGEQVGKVKVIVEPKYQEIVGISIIGPYATELIGQGTVMIHTEVTADIMRDYIAAHPTLSEAIHEALMQAVGHAVHA

SEQ ID NO: 6560 - protein, 559 aa, Methanococcoides burtonii DSM 6242
MPSKLVRRYSMVKRYGIIIDTLVKYGFGYFVDQMGIRPLGSFRSRFKGRFTSPPRPSSGPERVRKVLEELGPTYVKFGQLLSMRQDLIPKEYAEEFAKLQNEVPSFCFDEVERIVEEEFGKKIEDIFLSFDSSSIAAASIGQVHRAKLLDGTEVVVKVQRPGIRKIIGSDLDILYSIAGFAEEHVEEAKLYSPVEVVDEVYHSIHAEMDYTQEARNIERFRRNFENEPDIVIPNVYWEYSTRRVLTMEYIDGVKCDNFKTLEEMGLDRYKIAENGTKAFMKQIFEDGFFHADMHSGNVLILEDGRICLLDFGMVGSISNEVKNLLVDALLAVTREDVTQYLEVMRDFGMVPDELDVQSFKIEYGYILSKYYGRSLKQLDTPEMIAETMTLLRKFRIRIPPNIALLFKGLMTISGFALQMVPDFNVTVVAEPYAKGIMHNRLKPKQIAESLYSDLWQTARMLHKAPLQISHILATAEKGYLNLKFETHEMDRIVAEISSSSNRLAFSFIISAIIVGSSLIIQTGMEPHIGGVPLFGLMGFSVAAFMGIWLMVYILKTGKI

SEQ ID NO: 6561 - protein, 159 aa, Deschampsia antarctica
AQNGELYRYIADTHGAFVQPALYEAFGLTVVEAMTCGLPTFATLHGGPAEIIEHGISGFHIDPYHPDQAATLMVDFFEQCKQDPNHWVKISDRGLQRIYDKYTWKIYSERLMTLAGVYGFWKYVSKLERRETRRYLEMFYILKFRELVKSVPLALDEAH

SEQ ID NO: 6562 - protein, 393 aa, Saccharomyces cerevisiae
MSSRIIVGSAALAAAITASIMVREQKAKGQRREGNVSAYYNGQEYGSSAPAQLGKLHNIKQGIKEDALSLKDALLGVSQKAREEAPKVTKRVISPEEDAQTRKQLGQKAKDSSSQSIFNWGFSEAERRKAIAIGEFDTAKKRFEEAVDRNEKELLSTVMREKKAALDRASIEYERYGRARDFNELSDKLDQQERNSNPLKRLLKNNTGDANTEEAAARSVQGWGDTAQEFGREELEEAKRNASSEPSEAQKRLDELKKIKEKGWFGYNKGEQSEQQIAERVARGLEGWGETAAQLSKDEMDDLRWNYENSKKQLDKNVSDAMDSLSKAKEDLKQYGSHWWSGWTSKVDNDKQALKDEAQKKYDEALKKYDEAKNKFKEWNDKGDGKFWSSKKD

SEQ ID NO: 6563 - protein, 477 aa, Vibrio pommerensis
MLRPWQTQLWLDNSTGNTIHARLVNKLIEDILTGRLEAGALLPGSRSLATVLGLNRKTVQIAYDELIAQGWLVTQAKRGTFVSDRLPEQRMSEQYQYLLAGSAKPVIDHAEAEPLSRKENPSCNDGIPDARLIPYELLARAYRRALIAASRKQYLGYGDPQGTIELRHALQRMLIQERYLNLSSAQICTVRGSQMAIYLASRVLKPSDGVMVFEELTYAPALAAFEEAGFTILRCKTDQQGLDITHLQQLISGRKVAAIYTTPHHHYPTTVTMVMERRLLLLQLSTQHDFYIVEDDYDHEFHFDSRPIPPLASLPGADRVLHIGSLSKVFAPGLRIGYLVASAAFVEKVVQQILMIDRQGNTLTELALAELLQSGEVKRHIRKCKKIYKTRRDHCVNELKRLFGDRVRFHIPAGGLAFWLELGTQPQFDLAELATEPHFFVDKQRCFVRFGFGSFTEQEITAELTRLDWLLFPRSHS

SEQ ID NO: 6564 - protein, 353 aa, Zea mays
MDPPKPPSSVASSSGPETPNPHAFTCELPHSIYALAFSPVAPVLASGSFLEDLHNRVSLLSFDPVRPSAASFRALPALSFDHPYPPTKLQFNPRAAAPSLLASSADTLRIWHTPLDDLSDTAPAPELRSVLDNRKASSEFCAPLTSFDWNEVEPRRIGTASIDTTCTVWDIDRGVVETQLIAHDKAVHDIAWGEAGVFASVSADGSVRVFDLRDKEHSTIVYESPRPDTPLLRLAWNRSDLRYMAALLMDSSAVVVLDIRAPGVPVAELHRHRACANAVAWAPQATRHLCSAGDDGQALIWELPETAAAVPAEGIDPVLVYDAGAEINQLQWAAAHPDWMAIAFENKVQLLRV

SEQ ID NO: 6565 - protein, 151 aa, Solanum brevidens
  misc_feature (7)..(7): Xaa can be any naturally occurring amino acid
  unsure (1)..(151): unsure at all Xaa locations
RKSFYYXAENNVVFEGILLNPSMVTPGAEHKEKATPDTIAKYTLTMLKRRVPPAVPGIMFLSGGQSEVEATLNLHAMNQSPNPWHVSFSYARALQNTVLKTWQGRPENVDAAQRALLIRAKANSLAQLGKYSAEGESEEAKKGMFVKGYTY

SEQ ID NO: 6566 - protein, 563 aa, Oryza sativa (japonica cultivar-group)
MACLAPHFKWAPCPHAHHHHSTSSLPSSSSSSTSAPSSSSRCSFSRGGPFRVHCAVTATTSAAAPVVVEAPGGGMRLAYAAAPDSSAPALQKKIQSALASEVFLNEEAVVTAAAAEAVALARAAAEAAQEVVRMVQNNKNERNTRPKKAVVNYLANEILRTEMKPNILDKYSDGILSEEIESYGILSDEAELDGDTQDIPSIAVKSARQTERRARRTRAAIKAATIVRTSPKPATSSKKKRSKGASSGTNPLGSLWKMTGRRLLTAKEEVEFSEGIQDLLKLEAIQAELAEYNGGQPTFAQWATAAGVDERTLRKRLDHGIYCKNRMVTSNVRLVISIAREFEGPGMELYDLIQEGMQGLIRGAEKFDASKGFRFSTYSHWWIKQAMRKSVSEQSQIFRLPAHMVEASYRVKECIKRLRRKLKRRPTNEEIAADTGMPIKRVEAAVNLPKYSVSLDSKIGSTDMTYQEVTADPTAETAEEMLNRLSMKRDVHKALDTLTTRERQVVTLRFGLEDGRIRTLQEIGNTMGVSRERIRQIESAAFRKLRSKKRVNALKDYLVTGRV

SEQ ID NO: 6567 - protein, 441 aa, Xanthomonas oryzae pv. oryzae KACC10331
MSLSPKRDSRLPVTVLSGFLGAGKTTLLNRILHNRDGLRVAVIVNDMSEVNIDAQLVREGGAALRRTEETLVEFSNGCICCTLRDDLLQEVRRLAEQGRYDYLLIESTGIAEPMPVAATFAVRDADGFSLSDIARLDTMVTVVDGSRFLQDFGSAATLAELGQQAGPDDTRGLVQLLGEQVEFADVLVISKCDRIDAQQLQRLRAVLRALNREAAIVDAAHGEVPLQQLLDTGRFDFTRAQLAPGWMQELRGQHTPETEEYGISSFVYRARRPFHPQRFAHMVQSGLPQVIRSKGFFWLASRMDWVGELSSVGGATQTNAAGFWFAARHRVDAQSIGQPLQTSMTPLPYTDLGWQRQQTHCWTAPLPQPHEVGDANEYAAMQRLWHPLWGDRRQELAVIGVEMDASRTRAALDACLLSDQELRQGPAQWQLLDDPFPHWAR

SEQ ID NO: 6568 - protein, 932 aa, Acinetobacter sp. ADP1
MSNFNKKLSKRLQLNHAYGQLIALIFVPIMVLASVGTVLVLNETSAAAKSQQRHTAAALLTRYEHTASNLLELVERRPEQYDQAQRIMQNMFNERYLKRAAIIDQQGRVYLSIGYRDTRFWPQIPNMVFFGPVTHNHNNIYGQRIQSPLHQAAWLVVEMDNQPLQIAHYRVFLVLIVTGLITLLLLLLCLNFYSRRWIAPMYEIRMQLQRLNADTLDQHMVINSTGELRLLQRDIANVVKRLHFSFLELKEHTEQTEDDLRRTLDTLEVQNITYRQARDQAISANQAKSVFLANISHELRTPLNSIDGFIHLMLRQQNLSNEQRLYMQTIRKSSAHLLALINDVLDFSKIDAGKLELETAAFNLEEAIFDVMDMLSPLAAQKHIDMAFYYGDNIPEIVIGDALRVKQILTNLISNAIKFTPDGEIIVRVRMEHDDIDQCLLHFSVQDSGIGLSGTDRKKLFESFSQGDASVTRQFGGTGLGLAISKQLVQLMHGHIGFEDNQERAPTEKGSTFWFTAQFKTQEAHIIDHPEFPQLQVVSYLAHPATANILRHYLENYEVQHTEITSILELFSRLNHLSSKENTWLIVDHSGDTEALLKEIRQRYTGNLAVYGYQMALEPNMLNEYRARPLYQPLSRSALIQLLSNQPIFEQPPEQFNGRGLHVLAVDDHLPNLIVLEALLSELNVTTSKALSGQEALNIIEQRIEQNEKPFDVVFMDIQMPVMSGIDTTRAIRSLESTLDTQMRLPIIALTAHALADEKQKLLKVGMDDYVTKPIQMEQIIHILNQWSKADFDHPPQNDHQILIDALDPTILDWQQSLQLAANKEDLAYDLLKMLVDSFETELGEMEQLIELEDFPQLEHVLHRLYGATRYVGTPKLQHVTGEFEQFVSTLRKERRKADADFVQNVLKRFEELHLTIREVEGAAKHILSEQQ

SEQ ID NO: 6569 - protein, 673 aa, Triticum aestivum
  misc_feature (273)..(273): Xaa can be any naturally occurring amino acid
  unsure (1)..(673): unsure at all Xaa locations
TARLIRKPPAPVVDAVVPLPEEVAATAASVVDVERAVAAPVNRRRAPNGVAEQEPRSGGIRGEVKPRIIDVPNGVVGEHVAAGWPRWLTEVATEAVRGWQPRKAESCEKLDKIGQGTYSSVYKARDLENGKIVALKKVRFANMDPESVRFMAREIHILRRLDNPNVIKLEGLVTSRMSSSLYLVFEYMEHDLAGLAATPGIKFTEAQVKCYMHQLLSGLGHCHSRGVLHRDIKGANLLLDNNGALKIADFGLATFFNPNQKQNLTSRVVTLWXYRPPELLLGATNYGATVDLWSAGCILAELLSGKPIMPGRTEVEQLHKIFKLCGSPSEEFWANLKLSRATIFKPQHPYRRCVNDVYKDFPPSALALLDRLLAVEPDNRGTAASALESEFFTTKPYACDPSSLPKYPPSKEYDAKLRDEEARRQRAAAAKGHESETGRRKQLAAQNGTIDLQQRRVPVNPKSSSNKFTPKEDGVTGFPMDPLVVDNGHARHVPLMNAGRSSSTLGRSSGTDPNGQRFYTSQIAAAEMSNPSTATGQRGNTGKLSNLGDSARKQYLREHRSSSRYSQLAAADQSDKPKWSQSHQFQERPSSSHRKDEVVADKEPTGVNGTRKNRIQYSGPLMPPGVNMEEILKEHERQIQQAVRRARLDKGKGKHAERDQSESLLYAAHNGRS

SEQ ID NO: 6570 - protein, 138 aa, Triticum aestivum
  misc_feature (60)..(60): Xaa can be any naturally occurring amino acid
  misc_feature (100)..(100): Xaa can be any naturally occurring amino acid
  misc_feature (113)..(113): Xaa can be any naturally occurring amino acid
  misc_feature (120)..(121): Xaa can be any naturally occurring amino acid
  unsure (1)..(138): unsure at all Xaa locations
GAGINSSFAVHQDVDGRATDVALAWSVALGSPFTFATTLEQEYKSDIFGERGILLGAVHXIVEALFRRYTEQGMDEESAYKNTVEGITGIISKTISKKGXLEVYNSLSEEGKXEFNKVIXXSFYPCMDILYECYEVWL

SEQ ID NO: 6571 - protein, 334 aa, Saccharomyces kluyveri
MAPHVNKKQKLSNSLEQLKATGTVVVSDTGDFESIAKYTPQDATTNPSLILAAAKKENYAKLIDTAVEYGKKQGKTLEDKVDQAVDMLLVEFGKAILNIVPGRVSTEVDARLSFDKDATVAKALHIIKLYEDAGISRERVLIKIASTWEGIQAAKELEEKHGIHVNLTLLFSFSQAVAAAEAKVTLISPFVGRILDWYKASTGKDYTAETDPGVKSVRKIFNYYKKYGYDTIVMGASFRNVGEIKALAGVDFLTISPGLLDELMSSEDPVPQVLDAEAAKSEDLAKVSFISDEAKFRFELNEDAMATEKLSEGIRKFSADIVTLFELIEKKIKA

SEQ ID NO: 6572 - protein, 581 aa, Kluyveromyces lactis NRRL Y-1140
MMSIHLDEGPVRRMQPQSDPLTRKIQRACRISLPEPDLALNLDVADYINDKQGAAPREAAISIVRLINSRDTHTAIFALSLLDVLVKNCGYPFHLQISRKEFLNELVKRFPERPPVRFSKVQRLILTAIEEWYQTICKHSAYKEDMGYIRDMHRLLKYKGYTFPKINSEDLAVLKPSEHLKTPSEIQKEQEIAQAAKLEELIRRGKPEDLREANKLMKVMAGFKEDNMIQSKQILNEELTKLRRKADLLNEMLGTNDSPDIENETIVELYNALRSSQPRFQKIIEEEHDDDEFVQDLLKFNDTVNQLVQKYDLLKAGHAGEANQINVDNISSSVNNGGALANEINLIDFDDEEVNKSSSSNSTAAAARNNLEDDLLSGLNDLNFSDNNNNNNNFGFGGSIALDTAAHASPAVPVTTTTTTNSNFDLLSDLSSPSPVQAQQDTHSNDLLSEFSAPAVQHSTQPSIVSDRFLVNQSDVLKFEFAISRESESTIKVTSFFSNVSISQLTDLTLMLAVPKAQQLRLLPQSNTVLSSYAKDGIHQKSWIDNAVKNAPKPLRVKWKVSYKANGVPKEESAVYTFPNV

SEQ ID NO: 6573 - protein, 382 aa, Serratia marcescens
MSWQQRIEQALAERRLNAAYRRRQTTEGGNGRQIRLGDRLYLNFSGNDYLGLSQDARVIAAWQQGARYGVGNGGSGHVTGFSAAHQALEEQLAAWLGYPRALLFISYAANQAVLAALMQKGDRILADRLSHASLLEAAGAVAGRRAPVPAQSTAGLARICLAKPCDGQRLAVTEGLFSMDGDGAPLAELHRLTRAAGAWLMVDDAHGIGVRGEQGRGSCWQQGVRPELLVATFGKAFGVSGAAVLCDEATAEYLLQFARHLIYSTAMPPAQACALQAALARIREGDDLRARLQDNIRRFRQGAAPLALTLTDSDTAIQPLLVGDNQRALDLATRLRECGLWVSAIRPPTVPPGGARLRLLLTAAHQSQDIDRLLEVLNDVSQ

SEQ ID NO: 6574 - protein, 160 aa, Cucumis sativus
MFPMVTGFMNYGQQTVRAARYIGQGFVITLSHANRLPVTIQYPYEKLIASERFRGRIHFEFDKCIACEACVRVCPIDLPVVDWKLETDIRKKRLLNYSIDFGICIFCGNCVEYCPTNCLSMTEEYELSTYDRHELNYNQISLGRLPMSVVDDYTIRTILN

SEQ ID NO: 6575 - protein, 404 aa, Mannheimia succiniciproducens MBEL55E
MELFPKSNKLEHVCYDIRGPVHKAALRLEEEGHKILKLNIGNPAPFGFEAPDEILIDVIRNLPTAQGYCDSKGLYSARKAIVQYYQSKGIHGATVNDVYIGNGASELITMAMQALLNDGDEVLVPMPDYPLWTAAVTLAGGKAVHYLCDEEQDWFPAIDDIKSKITSRTKAIVIINPNNPTGAVYSKELLLEIAEIARQNGLLIFSDEIYDKILYDGAVHHHIAGLAPDLLTITMNGLSKAYRICGFRQGWMILNGPKDKARGYIEGLDMIASMRLCANVPMQHAIQTALGGYQSINELIVPGGRLYEQRNRAYELLNQIPGVSCVKPMGALYMFPKIDIKKFNIYDDEKLVLDLLAQEKVLLVHGRGFNWHAPDHFRIVTLPYVHQIEEALNKFARFMENYHQ

SEQ ID NO: 6576 - protein, 504 aa, Solanum tuberosum
MAISTLARRKATTFLSSRLLYSTSKYSFSLTRGFASGSDENDVVVIGGGPGGYVAAIKAAQLGLKTTCIEKRGTLGGTCLNVGCIPSKALLHSSHMFHEAQHSFANHGVKFSSVEVDLPAMMGQKDKAVSNLTRGIEGLFKKNKVNYVKGYGKFLSPSEISVDTVEGGNSVVKGKNIIIATGSDVKGLPGITIDEKKIVSSTGALALTEIPKRLVVIGAGYIGLEMGSVWGRLGSEVTVVEFASDIVPTMDGEVRKQFQRALEKQKMKFMLNTKVVSVDATGDGVKLTLEPSAGGDQTILEADVVLVSAGRVPFTSGLGLDTIGVETDKAGRILVNERFATNVPGVHAIGDVIPGPMLAHKAEEDGVACVEFIAGKEGHVDYDMVPGVVYTHPEVAYVGKTEEQVKSLGVDYRVGKFPFLANSRAKAIDDAEGIVKVIAEKESDKILGVHIMSPNAGELIHEAVLALQYGASSEDIARTCHAHPTMSEALKEAAMATYDKPIHM

SEQ ID NO: 6577 - protein, 234 aa, Actinobacillus pleuropneumoniae serovar 1 str. 4074
MLMNYITFQSAQQAVEKIAQEFVLYSQLNRSVHISLSGGSTPKLLFKTLAQAPFNSEIQWQNLHFWWGDDRMVLPTDPESNYGEVQKLLFDHIQIPQQNIHRIRGEEPVEQELARFSQELTACVPDLAFDWIILGMGNDGHTASLFPHQTDFNDPNVAVIAKHPESGQIRISKTAKLLEQAKRITYLVTGAAKAEILKEIRETEAEKLPYPVARIKARNGVTEWYLDREAAKLL

SEQ ID NO: 6578 - protein, 216 aa, Glycine max
MSKLQSDALREAISGIMADSKEKNRKFVETIELQIGLKNYDPQKDKRFSGSVKLPHIPRPKMKICMLGDAQHVEEAEKIGLDWMDVEALKKLNKNKKLVKKLAKKYHAFLASEAVIKQIPRLLGPGLNKAGKFPTLVTHQETLESKVNESKAMVKFQLKKVLCMGVAVGNVSMEEKQIFQNVQLSVNFLVSLLKKNWQNVRCLYLKSTMGKSYRVF

SEQ ID NO: 6579 - protein, 316 aa, Vibrio vulnificus YJ016
MSNKLEQLRKLTTVVADTGEIDAIKKYQPEDATTNPSLILKAAQIAEYAPLIDASIEYAKTQSDDKAQQIQDTCDMLAVNIGKEILKTIPGRISTEVDARLSYDMEGSVAKARQLVKMYNDAGITNDRILIKLASTWEGIRAAEILEKEGINCNLTLLFSFAQARACAEAGVFLISPFVGRIMDWYKAKEGRDFEAQEDPGVLSVTKIYNYYKEYGYKTVVMGASFRNIGEILELAGCDRLTIAPALLAELEAAEGEVVEKLVDSKGAAERPAPMTHAEFLWEHNQDPMAVEKLAEGIRNFAVDQGKLEAMIAAKL

SEQ ID NO: 6580 - protein, 663 aa, Vibrio vulnificus YJ016
MDRKHLANAIRALSMDGVQKANSGHPGAPMGMADIAEVLWRGHLNHNPSNPEWADRDRFVLSNGHGSMLIYSLLHLSGYELSIDDLKNFRQLHSKTPGHPEYGYAPGIETTTGPLGQGITNAVGMAMAEKALAAQFNKEGHDIVDHFTYVFMGDGCLMEGISHEACSLAGTLGLGKLIAFWDDNGISIDGHVEGWFSDDTPKRFEAYGWHVIPAVDGHNAEAINAAIEAAKADPRPTLICTKTIIGFGSPNKSGSHDCHGAPLGAEEIAATRKELGWEHGPFEIPQEVYAEWSAKEAGAAKEAAWNEKFAAYEAAYPELAAEFKRRVNGELPAQWEEKANQIIADLQANPANIASRKASQNALEAFGKMLPEFMGGSADLAPSNLTMWSGSKSLEASDFSGNYIHYGVREFGMTAIMNGIALHGGFVPYGATFLMFMEYARNAMRMAALMKVQNIQVYTHDSIGLGEDGPTHQPVEQIASLRLTPNMSTWRPCDQVESAVAWKLAIERKDGPSALIFSRQNLAQQERTAEQVADIAKGGYILKDSDGKPELILIATGSEVELAVKAAEQLTAEGKKVRVVSMPATDAFDKQDAAYRESVLPSDVTARIAIEAGITDFWYKYVGFDGRIIGMTTFGESAPADQLFEMFGFTVENVVNTAKELLA

SEQ ID NO: 6581 - protein, 577 aa, Ustilago maydis 521
MSWKLGKKFKDGANLGARTPLDRSATPTPANPGTDASASSSSSNLLASSDGAPIPRSGLLTIRVISARGLSLPAGMQTPPAVARALAQHNPNTSSLAQSFGAGANRENRQSMQRKQCWWLPYLVLEFDKNEILIDAIGGDIQGPTWMFRAHFDVSRISEISLQTYLRTGDRTTHPPEANRDGQGDDVMGVSDIYLGGVKFVPDFENQRTSDASYPLTGGNGQIHVQVSYRSDSRSSLNMDAFELLKVIGKGSFGKVMQVRKRDTSRIYALKTIRKAHIVSRSEVTHTLAERTVLAQVNNPFIVPLKFSFQSPDKLYLVLAFINGGELFHHLQREGRFNEERSRFYAAELLCALEHLHGFNVVYRDLKPENILLDYTGHIALCDFGLCKLNMGDQETTNTFCGTPEYLSPELLLGQGYTKAVDWWTLGVLLYEMLTGLPPFYSEDVNEMYRKILQDPLRFGDEVSPDARHLLTLLLNRDPAQRLGSGSHGAADIKAHPFFAKHIDWKLLLAKKIPPPFKPSVASAIDTSNFDPEFTNEPPMDSVVDDSLMLSATVQEQFVGFSYNAPNALGAGESLRD

SEQ ID NO: 6582 - protein, 468 aa, Agrobacterium tumefaciens str. C58
MAYDVVVIGTGPGGYVCAVKAAQLGLKVAVIEKRATYGGTCLNVGCIPSKALLHASETFAHVAHGVDTLGIEVAAPKLNLEKMMGHKDGVVKANVDGVAFLFKKNKIDAFQGTGKVVSAGKVSVTNDKGETQEIEAKNIVIATGSDVAGIPGVKVDIDETVIVSSTGAIALSKVPEKLIVVGGGVIGLELGSVWSRLGAKVTVVEYLDNILGGMDGEVSKQSQRLLAKQGLDFKLGAKVTAVEKTAAGAKVVFEPVKGGAAETLEADVVLISTGRKPYTEGLGLAEAGVVLDSRGRVEIDGHYKTNVDGIYAIGDVVKGPMLAHKAEDEGVALAEILAGQRGHVNYDVIPAVVYTQPEIASVGNTEEELKAAGVAYKVGKFPFTANGRARAMQVTDGFVKILADKETDRVLGGHIVGFGAGEMIHEITVLMEFGGSSEDLGRTCHAHPTMSEAVKEAALATFFKPIHM

SEQ ID NO: 6583 - protein, 149 aa, Triticum aestivum
NKFVQKSRLVPVRNSRDIVDPRVRACAHNPTGVDPTLEQWEQIRQLMRSKALLPFFDSAYQGFASGSLDKDAQSVRMFVADGGELLMAQSYAKNMGLYGERVGALSIVCGSADIAVKVESQLSCISLLSTLLSGALSGTYLDVYVTPLS

SEQ ID NO: 6584 - protein, 207 aa, Debaryomyces hansenii CBS767
MSFSDFSKVETIKSLNEFLADKSYIEGTSATQADVTVYKAFQKEFPQFARWFNHIASFTEEFAELPAGKVPASSAAEEDDDDVDLFGSDDDVDEEAEKVKQQRLADYAAKKASKGPKPAAKSIVTLDVKPWDDETNLEELLANVKSIEMDGLTWGASQWIPVGFGIKKLQINLVIEDEKVSLDDLQSSIEEFEDHVQSTDVAAMQKL

SEQ ID NO: 6585 - protein, 337 aa, Zea mays
MAENPAPSSPLVTSPDAAAPPLPAEFTKLTFRSLYIRRTGPGSREMTVDGRPSDQLGRRFVSDFPIYDGRGSGARLVARLQGVTVQIGSSHQLVSIVFEAERLKGSTLLTNGVITDGSDEWAIYGGTGVFAMATGVIRRRFLAGSNDGNSDELTSIEVFCPAFGSAQQQPNKQDSVSVTRIGVWGGGGGSAQDIPTTEPPQRLHSITVRTGFAVDSIEFTYTDRGGQRRTAGRWAGVDLAETFVRACIASSCTCVQIDLGDAEVVREVSGTYGTFEGATTLTSIRILTSSRAWGPWGVEDGTRFCITAPIGSSIVGFYGRSTSRLVAAIGVYLRQQL

SEQ ID NO: 6586 - protein, 540 aa, Ehrlichia ruminantium str. Welgevonden
MNNLTSTKFIFVTGGVVSSLGKGLAAASIGALLQARGFKICLRKLDPYLNIDPGTMSPIQHGEVFVTDDGAETDLDLGHYERFTGVKTTKNDNITTGKVYHNLLSKERKGDYLGQTVQIIPHVTDLINSFILYNTDALDFVICEIGGTVGDIESQPFLESIRQIGYKLSKNNTVFVHLTLVPYISATMELKTKPTQHSVKELSSVGIQPDIILYRSKIPLSQEQRDKIANLCNVSPTNIIPALDVKNIYELPISYHQYNLDTQILKHFNITSPEPNLDKWENILNISHISTKTITIAIIGKYIKLLDAYKSLIEALEHAAIHNKTKLSIHWIDSRSLNNEITNTFDNVHAILIPGGFGDDGVEGKIIAIKYARINNIPFLGICMGMQLAIIEFVRNVIHLEDANSTEFNFYCKNPVIHQLPELQQNLGGSMKLGSHPCYLKVDSKIFSIYKEQVINERRRHRYTVNLQYKDLLESHGLIFTGHSHHNNNDSLAEVIELKNHPWFIGVQFHPEFKSDPFQSHPLFMSFVQASLNYQETKKA

SEQ ID NO: 6587 - protein, 309 aa, Glycine max
YLSLLSILLRSHFWDSEFYAPWTKVSWFSQEGQCTEWTREENKKFESALAIYDKDTPDRWLRVAAMLPGKTVYDVIKQYRELEEDVCEIEAGRIPVPGYPTSSFTLEMVDNQCYDACRKKPATLRSSDQERKKGVPWTEEEHRRFLMGLLKYGKGDWRNISRNFVVTKTPTQVASHAQKYYIRQKLSGGKDNKRRPSIHDITIVNLTSDQEKPLLFNDESHMTSEQQKLTSMPKVQLEWRINHHNNGGSNYDMFVSPNSSGISSKTLKLQGQDFYECAFHETYAKLKNTGFRTASRDFNKEAIFGIHAL

SEQ ID NO: 6588 - protein, 277 aa, Citrobacter freundii
EIVAINDLLDADYMAYMLKYDSTHGRFNGTVEVKDGHLIVNGKKIRVTAERDPANLKWDEVGVDVVAEATGLFLTDETARKHITAGAKKVVLTGPSKDNTPMFVKGANFDKYEGQDIVSNASCTTNCLAPLAKVINDNFGIIEGLMTTVHATTATQKTVDGPSHKDWRGGRGASQNIIPSSTGAAKAVGKVLPELNGKLTGMAFRVPTPNVSVVDLTVRLEKAASYEEIKKAIKAASEGPMKGVLGYTEDDVVSTDFNGEVCTSVFDAKAGIALNDN

SEQ ID NO: 6589 - protein, 525 aa, Glycine max
MQRPEREMEEASCVCLVVILILALTLAWRVLNWLWLRPKRLERLLREQGLQGNPYRLLVGDLKEIMNMQKEVTSKPMNLSHDIVPRVFSFLQHTLNTHGKNSFIWFGRKPRVIITEPELIKDVLNKMHDFPKPDTSPLVKLLATGLLNHEGEKWNKHRRIISPAFNLEKLKNMLPIFYKSCNDLIIKWEEMLSSDGSCEIDVWPFLQNLSSDAIARTAFGSSYEEGRKIFQLLKEQAELAMKAIMKLYIPGWRFLPTANHRRMKEIDREIKASLTDMISNREKALKAGEATENDLLGILLESNHKETEEHGNSKNVGMSLEDVIEECKLFYFAGQETTSALLVWTMVLLSRYPDWQARAREEVLQVFGKQKPNFDGLSHLKIVSMILNEVLRLYPPAVGLNRNVDRDMKLGNLSLPAGVQVSLPTTMVHHDRELWGDDVNEFKPERFSEGVLKATNGRVSFFPFGWGPRICIGQNFSLLEAKMALSTILQHFSFELSPAYAHAPVTVFTLQPQYGAHVILRKVEI

SEQ ID NO: 6590 - protein, 332 aa, Prunus persica
MAKGPVRVLVTGAAGQIGYALVPMIARGVMLGADQPVILHLLDIPPAAEALNGVKMELVDAAFPLLKGVVATTDVVEACTGVNIAVMVGGFPRKEGMERKDVMSKNVSIYKSQASALEKHAAANCKVLVVANPANTNALILKEFAPSIPEKNITCLTRLDHNRALGQVSERLNVQVSDVKNVIIWGNHSSSQYPDVNHATVKTPSGEKAVRELVADDAWLTGEFITTVQQRGAAIIKARKLSRALSAASSACDHIRDWVLGTPEGTWVSMGVYSDGSYNVPSGLIYSFPVTCQNGEWKIVQGLSIDEFSRKKLDATADELSEEKALAYSCLS

SEQ ID NO: 6591 - protein, 296 aa, Saccharomyces cerevisiae
MITTPLVHVASVEKGRSYEDFQKVYNAIALKLREDDEYDNYIGYGPVLVRLAWHISGTWDKHDNTGGSYGGTYRFKKEFNDPSNAGLQNGFKFLEPIHKEFPWISSGDLFSLGGVTAVQEMQGPKIPWRCGRVDTPEDTTPDNGRLPDADKDAGYVRTFFQRLNMNDREVVALMGAHALGKTHLKNSGYEGPWGAANNVFTNEFYLNLLNEDWKLEKNDANNEQWDSKSGYIMLPTDYSLIQDPKYLSIVKEYANDQDKFFKDFSKAFEKLLENGITFPKDAPSPFIFKTLEEQGL

SEQ ID NO: 6592 - protein, 398 aa, Ralstonia metallidurans CH34
MSLFSAVEMAPRDPILGLNEAFNADTRATKVNLGVGVYFTDEGKIPLLRAVQEAEKARLTTATPRGYLPIEGIAAYDQAVQTLLFGKESPLITEGRVVTAQALGGTGALKIGADFLKRLYPNASVAISDPSWENHRALFEAAGFPVVNYAYYDAASHGLNFAGMVESLKSYPANTIVVLHACCHNPTGVDLDEAQWKQVVELVKERNLIPFLDMAYQGFAEGIEPDGAAVRLFAESGLPFFVSSSFSKSFSLYGERVGALSIVTTGKEEAQRVMSQIKRVIRTNYSNPPTHGGTVVATVLNSPELRAMWEQELAEMRDRIKLMRHALVDKLAAKGVPGDFSFVKAQRGMFSYSGLTSAQVDRLRTEHGIYAVGTGRICVAALNSRNIDAVVNAIAAVY

SEQ ID NO: 6593 - protein, 193 aa, Phaseolus acutifolius
MVPSEIRGVHYLAPENPFLVPPNFGLLQNDIPNLHLNTLLSNFPNCHFPPSGLEFVAPHSCLSSNSTSDEADEIQFNIIDERKHRRMISNRESARRSRMRKQKHLDELWSQVVRLRTENHNLIDKLNHMSDSHDRVLQKNTRLKEEASDLRQMLADMQIGISFACTMEELEDLPCNKPGPSNQLITPADMIHE

SEQ ID NO: 6594 - protein, 573 aa, Yarrowia lipolytica CLIB122
MARIIKHKLTTREGLIGDYDYAFLFTPKIPFMKKREDEPSTFFPLNSSLPLFLAILLGFQHSLAMVAGVVTPPLIMGGSANFGPDLSQYLVSACLIGSGILSLIHIIRFKIPKTNIYIGTGLISVVGTSFATINVFTSSLPIMYRSGICQTAADGTPLPCPDGYGRLIATAMVCALLEVVLSFLPAKVLKKVFPPIVTGPVVLLIGVELVSSGFKDWAGGSGPCYGRPTSGDFMMCPANGAPMAAPWGSAQFIGLGFLVFISILFCEKWGAPIMKSCSVVIGLLVGCIVAAACGYFDGTNIDAAPVGTFLWTHTFKLKIYGPAVLPMLAVYLVLMMESIGDITATCDVSRQAVEGPEYESRIKGGILGDGIIGILAGAFTLTPMSTFAQNNGVIALTKCANRQAGAWACFFMLIMGIFAKFAAAIVAIPKPVLGGMTTFLFSSVCVSGIAIITRAGKIQRRERLILTASLVMGLGATMVPDWFTYVFTYKGDNHSLRGFYDAIELVMTNGFAIAGFVGIACNLILAEEENVDDEQEMQVVEIDAAEEENSSSDDMMVPEAKRASEDHKRVDMV

SEQ ID NO: 6595 - protein, 460 aa, Leptospira interrogans serovar Copenhageni str. Fiocruz L1-130
MKEYDIIVIGTGGGTKLVTPPSKIGYKIAVIEKENPGGTCLNRGCIPSKMLIYPAEILSLTKHSEKFQISFPKKPEVDFKTLIERISKTVDDESASILPAYDKNSNITYISGTASFISDKVITVNGEQLTAERIFIASGARPAIPDIPGLAGTPFMTSRETLRRTDLPKSMIVIGGGFIALELGFAYSSFGSEVTFLVRNRMLKNEDKDIVDEFERIFTKEHNVLLHTNIHKIEYNKNLFYVEAISQGKTILLQSEALLVATGIKPNTDLLNLQNTNIQTDKNGYIVVNEYLETTSPGVYALGDITGKYFYRHSVNFEGEFLFRTLYQEKKRTPIEYPPVPHAVFTHPQIAKVGKTEEELIQEGIDYVAAKNSYSASATGMARLSDSGFVKILIDKKSKMVLGAHVIGDEASNLIHLFILLMTMKGTLDDLLKMIYVHPALPEIARNAARKAKELLQSKK

SEQ ID NO: 6596 - protein, 127 aa, Tropheryma whipplei TW08/27
MLRFGRILFSRGFLPSIDLEVLVHGRGSAVSFAIKPLGDRVVIRPADAEQVTASGLVIPDTAQERPQEGEVVAVGPGSLNDDGNRVPLDVSVGDRVIYARYGGTEVKLGDDEYTILASRDVLAVVHR

SEQ ID NO: 6597 - protein, 520 aa, Kluyveromyces lactis
MFTRDANGRHKEVDALVDDMVNFSFDTDAKVMLDPPSTPTRIRGSPSPTRSIVKNPENSLMDIDDDTQGDLTADITKSPKKLPKDFYKKSSKTKSKRLVSVCQMYFLDYYCDMFDYVISRRERTRQVINYLEEQRRSNLMGTEQITNEWQGYLTKETNILRKRRLKPKHKDFEMITQVGQGGYGQVYLARKKDTKEICALKILNKKLLMKLEGTDHVLTERDILTTTRSEWLVKLLYAFQDPQSLYLAMEFVPGGDFRTLLLNTKFLQAPHARFYISEMFCAVNALHQLGYTHRDLKPENFLIDSKGHIKLTDFGLASGTVSMERIESMKIRLQEVKNLEFPEFRERSMDDRRRMYNKLREEEVRYAHSTVGSPDYMALEVLEAKNYDFTVDYWSLGCILFESLVGYTPFSGNSTNETYENLRNWKHVLQRPKCDNGRYAFSDRTWELITRLIADPINRLKSFEHVKRMRYFSEIDFNTLRTIHPPFIPQLDNEEDVGYFDDFTNEEHMARYVDVFKRQD

SEQ ID NO: 6598 - protein, 432 aa, Anabaena variabilis ATCC 29413
MVNTTIKTTKSQEIFAAAQNLMPGGVSSPVRAFKSVGGQPIVFDHVKGAYIWDVDGNQYIDYVGTWGPAICGHAHPDVIGALHEALEKGTSFGAPSFLENVLAEMVIAAVPSIEMVRFVNSGTEACMAVLRLMRAFTNREKVIKFEGCYHGHADMFLVKAGSGVATLGLPDSPGVPKSATSSTLTAPYNDLEAVKALFAENRDQIAGVILEPVVGNAGFITPDAGFLEGLRELTHEHGALLVFDEVMTGFRIAYGGAQEKFGVTPDLTTLGKVIGGGLPVGAYGGRRDIMSMIAPAGPVYQAGTLSGNPLAMTAGIKTLELLQKPGAYEYLERITKKLADGLLQVAQETGHAACGGHISAMFGLFFTSGPVHNYEDAKNSDTAKFGRFHRGMLERGVYLAPSQFEAGFTSLAHTDEDIDQTIAIAREVLSSI

SEQ ID NO: 6599 - protein, 447 aa, Bacteroides fragilis NCTC 9343
MKYQVIIIGGGPAGYTAAEAAGKAGLSVLLFEKQNLGGVCLNEGCIPTKTLLYSAKTYDGAKHASKYAVTVPEVFFDLPKIIARKSKVVRKLVLGVKSKLTSNNVTIISGEATILDKNTVRCGEETYECDNLILCTGSETFIPPIPGIDSVNYWTHREALDNKELPASLAIVGGGVIGMEFASFFNSLGVKVTVIEMMDEILGGMDKELSALLRADYAKRGIQFLLSTKVVSLAQTEEGAVVSYENAEGAGSVIAEKLLMSVGRRPVTKGFGLENLNLQRTERGSIVVNGQMESSLPGVYVCGDLTGFSLLAHTAVREAEVAVHAILGKEDRMSYAAIPGVVYTNPEIAGVGQTEESLTAKGIAYRAVKLPMAYSGRFVAENEGVNGVCKVLLGEDDTILGAHVLGNPASEIITLAGMAVEMKLKAAEWKKIVFPHPTVAEIFREAL

SEQ ID NO: 6600 - protein, 474 aa, Microbispora rosea subsp. aerata
MSRRAKIVCTLGPATSSPERLRELIKAGMNVARFNLSHGSHELHKEVFDRVRAAADELGCAVGVLADLQGPKIRVGRFASGPVRLGYGDVFTITTEDVPGDRDIVSTTYEGLPGDVKPGDTILVDDGRLNLEVTAVDGPRVVTKVVIGGMISDNKGLNLPGVAVSAPALTEKDEEDLRWALRTGFDMIALSFVRCPDALVRAIMEEEGVRLPLLAKIEKPQAVERLEEIVDTFDGVMVARGDLGVELPLEQVPIVQRRIIDLCREKAHPVIVATQMLDSMMSSPRPTRAEASDVAYAVMDGADAVMLSGETSVGNYPVEAVSTMARIASPRRATRCRPPTPWTACPRPPAAHRPRGAEVGAIVGAKALVAYTMSGETARRLARYRSPIPLLAFTSNPLVRGQLALTWGVETFEVPFVHHTDDMVRQVEASLLSLGICEKGDKVVVVAGSPPGNHGSTNSLRVHTIGSAVAHPAV

SEQ ID NO: 6601 - protein, 692 aa, Solanum tuberosum
MTEYSLPTMNLWNNSTSDDNVSMMEAFMSSDLSFWATTNSTTTNSASAAVVGVNSNLLHTNNNNPSVFPLSSSTSVSAAAAVDATKSMPFFNQETLQQRLQALIDGARETWTYAIFWQSSVVDFSSPSVLGWGDGYYKGEEDKAKRKLAVSSPAYIAEQEHRKKVLRELNSLISGAPAGTDDAVDEEVTDTEWFFLISMTQSFVNGSGLPGQALYSSSPIWVAGTEKLAASHCERVRQAQGFGLQTIVCIPSANGVVELGSTELIVESSDLMNKVRVLFNFSNDLGSGSWAVQPESDPSALWLTEPSSSGMEVRESLNTVQTNSVPSSNSNKQIAYANENNHQSGNGQSCYNLQQQQNNPPQQQTQGFFTRELNFSEFGFDGSSNRNGNASLSCKPESGEILNFGDSTKKSASSANVNLFTGQSQFGAVEENNNNKNKKRSATSRGSNEEGMLSFVSGTVLPSSGMKSGGGGGEDSEHSDLEASVVKEADSSRVVEPEKRPRKRGRKPANGREEPLNHVEAERQRREKLNQRFYALRAVVPNVSKMDKASLLGDAISYINELKSKLQNTESDKEDLKSQIEDLKKESRRPGPPPPNQDLKIGGKIVDVDIDVKIIGWDAMIGIQCNKKNHPAARLMAALMELDLDVHHASVSVVNDLMIQQATVKMGSRHYTEEQLRVALKSKIAETPLESR

SEQ ID NO: 6602 - protein, 407 aa, Haemophilus influenzae R2846
MTNKVNSYGWKALIGSAVGYAMDGFDLLILGFMLSAISADLNLTPAQGGSLVTWTLIGAVFGGILFGALSDKYGRVRVLTWTILLFAVFTGLCAIAQGYWDLLIYRTIAGIGLGGEFGIGMALAAEAWPARHRAKAASYVALGWQVGVLGAALLTPLLLPHIGWRGMFLVGIFPAFVAWFLRSHLHEPEIFTQKQTALSTQSSFTDKLRSFQLLIKDKATSKISLGIVVLTSVQNFGYYGIMIWLPNFLSKQLGFSLTKSGLWTAVTVCGMMAGIWIFGQLADRIGRKPSFLLFQLGAVISIVVYSQLTDPDIMLLAGAFLGMFVNGMLGGYGALMAEAYPTEARATAQNVLFNIGRAVGGFGPVVVGAVVLAYSFQTAIALLAIIYVIDMLATIFLIPELKGKALD

SEQ ID NO: 6603 - protein, 201 aa, Salmonella enterica subsp. enterica serovar Paratyphi A str.
MALHDENVVWHSHPVTVAAREQLHGHRGVMLWFTGLSGSGKSTVAGALEEALHQRGVSTYLLDGDNVRHGLCRDLGFSDADRQENIRRVGEVASLMADAGLIVLTAFISPHRAERQLVKERVGHDRFIEIYVNTPLAICEQRDPKGLYKKARAGELRNFTGIDAIYEAPDSPQVHLNGEQLVTNLVSQLLDLLRRRDIIRS

SEQ ID NO: 6604 - protein, 646 aa, Solanum tuberosum
MTDYRLWSNSNTTNTSDDNMMMDAFLSSDPSSFWPNRTSISPTPVNGGVGETMPFFNQESLQQRLQALIDGARESWAYAIFWQSSSTSDFATPSVLGWGDGYYKGEENKNKRRASSSSTNFVAEQEHRKKVLRELNSLISGVQATGAGSGGDDAVDEEVTDTEWFFLISMTQSFANGNGLPGLAMYSSSPIWVTGTEKLAGSQCERARQAQGFGLQTIVCIPSANGVVELGSTELIFESSDLMNKVKYLFNFNIDMGSVTGSGSGSCAVHPEPDPSALWLTDPSSSVVEAKDSLINSSSRDVQLVFGNENSENGTQNQQHSQQTQGFFTKELNFSGYGFDGSSTRNKNGNSSISCKPETREILNFGDSSKKSGSLFSGQSQFGPGTGLGLMEENKNNNKKRSLASRGNNEKGMLSFVSGVILPTSTMGKSGGGGNFDHSDLEASVVKEAIVEPERKPRKRGRKPANGREEPLNHVEAERQRREKLNQRFYALRAVVPNVSKMDKASLLGDAIAYINELKSKVQNSDLDKEELRSQIESLRKELANKGSSNYSSSPPSNQDLKIVDMDIDVKVIGWDAMIRIQCSKKNHPAARLMAALKDLDLDVHHASVSVVNDLMIQQATVKMGSRLYAQEQLTIALTSKFAESR

SEQ ID NO: 6605 - protein, 509 aa, Mesorhizobium sp. BNC1
MSEEQNVTSKKITSKTRNRLVAAVASAAIAGAVGFSAISSGTVPVFAEPVKLDRPVQAPSFADVVDVVTPAVVSVRISGEAPETGTVATPFFDMPGFDNLPPNHPLRRFFDEFQRRDEQPRGPQQRRRTRPVAQGSGFFISGDGYIVTNNHVVEGGNQYTVVLEDGTELQADLIGKDPRTDLAVLKVKADREFTYVTWANDDAARVGDWVVAVGNPFGLGGTVTAGIVSARGREIGAGNYDDFLQIDAAVNQGNSGGPTFNLAGEVVGVNTAIFSPSGGNVGIAFAIPASLAKTVVEQLIEDGSVERGYMGVSIQEVTPQIAESLGLQDARGALINSANSGDPAARAGIQAGDVVIAVNGKTIATPRELARTVAAIQPGTEIDVTVWRNGKSQDFSVTLTEMPDTDQVASAAPSAPSQDEGGQPASFGLTVAPADDGNGLVVTDVEPGSVAEENGIQPGDVIRAINSQPVTTAGDLKKAADAASSAGRGAVLLQVVRDDANRFVALPIG

SEQ ID NO: 6606 - protein, 273 aa, Actinobacillus pleuropneumoniae serovar 1 str. 4074
MQNLRYPVDSKPPFGLTLLLAAQHLLAALGGIIAVPLVIGNVLKLPTPDTIVLVNAALLVSGIVTIIQCQGIGPIGLRLPSVMGTSFTFVAAALAIGFSEHGVAGIMGASLVGSLVMIIGSFFMPYVRKLFPPVVTGVVVMMIGLSLIPVAVDWFAGGQKGDPHYADPANLAMATFVLVLVVILVQWGKGIFSAAAIVIGMMVGYVVALALGWITFDAVKNSDAFAIPQPLHFGLAFPISGIIGMSIAYLVTIVESSGNLFAPGYPTQTENYR

SEQ ID NO: 6607 - protein, 339 aa, Armillariella tabescens
MVKVGINGFGRIGRIVLRNALQFSEIEVVAVNDPFIDLDYMVYMFKYDSVHGRFKGTVEAKDGKLYIEGKPITVYGERDPSAIPWGSVGAEYVVESTGVFTTIDKASAHLKGGAKKVVISAPSADAPMFVVGVNLDAYDPSYKVISNASCTTNCLAPLAKVIHDKFGIVEGLMSTIHATTATQKTVDGPSNKDWRGGRGVNNNIIPSSTGAAKAVGKVIPSLNGKLTGLSFRVPTSDVSVVDLVARLQKDASYDDIKAAVKEAAASGPLKGVIEYTEDAVVSTDFVGHSASSIFDAKAGIQLNKNFVKLIAWYDNEWGYSRRVCDLLVYAAAQDKKAGL

SEQ ID NO: 6608 - protein, 613 aa, Agrobacterium tumefaciens str. C58
MASISSPSQNGKAYTYVDHSYDVIVVGAGGAGLRATLGMAEQGFRTACITKVFPTRSHTVAAQGGIAASLTNMTPDCWQWHLYDTVKGSDWLGDVDAMQYLAMEAPKAVYELEHYGVPFSRNAEGKIYQRPFGGHMQNYGEGPPVQRTCAAADRTGHAILHTLYGQSLRNNAEFFIEYFALDLIMAPDGRCTGVVAWNLDDGTIHRFSAKMVVLATGGYGRAYFSATSAHTCTGDGGGMIARAGLPLQDMEFVQFHPTGIYGAGCLITEGARGEGGYLVNSEGERFMERYAPSAKDLASRDVVSRCMTMEIREGRGVGKNKDHIFLHLDHLDPAILHERLPGISESAKIFAGVDVTREPIPVLPTVHYNMGGIPTNYWGEVLNADANNPERIAPGLMAVGEAGCASVHGANRLGSNSLIDLVVFGRAAAIRAAQVIDRDAPVPALDIAACDKIMERFDSLRYANGSTPTAVLRDKMQRAMQDDAAVFRTQESLESGCQRLSAIWKELPDVKVTDRSMVWNSDLVETLELHNLMANAITTVYGAEARKESRGSHAREDFVDGPFGGRDDVNWRKHTLAWVSPEGDVKLDYRPVHTDLIADGIDPKKIEPKARVY

SEQ ID NO: 6609 - protein, 464 aa, Burkholderia fungorum LB400
MNDELIAARIDRLPVSRFHRRLLLLVSLPFFFDISDIFTFSYAAPALVKEWGLTMSSIAMLTSAGFFGMFLGATLGGMLSDKIGRKRALICYVIAYSVFSLANALAPDIPMLMITRVLTGVGISSATAVVMAYIAELFPAKTRGTWQSWAMVIALMGIPITSWVARLVVPSGPDGWRWIFVWGALGIVFLVFTKHFPESPRWLARQGRMEEADRTLSLIEAEVVRTTGPLPEAVAINRPAEVRAPWTSMFKGQYIGRTMTLWAIWIFQTLGFYGFQAWVPTLLVQHGITIVHSLTYITLINIGAVPGALIAVFLADRFERKFSIAGAAALIAVFGLLYGLSFQPVLIVSFGFLVGMLIQTFAALCYAYTPEQYPTDIRNTGAGFAYGMGRLANVGNSFIVAGIFMNFGYVWVFVYIAGAWLATAAVTLLFGARTTGRRLESINPVLAQAADNPLDAPILRPGDR

SEQ ID NO: 6610 - protein, 417 aa, Solibacter usitatus Ellin6076
MTHTKSEELFRRAVEKIPGGVNSPVRAFRSVGGQPVFIARGQGSHLFDVDGNEYIDYVGSWGPLILGHRHPEILAALERALEIGTSFGAPTEQEIDLADAIIDAVPSVEMVRLVNSGTEATMSAIRVARGFTGRDLVVKFEGCYHGHVDSLLVKAGSGMATLGIADTQGVPKAFADTTIPLPYNSLDALEEAFRAHGDRIAAVIVEPVVGNMGCVPPLPGYLEGMRAITERYGALLIFDEVMTGFRVAFGGAQQLYGIKPDLTTLGKVIGGGLPVGAYGGRKDIMSKVAPAGPIYQAGTLSGNPLAVAAGLAMLRHLKRNPQVYTRLEECGARLAAAAPKGVTVNRVGSMFTFFFTDGPVTDWESAKRCDTSRFGEFFRGMLDRGVYLAPSQFEAAFVGAAHSDEDIAKTIEAAKTA

SEQ ID NO: 6611 - protein, 145 aa, Pyrus communis
MKMGFAGFQVLMVLGLLATSCIAQAPGAAPTASPPTAKSPTATPPTATPPSAVPVPSPSKTPTASPTPSPVTAPTPSASPPSSTPASTPASTPAAKSPSSSAAPSGSSPNSPPADAIPPSGTSAISRVAIAGTALAGVFFAIVLA

SEQ ID NO: 6612 - protein, 329 aa, Oryza sativa
  misc_feature (9)..(9): Xaa can be any naturally occurring amino acid
  misc_feature (16)..(16): Xaa can be any naturally occurring amino acid
  misc_feature (86)..(86): Xaa can be any naturally occurring amino acid
  unsure (1)..(329): unsure at all Xaa locations
MAATGDSSXGVLVCVXTGGSGFIGSWLVRLLLDRGYTVHATVKNLQDDGETRHLQALDGADTRLRLFQMDLLDPASITPAVDGAHXGVFHLGCPLTLYPASDRKTTHYRANWSCTAVAAALELVDPPGCRNSARGQVAILPNPEWPADKVIDDDSWADVELLKKHQHWYNVSKTLAEKAAWDFAAKEGLQLVALNPGLVLGPMLMPSPTSSLHMLLQILGGQRFDIDDFYIGCVDVRDVAQSAVVIYENTSAQGRHLCIESIERLIDFHDKLAELYPEFPIHRIQEDKQGWVVRSKAASKKLIDLGVHFIPFEKTIRDSVDCLRSKGYI

SEQ ID NO: 6613 - protein, 247 aa, Galdieria partita
MVASKTDLEQKVRSRLVKLFEQTPCMPIMVRLAWHDAGTYDAQTGTGGVNGSIRFDPELRHGANNGLKIALDLLEPIKKEYPDIGYADLFQLASVTAIEFAKGPKIPFRMGRKDATGPDACPEEGRLPNAEDHMSQLRRTFHRMGLSDKDITVLSGAHTLGRCHKERSGYEGPWTHQPLEFDNSYFVEILKPNPDPGLIRLASDLSLLDDSYTRSLVETYAENKDIFFKDYTESHHKLSELGAVWEY

SEQ ID NO: 6614 - protein, 313 aa, Glycine max
EIRFFELNTGANIPSLGLGTWLADPGVVGDVIAHAVEGDVHVGYRHIDCAQIYGNQEEIGLALKKLFEEGVVKREDLWITSKLWCTDHAPEDVPEALDRTLRDLQLDYIDLYLIHWPIRMKKGSVGFKAENIVPSDIPNTWKAMEALNKSGKARAIGVSNFSTKKLGELLEYARVTPAVNQSECHPAWRQDKLKAFCKSKGVHFSGYSPLGSPAWLEGDFLNHPVINMIAKKLGKTPAQVALRWGLQMGHSVLPKSSNPARIKENFDIFDWSIPEDMLDKFFEIQQERLLKASFFHEPNGGYLPEDELWDGGI

SEQ ID NO: 6615 - protein, 408 aa, Arabidopsis thaliana
MLAMEKEFDSKLVLQGNSSNGANVSRSKSFSFKAPQENFTSHDFEFGKIYGVGSYSKVVRAKKKETGTVYALKIMDKKFITKENKTAYVKLERIVLDQLEHPGIIKLYFTFQDTSSLYMALESCEGGELFDQITRKGRLSEDEARFYTAEVVDALEYIHSMGLIHRDIKPENLLLTSDGHIKIADFGSVKPMQDSQITVLPNAASDDKACTFVGTAAYVPPEVLNSSPATFGNDLWALGCTLYQMLSGTSPFKDASEWLIFQRIIARDIKFPNHFSEAARDLIDRLLDTEPSRRPGAGSEGYVALKRHPFFNGVDWKNLRSQTPPKLAPDPASQTASPERDDTHGSPWNLTHIGDSLATQNEGHSAPPTSSESSGSITRLASIDSFDSRWWGHLSFICFLGSNLVQSS

SEQ ID NO: 6616 - protein, 221 aa, Saccharomyces cerevisiae
MRANVDFLNPIQLGLSLSDANGNKPDNGPSTWQFNFEFDPKKEIMSTESLELLRKSGINFEKHENLGIDVFEFSQLLMDSGLMMDDSVTWITYHAAYDLGFLINILMNDSMPNNKEDFEWWVHQYMPNFYDLNLVYKIIQEFKNPQLQQSSQQQQQQQYSLTTLADELGLPRFSIFTTTGGQSLLMLLSFCQLSKLSMHKFPNGTDFAKYQGVIYGIDGDQ

SEQ ID NO: 6617 - protein, 260 aa, Mycobacterium bovis AF2122/97
MSGRLIGKVALVSGGARGMGASHVRAMVAEGAKVVFGDILDEEGKAVAAELADAARYVHLDVTQPAQWTAAVDTAVTAFGGLHVLVNNAGILNIGTIEDYALTEWQRILDVNLTGVFLGIRAVVKPMKEAGRGSIINISSIEGLAGTVACHGYTATKFAVRGLTKSTALELGPSGIRVNSIHPGLVKTPMTDWVPEDIFQTALGRAAEPVEVSNLVVYLASDESSYSTGAEFVVDGGTVAGLAHNDFGAVEVSSQPEWVT

SEQ ID NO: 6618 - protein, 223 aa, Zea mays
  misc_feature (35)..(35): Xaa can be any naturally occurring amino acid
  misc_feature (86)..(86): Xaa can be any naturally occurring amino acid
  unsure (1)..(223): unsure at all Xaa locations
MVQSKKKFRGVRQRHWGSWVSEIRHPLLKRRVWLXTFETAEEAARAYDEAAVLMSGRNAKTNFPVPRSGTGELLAPAVPAARGGAXGGGGGTSLSQILSAKLRRCCKTPSPSLTCLRLDPEKSHIGVWQKRAGARADSSWVMTVELNKDAPPPPSSGEEPAPSYGGAATTSTSTPTSSTITAGSPPPEMMDDEESVALQMIEELLGSHGMMLQVQGAAGSLVI

SEQ ID NO: 6619 - protein, 252 aa, Enterobacter cloacae
NDLLDAEYMAYMLKYDSTHGRFDGTVEVKDGHLVVNGKTIRVTAEKDPANLKWNEIGVDVVAEATGIFLTDETARKHITAGAKKVVLTGPSKDNTPMFVRGANFETYAGQDIVSNASCTTNCLAPLAKVINDNFGIVEGLMTTVHATTATQKTVDGPSHKDWRGGRGAAQNIIPSSTGAAKAVGKVLPELNGKLTGMAFRVPTPNVSVVDLTVRLEKAASYEEIKKAIKAASEGAMKGVLGYTEDDVVSTDF

SEQ ID NO: 6620 - protein, 608 aa, Arabidopsis thaliana
MGGLIDLNVMETEEDETQTQTPSSASGSVSPTSSSSASVSVVSSNSAGGGVCLELWHACAGPLISLPKRGSLVLYFPQGHLEQAPDFSAAIYGLPPHVFCRILDVKLHAETTTDEVYAQVSLLPESEDIERKVREGIIDVDGGEEDYEVLKRSNTPHMFCKTLTASDTSTHGGFSVPRRAAEDCFPPLDYSQPRPSQELLARDLHGLEWRFRHIYRGQPRRHLLTTGWSAFVNKKKLVSGDAVLFLRGDDGKLRLGVRRASQIEGTAALSAQYNQNMNHNNFSEVAHAISTHSVFSISYNPKASWSNFIIPAPKFLKVVDYPFCIGMRFKARVESEDASERRSPGIISGISDLDPIRWPGSKWRCLLVRWDDIVANGHQQRVSPWEIEPSGSISNSGSFVTTGPKRSRIGFSSGKPDIPVSEGIRATDFEESLRFQRVLQGQEIFPGFINTCSDGGAGARRGRFKGTEFGDSYGFHKVLQGQETVPAYSITDHRQQHGLSQRNIWCGPFQNFSTRILPPSVSSSPSSVLLTNSNSPNGRLEDHHGGSGRCRLFGFPLTDETTAVASATAVPCVEGNSMKGASAVQSNHHHSQGRDIYAMRDMLLDIAL

SEQ ID NO: 6621 - protein, 473 aa, Prunus persica
  misc_feature (146)..(146): Xaa can be any naturally occurring amino acid
  misc_feature (194)..(194): Xaa can be any naturally occurring amino acid
  unsure (1)..(473): unsure at all Xaa locations
MVFFRSVNALSKLRSRLGQQSNLRDSVRWLQTQTSTDLDLRSQLKELIPEQQERLKKIKAEYGKVQLGNITVDMVLGGMRGMTGLLWETSLLDPDEGIRFRGLSIPECQKVLPGAKPGGEPLPEGLLWLLLTGKVPSKEQVDALSXELRSRAAVPDYVYKAIDALPITAHPMTQFTTGVMALQVQSEFQKAYDXGIYKSKYWEPTFEDSLSLIAQLPVVASYVYQRIFKDGKVIPVDDSLDYGANFSHLWGFDDPKMHELMRLYVTIHSDHEGGNVSAHTGHLVASALSDPYLSFAAALNGLAGPLHGLANQEVLLWIKSVVDEVGENVTTEQLKDYVWKTLNSGKVVPGFGHGVLRKTDPRYSCQREFALKHLPDDPLFQLVSKLYEVVPPILIELGKVKNPWPNVDAHSGVLLNHFGLTEARFFTVLFGVSRSIGIGSQLIWDRALGLPLERPKSVTMESLENYCKKAASS

SEQ ID NO: 6622 - protein, 552 aa, Lactobacillus gasseri
MNNLGNKVIYQIYPKSFYDSNNDGIGDLRGIIEKIDYIKKLNVDFIWFNPFFVSPQNDNGYDIADYKKIDPRFGTMDDFEELVTKLKSINVNVMLDMVLNHCSTEHEWFKKALAGDKKYQKFFYLRKGKDGQLPNNWQSKFGGPAWSKFGDTDYYYLHLYDPTQADLDWHNPEVRAALIDVVNFWRNKGVHGFRFDVINVTGKDTTLVNSTDPVQEKSLYTDTPVVQQYLKELNAKSFGQDPESVTVGEMSSTTIENSIAYTRPEDHELSMVFTFHHLKVDYKNGEKWSKMPFDFKKLKDIMLTWNSKIDQGGGWQALFWNNHDQPWALNRFGDTGKYHNKSAEMLALALHLLRGTPYIYMGEEIGMMDPHYTSMKDYVDIEALNAYDALIKKGIDEKEAFEIVQSKARDNSRVPMHWDNSQYAGFSDHKPWLMPTDQDRINVEKELLDGEIFNFYQKLIKLRKSEKLISEGHIKPFLMEHPQVMAYERYLDDSNEKLLVFANFYGKETEVKIPAEYLNKAGHILIQNYDKNLASLPLALQLKPYEALAIKL

SEQ ID NO: 6623 - protein, 432 aa, Streptomyces spiramyceticus
MSATDSAVGAQRRVVITGIGVVAPGGTGTKAFWDLITSGRTATGRISYFDPAPFRSQVAAECTFDPALQGLTPREIRRMDRAAQFAVVSAREAVQDSGLDFGSPDPARIGVTIGSAVGATMGLEEEYVVLSDSGRKWLVDNSYGVPHLYGHFVPSSMAAEVAWAVGAEGPAAVVSAGCTSGIDSVGYARELIAEGSVDIMVAGATDAPISPIAVACFDAIKATTPRNEDAEHASRPFDKSRNGFVLGEGSAVFVLEEYGHARRRGAHIYAEIAGFGSRCNAFHMTGLRPDGREMAVAIDTALAEARMNAEEVSYINAHGSGTKQNDRHETAAFKRSLGHHAYDVPVSSIKSMVGHSLGAIGSIEIAACALAIEHGVVPPTANLHTPDPECDLDYVPLVAREQRVDTALTVGSGFGGFQSAMVLTRPEERTGA

SEQ ID NO: 6624 - protein, 1327 aa, Mycobacterium bovis AF2122/97
MRCGIVVNVTGPPPTIDRRYHDAVIVGLDNVVDKATRVHAAAWTKFLDDYLTRRPQRTGEDHCPLTHDDYRRFLAGKPDSVADFLAARGIRLPPGSPTDLTDDTVYGLQNLERQTFLQLLNTGVPEGKSIASFARRLQVAGVRVAAHTSHRNYGHTLDATGLAEVFAVFVDGAVTAELGLPAEPNPAGLIETAKRLGANPGRCVVIDSCQTGLRAGRNGGFALVIAVDAHGDAENLLSSGADAVVADLAAVTVGSGDAAISTIPDALQVYSQLKRLLTGRRPAVFLDFDGTLSDIVERPEAATLVDGAAEALRALAAQCPVAVISGRDLADVRNRVKVDGLWLAGSHGFELVAPDGSHHQNAAATAAIDGLAEAAAQLADALREIAGAVVEHKRFAVAVHYRNVADDSVDNLIAAVRRLGHAAGLRVTTGRKVVELRPDIAWDKGKALDWIGERLGPAEVGPDLRLPIYIGDDLTDEDAFDAVRFTGVGIVVRHNEHGDRRSAATFRLECPYTVCQFLSQLACDLQEAVQHDDPWTLVFHGYDPGQERLREALCAVGNGYLGSRGCAPESAESEAHYPGTYVAGVYNQLTDHIEGCTVDNESLVNLPNWLSLTFRIDGGAWFNVDTVELLSYRQTFDLRRATLTRSLRFRDAGGRVTTMTQERFASMNRPNLVALQTRIESENWSGTVDFRSLVDGGVHNTLVDRYRQLSSQHLTTAEIEVLADSVLLRTQTSQSGIAIAVAARSTLWRDGQRVDAQYRVARDTNRGGHDIQVTLSAGQSVTLEKVATIFTSRDAATLTAAISAQRCLGEAGRYAELCQQHVRAWARLWERCAIDLTGNTEELRLVRLHLLHLLQTISPHTAELDAGVPARGLNGEAYRGHVFWDALFVAPVLSLRMPKVARSLLDYRYRRLPAARRAAHRAGHLGAMYPWQSGSDGSEVSQQLHLNPRSGRWTPDPSDRAHHVGLAVAYNAWHYYQVTGDRQYLVDCGAELLVEIARFWVGLAKLDDSRGRYLIRGVIGPDEFHSGYPGNEYDGIDNNAYTNVMAVWVILRAMEALDLLPLTDRRHLIEKLGLTTQERDQWDDVSRRMFVPFHDGVISQFEGYSELAELDWDHYRHRYGNIQRLDRILEAEGDSVNNYQASKQADALMLLYLLSSDELIGLLARLGYRFAPTQIPGTVDYYLARTSDGSTLSAVVHAWVLARANRSNAMEYFRQVLRSDIADVQGGTTQEGIHLAAMAGSIDLPQRCYSGLELRDDRLVLSPQWPEALGPLEFPFVYRRHQLSLRISGRSATLTAESGDAEPIEVECRGHVQRLRCGHTIEVGCSR

SEQ ID NO: 6625 - protein, 767 aa, Prunus persica
MAVLLSTLATEIVIPVAAVIGIVFSLVQWFIVSRVKVTLERHAPPAGPNSNKNGFNDYLIEEEEGLHDQNVVAKCAEIQNAISEGATSFLFTEYQYVGVFMVVFAILIFLFLGSVEGFSTKSQPCTYDAQRTCKPALATAIFSTVAFVLGGVTSILSGFLGMKIATYANARTTLEARKGVGKAFIVAFRSGAVMGFLLAANGLLVLYITINVFKVYYGDDWEGLFESITGYGLGGSAMALFGRVGGGIYTKAADVGADLVGKVERNIPEDDPRNPAVIADNVGDNVGDIAGMGSDLFGSYAESSCAALVVASISSFGINHEFTSMLYPLLISSMGILICLITTLFATDFFEIKAVKEIEPALKKQLIISTVLMTVGIAIISWIALPSSFTIYNFGVQKVVKNWQLFLCVAVGLWAGLIIGFVTEYYTSNAYSPVQDVADSCRTGAATNVIFGLALGYKSVIIPIFAIAVSIFVSFSFAAMYGIAVAALGMLSTIATGLAIDAYGPISDNAGGIAEMAGMSHRIRERTDALDAAGNTTAAIGKGFAIGSAALVSLALFGAFVSRAAISTVDVLTPKVFIGLIVGAMLPTGFSAMTMKSVGSAALKMVEEVRRQFNTIPGLMEGTAKPSYATCVKISTDASIKEMIPPGALVILTPLIVGTLFGVETLSGVLAGSLVSGVQVAISASNTGGAWDNAKKYIEAGASEHARTLGPKGSDPHKAAVIGDTIGDPLKDTSGPSLNILIKLMAVESLVFAPFFATHGGLLFKIF

SEQ ID NO: 6626 - protein, 559 aa, Synechococcus sp. CC9605
MAKLLSFSDESRSALERGVDALADAVRVTIGPRGRNVVLEKKFGAPDIVNDGDSIAREIELDDPFENLGAKLMQQVASKTKDKAGDGTTTATVLAQAMVREGLRNTAAGASPVELRRGMEKAAAHIVAGLSERSQAIAGDAIRQVATVSSGGDEEVGRMIAEAMDKVSTDGVITVEESKSLATELEITEGMAFDRGYSSPYFVTDADRQVCEFDNPLILLTDRKISTITDLVPVLETVQKSGSPLLILSEEVEGEALATLVMNKSRGVLQVAAVRAPSFGERRKAALADIAILTGGTLISEDKAMTLDKVTLEDLGKARRVTISKENTTIVANDDHRQAVSERVSAIRRELEATESDYDREKLQERIAKLAGGVAVIKVGAPTETELKNRKLRIEDALNATRAAVEEGIVAGGGSTLLQLADSLDALASSLNGDQRTGVEIVQRALTAPIHQIATNAGQNGDVVIAGMRSSGQGFNALSGVYEDLMAAGIVDAAKVVRLAVQDSISIASLLITTEVVIADKPEPPAPAPAGDGDPMGGMGGMGGMGMPGMGGMGMPGMM

SEQ ID NO: 6627 - protein, 329 aa, Kluyveromyces lactis NRRL Y-1140
MTYLAETVTLNNGEKMPLVGLGCWKMPNDVCADQIYEAIKIGYRLFDGAQDYANEKEVGQGVNRAIKEGLVKREDLVVVSKLWNSFHHPDNVPRALERTLSDLQLDYVDIFYIHFPLAFKPVPFDEKYPPGFYTGKEDEAKGHIEEEQVPLLDTWRALEKLVDQGKIKSLGISNFSGALIQDLLRGARIKPVALQIEHHPYLTQERLIKYVKNAGIQVVAYSSFGPVSFLELENKKALNTPTLFEHDTIKSIASKHKVTPQQVLLRWATQNGIAIIPKSSKKERLLDNLRINDALTLTDDELKQISGLNQNIRFNDPWEWLDNEFPTFI

SEQ ID NO: 6628 - protein, 580 aa, Bacillus cereus G9241
MTILLLVSFVLGFVAILLSQFFRTYYVDMSEARLQKVATSVSELIEEGADVKTIENIAYKFSDPLSRIIIVEDGKEISSSPKQEGLVTLTMDDLKEDKELAAVFTDKKEIKNNIRKASNSRKNKNTENDIMIVGKPVQSKNQSAVFVYESLQVPIQGMERTTDFIFLSAGIAIILTTFFAFFLSTRITAPLRKMREVAFEVSRGKFDAKAPMVSQDEIGELATALNQMGKQLKFNMNALQQEKEQLASILSSMADGVITLNQEGEVVVINPPAEHFLQVWQEEKEIELSKKLPSELVKLFHLVVESEQQQVVEINLQKGNYVVLMTPLYNQTKIRGAVAVLRDMTEERRLEKMRQDFIANVSHELRTPMVMLQGYSEAILDDIVQTKEEINEFVQIIYDESVRLGKLVNELLDLARMESGNVELHIGEVDIHPFVEKIGRKFQGIAKDKEVALTVDFKDPIEQYPFDADRMEQVLTNLIDNAIRHTNAGGHVTLVIDTKNNGLIFEVQDSGAGIPEEDIPFLFDRFYKADKARTRGKKGGTGLGLAIAKNIVQGHDGKIAVSSIVGEGTTFSVYLPNRII

SEQ ID NO: 6629 - protein, 759 aa, Prunus persica
MGLLSEGLTQLLIPLAALVGLAFALLQWFLVSRVKVSGSYGEGNGYKDKLIGEAEEGVDSLEVTIKVAEIQNAISIGATSFLFTQYRYLSIFVGVFSAIIFLFLGSVKGFSTKSEPCTYNTGNTCKPALANALFTTIAFLLGALTSVLSGFFGMKIATYANARTTLEARRGVGKAFITAFRSGAVMGFLLAANGLLVLYITINLFKLYYGDDWEGLYESITGYGLGGSSMALFGRVGGGIYTKAADVGADLVGKVERNIPEDDPRNPAVIADNVGDNVGDIAGMGSDLFGSYAESSCAALFVASISSFGISHDYTAMSYPLIISSMGIVVCLITTLFATDLFEIKKVNEIEPSLKRQLLISTVLMTAGIAAVTFVALPSEFTLFQFGTNKAVKNWYLFFCVAIGLWAGLVIGYTTEYHTSNAYSPVQDVADSCRTGAATNVIFGLALGYKSVIIPVFAIAFAIYVSFSLAAMYGIAVAALGMLSTISTGLAIDAYGPISDNAGGIAEMAGMSHEIRERTDALDAAGNTTAAIGKGFAIGSAALVSLALFGAYVSRAGIETVDVLTPKVFIGLLVGAMLPYWFSAMTMKSVGSAALKMVEEVRRQFNTIPGLMEGTAKPDYATCVKISTDASLKEMIPPGALVMLTPLIAGTFFGVETLAGILAGSLVSGVQIAISASNTGGAWDNAKKYIEAGASEHAKSLGPKGSDPHKAAVIGDTIGDPLKDTSGPSLNILIKLMAVESLVFAPFFAAHGGVLFKWL

SEQ ID NO: 6630 - protein, 396 aa, Escherichia coli
MFENITAAPADPILGLADLFRADERPGKINLGIGVYKDETGKTPVLTSVKKAEQYLLENETTKNYLGIDGIPEFGRCTQELLFGKGSALINDKRARTAQTPGGTGALRVAADFLAKNTSVKRVWVSNPSWPNHKSVFNSAGLEVREYAYYDAENHTLDFDALINSLNEAQAGDVVLFHGCCHNPTGIDPTLEQWQTLAQLSVEKGWLPLFDFAYQGFARGLEEDAEGLRAFAAMHKELIVASSYSHNFGLYNERVGACTLVAADSETVDRAFSQMKAAIRANYSNPPAHGASVVATILSNDALRAIWEQELTDMRQRIQRMRQLFVNTLQEKGANRDFSFIIKQNGMFSFSGLTKEQVLRLREEFGVYAVASGRVNVAGMTPDNMAPLCEAIVAVL

SEQ ID NO: 6631 - protein, 240 aa, Bacillus cereus ATCC 10987
MRDKSVASSYVTTVKLDSFREIAYSKELKRKLLAEFIGTFTLVFAGTGAIIVNSITQSLTHIGVAITFGLVVLALIYSFGHISGAHFNPAVTIALLSAKEISRREAILYILIQMIGASFASLFLLSIFGDIANLGATLPSQSWTQSFILEFVLTFILMMVIFASATHGKATKSFAGVAIGSTVALEAMFGGPISGASMNPARSFGPALISGTFEYLWIYLVATTLGALLAAIVYKFIHEQ

SEQ ID NO: 6632 - protein, 371 aa, Zea mays
MAAEHATAAVGEPPPATSQPAEGVTAAAGQRSVPTPFLSKTYQLVDDPAVDDIISWNDDGSAFIVWRPAEFARDLLPKYFKHNNFSSFVRQLNTYGFRKIVPDRWEFANDCFRRGEKRLLCDIHRRKVSPATGAVTVAAAAAAAIPMALPVGSPVYSGEEQVLSSSSPEPPSLQQHPPAPSGSGSGGVVSGDVGEENERLRRENARLARELGQMKKLCNNILLLMSKYAATQQPDAAKEAAAGNCTGESSDAAAAPPLPSILELLPSCRADPAPAAAGTDHEDDEKAGARLFGVSIGRKRMRDESDHHAGVCAAEVKAEPVDARPDQQRQRNATEPQSWPIYRPRPVYHPLRACNGSGSAGSDHDGSNDSR

SEQ ID NO: 6633 - protein, 203 aa, Yarrowia lipolytica CLIB122
MLQKSGIISRNVYSLYLDSIDAATGSVLFGAVDSSKYSGSLETLPLTSPNAFQVAYGDISVNGQSVSSGGNAILDSGTSFSYIPEAAFAGLQKKLKLGTLEPNTQLYTIDCNAASFNVDFKFGSSTISVPSSQLIMPLKNFGLNSNQCVFGIVSTKYSSGYVLLGDTFLRSAYVVYDLDNKLVGIAPAKYGTASSIQRVTGSL

SEQ ID NO: 6634 - protein, 370 aa, Zea mays
MEAMDVKYKPVMFPNGAGLKKAKPAAAVALAGEPLYRECLKNHAASLGGHAVDGCGEFMPSPGANPADPTSLKCAACGCHRNFHRRTLEGSPPPPAPAPLALPPPPSVMHGQPHRAREETPEDRHPGVVDADDSDSDSEGSEYDEERSVSPPPPPHHLLPAPVAQQPPPPSYFPTAPHMVLSLGSGVPGPAVAVSPAQRLAPTQLTPSSAPPHAGGAMPMPRKRFRTKFTAEQKQRMQELSERLGWRLQKRDEAIVDEWCRDIGVGKGVFKVWMHNNKHNFLGGHSARRSASSPAPAAASLQTPAAGAGSGAAAAPSFNPSRITPPPPVLTSSPTAATGFNINGAASSAPTVATDYTTDNANGASSPHSA

SEQ ID NO: 6635 - protein, 1030 aa, Pichia angusta
MTILVASLFLPYTVHFEVQVKDKCVNNDTEFDDIAEPIRQPKTSASSKDKQLKDATNTTISLIKALAKNSSASNLSQTDLIDNRIQVISEDDDGETSVSTSNTDGANQNVSVQEFFFNNPKQPTLDEISQLKEASKSSPSVNVSTSTFIQPKSRVSTTKITVSSSVSEKQATKGPELLHSSLKVNRPGLSSRRSSSKVAKQALEKPLEREKDEYPPEHENAFLPDEDKVTPFGGFSKPDYHDLFIKDNVFATAPWRVVEFDKANGSLKNAIRVAAASDPETKFRWVGVLPIPSDVVPQTTKNNIAKELSEKYDSSVAFVDDVTFHGHYTSFSKEILWPIFHYQIPDNPKSNAFENHSWKHYEKLNRAVADQIVSQYREGDIVWVHDYHLMLVPKMIREKIPNAKIGFFLHVSFPSSEVFRCLAQRNNILEGLLGADCIAFQTEEYVRHFYQTCNRLLLADFDEYGIRYKDRVISVRGNPIGVDAELLNKRLQNNLCLNWRTLVRERWADKKLIVSRDKIDRIRGIKEKLLAYERFLNDNPERVSDTILILIYTKAKMEKDDDFETSIFNIAERINAKSSNISTDQPVIFLHQDIEFEQYLALLAEADLFIISTLREGMNLTSQEFVVAAQETHSPLIMSEFVGSAQVMTEGPLLTNPYDVKQVAENIKLGLEMSPEEKLQRWKKMYATILKHDSQSWVKNCIHDIETAFASNRKDCSSELTQLSQALFKEKYHSLPHPESKRLFIINLGNLVSKVNIPGSLINPVQHEYIMSTLFNLANDPNNIVYVFSFLKRSDLLRRYRRIGELGLIAENGGYIKLPNSNDWFTVIDENELTWMPTVIEVMNALCERLPGSFVEVEECTVRFHTENCSDVDRDHKLKLVGELITHVNELYSKEFNLHANLINGIVIVQEANLIVRALSFVMNQNSFDGHLRKIPSSSLTSPVSQPSDLTMSFKNQPQLKHNLGFVMAAGGNTPVDEEVFNYFNSLEFDIENKFTIRVGQDNSNSKAEEKLSGVNELFRILSTVIASDK

SEQ ID NO: 6636 - protein, 478 aa, Bacillus anthracis str. Sterne
MRKTMSQVNNTNNELKRTMKSRHLFMIALGGVIGTELFNGSGFIISQAGPGGSVLAFMAGGLLMYFVMLCLGELAVAMPVSGSFQEYATKFINPATGFTIGWLYWLSWANTTGLEFTTAGITMQRWFPDIPVWVWCLIFGVTIFMINALSARSYAETEFWFSSIKVSAIIAFIILGGAAMFGLIDLKGDEPAPLLSNFVNHGGLFPNGLAAILLTMVTVNYSFQGTELVGIAAGESEDPAKTLPRSIRNIIWRTMFFFVLAIFVLVALIPWEEAGLTKSPFVAVFDNISIPYAADIMNFVILTAVLSVANSGLYAATRMLWSLSKNEMAPAFLKKLSSRGIPLNALILTISISAFSLLTSVVAAETVYLWLISISGVITIIVWMSICVSQFFFRKHYVADGGRLEDLKFKTPLYPLVPILGFGLYGIILVSLIFIPDQRLGIYCTVPFIIFCYTYYHFKVKKRISTNTSSENKISETI

SEQ ID NO: 6637 - protein, 389 aa, Glycine max
  misc_feature (180)..(180): Xaa can be any naturally occurring amino acid
  unsure (1)..(389): unsure at all Xaa locations
MEDQNASSNGLGKVFHKVKPYLAMMSLQFGYSGMYIITMVSFKHGMSHWVLSVYRHIVATLIMAPFAFVLERKIRPKMTLPVFLRLAALGFLEPVLDQNLYNMGMKNTSTTFASATVNVMPAITFIMALICRLETVNLRKIPSVAKVVGTAVTVSGAMVMTLYKGPALQFIKGQAATHHXVGNSTQPSEQNWVLGTVELIASCGGWASFFILQSFTLKMYPAELSVTAWICFLGIFEGAIATLIFERDMSVWSIGMDSRLLACVYSGVVCSGMAYYVQGVVTRERGPVFVTSFSPLCMIITAALGSIVLAEQVYMGSVIGAIIIVSGLYTVVWGKSKDKLNNKTNEGNSEGHELPIKDGTKSGSDIFDSIEINVPSGAGKNVLLPSART

SEQ ID NO: 6638 - protein, 205 aa, Zea mays
  misc_feature (117)..(117): Xaa can be any naturally occurring amino acid
  misc_feature (197)..(197): Xaa can be any naturally occurring amino acid
  unsure (1)..(205): unsure at all Xaa locations
MAMMSGMDGGSNVVKVAAVVDAENPAVGPPPCAVDSDDLSQRANWLRAAVLGANDGLVSTASLMLGVGAVKADARAMVISGFAGLLAGACSMAIGEFVSVCSQRDVELARLDRGGGXDEKAALPSPVQAAAASALAFSVGALLPLLAAGFIADYRLRIGVVAAVATATLAAFGCVGAVMGRAPVARSCARVVGGGWXPWPSPSAS

SEQ ID NO: 6639 - protein, 545 aa, Salmonella enterica subsp. enterica serovar Paratyphi A str.
MTTNYIFVTGGVVSSLGKGIAAASLAAILEARGLNVTIMKLDPYINVDPGTMSPIQHGEVFVTEDGAETDLDLGHYERFIRTKMSRRNNFTTGRIYSDVLRKERRGDYLGATVQVIPHITNAIKERVLEGGEGHDVVLVEIGGTVGDIESLPFLEAIRQLAVDIGREHALFMHLTLVPYLAAAGEVKTKPTQHSVKELLSIGIQPDILICRSDRAVPANERAKIALFCNVPEKAVISMKDVDSIYKIPGLLKSQGLDDYICKRFSLNCPEANLSEWEQVIYEEANPAGEVTIGMVGKYIELPDAYKSVIEALKHGGLKNRVTVNIKLIDSQDVETRGVEILKDLDAILIPGGFGYRGVEGKIATARYARENNIPYLGICLGMQVALIEFARNVAGMDNANSTEFVPDCKYPVVALITEWRDEDGNVEVRSEKSDLGGTMRLGAQQCQLSDDSLVRQLYGAPTIVERHRHRYEVNNMLLKQIEAAGLRVAGRSGDDQLVEIIEVPNHPWFVACQFHPEFTSTPRDGHPLFAGFVKAANEHQKRQAK

SEQ ID NO: 6640 - protein, 386 aa, Brassica napus
MAKPVSIEVYNPNGKYRVVSTKPMPGTRWINLLVDQGCRVEICHLKKTILSVEDIINLIGNRCDGVIGQLTEDWGETLFSALSKAGGKAFSNMAVGYNNVDVEAANKYGIAVGNTPGVLTETTAELAASLSLAAARRIVEADGFMRAGLYEGWLPHLFVGNLLKGQTVGVIGAGRIGSAYARMMVEGFKMNLIYFDLYQSTRLEKFVTAYGQFLKANGEQPVTWKRASSMEEVLREADLISLHPVLDKTTYHLVNKERLAMMKKEAILVNCSRGPVIDEVALVNHLRENPMFRVGLDVFEEEPFMKPGLADMKNAIVVPHIASASKWTREGMATLAALNVVGKIKGYPIWSDPNRVDPFLNENASPPNASPSIVNSKALGLPVSKL

SEQ ID NO: 6641 - protein, 162 aa, Oryza sativa
  misc_feature (13)..(13): Xaa can be any naturally occurring amino acid
  misc_feature (40)..(40): Xaa can be any naturally occurring amino acid
  misc_feature (48)..(49): Xaa can be any naturally occurring amino acid
  misc_feature (52)..(52): Xaa can be any naturally occurring amino acid
  misc_feature (54)..(54): Xaa can be any naturally occurring amino acid
  misc_feature (56)..(56): Xaa can be any naturally occurring amino acid
  misc_feature (69)..(69): Xaa can be any naturally occurring amino acid
  misc_feature (71)..(71): Xaa can be any naturally occurring amino acid
  misc_feature (75)..(76): Xaa can be any naturally occurring amino acid
  misc_feature (78)..(79): Xaa can be any naturally occurring amino acid
  misc_feature (82)..(82): Xaa can be any naturally occurring amino acid
  misc_feature (84)..(84): Xaa can be any naturally occurring amino acid
  misc_feature (92)..(93): Xaa can be any naturally occurring amino acid
  misc_feature (97)..(97): Xaa can be any naturally occurring amino acid
  misc_feature (106)..(107): Xaa can be any naturally occurring amino acid
  misc_feature (109)..(110): Xaa can be any naturally occurring amino acid
  misc_feature (112)..(112): Xaa can be any naturally occurring amino acid
  misc_feature (115)..(117): Xaa can be any naturally occurring amino acid
  misc_feature (120)..(120): Xaa can be any naturally occurring amino acid
  misc_feature (126)..(126): Xaa can be any naturally occurring amino acid
  misc_feature (128)..(128): Xaa can be any naturally occurring amino acid
  misc_feature (131)..(132): Xaa can be any naturally occurring amino acid
  misc_feature (137)..(137): Xaa can be any naturally occurring amino acid
  misc_feature (139)..(139): Xaa can be any naturally occurring amino acid
  misc_feature (142)..(142): Xaa can be any naturally occurring amino acid
  misc_feature (149)..(149): Xaa can be any naturally occurring amino acid
  misc_feature (153)..(153): Xaa can be any naturally occurring amino acid
  misc_feature (155)..(155): Xaa can be any naturally occurring amino acid
  misc_feature (157)..(157): Xaa can be any naturally occurring amino acid
  misc_feature (159)..(159): Xaa can be any naturally occurring amino acid
  unsure (1)..(162): unsure at all Xaa locations
MAPTVMASSATSXAPFQGLKSTAGLPVSRRSTNSGFGNVXNGGRIKCXXVWXIXGXKKFETLSYLPPLXVXDLLXXIXXLLXSXWVPCLQFXXVGFXYRENHRSPXXYXXRXWTXXXLPXFGCTDXTXVLXXLQEAXKXYPXAFVRIIXFHNXRXVXLXNFI

SEQ ID NO: 6642 - protein, 856 aa, Ustilago maydis 521
MAVRPPRPSGSSWSTLLVRQRPCFQAHPNEKDIRQLVLISGSLAPSSKKLRQNTTVGTSQKNVVARLPVRAPSKRLVASSVHASRLQRLHRVLFPSPSHDTTKDNMAPIAVSPKAAPAVPVGKQSSKKALSKQKDAVQIKFASFDVTDQVFYRSSDASCSAVVNLKPIVPGHILVIPTKPYHRLSEAPPEIVASLFQTVQEISKGLEKVFEADALTISVQDGEAAGQTVPHLHVHILPRRTGDIEPNDLVYTHLEQWGFDIKKLLSKDEQLKVDADEDRQPRSNEEMRKEAIFLSSFFGADGKFDATKLKTSQSKASKRVSDAVVLGKQKRSRVDRLPVTLLSGFLGAGKTTLLEHILTSKDHGLRVAVVVNDMGALNIDASLLSNHRVTQAEEKVVQMQNGCICCTLRGDLLEEVAALAENREIDYLLIESTGISEPMQVAETFSEEFADMYSQMADDLEEEIRADPQKKEEHEKVAKILKQGGLPAVARLDTCVTVVDAVNLFNDYNTTDFLVDRHKDDHDVPEEDDRNISDLQTDQLEFANVILINKCDLVGKEEVDRIRAFIRLLNPDAKIIPTTRSRIDLQEILNTNLFSYEKAALGAGWLKSLNEEIKPETEEYGIGSFVYRARRPFHTARLWETIREVFVVIQSEYIDDGEDEDDDESMDADGEADDTEDNEMDVEAEGDDDAQPQLNPQARLEAKNASETFAPLLRSKGFIWLATRPLMFGEWSQAGIMLTLQGGARWRCELDAEMWPQDKEIVEAIKKDFQEPWGDRRQEIVLIGKSMRDGGEDKLRAALDKCLLTDDEMKQWEDIMNDPSLETIKDKEHKLQDMFEDGFEDWPDHEDPEAHEGHSH

SEQ ID NO: 6643 - protein, 324 aa, Arabidopsis thaliana
MAKDGPNWDGLLKWSLSHSDGTRPTCQLSEEDRKWFAEAMQSQTVDVVKRLKEITQVLQTPQQVLEAHEVTPQDIEGLLDELQEHVESIDMANDLHSVGGLVPLLGYLKNSNANIRAKSADVVSTIVENNPRSQESVMEANGLESLLLRFTSDTDMHSRTQALGAISSLIRNNKPGITGFRIANGYSGLKDALETDSVRFQRKALNLLHYLLQENDSDSDIAIEFGLHHLMMHLVSSFDADVREAALRGLLELVKARKDCSTCGSSIVKGDERLRQILKDRIKAISRVKAMSLFMSQEDLSAAKEERQLLDSLWTTIFNEPSSL

SEQ ID NO: 6644 - protein, 277 aa, Escherichia coli
EIVAINDLLDADYMAYMLKYDSTHGRFDGTVEVKDGHLIVNGKKIRVTAERDPANLKWDEVGVDVVAEATGLFLTDETARKHITAGAKKVVMTGPSKDNTPMFVKGANFDKYAGQDIVSNASCTTNCLAPLAKVINDNFGIIEGLMTTVHATTATQKTVDGPSHKDWRGGRGASQNIIPSSTGAAKAVGKVLPELNGKLTGMAFRVPTPNVSVVDLTVRLEKAATYEQIKAAVKAAAEGEMKGVLGYTEDDVVSTDFNGEVCTSVFDAKAGIALNDN

SEQ ID NO: 6645 - protein, 516 aa, Chlorobium tepidum TLS
MVQKLIFILTGVLLMLGIAMGGDLHAYTQPDPSGAKVGVTADISAANPGKPTAAEITDQIGKNKVSINMVWVLITGFLVMFMQAGFAMVEAGLTRAKNAAHTMSMNMMIYPIGMLGFFVSGFAIMFGGLGTLGTLGGYEGLNQEFAINLFGHTIGLFGMKGFFLNNVYDVGVFALFLFQMVFMDTTATIPTGSMAERWKFSAFAIYGIFVGTIIYPLYGNWVWGGGWLATLGSNFGLGHGHVDFAGSSVVHMTGGVLALVGAIIIGPRIGKYNKDGSPNAIPGHNIPMAIVGAFILAFGWFGFNPGSTLAGTDLRISVVAVNTMIASATGAAASMLYMWLFKTKKPDPTMMINGLLAGLVAITAPSAFVNVQAAALIGLISGVLVIEAAFFIEKVLKIDDPVGAVAVHGVNGAWGCLALGLFADGTYGDGWNGVAGPVTGLFYGNPGQFYAEVIGVLANIIYVGAIGWVVFKLIDVTIGNRVNPDDELDGLDIPEMGVEGYCGIRLDKNSETPLSK

SEQ ID NO: 6646 - protein, 125 aa, Pichia angusta
MRSQFKDEHPFERRKAEASRIRGKFLDRIPVICEKVEESDIPEIDKRKYLVPSDLTVGQFVYVIRKRIQLPSEKAIFIFVNDILPPTASLMSTIYEQYKDEDGFLYILYSGENTFGQLEGVEETL

SEQ ID NO: 6647 - protein, 451 aa, Shewanella sp. MR-7
MAQHFDYICLGAGSGGIASANRAAMRGAKVLLIEAKHVGGTCVNVGCVPKKVMWYGAHIAEAMNLYAKDYGFDVSVNKFDWNTLVNSREAYIGRIHEAYGRGFTNNKVTLLNGYGRFVNGNTIEVNGEHYTADHILIATGGAPTIPNIPGAEYGIDSDGFFALREQPKRVAVVGAGYIAVEVAGVLHALGSETHLFVRKHAPLRNFDPMLIDALVDAMKTEGPTLHTNSVPQSVVKNADDSLTLHLENGESVTVDCLIWAIGRSPATGNIGLENTDVQLDSKGYVITDAQQNTTHKGIYCVGDIMAGGVELTPVAVKAGRLLSERLFNGMSDAKMDYSQIPTVVFSHPPIGTMGLTEPEARAQYGDDNVKVYTSTFTSMYTAVTSHRQACKMKLVCAGKEEKVVGIHGIGFGMDEILQGFGVAMKMGATKADFDAVVAIHPTGAEEFVTMR

SEQ ID NO: 6648 - protein, 253 aa, Bacillus subtilis
MNLTDKTVLITGGASGIGYAAVQAFLNQQANVVVADIDEAQGEAMIRKENNDRLHFVHTDITDEPACQNAIRSAVDKFGGLDVLINNAGIEIVAPIHEMELSNWNKVLNVNLTGMFLMSKHALKYMLKSGKGNIINTCSVGGVVAWPDIPAYNASKGGVLQLTRSMAVDYAKHNIRVNCVCPGIIDTPLNEKSFLENNEGTLEEIKKEKAKVNPLLRLGKPEEIANVMLFLASDLSSYMTGSAITADGGYTAQ

SEQ ID NO: 6649 - protein, 184 aa, Hordeum vulgare
MAPRRRTLLKVIVLGDSGVGKTSLMNQYVNKKFSQQYKATIGADFLTKEVLIEDRLVTLQIWDTAGQERFQSLGVAFYRGADCCVLVYDVNAKRTFNTLGTWHDEFINQAGPSDPKQFPFILVGNKVDLDSGSRRVVPEKKAKDWCVAKGDIPYFETSAKDDCNVDTAFLCIAKLALEHEHDQD

SEQ ID NO: 6650 - protein, 144 aa, Brassica napus
RKPATRGSSSTVRSNGCGAYTSSSKAMHFRKLSGCYECHMIVDPSRYPISPRIFACPQCGEVFPKLETLEIHQAVRHAVSELGPEDSGRNIVDIIFKSSWLRKDGPLYKIERILKVHNTQRTIQRFEDCRDAVKSHAHASTRKE

SEQ ID NO: 6651 - protein, 363 aa, Arabidopsis thaliana
MKKGGFSNNLKLAIPVAGEQSITKFLTQSGTFKDGDLRVNKDGVRIISQLEPEVLSPIKPADDQLSLSDLDMVKVIGKGSSGVVQLVQHKWTGQFFALKVIQLNIDEAIRKAIAQELKINQSSQCPNLVTSYQSFYDNGAISLILEYMDGGSLADFLKSVKAIPDSYLSAIFRQVLQGLIYLHHDRHIIHRDLKPSNLLINHRGEVKITDFGVSTVMTNTAGLANTFVGTYNYMSPERIVGNKYGNKSDIWSLGLVVLECATGKFPYAPPNQEETWTSVFELMEAIVDQPPPALPSGNFSPELSSFISTCLQKDPNSRSSAKELMEHPFLNKYDYSGINLASYFTDAGSPLATLGNLSGTFSV

SEQ ID NO: 6652 - protein, 448 aa, Yarrowia lipolytica CLIB122
MPGTQIFGTLPAEGMTNTEVITEMSKYHDMKRTFWEKGRVSGAVYHGGKELTDLQSEAFSQFTVANQLHPDVFPGVRKMESEVVAMVLALFHGPEGSCGTSTSGGTESLLLTSLAAKMKAYNERGVTHPEIIAPITVHAGFDKAAYYFGMKLRHAPVDPKTMKVDLKAVRRMVTRNTVLLVGSAPNFPHGIIDDIEGLSDIALKHKIPLHVDACLGSFIVPYLERAGFDKILFDFRVPGVTSISCDTHKYGFAPKGSSIIMYRTPELRHYQYFVAPDWTGGIYGSPTLAGSRPGAIMVGCWATMLSVGDNGYLESCKEIVGAARKFRKAVDEEIPDLQIIGDPRASVIAFGSDSVNIYDLSDAMSKKGWHLSTLQNPPAAHVAFTKPAVAAVDDLVSDLKSCIIEMKKAGNTKVEDGTAAFYGVAGSIKTAGVADRLVCGFLDGLYKL

SEQ ID NO: 6653 - protein, 287 aa, Oryza sativa (japonica cultivar-group)
MEVLPPMDHYASRGNWFMARKWSPEENKQFERALAGLDLRCPDWDRVARAIPGRSALEVMNHFRDLELDVQQIENGMVPFPVYGAAAAGGAFTLQWDGAHGVGDFRNAYRFGGGGGGKRHFGRTPEQERKKGVPWTEEEHKLFLLGLKKYGKGDWRNISRNFVQTRTPTQVASHAQKYFIRLNSGGKDKRRSSIHDITTVNLTDDRPPSPSQSSLISNQSNTSTLTAAVAPFSSTADVKPQNAANASFNSPSRTLGMAGYGMGLQDQGLQCGGPLHDQLAASRSILF

SEQ ID NO: 6654 - protein, 234 aa, Listeria innocua Clip11262
MINLIFDIDDTVYDQLKPFENAFKATFGKADHLKIENLYIKSRFYSDEVYRKVVGGEMPKAEMHVYRITQALNDFDYQITKKEAEAFQHTYEQNQRKIELSPGIKEILTWAKKKNITMGIITNGSKEHQQHKINDLQINEWIPAEHTFISGGVGIEKPDKKIFELVEEQIGIKSAETYYIGDSFENDVIGSKSAGWKSIWLNRRQHIQPNNATYQPDYCIKNEQELAALLQDLL

SEQ ID NO: 6655 - protein, 545 aa, Haemophilus influenzae R2846
MATNYIFVTGGVVSSLGKGIAAASLAAILEARGLNVTIMKLDPYINVDPGTMSPTQHGEVFVTQDGAETDLDLGHYERFIRTKMTKRNNFTTGKIYSEVLRKERRGDYLGATIQVIPHITNEIKDRVIAGAQGHDVVIVEVGGTVGDIESLPFLEALRQLAVQVGREHTLFMHLTLVPYIPTAGEVKTKPTQHSVKELLSIGIQPDVLICRSDRMIPPNERAKIALFCNVAERAVISLKDVNSIYQIPALLKSQGLDDFVCDRFRLTCPEADLTEWEQVLYKQANPVGEVTIGMVGKYTELPDAYKSVNEALKHAGLTNRLSVNIKYIDSQDVETKGVEVLKGVDGILVPGGFGYRGVEGKIRTAQYARENKIPYLGICLGMQIALIEYARNVAGLTKANSSEFDKDCEQPVVALITEWQDAEGNTEVRTDESDLGGTMRLGAQQCHLVSGSRARELYGKETIEERHRHRYEVNNTLLPQIEKAGLKVTGLSADKKLVEIIEVPNHPWFVACQFHPEFTSTPRDGHPLFAGFVKAAYENHKKSVK

SEQ ID NO: 6656 - protein, 545 aa, Tropheryma whipplei TW08/27
MNGIKHIFITGGVVSSIGKGLTAASLGSLLTMRGLKVFIKKLDPYLNVDPGTMNPLQHGEVFITEDGAETDLDVGHYERFLDVDLDRTANVTTGQVYSKVITLERTGRYLGETVQVIPHITDEIKRRIRLAPDDIDVIITEIGGTVGDIESQPFIEAARQIRREVGRENCCFIHVSLVPFLESAGEQKTKPTQHSVAILRAAGIQPDALVLRSDKPISSANQKKIALMCDVSAVVNAVTVPNIYEIPCVLNQHGLDKFVIKHLDLEAGEIDWSYWDDVLDAIENNRSEIEIAIIGKYTGLPDAYISVIEALRAGGFESKTKVNIKWVDSDDENLEDQLENINGACIPGGFGIRGIEGLIKAIRICREREIPTLGICLGMQCMVIEYARHVVGMHGASSTEFTDDTQWPVVTTMLEQRDILIDDQFGGTMRLGSYRAVLSVGSLAASLYGTTDIHERHRHRYEVNNGYAQRLVERGLIVSGRNTEQDLIEFIELDRKDHPFYIGTQAHPECKSRPKRPHPLFKGLVAAALARKEIAEFNSGKTVLQ

SEQ ID NO: 6657 - protein, 260 aa, Haemophilus ducreyi 35000HP
MQNTLKGACIAECIGTGLLIFFGVGCVAAAQLAGATLGLWEISIIWGIGVALAVYATAGVSGAHLNPAVTIALWKFACFDGKKVLPYIIAQCLGAFLAAALVYFLYKDLFIVAETAKNIVRGESVGFASVFSTYPNPNISVLQAFFVETVITMVLMGLILALTDDGNGLPKGPIAPFLIGLLIATLGGAFGPLTGFAMNPARDFGPKVFAFLAGWGEVAFTGAREIPYFIVPIFAPIIGALLGAWGYQRFIGKNLPCNCK

SEQ ID NO: 6658 - protein, 214 aa, Zea mays
MAPMKLYGAVLSWNVTRCATALEEAGSDYEIVPINFATAEHKSPEHLVRNPFGQVPALQDGDLYLFESRAICKYAARKNKPELLREGNLEEAAMVDVWIEVEANQYTAALNPILFQVLISPMLGGTTDQKVVDENLEKLKKVLEVYEARLTKCKYLAGDFVSLADLNHVSVTLCLFATPYASVLDAYPHVKAWWSGLMERPSVQKVAALMKPSA

SEQ ID NO: 6659 - protein, 375 aa, Arabidopsis thaliana
MPLSLQSPPCATLSASIRKGRWKTLAAGFSVTPLPAVNFSLRRSIPRILASASSSSSPASSSLEAGENNELNAVSAFSEIVPDTVVFDDFERFPPTAATVSSALLLGICGLPDTIFRNAVDMALADSSCAGLETTESRLSCFFNKAIVNVGGDLVKLVPGRVSTEVDARLAYDTNGIIRKVHDLLRLYNEIDVPHDRLLFKIPATWQGIEAARLLESEGIQTHMTFVYSFAQAAAASQAGASVIQIFVGRLRDWARNHSGDTEIESAIKSGEDPGLALVKRSYNYIHKYGYKSKLMAAAVRNKQDLFSLLGVDYVIAPLKVLQSLKDSPAIPDDEKYSFVRKLTPETATHYHFTNKELVKWDQLSLASSMGPASV

SEQ ID NO: 6660 - protein, 138 aa, Burkholderia fungorum LB400
QEAHPSVLAKRMELSEEKVRGILKIAKQPVSMETPVGDDGDATLGDMIEDSAASSPADAAMQADLRAAIDDALDSLSPREAKVLRMRYGINTKSDHTLEEVGKQFDVTRERIRQIESKAMRKLMHPSRADRLKSFLDR

SEQ ID NO: 6661 - protein, 511 aa, Ipomoea batatas
MMEAVTIKVPYRNLKQEVELVGADELHQRRLQIDSQSSPPRVSNGDSTDSSHHQSPVQSSLLTLILSCTVAAGVQFGWALQLSLLTPYIQVQPCVGIWSDKCSSKYGRRRPFILIGSLMISISGPARALLADLSGPDQRNTANAVFCSWMAVGNILGFSAGASGNWHRWFPFLMSRACCEPCGNLKAAFLIAVVILALCTLVTLHFAKEVPLTPNLSPRLADSSPLLDSPNPDFELAQAKDDMQPINFVSDNKSENGYMDNNPIHEDQKGVNDQADSFNDSPAAVLVNLLTSLRHLPPAMHSVLIVMALTWLSWFPFFLFDTDWMGREVYHGDPNGDVSEVKAYNQGVREGTTVISFVSLNESSEGVQHVIGASKATKVASLVVFALLGIPLAITYSVPFSVTAELTADAGGGQDDYLTWCGSMGRLIWRREHTSICPGLYIRTRGWYHRNTQTAKSLEKLIQINRLPFLITRDSAHTTDERRKLAIHNARQDCDGSVGTHNELPYKRVNL

SEQ ID NO: 6662 - protein, 375 aa, Arabidopsis thaliana
MPLSLQSPPCATLSASIRKGRWKTLAAGFSVTPLPAVNFSLRRSIPRILASASSSSSPASSSLEAGENNELNAVSAFSEIVPDTVVFDDFERFPPTAATVSSALLLGICGLPDTIFRNAVDMALADSSCAGLETTESRLSCFFNKAIVNVGGDLVKLVPGRVSTEVDARLAYDTNGIIRKVHDLLRLYNEIDVPHDRLLFKIPATWQGIEAARLLESEGIQTHMTFVYSFAQAAAASQAGASVIQIFVGRLRDWARNHSGDTEIESAIKSGEDPGLALVKRSYNYIHKYGYKSKLMAAAVRNKQDLFSLLGVDYVIAPLKVLQSLKDSPAIPDDEKYSFVRKLTPETATYYHFTNKELVKWDQLSLASSMGPASV

SEQ ID NO: 6663 - protein, 316 aa, Actinobacillus pleuropneumoniae serovar 1 str. 4074
MKKFDEHEIEDAEIIEPGEIEVTESDNQPTEAMHPALVQGGMPVPQGNLDSYIRMANQYPILTAEQEKELAERYYYDEDVEAAKQLILSHMRFVIHIARGYLGYGLPLADLIQEGNIGLMKAVKRFDPNVGVRLVSFAVHWVKAEIHEYVLKNWRIVKVATTKAQRKLFFNLRKNKNRLAWFNEEEIQKVAEDLGVSPEEVREMESRMTGQDLGFDLPVGEDDDEVYTPSMYLEDNSSNFADDLEDEQYNGQATAQLAYALATLDERSQDIIKTRWLDEEKATLQDLAEKYGISAERVRQLENAALKKIKDAITFE

SEQ ID NO: 6664 - protein, 234 aa, Arabidopsis thaliana
MATNEPEHEHRDEEEAGANEDEDTGAQVAPIVRLEEVAVTTGEEDEDAVLDLKSKLYRFDKDANQWKERGAGTVKFLKHKNTGKIRLVMRQSKTLKICANHFVKSGMSVQEHVGNEKSCVWHARDFADGELKDELFCIRFASIENCKTFMQKFKEVAESEEEKEESKDAADTAGLLEKLTVEETKTEEKTEAKLVETAKTEVKAEEKKESEAEKSGEAKKTEESGSLNIRSVII

SEQ ID NO: 6665 - protein, 217 aa, Arabidopsis thaliana
MASISNEPERENRDEEETGANEDEDTGAQVAPIVRLEEVAVTTGEEDEDTILDLKSKLYRFDKDGSQWKERGAGTVKFVKHRVSGKIRLVMRQSKTLKICANHLVGSGMSVQEHAGNDKSCVWHARDFSDGELKDELFCIRFGSVENCKAFMQKFKEVAESEEEKEESKDASDTAGLLEKLTVEEKESEKKPVEKAEENKKSEAVEEKKTEESVPSA

SEQ ID NO: 6666 - protein, 920 aa, Arabidopsis thaliana
MVLSQEKDEEKDLYLVHDEHESPLPLTVTSRVLYMLGDIASGPAYRFTQWLDLVRKRSATYGSSGFPHRLHRIDDMVTSAGERNTDPKSPPSRQSSEISLWERLGKASTVDIDSSCFSWNMLSSLHHTEHSSSTDHSEEDQSKPLEVTVNSGGVVFFALFNSSSSEDASRKEEAAVIKFASSRMATQSERLGYEFSKWLGVQIPQARVIHSCNPEWTLIKEATEKAQAKATSEGDEVGEMTCSELLEALELSRCLLLMSYVHGCPMLESMSSFETEEKAERAAAALGRILVLDLVIRNEDRLPCRQLRWRGNPANLLLTDRIVSSAKHHECSFDEAFDSAIKRYHPKDYRSIQRERRASSVDSRSRLSISDQMLVSQASDFSDITESPRSYDTGLMSPMSDRSVAADFHLVAIDSGVPRRPPAGKRASDQEIYPRLVELLLNSSQYSSNLLHEITEGSLGYPQAEDGEETSNVRSVVTPVVREFRNGFRAGLRDLQEFHIFLVTLHQKLDVLLRAFFSMMDKTMCADFDREDFAVPESPSHTHGHEVNHYPSPSKDRVPSDNSSDHSESDMQKSVPRTPNSENKEDGSSPKSRESWHGRSGKGGESLSSQRLAAKLRDFHKFAKVDAESNKELDQWNETLRNEVMKLCQENGFNTGFFEGSDNNSCTDAYELKVRLEHILERISLISKAANTEKPSMIQENLFIGGGLAARSIYTLQHLGITHVLCLCANEIGQSDTQYPDLFEYQNFSITDDEDSNIESIFQEALDFIKHGEETGGKILVHCFEGRSRSATVVLAYLMLQKKLTLLEAWSKLRKVHRRAQPNDGFARILINLDKKCHGKVSMEWRQRKPTMKVCPVCGKNAGLSSSSLKLHLQKSHRKLSSGSVDSAMNMEIQKALEALKLSTGRGSSASSNSFQSHPG

SEQ ID NO: 6667 - protein, 456 aa, Solibacter usitatus Ellin6076
MATQFDAIVIGTGQAGPSLARRLAATGRKVAVIERKLFGGTCVNTGCIPTKTMVASAYAAQMVRRAAEFGVDVPAPTIDMKRVKARKDAVSAASRVGLENSLKHLENCTVYEGHARFESPVEISVGADRLSAPWMFINVGGRAIVPAMPGVDAIDHLTNSSMMAVDFLPKHLIVVGGSYIGLEFGQMFRRFGSRVTILEMSPRLVHREDEDVSIAMREILEREGIEVRLNAKCIAFSRSGNDLIAHAECAEGSPDIAGSHVLLAVGRRPNTDDLGLEKAGVAVDGHGYITVDDELRTNVPGIWAMGDCNGKGAFTHTSYNDYEIVAANLLDNDPRRVSDRIACYALYTDPPLGRAGMTEAEARKTGRPLLIGKRPMTRVARAVEKGEQQGFMKVVIDKESKKILGAAILGTGGDEVVHSILDIMYAKAPYTVIQRAVHIHPTVSELIPTLLGELEG

SEQ ID NO: 6668 - protein, 258 aa, Novosphingobium aromaticivorans DSM 12444
MNPNQVFLEGKVAIVTGAGVGMGAATARLLAARGARVVVSDINPDTAAATVETIRADGGTAHAVRTDVSDEAQVEALVAETVATFGRLDCAVNNAAITPDVLPIHEADMAVFDRVLNVDLRSVMLCMKYEIRQMLAQEGPGSIVNIGSVSSFRPQPNNAAYVAAKHGVIGLTKTGSLEYAGRGIRVNAVLPGAIDTPMLRGALETTGFTEADFAPALSLFGRFGKPEEVAEASAWLCSDAASYVTGHSLAVEGGYLTR

SEQ ID NO: 6669 - protein, 447 aa, Zea mays
MGKEKTHINIVVIGHVDSGKSTTTGHLIYKLGGIDKRVIERFEKEAAEMNKRSFKYAWVLDKLKAERERGITIDIALWKFETTKYYCTVIDAPGHRDFIKNMITGTSQADCAVLIIDSTTGGFEAGISKDGQTREHALLAFTLGVKQMICCCNKMDATTPKYSKARYDEIVKEVSSYLKKVGYNPDKIHFVPISGFEGDNMIERSTNLDWYKGPTLLEALDLINEPKRPSDKPLRLPLQDVYKIGGIGTVPVGRVETGIIKPGMVVTFGPSGLTTEVKSVEMHHEALQEALPGDNVGFNVKNVAVKDLKRGYVASNSKDDPAKEAASFTSQVIIMNHPGQIGNGYAPVLDCHTSHIAVKFAELVTKIDRRSGKELEKEPKFLKNGDAGMVKMVPTKPMVVETFSEYPPLGRFAVRDMRQTVAVGVIKSVEKKDPTGAKVTKAAAKKK

SEQ ID NO: 6670 - protein, 417 aa, Mucor indicus
GKSTTTGHLIYKCGGIDKRTIEKFEKEAAELGKGSFKYAWVLDKLKAERERGITIDIALWKFETPKYNVTVIDAPGHRDFIKNMITGTSQADCAILIIAGGTGEFEAGISKDGQTREHALLAFTLGVRQLIVAINKMDTTKWSEARYNEIVKEVSSFIKKIGFNPKSVPFVPISGWHGDNMLDESTNMPWFKGWNKETKAGSKTGKTLLEAIDAIDPPTRPVDKPLRLPLQDVYKIGGIGTVPVGRVETGVIKAGMVVTFAPAAVTTEVKSVEMHHETLTEGLPGDNVGFNVKNVSVKDIRRGNVCSDSKNDPAKESASFTAQVIILNHPGQISAGYAPVLDCHTAHIACKFAELIEKIDRRSGKKLEDAPKFVKPGDSAIVKMIPSKPMCVEAYTDYPPLGRFAVRDMRQTVAVGV

SEQ ID NO: 6671 - protein, 403 aa, Mucor mucedo
GKSTTTGHLIYKCGGIDKRTIEKFEKEAAELGKGSFKYAWVLDKLKAERERGITIDIALWKFETPKYNVTVIDAPGHRDFIKNMITGTSQADCAILIIAGGTGEFEAGISKDGQTREHALLAFTLGVRQLIVAINKMDTTKWSEARYNEIVKEVSSFIKKIGFNPKSVPFVPISGWHGDNMLEESVNMGWFKGWNKETKAGSKTGKTLLEAIDAIDPPSRPSDKPLRLPLQDVYKIGGIGTVPVGRVETGTIKAGMVVNFAPAAVTTEVKSVEMHHETLTEGLPGDNVGFNVKNVSVKDIRRGNVCSDSKNDPAKEAGSFLAQVIILNHPGQISNGYSPVLDCHTAHIACKFSELVEKIDRRSGKKMEDAPKFVKSGDSAIVKMIPSKPMCVEAYTDYPPLGR

SEQ ID NO: 6672 - protein, 231 aa, Brassica napus
  misc_feature (88)..(88): Xaa can be any naturally occurring amino acid
  unsure (1)..(231): unsure at all Xaa locations
MAAFPNLNSDSGLKKLDEHLLTRSYITGYQASKDDITVFTALAKPPSSQYVNASRWYNHIDALLRISGVTAEGSGVVVEGSAPVAEEXAVATPPAADSKDAADEEDDDDVDLFGEETEEEKKAAEERAASVKASTKKKESGKSSVLIDIKPWDDETDMKKLEEAVRSIQMEGLFWGASKLVPVGYGIKKLQIMCTIVDDLVSVDTMIEEQLTVEPINEFVQSCDIVAFNKI

SEQ ID NO: 6673 - protein, 469 aa, Ehrlichia ruminantium str. Welgevonden
MNKHEFLIIGSGPGGYIAAIRAAQLGYNVAIIEKENTLGGVCLNWGCIPTKSLLHSALIYHNIKKADVFGINVTNVTCNFTKIIERSRNVVEKLSNGISGLMKKNNIKVYSGTAKLLGEGTVEVLDNNNDKINITSKHIIIATGSHPRNLPNINFDNNIIWNAKNAMTPNILPKSLAIIGTGAIGIEFASFYNTFGTQVTMIELRDNILPLEDHEVSKSMHQILNQKGIKIYTKSSVTKLEKSNNNARIQISNTIDLEVDKVILAVGIQPNTDNLGLDNTKIQIDQAGFIITDKYCCTSESGVYAIGDVAGPPCLAHKASHEAILCVENIAAQEKKITDRNIHHINKENIPSCIFSIPQIASIGLTEHQAKSMGYDIKIGKFNANCSGKAIAIDETEGFVKVIINKTTGELLGAHMIGAEVTEMINGYIIGKQLEATDRDIISSIFPHPTLSEMIHEAVLASNNESLNS

SEQ ID NO: 6674 - protein, 402 aa, Mucor ramosissimus
GKSTTTGHLIYKCGGIDKRTIEKFEKEAAELGKGSFKYAWVLDKLKAERERGITIDIALWKFETPKYNVTVIDAPGHRDFIKNMITGTSQADCAILIIAGGTGEFEAGISKDGQTREHALLAFTLGVRQLIVAINKMDTTKWSQDRYNEIVKEVSGFIKKIGFNPKSVPFVPISGWHGDNMLDESTNMPWFKGWTKETKAGSKTGKTLLEAIDSIEPPVRPSDKPLRLPLQDVYKIGGIGTVPVGRVETGTIKAGMVVNFAPAAVTTEVKSVEMHHETLSEGLPGDNVGFNVKNVSVKDIRRGNVCSDSKNDPAKESASFTAQVIILNHPGQISAGYAPVLDCHTAHIACKFSELIEKIDRRSGKKMEDAPKFVKSGDSAIVKMVPSKPMCVEAYTDYPPLG

SEQ ID NO: 6675 - protein, 357 aa, Arabidopsis thaliana
MMSDISQDLLEEILSRVPITSLRAVKSTCKRWKDLLNDPSFSKKYGGKRDNEFLAIMTSGSRASLMSVNLHGPRDNKDLEDPFIKQIGELNQDQIFKVFHCDGLLLCITNEDNTRLVVWNPYLAQTRCIQPIDKFYIYDWYCLGYDKDKNHKILVVYSPMFGRIEYEIYSFLSKSWIVLSFPTDWQISRDECLSLKGNTYFIAYKKMEVEEVGFQEFLLCFDFTNERFGPLLPLPFQCYNQTSLVLSTVQEEQLAVLCKRCDAYETKIWITTKIEPNAVSWSYFLKFDFKVDISGGSFFVDVEEKVAVLFCINREKEKGINNKTYMIGEDGYYKEVDLGESNWCPSMCSYVPSCVQV

SEQ ID NO: 6676 - protein, 158 aa, Synechococcus sp. CC9605
MRRLFAVVLSALLVFGFAPVAKADVAGLTPCSESARFQQRAAAATTPQAKARFEMYSQASCGDDGLPHLIVDGRWSHAGDFVYPGIMFLYVAGCIGWAGREYLKATRGKNAAQYEIFIDRSIAIKSLLAAATWPLAAFGEFTSGKLLEDDSKVTVSPR

SEQ ID NO: 6677 - protein, 887 aa, Glycine max
MLTWWGKSSSKETKKKANKESFFDTLHRKLRISSKGKVSIRSGGSRRHCNDTISEKGDHSPCGSRSPSPSKVARCQSFIDRPHAQPLPLPGLHPSSVGRVDSEISISSKSRLEKVSKPLSFLTLPTPGCIRCRPNPADLDGDMVTASVFSDCSADSDEPADSHNRSPLAIDCETGTRTAAGSPSSLMLKDQPPAVSQLNSTGVKKPGNILSNHMSSTSPKRRPLRNHVPNLQVPPHGAFYSAPDSSLSSPSRSPLRAFGTDQVLNSAFLAGKPYPEINFVGSGHCSSPGSGHNSGHNSMGGDMSGPLLWQPSRGSPEYSPVPSPRMTSPGPSSRIQSGAVTPIHPKAGGTPTESQTHRLPLPPLSVSNSSLFSHSNSAATSPSMPRSPARADNPNSGSRWKKGKLLGSGSFGHVYLGFNSERGEMCAVKEVTLFSDDPKSMESAKQFMQEIHLLSRLQHPNIVQYYGSETVDNKLYIYLEYVSGGSIHKLLREYGQFGELVIRSYTQQILSGLAYLHAKNTLHRDIKGANILVDPTGRVKLADFGMAKHITGQSCPLSFKGTPYWMAPEVIKNSNGCNLAVDIWSLGCTVLEMATTKPPWFQYEGVAAMFKIGNSKELPTIPDHLSNEGKDFVRKCLQRNPHDRPSACELLDHPFVKNAAPLERPILAPEVLDPVSGIIQGAKALAAGQGKNLSSLDSDRLSIHSSRFLKTNPRESEIHIPRNISCPVSPIGSPLLRSRSPQHRNGRMSPPISSPRTASGASTPLAGGSGAIPFGNHSKQPIYFQEGFGSIPKSSNGVYINGHSHHDSSVDIFRGMQIGSHIQPELVSSENDVLVNQFARHPHAEPYDFQSVLADRVGRQLLREHVKINPSIDLSPNSSLLSRPNGL

SEQ ID NO: 6678 - protein, 365 aa, Mucor recurvus var. indicus
GKSTTTGHLIYKCGGIDKRTIEKFEKEAAELGKGSFKYAWVLDKLKAERERGITIDIALWKFETPKYNVTVIDAPGHRDFIKNMITGTSQADCAILIIAGGTGEFEAGISKDGQTREHALLAFTLGVRQLIVAINKMDTTKWSEARYNEIVKEVSSFIKKIGFNPKSVPFVPISGWHGDNMLEESQNMPWFKGWTKETKAGSKTGKTLLEAIDNIDPPTRPVDKPLRLPLQDVYKIGGIGTVPVGRVETGVIKAGMVVTFAPANVTTEVKSVEMHHETLPEGLPGDNVGFNVKNVSVKDIRRGNVTSDSKNDPAKEAASFTAQVIILNHPGQIGAGYAPVLDCHTAHIACKFSELIEKIDRRSGK

SEQ ID NO: 6679 - protein, 447 aa, Mycosphaerella graminicola
MREIVHLQTGQCGNQIGAAFWQTISGEHGLDGSGVYNGISDLQLERMNVYFNEASGNKYVPRAVLVDLEPGTMDAVRAGPFGQLFRPDNFVFGQSGAGNNWAKGHYTEGAELVDQVLDVVRREAEGCDCLQGFQITHSLGGGTGAGMGTLLISKIREEFPDRMMATFSVMPSPKVSDTVVEPYNATLSVHQLVENSDATFCIDNEALYDICMRTLKFNNPSYGDLNHLVSAVMSGVTTCLRFPGQLNNDLRKLAVNMVPFPRLHFFMVGFAPLTSRGAHSFRAVTVPELTQQIFDPKNMMAASDFRNGRYLTCSAIYRGKVSMKEVEDQIRNVQNKNTAYFVEWIPNNVQTALCSIPPRGLKMSSTFVGNSTSIQELFKRVGDQFSAMFRRKAFLHWYTGEGMDKMEFTEAESNMNDLVSEYQQYQEASVSDAEEEYDEEAPLEGEE

SEQ ID NO: 6680 - protein, 398 aa, Escherichia coli
  misc_feature (397)..(397): Xaa can be any naturally occurring amino acid
  unsure (1)..(398): unsure at all Xaa locations
MFENITAAPADPILGLADLFRADERPGKINLGIGVYKDETGKTPVLTSVKKAEQYLLENETTKNYLGIDGIPEFGRCTQELLFGKGSALINDKRARTAQTPGGTGALRVAADFLAKNTSVKRVWVSNPSWPNHKSVFNSAGLEVREYAYYDAENHTLDFDALINSLNEAQAGDVVLFHGCCHNPTGIDPTLEQWQTLAQLSVEKGWLPLFDFAYQGFARGLEEDAEGLRAFAAMHKELIVASSYSKNFGLYNERVGACTLVAADSETVDRAFSQMKAAIRANYSNPPAHGASVVATILSNDALRAIWEQELTDMRQRIQRMRQLFVNTLQEKGANRDFSFIIKQNGMFSFSGLTKEQVLRLREEFGVYAVASGRVNVAGMTPDNMAPLCEAIVAVLXD

SEQ ID NO: 6681 - protein, 254 aa, Bacillus amyloliquefaciens
MNLTDKTVLITGGASGIGYAAVQAFLNQQANVVVADIDEAQGEAMIRKENNDRLHFVQTDITNEPACQNAILSAVDKFGGLDVLINNAGIEIVAPIHEMELSDWNKVLNVNLTGMFLMSKHALKYMLKSGKGNIINTCSVGGVVAWPDIPAYNASKGGVLQTDAFYRPSIIAKHNIRVNCVCPGIIDTPLNEKSFLENNEGTLEEIKKEKAKVNPLLRLGKPEEIANVMLFLASDLSSYMTGSAITADGGYTAQ

SEQ ID NO: 6682 - protein, 364 aa, Bradyrhizobium japonicum USDA 110
MNIHLTKSQIGLDGVPAAETVLSHVDGERGELIIAGEHVGRLAAKSSFEGVTARLWNGASKTSLSEANVRASLGAARERAFARLAELLPATHGMGIVDGFRAAVAGLRAEHGLEHEATIVGAFPVISGALVRRAKGLDPVAPDPSASHAADTLRMLHGRAPATREVTALDAYLVTVCDHGMNASTFTTRVVASTQADLFAAVTAGYCALTGPLHGGAPEPVLEMLDAIGSRERIQPWVDAALARGERMMGFGHRVYRVRDPRADVLKTAIEALASNGADLPFAGEVEAYIRAALRKKNPDRPLETNVEFFTAILLDALAIPRQAFTPIFAVARAAGWTAHAREQQRTGRLIRPSSSYVGAVPEA

SEQ ID NO: 6683 - protein, 219 aa, Oryza sativa
  misc_feature (89)..(89): Xaa can be any naturally occurring amino acid
  misc_feature (183)..(183): Xaa can be any naturally occurring amino acid
  unsure (1)..(219): unsure at all Xaa locations
AEAEREGGAGARWELSAAREYYDYRKSVYGDVTHRALLVDAVGTLVVPAQPTAKVYKSIGEKYGVKYSEDEILARYRRAYEQPWGGSRXQYYMTEKAWKLCDPDAENVFKALRKAGVKTAVVSNFDTRLRPLLHVLKCDHWFDAVAVSAEVAAEKPNPTIFLKACESLGVKPEEAVHVGDDRXNDIWGARDAGCDAWLWGSDVHSFKEVAERIGVEVAK

SEQ ID NO: 6684 - protein, 766 aa, Zea mays
MGSACQAGTDGPSRKDVLGIGNAALENGHHQAEADADEWREKEEDLANNGHSAPPPGMQQVDEHKEEQRQSIHWERFLPVKTLRVLLVENDDSTRQVVSALLRKCCYEVIPAENGLHAWRYLEDLQNNIDLVLTEVFMPCLSGIGLLSKITSHKICKDIPVIMMSTNDSMSMVFKCLSKGAVDFLVKPLRKNELKNLWQHVWRRCHSSSGSESGIQTQKCAKLNTGDEYENGSDSNHDDEENDDGDDDDFSVGLNARDGSDNGSGTQSSWTKRAVEIDSPQPISPDQLVDPPDSTCAQVIHPRSEICSNKWLPTANKRNVKKQKENKDESMGRYLGIGAPRNSSAEYQSSLNDVSVNPIEKGHENHMSKCKSKKETMAEDDCTNMPSATNAETADLISSIARNTEGQQAVQAVDAPDGPSKMANGNDKNHDSHIEVTPHELGLKRSRTNGATAEIHDERNILKRSDQSAFTRYHTSVASNQGGARYGESSSPQDNSSEAMKTDSTCKMKSNSDAAPIKQGSNGSSNNDVGSSTKNVAARPSGDRERVASPLAIKSTQHASAFHTIQNQTSPANLIGEDKADEGISNTVKMSHPTEVPQGCVQHHHHVHYYLHVMTQKQPSTDRGSSDVHCGSSNVFDPPVEGHAANYSVNGGVSVGHNGCNGQNGSSAVPNIARPNIESINGTMSQNIAGGGIVSGSGSGNDMYQNRFLQREAALNKFRLKRKDRNFGKKVRYQSRKRLAEQRPRVRGQFVRQSEQEDQTAQGSER

SEQ ID NO: 6685 - protein, 258 aa, Bacillus cereus G9241
MGVEKIKAAFENGKKAFIPYVMGGDGGLEKLKERIRCLDEAGASIVEIGIPFSDPVADGPTIQRAGKRALDSGVTLKGIFQALIEVRKEVQIPFVLMTYLNPVLAFGKERFIENCIEAGVDGIIVPDLPYEEQNIIAPLLREANIALIPLVTVTSPIERIEKITSESEGFVYAVTVAGVTGVRQNFKGEIHSYLEKVKSHTHLPVVAGFGISTKEHVEEMITICDGVVVGSKVIELLENEKREEICELIQATKQKEEA

SEQ ID NO: 6686 - protein, 288 aa, Sinorhizobium meliloti
MKTLTADRRMIKIAMEAPYLERDEEHALAQAWRNDNDQEARNKIAMSHMRLVISMAAKFRSFGLPMGDLVQEGHIGLLEAAARFEPSREVRFSTYATWWIRASMQDYVLRNWSIVRGGTSSAQKALFFNLRRLRARLAQGDRQLTSQAMHEEIAAALGVSLADVQTMDARLSGNDASLQAPIGSGDPDAGARLDFLASEAPLPDEQVSDLIDGERARRWLQVALGELSEREMKIIRARRLTEDGATLEELGVALGISKERVRQIETRALEKLRAALTAKAPALTASMH

SEQ ID NO: 6687 - protein, 374 aa, Streptomyces noursei ATCC 11455
MRRDIGAPRRRFNGDPDGTRLSSATKGTEVMSTVHTGVTQSGLTAELASLHAELVRRNPGEAEFHQAALEVLETLAPVLTARPEFADAKVLERIVEPERQIMFRVPWQDDSGTIRVNRGFRVEFNSALGPYKGGLRFHASVNLGIVKFLGFEQIFKNALTGLNIGGGKGGSDFDPHGRSDAEVMRFCQSFMTELHRHLGEHTDVPAGDIGVGGREIGYLFGQYRRITNRWEAGVLTGKGLAWGGSKARTEATGYGNVLFTEEMLKQRGEELDGQQVVVSGSGNVAIYTIEKAQALGANVLTVSDSGGYVVDEKGIDLALLKQVKEVERGRVGDYAQRRGSSAKYVAGGSVWDVACDVALPSATQNELDADAARI

SEQ ID NO: 6688 - protein, 641 aa, Rhodospirillum rubrum
MCGLVGIYHPTASRPVDRALVEAMNQRQFHRGPDDGGVFIGPGIGLGHRRLSIVDLGGGRQPMTNDGGGVVLVYNGELYNNAELVAELKAAGHVFRTASDTETVIHAWEEWGEDSVRHLRGMFAYALWDDRSQTLFLARDRLGIKPLHYTCLADGRVMFGSELKSLTGVEDIPKVVDPLAIEDFLAYGYVPDPRSIFKDILKLEAGHTLTFRRGEAPGRPHCYWDVSFTTPSRPAKTDDLCAEVIDRLDEAVRCHLVADVPVGAFLSGGVDSSAMVALMAGATDRPVETCSIAFSEARFDESAYAKTVAERYGTHHRVHTLPAQALSEVGPLTAIYDEPFADSSALPTLKVCQAARETVTVALSGDGGDELFAGYRRYRFHTAEEAVRRILPQAARGPLFGALGRVYPKLDWAPQVLRAKSTFQALGRDRVEGYFNAVSVIPDGLRRGLYSKTMRAELAGYGASEVLRRHMTRAPADHPLSIAQYVDLKTWLPGDILTKVDRASMATSLEVRVPMLDHRFVEWTAGLSPDLKLSGGTGKYLLKRALRPLLPDEVLYRRKMGFSIPLTDWLRGPWSGRTRALAGRSALVTSGLFDGAAVAKLVEQHLGGNWDHGAALYALIVLDDFLTAHVGAACLPARMSA

SEQ ID NO: 6689 - protein, 375 aa, Arabidopsis thaliana
MPLSLQPPPCATLSASIRKGRWKTLAAGFSVTPLPAVNFSLRRSIPRILASASSSSSPASSSLEAGENNELNAVSAFSEIVPDTVVFDDFERFPPTAATVSSALLLGICGLPDTIFRNAVDMALADSSCAGLETTESRLSCFFNKAIVNVGGDLVKLVPGRVSTEVDARLAYDTNGIIRKVHDLLRLYNEIDVPHDRLLFKIPATWQGIEAARLLESEGIQTHMTFVYSFAQAAAASQAGASVIQIFVGRLRDWARNHSGDTEIESAIKSGEDPGLALVKRSYNYIHKYGYKSKLMAAAVRNKQDLFSLLGVDYVIAPLKVLQSLKDSPAIPDDEKYSFVRKLTPETATHYHFTNKELVKWDQLSLASSMGPASV

SEQ ID NO: 6690 - protein, 386 aa, Oryza sativa
MAPLGWGWGIACLLFIGAASWYANWLLAGLHVIDGQRFIRYRDLMGFVFGRKMYYITWFLQFITLILGNMGFILLGGRALKAIHAEFSSSHSPARLQWFIAATGFVYFAFAYFVPTISAMRNWLATSAALTVAYDVALIVILIKDGKSNKQKDYNVHGTQAEKVFGAFGAIAAILVCNTSGLLPEIQSTLRKPVVSNMRRALLLQYTAGAAVYYGISVAGYWAYGAAVSEYLPDQLSGPSWATVLINATAFLQSIVSQQLFTVPIHEALDTQMQRLDEGMFSRYNLGRRLLARGLVFGANAFVTALFPFMGDFVNLFGSFVLFPLTFMFPSMVVLKIKGKDEAGRWNRIWHWGIIVASSVLSVVTTAAAVRLIVHNASVYHFFADM

SEQ ID NO: 6691 - protein, 459 aa, Yarrowia lipolytica CLIB122
MSDQNHVELESLAESDDYQVESDNDDGGHVTQTLLGNNPGLAEVTAESEKSNMKMAFMNMANSIIGAGIIGQPYAVHESGLIAGILLLVGLTFLIDWTIRLIVVNAKLSGTDTYQATCRKCFGKTGLIAISLAQGCFAFGGSIAFCVIIGDTIPHVLGALFPSLLGGEDSGPSILVNRQFIIVICTCLISYPLALNRNIAHLAKASALALVSMLVIVILVIVRGPQLAPEYKGTFDGHALSISPGLFQGVSVISFAFVCHHNSLLIYDSLKRPTMDRFATVTHWSTGVSMVACLAMGVGGFVIFVDKTKGNVLNNFPASDVMANVARFCFGFNMLTTLPLEIFVCREVFTTYFWPGDEFKWIRHIVTTTVMMLTAMCVALITCNLGVILELVGATSACVMAYILPPLCYLKLTKNKSLKQKAPYYLVAGFGVLVMLFSTIQSLLKIVNGEEEGSHCDVN

SEQ ID NO: 6692 - protein, 192 aa, Oryza sativa (japonica cultivar-group)
MSKYGTIPTSSSSSSSGAAPPPLPLGGGGGASPLDFFSRAKARGATALATRRPWRELADPHALGLPPSLADAYLRVRANLAHYAMNYAIVVLAVVFLSLLWHPASLIVFLVCMVAWLVLYFLRDEPIVLFGRVVGDGAVLAALAAVTLVLLLLTGATANIVSSLLIGVLLVVLHAALHKAEENVDDEVGRWI

SEQ ID NO: 6693 - protein, 355 aa, Zea mays
  misc_feature (141)..(141): Xaa can be any naturally occurring amino acid
  unsure (1)..(355): unsure at all Xaa locations
MDKYEAVRDIGSGNFGVARLMRNRETRELVAVKCIERGHRIDENVYREIINHRSLRHPNIIRFKEVILTPTHLMIVMEFAAGGELFDRICDRGRFSEDEARYFFQQLICGVSYCHYMQICHRDLKLENVLLDGSPAPRLKXCDFGYSKSSVLHSRPKSAVGTPAYIAPEVLSRHEYDGKLADVWSCGVTLYVMLVGAYPFEDPDDPKNIRKTIQQIMQVQYKIPDYVHISTECQQLIARIFVANPVRRITMKEIKSHPWFLKNLPRELTETAQGMYYRRDNKVPSYSDQTSEEIMKIVRDARTMPKSSRSGYGWSAEYSDEEEKEEEHRLEEDEYDRRVKEVHASGELRMDTLHI

SEQ ID NO: 6694 - protein, 460 aa, Actinobacillus pleuropneumoniae serovar 1 str. 4074
MKKSILASLLLGLGLFSTPATTFATLPIAIDGQTMPSLAPMIEKVRPAVVSIAVEGKTQAGKTQYRRDIPEEFEFFFGPDMFGERSAPRNFRGQGSGAIINAEKGYVITNNHVIKDADKITIKLEDGREFKAKLVGADPLSDVALVQMENPKDLIELKFADSDKLRVGDFSVAIGNPFGLGQTVTSGIISALGRSTGSIDEGYESYIQTDAAVNQGNSGGPLINLNGELIGINTAIISPSGGNAGIAFAIPSNMANSLVQQIIEFGEVKRGMLGIKGGELNADLAKEFNISAQQGAFISEVFADSAAAKAGLKAGDVITEINGQKIRSFSELRAKVATSGVGKEIELTYLRDGKTEKAKVTLQAEQGKSVSATTKDILPGLKGAELTNFDKDRVKGVAIAKVEKGSLAEQRGLAEGDVIVGVNRIAVENLTQLRQVLDSKPSVVALNILRNGANFYLILQ

SEQ ID NO: 6695 - protein, 375 aa, Arabidopsis thaliana
MPLSLQSPPCATLSASIQKGRWKTLAAGFSVTPLPAVNFSLRRSIPRILASASSSSSPASSSLEAGENNELNAVSAFSEIVPDTVVFDDFERFPPTAATVSSALLLGICGLPDTIFRNAVDMALADSSCAGLETTESRLSCFFNKAIVNVGGDLVKLVPGRVSTEVDARLAYDTNGIIRKVHDLLRLYNEIDVPHERLLFKIPATWQGIEAARLLESEGIQTHITFVYSFAQAAAAAQAGASVIQIFVGRLRDWARNHSGDNEIESAIKSGEDPGLALVKRSYNYIHKYGYKSKLMAAAVRNKQDLFSLLGVDYVIAPLKVLQSLKDSPAIPEDEKYSFVRKLTPETATHYHFTNKELVKWDQLSLASSMGPASV

SEQ ID NO: 6696 - protein, 150 aa, Vitis vinifera
LGNLSGDPYILHTNVFIQGKGNREQQFYLWFDPTRNFHTYSIAWSAQHIILLVDNVPIRLFKNAESMGVPFPKNQPMRIYSSLWNADDWATRGGLVKTDWSKAPFTAYYRNFRASTSTSTSTFSDSAFQTQELDAYGRRRLRWVQKNFMI

SEQ ID NO: 6697 - protein, 324 aa, Zea mays
MSTSVSASAVAALVPPLTGRRSPPASRVPQICRRRIRSKPRIFSSSPSFPIVPAAAMATGGAAPTASDAGSKKKLLIFDSEEDLAVSLAKYTAELSEKFAAERGAFTAVLSGGSLIEALRKLTEPPYLDSVDWSKWHVFWVDERVVPKDHVDSNYKLAYDGFLSKVPIPPGQVYAINDALSAEGAADDYEACLKQLVKNGVISMSAATGFPRFDLQLLGMGPDGHIASLFPDHPLVNEKERWVTYIKDSPKPPPERITFTFPVINSSAYVAMVVTGAGKAAAVQKALSDKQTSSDLLPVEMAVLQDGEFTWFTDKAAVSLLQNK

SEQ ID NO: 6698 - protein, 448 aa, Bacillus pseudofirmus
MSNEREMQNKKDQQLESFRVEDEGKKLTTNQGLKVSEDEFSLKAGERGPTLMEDFHFREKMTHFDHERIPERIVHARGFAAHGEFQVYDSMKEFTKAKFLQDPSVKTPVFVRFSTVAGSKGSAETVRDARGFATKFYTEEGNYDLVGNNIPVFFIQDAIKFPDLVHALKPEPHNEIPQAQSAHDTFWDFIANNQESAHMVMWAMSDRSIPRSFRMMEGFGVHTFRFVNEEGKAHFVKFHWKPVLGIHSLVWDEAQKIAGKDPDFHRRDLWESIENGDYPEYELGVQLISEEDEFNFDFDVLDPTKIWPEEEVPVKIIGKMTLNRNVDNVFAETEQVAFHPGHVVPGIDFTNDPLLQGRLFSYTDTQLIRLGGPNFHELPINRPVCPFHNNQRDGYGRQTINKGQVSYHKNSLAANTPQPASEEEGGYAHYQEKVEGRKVRKRSESFKD

SEQ ID NO: 6699 - protein, 249 aa, Brassica napus
MDEGGSSHDAESSKKIGRGKIEIKRIENTTNRQVTFCKRRNGLLKKAYELSVLCDAEVALVIFSTRGLLYEYASNSVKGTIERYKKACSDAVNPPTVTEANTKHYQQEASKLRRQIRDIQNSNRHIVGESLGSLNFKELKNLEGRLEKGISRVRSKKSELLVAEIEYMQKREMELQHVNMYLRAKIEQGARLNPEQHGSGVIQGTAVYESGLSSSHDQSQHYNRNYIPVNLLEPNQQFSGQDQPPLQLV

SEQ ID NO: 6700 - protein, 417 aa, Mycotypha africana
GKSTTTGHLINKCGGIDKRTIEKFEKEAAELGKGSFKYAWVLDKLKAERERGITIDIALWKFETPKYHVTVIDAPGHRDFIKNMITGTSQADCGILIIAAGTGEFEAGISKDGQTREHALLAFTLGVRQLIVAINKMDTTKWSEARYNEIVKEVSSFIKKIGFNPKSVPFVPISGWHGDNMLDESNNMPWFKGWTKETKAGSKTGKTLLEAIDAIDPPTRPVDKPLRLPLQDVYKIGGIGTVPVGRVETGVIKAGMVVTFAPANVTTEVKSVEMHHETLTEGLPGDNVGFNVKNVSVKDIRRGNVCSDSKNDPAKESGSFTAQVIILNHPGQISAGYAPVLDCHTAHIACKFAELVEKIDRRSGKKLEDAPKFVKSGDSAIVKMIPSKPMCVEAYTDYPPLGRFAVRDMRQTVAVGV

SEQ ID NO: 6701 - protein, 304 aa, Zea mays
SARALVPYYLEEEANWNLDFANIRQAVAEARSKGITVRATVIINPGNPTGQCLSEANIRELVRYCYHENLVLLADEVYQQNVYQDERPFISARKVMFDMGPPISREVQLVSFHTVSKGYWGECGQRGGYFEMTNLPPKTVDEIYKVASIVLSPNVPGQIFMGVMVNPPKPGDISYPKFTAESKSILESLRRRARMMTDGFNSCRNVVCNFTEGAMYSFPQIQLPARAIEAAKRAGKAADVFYCLKLLEATGISTVPGSGFGQKEGVFHLRTTILPAEEDFPTIMSSFKKFNDSFMEQYEGYSRM

SEQ ID NO: 6702 - protein, 416 aa, Mycotypha microspora
GKSTTTGHLIYKCGGIDKRTIEKFEKEAAELGKGSFKYAWVLDKLKAERERGITIDIALWKFETPKYHVTVIDAPGHRDFIKNMITGTSQADCGILIIAAGTGEFEAGISKDGQTREHALLAFTLGVRQLIVAINKMDTTKWSEARYNEIVKEVSSFIKKIGFNPKSVPFVPISGWHGDNMLDESTNMPWFKGWTKETKAGSKTGKTLLEAIDAIDPPTRPSDKPLRLPLQDVYKIGGIGTVPVGRVETGVIKAGMVVTFAPANVTTEVKSVEMHHETLTEGLPGDNVGFNVKNVSVKDIRRGNVCSDSKNDPAKESGSFTAQVIILNHPGQISAGYAPVLDCHTAHIACKFAELVEKIDRRSGKKLEDAPKFVKSGDSAIVKMIPSKPMCVEAYTDYPPLGRFAVRDMRQTVAVG

SEQ ID NO: 6703 - protein, 426 aa, Parasitella parasitica
VVVIGHVDSGKSTTTGHLIYKCGGIDKRTIEKFEKEAAELGKGSFKYAWVLDKLKAERERGITIDIALWKFETPKFMVTVIDAPGHRDFIKNMITGTSQADCAILIIAGGTGEFEAGISKDGQTREHALLAFTLGVRQLIVAINKMDTTKWSENRYTEIVKEVSNFIKKIGFNPKAVPFVPISGWHGDNMLDESKNMPWFKGWNKETKAGAKTGKTLLEAIDAIEPPVRPSDKPLRLPLQDVYKIGGIGTVPVGRVETGVIKAGMVVNFAPANVTTEVKSVEMHHETIPEGLPGDNVGFNVKNVSVKDIRRGNVCSDTKNDPAKESGSFTAQVIILNHPGQISAGYAPVLDCHTAHIACKFDELIEKIDRRSGKKMEDSPKFVKSGDSAIVKMIPSKPMCVEAYTDYPPLGRFAVRDMRQTVAVGV

SEQ ID NO: 6704 - protein, 277 aa, Klebsiella oxytoca
EIVAINDLLDADYMAYMLKYDSTHGRFNGTVEVKDGHLIVNGKKIRVTAERDPANLKWDEVGVDVVAEATGIFLTDETARKHITAGAKKVVLTGPSKDNTPMFVKGANFDKYEGQDIVSNASCTTNCLAPLAKVINDNFGIIEGLMTTVHATTATQKTVDGPSHKDWRGGRGAAQNIIPSSTGAAKAVGKVLPELNGKLTGMAFRVPTPNVSVVDLTVRLEKAASYEEIKKAIKAASEGAMKGVLGYTEDDVVSTDFNGEVCTSVFDAKAGIALNDN

SEQ ID NO: 6705 - protein, 426 aa, Phascolomyces articulosus
VVVIGHVDSGKSTTTGHLIYKCGGIDKRTIEKFEKEAAELGKGSFKYAWVLDKLKAERERGITIDIALWKFETPKYHVTVIDAPGHRDFIKNMITGTSQADCGILIIAAGTGEFEAGISKDGQTREHALLAFTLGVRQLIVAINKMDSTKYSEARYNEIVKEVSTFIKKIGYNPKSVPFVPISGWNGDNMLDESTNMPWFKGWTKETKAGSKTGKTLLEAIDNIDPPVRPSDKPLRLPLQDVYKIGGIGTVPVGRVETGVIKAGMVVTFAPANVTTEVKSVEMHHEQLAEGVPGDNVGFNVKNVSVKDIRRGNVCSDSKNDPAKESASFTAQVIVLNHPGQIGAGYSPVLDCHTAHIACKFAELLEKIDRRSGKKLEDAPKFVKSGDSAIVKMIPSKPMCVEAYTEYPPLGRFAVRDMRQTVAVGV

SEQ ID NO: 6706 - protein, 246 aa, Corynebacterium diphtheriae NCTC 13129
MTALQAFGWEFLGTALLLLLGNGVCAVNSLRTSAGKGTGWVLIAFGWGMAVFVGASVASPSGGHLNPAVTIALAIKGSTPWNLVGGYVLGQFLGAMFGAILCWLTFKQLFDANNTDENGNVTGANRTTGGIFFTGPAHNQNGWNMVTEFIGTCVLLLFIFFGPTGGDLGPMTYFAVAFVIVAIGLSLGTPTGYAINPVRDLGPRLMYAFVLPIKDKGSANWGYAWVPIVGPMIAAVFCGVLATVVL

SEQ ID NO: 6707 - protein, 805 aa, Anabaena variabilis ATCC 29413
MHELFHPIFANGEEKAALQQLIIALDSSGKRYFLRNEILHTFSQYCQQAQKPTYFYYSSSVGKLIQYTHEIVLAEDSTWFVVRPRIANQEVWRLTSDLAKFDSMPIDAFLDVSDRLVNAYEPNILEIDLSSFYEASPSISDPRNIGQGLAFLNRYLCSQIATDPQYWVELVYLALRGLQYDGINLMIGDAIPSGIHLAKQIHAAIKFLSDLPPEEPYEKFYIELQALGFEPGWGNTAERILETITLLDRLIDSPQPAVLEAFVARVPAVFRVVLVSIHGWVAQEDVMGRDETLGQVIYVLEQARSLENKLQQEIKLAGLEVLGIQPHIIILTRLIPHCEGTYCNLRLEKLHNTENAWILRVPFGEFNPAITNNWISKFEIWPYLETFALDAEKQLLAQFQGKPNLIVGNYSDGNLVAFLLARRLKVTHCNIAHSLEKPKNLFSNLYWQNSEEKYHFSVQFTADLITMNAADFIITSSYQEIFGTPESVGQYESYKFFTMPHLYHVVDGVDLFSPKFNMVPPGVNEQVFFPYSQTADRDPNLSQSVHDLLFHRQDSQIFGYLEQPQKPPIFAVAPITSIKNLTGLAECFGRSQELQAHSNLILLTSKLNIDETTNPEEAREIEKLHNIINQYQLQGHIRWLGLRLPNQEVGEAYRLVADYRGIYLHFARFEAFGRSILEAMISGLPTFATKFGGSLEILEDQNNGFRINPTDLEGTAEKILAFFQECDTHPEHWQEVSQWMSQRIHQKYNWQLHTSQLLALTKIYSFWNFIRPESSEARVRYMESLFHLIYKPRAEQILAKHMSCH

SEQ ID NO: 6708 - protein, 284 aa, Physcomitrella patens
MGRGKIEIKKIENTTSRQVTFSKRRGGLLKKAHELAVLCDAEVALVIFSSTGKLFEYASSGSIRDIIDRYKKGSDGMQNGARNDFMGCEVVKLREQLEQLKASHRHMLGEDLSLLKVPDLLQLEQQLDLGASRVRARKNQLILEEVESLRRKEHELLIANEDLRQKLADAQGIADAVTARANVSESPRPLTSALTRDIVMSSQQQEVTVHPHPNLRDAQRSQTSLQLGMFSSESYLPSSSRGPSEHPIPVGPEGCAGESAMRWEHPHFHSQNRLHANISPSVRI

SEQ ID NO: 6709 - protein, 413 aa, Phycomyces blakesleeanus
GKSTTTGHLIYKCGGIDKRTIEKFEKEAAELGKGSFKYAWVLDKLKAERERGITIDIALWKFETPKYMVTVIDAPGHRDFIKNMITGTSQADCGVLIIAAGTGEFEAGISKDGQTREHALLAFTLGVRQLIVAINKMDTTKWSEARYNEIVKEVSSFIKKIGFNPKSVPFVPISGWHGDNMLEESVNMGWFKGWTKETKAGVKSGKTLLEAIDNIDPPVRPSDKPLRLPLQDVYKIGGIGTVPVGRVETGVIKAGMIVNFAPAGVVTEVKSVEMHHEQLVEGLPGDNVGFNVKNVSVKDIRRGNVCSDSKNDPAKESGSFTAQVIVLNHPGQIGAGYSPVLDCHTAHIACKFAELIEKIDRRSGKKMEDAPKFIKSGDSAIVKMVPSKPMCVEAYTDYPPLGRFAVRDMRQTV

SEQ ID NO: 6710 - protein, 289 aa, Chlorobium tepidum TLS
MKTQSQDRWFIWQLSEELEAKIRYREYGPPDSPFTPLLFIHGYGGMIEHWNDNIPSFDDRYRIYAMDLIGFGQSGKPNVRYSLALFAAQIKAFMHLKKLEKVTLVGHSMGAASSIIYAHHNPDSVRALVLANPSGLYGDSMDGVAKIFFGLVGSPLIGEMLFAAFANPVGVSQSLTPTYYNQKKVDLNLINQFSRPLQDRGAIFSYLSPSKRPHDFMLDGLKPCNYKGDAWLLWGAEDTALPPHKIIPEFQELLPQAGAYIIPKAGHCIHHDAHETFNNRLAQLLQRLE

SEQ ID NO: 6711 - protein, 277 aa, Klebsiella pneumoniae
EIVAINDLLDAEYMAYMLKYDSTHGRFDGTVEVKDGHLVVNGKKIRVTAERDPANLKWDEVGVDVVAEATGIFLTDETARKHITAGAKKVVLTGPSKDNTPMFVRGANFDTYAGQDIVSNASCTTNCLAPLAKVINDNFGIVEGLMTTVHATTATQKTVDGPSHKDWRGGRGAAQNNIPSSTGAAKAVGKVLPELNGKLTGMAFRVPTPNVSVVDLTVRLEKAASYEEIKKAIKAASEGAMKGVLGYTEDDVVSTDFNGEVCTSVFDAKAGIALNDN

SEQ ID NO: 6712 - protein, 335 aa, Chlamydophila caviae GPIC
MKVVINGFGRIGRLVLRQVLKRNSSVDVVAVNDLVPGEALTYLFKYDSTHGRFPADVSYDNGYLVVDGRRIQLLDQRDVQKLPWKDLGVDVVIESTGLFTKKEDAAKHLDSGAKRVLITAPAKGDVPTFVMGVNENAFDPEKDTIISNASCTTNCLAPLAKVLLDNFGIEEGLMTTVHAATATQSVVDGPSKKDWRGGRGAFQNIVPASTGAAKAVALCLPELKNKLTGMAFRVPVADVSVVDLTVRLQKSTTYEEICKAIKNASETNLRGILGYTDQEVVSSDFIGCEYSSIFDAGAGIALTDRFFKLVAWYDNEIGYATRIVDLLEYVAKNSK

SEQ ID NO: 6713 - protein, 358 aa, Anabaena variabilis ATCC 29413
MVDSLKKPGFEEIRPGVKVPAKETLLTPRFYTTDFDEMARMDISVNEDELLAILEEFRTDYNRHHFVRDAEFEKSWDHIDGDTRRLFVEFLERSCTAEFSGFLLYKELGRRLKDKSPVLAECFNLMSRDEARHAGFLNKAMSDFNLSLDLGFLTKSRNYTFFKPKFIFYATYLSEKIGYWRYITIYRHLEAHPEDRIYPIFRFFENWCQDENRHGDFFDAIMKSQPQMLNDWKAKLWSRFFLLSVFATMYLNDIQRKDFYASIGLDARDYDIYVIKKTNETAGRVFPVILDVDSPEFYERLDICVENSEKLSAIASSNTPKFLQFFQKLPVLASTGWQLLRLYLMKPIDAVSAQGAAR

SEQ ID NO: 6714 - protein, 159 aa, Vitis vinifera
LGNRSGQPYILQTNVFTGGKGDREQRIYLWFDPTKASHSYSVLWNTFLIIFLVDDVPIRVFKNSKDLGVKFPFDQPMKIYSSLWNADDWATRGGLEKTDWSKAPFVASYKSFHVDGCEASVEAKFCATQGKRWWDQREFQDLDSLQYRRLAWVRQKYTI

SEQ ID NO: 6715 - protein, 194 aa, Triticum aestivum
GRVGSVTRASIKPTRIASRAFVSTWNSVPQGPPDAILGVTEAYKRDTSPNKMNLGVGAYRDDGGKPYVLTSVKKAEKVMMEKNLDKEYAGITGVPAFTKAAGELAYGEDSSVIKDNRLVISQSISGTGALRIGAEFLKAWYPHAKNIIVPNPTWGNHIPIMKNAGLSLEKYTYFDKNTNGLNIDGMLEDLHKAP

SEQ ID NO: 6716 - protein, 308 aa, Mesoplasma florum L1
MKKILTMGSIGVDHVFNVDKLPNKGQSIISKNFNIFFGGKGANQAVAAAKLGADVKYIGHVGNDDAGLHAIENLVKNKIDASYIKKINNINTQVANIIVDDKGDNLLIVDTGANFTFLKDEINEYKELIDHSDILLTQLETNLEFVEDFINYGHSKNKLIILNPGPAKVISNKIIEKCDFITPNESEICILLGKEYTENYELLKKYAYELWDINKKNVIVTLGENGSIWIDEKGELHKFEAYKVKAVDATACGDTFMGGISAYLAQDKTIEEAIKFATAAASLAVTKMGAQSSLPELKEVHEFIKKNG

SEQ ID NO: 6717 - protein, 141 aa, Chlamydophila caviae GPIC
MEQTLSIIKPDSVGKAHIGEIVAIFEKSGFRIAAMKMVHLSVKEAEGFYAVHKSRPFFQELVDFMISGPVVVMVLEGDNAVVRNREIMGATNPQEAAQGTIRAQFGESIGINAVHGSDSLENAAIEINYFFSKIEIVNSAK

SEQ ID NO: 6718 - protein, 76 aa, Ipomoea batatas
MSCCGGNCGCGSGCKCGNGCNGCGMYADVEKPTTVSSLIQGVAPVKNSFEGGAEKATEGGHACKCGDNCQCNPCNC

SEQ ID NO: 6719 - protein, 375 aa, Arabidopsis thaliana
MPLSLQSPPCATLSASIQKGRWKTLAAGFSVTPLPAVNFSLRRSIPRILASASSSSSPSSSSLEAGENNELNAVSAFSEIVPDTVVFDDFERFPPTAATVSSALLLGICGLPDTIFRNAVDMALADSSCAGLETTESRLSCFFNKAIVNVGGDLVKLVPGRVSTEVDARLAYDTNGIIRKVHDLLRLYNEIDVPHERLLFKIPATWQGIEAARLLESEGIQTHITFVYSFAQAAAAAQAGASVIQIFVGRLRDWARNHSGDNEIESAIKSGEDPGLALVKRSYNYIHKYGYKSKLMAAAVRNKQDLFSLLGVDYVIAPLKVLQSLKDSPAIPEDEKYSFVRKLTPETATHYHFTNKELVKWDQLSLASSMGPASV

SEQ ID NO: 6720 - protein, 532 aa, Mesoplasma florum L1
MAKFVFVTGGVVSGLGKGITASSLGNLLKASGLKVFMQKFDPYLNVDPGTMSPYQHGEVFVTDDGGETDLDLGHYERFIDEKLTKMSSTSAGKIYLETINAERRGDWGGQTIQVVPHITDSIKNKVYQAAKTSGADVIISEIGGTVGDIESQPFIEAIRQIRMEQGKENVVFIHVALLLYLNASKEYKTKPIQMSVKELLSLGIQPDIIVQRTDKHSSKEIKEKISLFCNIPTSNVIDAIDKESIYEVPLEMYEQNLHGLVLDQLQIRTKKTDMESWIKFCEKIKASKEEFEVTFVGKYIELQDAYLSVIESLKIAGYEFKRKLKINWIQADKLNESNYKEVLQNAKGILVPGGFGDRGIEGMILASKFARENSIPYLGICLGMQIATISIARDWLNLPEANSTEFDHSGAVPIFDFIRGIDVQNLGGTLRLGAFYKTTIKEGTKAEKLYGSREVFERHRHRYEFNNEYKKALEEKGLVFSGIYEEKKLVEIIELPNHPFFVGSQYHPEFTSRPNKPNPLFKGFVEAIVNNK

SEQ ID NO: 6721 - protein, 308 aa, Triticum aestivum
MAAAAGEAPRALSQKEQDIQMMLAADVHLGTKNCDFQMERYAYKRRSDGIYIINLGKTWEKLQLAARVIVAIENPQDIIVQSARPYGQRAVLKFAQHTGANAIAGRHTPGTFTNQMQTSFSEPRLLILTDPRTDHQPIKESALGNIPTIAFCDTDSPMRYVDIGIPANNKGRNSNGCLYWLLARMVLQMRGTILPGHKWDVMVDLFFYRDPEEAKEQEDEPAEAPEYAAITDYGAAAGQWGGDQWTSDAPAPPPVTGGEWPMAEAPVAGGDGWDAAGAPVAVEGAVPPPVVAATGWDAAVQPPAQGWE

SEQ ID NO: 6722 - protein, 375 aa, Arabidopsis thaliana
MPLSLQSPPCATLSASIQKGRWKTLAAGFSVTPLPAVNFSLRRSIPRILASASSSSSPASSSLEAGENNELNAVSAFSEIVPDTVVFDDFERFPPTAATVSSALLLGICGLPDTIFRNAVDMALADSSCAGLETTESRLSCFFNKAIVNVGGDLVKLVPGRVSTEVDARLAYDTNGIIRKVHDLLRLYNEIDVPHDRLLFKIPATWQGIEAARLLESEGIQTHMTFVYSFAQAAAASQAGASVIQIFVGRLRDWARNHSGDTEIESAIKSGEDPGLALVKRSYNYIHKYGYKSKLMAAAVRNKQDLFSLLGVDYVIAPLKVLQSLKDSPAIPDDEKYSFVRKLTPETATHYHFTNKELVKWDQLSLASSMGPASV

SEQ ID NO: 6723 - protein, 321 aa, Arabidopsis thaliana
MSYRLLSVDKDELVTSPCLKERNYLGLSDCSSVDSSTIPNVVGKSNLNFKATELRLGLPESQSPERETDFGLLSPRTPDEKLLFPLLPSKDNGSATTGHKNVVSGNKRGFADTWDEFSGVKGSVRPGGGINMMLSPKVKDVSKSIQEERSHAKGGLNNAPAAKAQVVGWPPIRSYRKNTMASSTSKNTDEVDGKPGLGVLFVKVSMDGAPYLRKVDLRTYTSYQQLSSALEKMFSCFTLGQCGLHGAQGRERMSEIKLKDLLHGSEFVLTYEDKDGDWMLVGDVPWEIFTETCQKLKIMKGSDSIGLAPGAVEKSKNKERV

SEQ ID NO: 6724 - protein, 720 aa, Glycine max
  misc_feature (13)..(13): Xaa can be any naturally occurring amino acid
  misc_feature (189)..(189): Xaa can be any naturally occurring amino acid
  misc_feature (348)..(348): Xaa can be any naturally occurring amino acid
  unsure (1)..(720): unsure at all Xaa locations
VDKICKALETVNXRSSEILDHPYTQICNEGRQNALSEILEILTVVCETLNLPLAQTWIPCKHRSVLAQGGGVKKSCSSFDGSCMGKVCMSTTDIAFYIIDAHLWGFREACVEHHLQQGQGVAGRAFLSHSMCFCSNITQFCKTDYPLVHYALMFGLTSCFTICLRSSHTGNDDYVLEFFQLRRPPPRVXLPPRITHIHEQKTLLGSILAIMKQHFQSLHIASGVEPEDGSIEIIEATIERVHTRLESIPIASSIKSPPRPDTSPNMGEEVPQDPSEQQILMYCNDINNGGSLGENAARNIDHMPSLETKNINKPLERKRGKTEKSISLEVLQRYFAGSLKDAAKSLGXQHGISRWPSRKINKVNRSLSKLKRVIESVQGAEGAFGLNSLSKSPLPIAVGSFPEPSTPNKFSLPASLSINPSEPQIKENELNASKALETNSQAVMEEDRLLGGRTPHLEKVINDKGRHTREVGKEPKRTRTGSGSSEDSTNPTSHGSCHDSPPNESSPVKNIFITSNNDQCAGLKRSPESTLQLTTNTPNRPAAYPMPDFVAAELQEPFGGMLIEDAGSSKDLRNLCPSVAETILEDMVPEACGTNIPGPDLSPKQSMGTPNKAVTPFVAMKEMKTVTIKATYREDIIRFRVSLTCGIVELKEEVAKRLKLEVGTFEIKYLDDDHEWVLIACDADLQECMDVSRSSGSKIIRVLVHDITSNLGSSCESSGE

SEQ ID NO: 6725 - protein, 237 aa, Hordeum vulgare subsp. vulgare
MPSRPAPFIHRLRLLRSAVVSPSSAPLPCSRPRLAVPFAQPPIRAPAFAAAGSPLLRPVGARFSLSSNMAAAASSASSVHDFTVEDASGKDVDLSTYKGKVLLIVNVASQCGLTNSNYTELAQLYEKYKDQGFEILAFPCNQFGGQEPGTNEEIVQFACTRFKAEYPIFDKVDVNGDNVAPVYKFLKSSKGSLFGDNIKWNFSKFLVDKDGNVVDRYAPTTSPLSIEKDIKKLLASS

SEQ ID NO: 6726 - protein, 365 aa, Pilaira anomala
GKSTTTGHLIYKCGGIDKRTIEKFEKEAAELGKGSFKYAWVLDKLKAERERGITIDIALWKFETPKYMVTVIDAPGHRDFIKNMITGTSQADCAILIIAGGTGEFEAGISKDGQTREHALLAFTLGVRQLIVAINKMDTTKWSEARYNEIVKEVSSFIKKIGFNPKTVPFVPISGWHGDNMLEESKNMPWFKGWNKETKAGAKTGKTLLEAIDAIDPPVRPSDKPLRLPLQDVYKIGGIGTVPVGRVETGVIKAGMVVNFAPAAVTTEVKSVEMHHETLSEGLPGDNVGFNVKNVSVKDIRRGNVCSDSKNDPAKEAGSFTAQVIILNHPGQISNGYSPVLDCHTAHIACKFSELIEKIDRRSGK

SEQ ID NO: 6727 - protein, 171 aa, Hordeum vulgare subsp. vulgare
MGAAESSSKLGGSVHDFVVKDVRGNDVELSRYKGKVLLIVNVASRCGLANSNYTEMGQLYEKYREKGLEILAFPCNQFAGQEPDSDEKIVEFACDRFQAQFPIFRKVDVNGNNAAPLYKFLKSERGGLFGERIKWNFTKFLVDKEGHVMNRYAPTWSPLGIENDIKKLLEV

SEQ ID NO: 6728 - protein, 370 aa, Pilobolus umbonatus
GHVDSGKSTTTGHLIYKCGGIDKRTIEKFEKEASELGKGSIKYAWVLDKLKAERERGITIDIALWKFETPKYNVTVIDAPGHRDFIKNMITGTSQADCAILIIAGGTGEFEAGISKDGQTREHCLLAFTLGVRQLIVAINKMDTTKWSEARYNEIVKEVSSFIKKIGFNPKAVPFVPISGWHGDNMLEESKNMPWFKGWTKESKAGNKAGKTLLEAIDAIEPPSRPSDKPLRLPLQDVYKIGGIGTVPVGRVETGVIKAGMVVTFAPAAVTTEVKSVEMHHETLTEGLPGDNVGFNVKNVSVKDIRRGNVCSDSKNDPAKEAGSFTAQVIILNHPGQIGAGYAPVLDCHTAHIACKFAELLEKIDRRSGK

SEQ ID NO: 6729 - protein, 103 aa, Glycine max
HTHQALSLPQHPDLQAVVYRSMEASRRLLSAALLLVLLLAATGELGGPVMVAEARTCESRSHRFRGPCVRRSNCANVCKTEGFPDGKCRGFRRRCFCTTHCHH

SEQ ID NO: 6730 - protein, 165 aa, Hordeum vulgare subsp. vulgare
MAAASSATSVHDFTVKDASGKDVDLSVYKGKVLLIVNVASQCGLTNSNYTELSQLYPKYKDQGFEILAFPCNQFGGQEPGTNDEIVQFACTRFKAEYPIFDKVDVNGNNVSPLYKFLKSSKGGFFGDSIKWNFSKFLVDKEGHVVDRYAPTTSPMSIEKDIKKLL

SEQ ID NO: 6731 - protein, 277 aa, Klebsiella pneumoniae
EIVAINDLLDAEYMAYMLKYDSTHGRFDGTVEVKDGHLVVNGKKIRVTAERDPANLKWDEVGVDVVAEATGIFLTDETARKHITAGAKKVVLTGPSKDNTPMFVRGANFDTYAGQDIVSNASCTTNCLAPLAKVINDNFGIVEGLMTTVHATTATQKTVDGPSHKDWRGGRGAAQNIIPSSTGAAKAVGKVLPELNGKLTGMAFRVPTPNVSVVDLTVRLEKAASYEEIKKAIKAASEGAMKGVLGYTEDDVVSTDFNGEVCTSVFDAKAGIALNDN

SEQ ID NO: 6732 - protein, 365 aa, Pirella circinans
GKSTTTGHLIYKCGGIDKRTIEKFEKEAAELGKGSFKYAWVLDKLKAERERGITIDIALWKFETPKYHVTVIDAPGHRDFIKNMITGTSQADCAILIIAGGTGEFEAGISKDGQTREHALLAFTLGVRQLIVAINKMDTTKWSEARYTEIVKEVSSFIKKIGFNPKSVPFVPISGWHGDNMLEESKNMGWFKGWTKETKAGSKTGKTLLEAIDAIEPPVRPSDKPLRLPLQDVYKIGGIGTVPVGRVETGIIKAGMVVNFAPAAVTTEVKSVEMHHETLTEGLPGDNVGFNVKNVSVKDIRRGNVCSDSKNDPAKEAGSFTAQVIILNHPGQISNGYSPVLDCHTAHIACKFSELIEKIDRRSGK

SEQ ID NO: 6733 - protein, 277 aa, Klebsiella pneumoniae
EIVAINDLLDAEYMAYMLKYDSTHGRFDGTVEVKDGHLVVNGKKIRVTAERDPANLKWDEVGVDVVAEATGIFLTDETARKHITAGAKKVVLTGPSKDNTPMFVRGANFETYAGQDIVSNASCTTNCLAPLAKVINDNFGIVEGLMTTVHATTATQKTVDGPSHKDWRGGRGAAQNIIPSSTGAAKAVGKVLPELNGKLTGMAFRVPTPNVSVVDLTVRLEKAASYEEIKKAIKAASEGAMKGVLGYTEDDVVSTDFNGEVCTSVFDAKAGIALNDN

SEQ ID NO: 6734 - protein, 403 aa, Poitrasia circinans
GKSTTTGHLIYKCGGIDKRTIEKFEKEAAELGKGSFKYAWVLDKLKAERERGITIDIALWKFETPKYHVTVIDAPGHRDFIKNMITGTSQADCAILIIAGGTGEFEAGISKDGQTREHALLAFTLGVRQLIVAINKMDTTKWSEARYTEIVKEVSSFIKKIGFNPKAVPFVPISGWHGDNMLEESTNMPWFKGWKKETKAGEKSGKTLLEAIDAIEPPVRPSDKPLRLPLQDVYKIGGIGTVPVGRVETGVIKAGMVVTFAPAAVTTEVKSVEMHHETLTEGLPGDNVGFNVKNVSVKDIRRGNVCPDSKNDPAKEAGSFTAQVIILNHPGQIGAGYAPVLDCHTAHIACKFSELIEKIDRRSGKKLEDAPKFVKCGDSAIVKMIPSKPMCVEAYTDYPPLGR

SEQ ID NO: 6735 - protein, 95 aa, Chlorobium tepidum TLS
MNLKPLADRVIVKPAPAEEKTKGGLYIPDTGKEKPMYGEVVAVGPGKVSDAGQVVAMQVKAGDKVLYGKYSGTEVHVEGEDYLIMRESDIFAILG

SEQ ID NO: 6736 - protein, 545 aa, Chlorobium tepidum TLS
MTAKDILFDAEARTKLKVGVDKLANAVKVTLGPAGRNVLIDKKFGAPTSTKDGVTVAKEIELVDPVENMGAQMVREVASKTSDVAGDGTTTATVLAQAIYREGLKNVTAGARPIDLKRGIDRAVKEVVAELRNISRSISGKKEIAQVGTISANNDPEIGELIAEAMDKVGKDGVITVEEAKGMETELKVVEGMQFDRGYLSPYFVTNSETMEAELDEALILIHDKKISNMKELLPILEKAAQSGRPLLIIAEDIEGEALATLVVNKLRGTLKVAAVKAPGFGDRRKAMLEDIAILTGGTVISEEKGYKLENATMAYLGQAARITIDKDNTTIVEGKGKQEEIKARINEIKGQIEKSTSDYDTEKLQERLAKLSGGVAVLKIGASTEVEMKEKKARVEDALHATRAAVQEGIVVGGGVALIRAAKGLAKAVADNEDQKTGIEIIRRALEEPLRQIVANTGTTDGAVVLEKVKNAEGDYGFNARTEQYENLIEAGVVDPTKVTRSALENAASVASILLTTEAAITDVKEDKADMPAMPPGGMGGGMY

SEQ ID NO: 6737 - protein, 417 aa, Protomycocladus faisalabadensis
GKSTTTGHLIYKCGGIDKRTIEKFEKEAAELGKGSFKYAWVLDKLKAERERGITIDIALWKFETPKYQVTVIDAPGHRDFIKNMITGTSQADCGILIIAAGTGEFEAGISKDGQTREHALLAFTLGVRQLIVAINKMDSTKYSEARYNEIVKEVSGFIKKIGFNPKAVPFVPISGWNGDNMLEESPNMPWFKGWNKETKAGAKTGKTLLEAIDAIEPPVRPSDKPLRLPLQDVYKIGGIGTVPVGRVETGTIKAGMVVTFAPANVTTEVKSVEMHHEQLAEGVPGDNVGFNVKNVSVKDIRRGNVCSDSKNDPAKEAASFTAQVIVLNHPGQIGAGYSPVLDCHTAHIACKFAELLEKIDRRSGKKLEDSPKFVKSGDSAIVKMVPSKPMCVEAYTEYPPLGRFAVRDMRQTVAVGV

SEQ ID NO: 6738 - protein, 277 aa, Klebsiella pneumoniae
EIVAINDLLDAEYMAYMLKYDSTHGRFDGTVEVKDGHLVVNGKKIRVTAERDPANLKWDEVGVDVVAEATGIFLTDETARKHITAGAKKVVLTGPSKDNTPMFVRGANFDAYAGQDIVSNASCTTNCLAPLAKVINDNFGIVEGLMTTVHATTATQKTVDGPSHKDWRGGRGAAQNIIPSSTGAAKAVGKVLPELNGKLTGMAFRVPTPNVSVVDLTVRLEKAASYEEIKKAIKAASEGAMKGVLGYTEDDVVSTDFNGEVCTSVFDAKAGIALNDN

SEQ ID NO: 6739 - protein, 212 aa, Escherichia coli O157:H7 EDL933
MSLFDKKHLVSPADALPGRNTPMPVATLHAVNGHSMTNVPDGMEIAIFAMGCFWGVERLFWQLHGVYSTAAGYTGGYTPNPTYREVCSGDTGHAEAVRIVYDPSVISYEQLLQVFWENHDPAQGMRQGNDHGTQYRSAIYPLTPEQDAAARASLERFQAAMLAADDDRHITTEIANATPFYYAEDDHQQYLHKNPYGYCGIGGIGVCLPPEA

SEQ ID NO: 6740 - protein, 291 aa, Streptomyces echinatus
MSPTNRTVVVTGIGATTPLGGDAASFWEALVAGTPGVSLLEQEWAADLPVRIAAQIAVEPGEVLPRPQARKLDRSAQFALIAAQEAWKDAGFTAKAGEDASVNPDRLGAVIASGIGGVTTLLDQYDVLKEKGVRRVSPHTVPMLMPNSPAANVGIELGARAGVHTPVSACASGAEAIGYAIEMIRTGRADVVVAGGTEAAIHPLPIAAFGNMMAMSKNNDDPQGASRPYDADRNGFVLGEGAGVIVLESEEHAKARGARVYAEAVGQGISADGHHITQPEPSGNGIAHALQ

SEQ ID NO: 6741 - protein, 345 aa, Mesorhizobium loti MAFF303099
MPPKSAQRFWDNGTNRKKSRSSLKTRSPSMALAAAKFQSDETLLDAYSTTVADAVDRIGPAVCRIERIGGQGGHGSGFVIAPDGLVVTNFHVVGDARTVRVSMPDGASSEGRVLGRDPDTDIALVRADGSFTDVAPLGDSKRLRRGQIAIAIGNPLGFEWTVTSGVVSALGRSMRASTGRLIDDVIQTDAALNPGNSGGPLVSSAGEVIGVNTAMIHGAQGIAFAVASNTANFVISEIIRFGRVRRAFIGVSADTTNLPRRAALLSQVSTSTAVRLRSVEKNGPAAKAGLKEGDIIAAIDGRPVTGVDDLVRMLDAERIGRETLCTVVRRTGVSQVTVTPVARAG

SEQ ID NO: 6742 - protein, 83 aa, Brassica napus
MASPRRMAAAPAVLLLVLLLLVATEMGTMKTAEARTCLSQSHKFKGTCLSNSNCAGVCRTENFPDGECNSHRLERKCFCKRTC

SEQ ID NO: 6743 - protein, 470 aa, Kluyveromyces lactis NRRL Y-1140
MTVENENNSYVFQGYITKKLPHVKRGEGCRIVVEKDGKLHEDVFDGITGAAVGALGWGDEDIHGIMTEAAKNHTYTFPSLIGNSQSEELAKFYIENSPKGAFESALWCCSGSEANENAMKIIRQYQLERGQPKRTKIISRESSYHGFTLGALSISSNPRAEQFKEILMDQKELCLKMPVCYPYRFMKKGETEEEYCARLIHSLEQLILDNDPETISVVLVETLPGSSLGTTPPPKGYLSGIRRICNKYDVVFMLDEVMCGTGRSNPNGKLNCWENFLTAEEAPDIQSVGKTLGSGYVTIAGVLVGPKIKKAYAEGSNCMIGSHTYASHGFNCAVALGVQKKILDNDLTKNIFEKGNLMGQKLKKSLLAYDNIVGDVRGIGGFWSLEFVKDRETKEPFPYKLDVGHRFQDVCFENGITVMGMQGNIDGVSGDIALLAPSFIITEDDVSTIVERVTKSVDDMTVLLKAEGHF

SEQ ID NO: 6744 - protein, 491 aa, Musa acuminata
GTRRDRERERERERERERERERERERERERERERERVHLLGSSSLHRSLWELSKKHGPLMHLKFGRVPVVVVSSPEMAKEVLKTHDLECCSRPSLLSFSKFSYGLSDVAFIPYGERWRQLRKLCTVELLSTRKINSFRDIRKEEMERVTKLICSHVRASSMVNLSELLLSLSCNMTCRSAFGSGFDDGGDIQLHDMLREAQEELSGLFLSDYLPLLGWVDRLSGMRSRLERAFLKLDSIYQRRIDYHQDRLRQQGKEDGDVLDALLRMQKDEEGLTEDHIKGVLMDIFIAGTDTSSATVEWAMAELIRQPELMKRAQDEVRRCVGSKGEVEESDLHQLHFFKCVIKETMRLHPPAPLLLPRETMQHFKLNGYDILPKTWMYVNAWAIGRDPNSWGRPHVFDPERFMHDSTEASGQDFKLIPFGEGRRICPGKNLGMLMVELVLANLLYSFDWHLPPGMVKEDISMEEAPGVPVHREYALCLMATKYDATTA

SEQ ID NO: 6745 - protein, 339 aa, Escherichia coli
MVIFVTGGAGYIGSHTILELLNNGHDVVSIDNFVNSSIESLKRVEQITNKKIISYQGDIRDKNLLDEIFSRHHIDAVIHFASLKSVGESKLKPLEYYSNNVGGTLVLLECMKRYNINKMIFSSSATVYGSNSIPPHTEDRRIGETTNPYGTSKFIIEIILSDYCDSDNNKSVIALRYFNPIGAHKSGMIGENPNGIPNNLVPYISKVAQNQLPVLNIYGNDYPTKDGTGVRDYIHVCDLAKGHVKALEYMFLNDVNYEAFNLGTGQGYSVLEIVKMFEIVTKKSIPVAICNRREGDVAESWASADLAHKKLSWKAEKNLKEMIEDVWRWQTNNPNGYKK

SEQ ID NO: 6746 - protein, 507 aa, Musa acuminata
MALPPLLLSPLPSLLVVLALLSSLLLAGRKARGGSATWKLPPGPPKLPVIGHLHLLGSSLLHRSLWELSKKHGPLMHLKFGRVPVVVVSSPEMAKEVLKTHDLECCSRPSLLSFSKFSYGLSDVAFIPYGERWRQLRKLCTVELLSTRKINSFRDIRKEEMERVTKLICSHVRASSMVNLSELLLSLSCNMTCRSAFGSGFDDGGDIQLHDMLREAQEELSGLFLSDYLPLLGWVDRLSGMRSRLERAFLKLDSIYQRRIDYHQDRLRQQGKEDGDVLDALLRMQKDEEGLTEDHIKGVLMDIFIAGTDTSSATVEWAMAELIRQPELMKRAQDEVRRCVGSKGEVEESDLHQLHFFKCVIKETMRLHPPAPLLLPRETMQHFKLNGYDILPKTWMYVNAWAIGRDPNSWGRPHVFDPERFMHDSTEASGQDFKLIPFGEGRRICPGKNLGMLMVELVLANLLYSFDWHLPPGMVKEDISMEEAPGVTVHREYALCLMATKYDATTA

SEQ ID NO: 6747 - protein, 188 aa, Aspergillus niger
CRDIVEAHYRACLYAGIKISGINAEVMPSQWEYQVGPCDGIEMGDHLWMSRFLLHRVAEEFGVKISFDPKPIKGDWNGAGLHTNVSSASMRAEGGMKVIEAAMKKLEARHVEHIAVYGEGNEERLTGRHETGNIDKFSYGVADRGGSIRIPRQVAKDGKGYFEDRRPASNACPYQITGIIVETLMGGN

SEQ ID NO: 6748 - protein, 375 aa, Arabidopsis thaliana
MPLSLQSPPCATLSASIQKGRWKTLAAGFSVTPLPAVNFSLRRSIPRILASASSSSSPSSSSLEAGENNELNAVSAFSEIVPDTVVFDDFERFPPTAATVSSALLLGICGLPDTIFRNAVDMALADSSCAGLETTESRLSCFFNKAIVNVGGDLVKLVPGRVSTEVDARLAYDTNGIIRKVHDLLRLYNEIDVPHERLLFKIPATWQGIEAARLLESEGIQTHITFVYSFAQAAAAAQAGASVIQIFVGRLRDWARNHSGDNEIESAIKSGEDPGLALVKRSYNYIHKYGYKSKLMAAAVRNKQDLFSLLGVDYVIAPLKVLQSLKDSPAIPEDEKYSFVRKLTPETATHYHFTNKELVKWNQLSLASSMGPASV

SEQ ID NO: 6749 - protein, 417 aa, Debaryomyces hansenii CBS767
MNFNIIIKIICENIQLAPIINMVSYKELFNINDTDLIVPSDTLSEAVYDNSKLDYIFQNVNRRNRDEVEDESINIQTQLPKQQNQQISKDMSEVGSKQVSEIRPDSDSRWKLLRVMAGAHQGWVRSCTVDPVTNKWFVTGSSDSTIKIWDLASLNLKATITGHIMGVRSLAVSSRYPYLFSGSEDKTVKCWDLERTNSLLGCQIRNYHGHVGGIYAMALHPELDLLFTGGRDSVIRVWDLRSRTEIMVLSGHRSDITSIASQIGDPQIITSSMDATIRLWDIRKATTQLALTHHSKSIRLMAMHPQEMTMCSGDTSGNLKEWLLPGGELLNEFGHSGENKIINTLSINPSNNTLFSGYDDGRMEFYDYVSGDLLQSDATTPVTGSTESAIYASTFDMLGLRLITCEGDKSIKIWGEE

SEQ ID NO: 6750 - protein, 442 aa, Chlamydophila caviae GPIC
MIENDFQGYSPSYQASHFYRDKVGVIVLCGGEGKRLSPLTYWRCKPTVSFGGRYKLIDVPISHAIASGFSKIFVIGQYLTYTLQQHLVKTYFYHGVLQDRIHLLAPEGREGSQVWYQGTADAIRQNLLYLEDTEIEYFLVLSGDQLYNMDFRKVVDYAIAMQSDMVIVAQPIQEKDASRMGVLQIDKDANLVDFYEKPQEEEILNRFRLSSEDCRKHKLDPQYGNFLGNMGIYLFRRESLFQLLLEEQGDDFGKHLIQAQKQRGSIKTFLYDGYWTDIGTIESYYEANIALTQRPKPQVRGLNCYDDAGMIYSKNHHLPGTIVTDSMISSSLLCEGAVIDSSNVSHSVVGIRGVIGKNSIIDHSIVMGNDRYGNPQQNALGIGDNCEIYKTIIDENCRIGNGVKLTNIQGHKDYNSPDGKLVVRDGIIIIPRGTRIPDNYTF

SEQ ID NO: 6751 - protein, 361 aa, Mannheimia succiniciproducens MBEL55E
MKFGTSTLTQGTPKLNRAHMIEIVRQLAQLHQEGYRLVIVTSGAMAAGRHYLNHPKLPPTIASKQLLAAVGQSQLIQTWEQLFAIYDIHIGQLLLTRADIEDRERFLNARDTLHALLDNRIIPVVNENDAVATAEIKVGDNDNLSALVAILVQAEQLYLLTDQQGLFDSDPRKNPQAKLIPVVNEITDHIRSIAGGSGTTLGTGGMSTKITAADIATRSGIETIIAPGNRENVIADLAHGEAIGTKFTVQTDKLESRKQWLFAAPSAGILTIDQGAENAILEQHKSLLPAGIVNIEGRFSRGEVVKIRTQQGKDIALGMPRYNSDALYLIQGKKSQNIEKILGYEYGSVAIHRDDMIVLNK

SEQ ID NO: 6752 - protein, 301 aa, Lycopersicon esculentum
MNKGANGNQQLELPAGFRFHPTDDELVQHYLCRKCAGQSIAVSIIAEIDLYKFDPWQLPEKALYGEKEWYFFSPRDRKYPNGSRPNRAAGTGYWKATGADKPVGKPKTLGIKKALVFYAGKAPRGIKTNWIMHEYRLANVDRSAGKNNNLRLDDWVLCRIYNKKGTLEKHYNVDNKETTSFGEFDEEIKPKILPTQLAPMPPRPRSTPANDYFYFESSESMTRMHTTNSSSGSEHVLSPCDKEVQSAPKWDEDHRNTLDFQLNYLDGLLNEPFETQMQQQICNFDQFNNFQDMFLYMQKPY

SEQ ID NO: 6753 - protein, 339 aa, Escherichia coli
MNILVTGGAGYIGSHTSLCLLNKGYNVVIIDNLINSSCESIRRIELIAKKKVTFYELNINNEKEVNQILKKHKFDCIMHFAGAKSVAESLIKPIFYYDNNVSGTLQLINCAIKNDVANFIFSSSATVYGESKIMPVTEDCHIGGTLNPYGTSKYISELMIRDIAKKYSDTNFLCLRYFNPTGAHESGMIGESPADIPSNLVPYILQVAMGKLEKLMVFGGDYPTKDGTGVRDYIHVMDLAEGHVAALSYLFRDNNTNYHVFNLGTGKGYSVLELVSTFEKISGVRIPYEIVSRRDGDIAESWSSPEKANKYLNWKAKRELETMLEDAWRWQMKNPNGYI

SEQ ID NO: 6754 - protein, 271 aa, Triticum aestivum
EQQLALLANASLLAEELLPRAAMKLSSINQSSMDDLRKRGPDKQNRVPELREWKRKLQRMVDRLRDSFCRQHALELIFTDEGDTHLSAEMYISMDNTVEEPEWVPSPIFQELYAKLNRMAGVAADMFVGRERFATLLMMRLTETVILWLSEDQAFWEEIEQGPKPLGPLGLQQFYLDMQFVIIFGQGRFLSRHVHQVILDIIDRAMGAFSATGMNPDSVLPGDDWFMDVAQEVVGMISGRGRAANGDREINSPTASVSAHSMSSFRSHGSS

SEQ ID NO: 6755 - protein, 225 aa, Sulfolobus tokodaii str. 7
MSEKEKEGQLSEEEKAELQKSEKGAVIELLVPLDTYLSAGVHIGTHTCTKYMEKFVYRVRPEGLYVLDVRKIDERLRIAARFLSRFTPENILAVTSRPYAFTPVTKFAEVIRGRAIVGRFPPGILTNPQLPNHIEPEVIVATDPRTDLQAIKEASKVGIPVVAFADTDAKVDFVDFIIPANNKGRKSLALLYWVLARQILRERREIPPEGEIPQRVEDFETRLVE

SEQ ID NO: 6756 - protein, 527 aa, Oryza sativa
MAPVKAEELVAFVPKEQYDGVDYCITSPPPWLTAVLLAFQHYLVMLGTTVIVATILVPLMGGGHVEKAIVVQTILFLAGINTLLQVHLGTRLPAVMGASYAYIYPAVAIILSPRFAIVVDPFERFVYTMRSLQGALIIAGVVQAIIGFFGIWRIFIRFLSPLAAVPFVTLSALGLFYFAFPGVAKCIEVGLPALILLLLFTEYAAHFFARGSFLFGRCAVLATVLVVWIYAEILTAAGAYNERSLVTQFSCRADRSGLIHGAPWVRFPYPFQWGYPIFFADDCFVMIAASFVSLIESTGTLMAVTRYAGATFCPPSVFARGVGWQGISTILDGMCGTLTGSVASVENAGLLALTRVGSRRVIKISALFMIFFSLFGKFGAIIASIPLPIFSALYCVLFAYSAAAGLCFLQYCNLNTLRTKFILSISLFLGLSIPQYFREYEVFYVFGPVHTHSPAFNVIVNVIFSSPATVAAILAYLLDCTHTYWDGPVWKDRGFHWWEKFKSYRHDPRSEEFYSLPYGLSKYFPSF

SEQ ID NO: 6757 - protein, 315 aa, Novosphingobium aromaticivorans DSM 12444
MSLDTELEQLTHDHVFLGEAHEANALRTLWVVLLTAGMMVVEIAAGALFNSMALLADGFHMATHAGALGVAALAYSYARRHAKSGRYSFGTGKVGDLAGFASALVLGMVALGIAVESLQRLFDPRPVAFAEATVIAIVGLMVNLASAALLGGHHHHDHGHHDHHDHHDHHDHGHGHGHGHGHHDNNLRSAYVHVLADALTSVLAIAALLGGRYLGWNWLDPVMGLVGAAVISVWSWSLMRDTAGVLLDRHEAGLEREIRELVEGPGDAHITDLHVWRVGPGAHAAIVAARGASAADIRTRLAPVHEIAHLTVEQH

SEQ ID NO: 6758 - protein, 135 aa, Sulfolobus tokodaii str. 7
MKKMSSRREIRWGIARVYASQNNTLITITDITGAEIISRASGGMVVKADREKPSPYAAMLAANKAATEAFDKGISAIHIKVRAQGGYGSKTPGPGAQPAIRALARAGFIIGRIEDVTPIPHDSIRRPGGRRGRRV

SEQ ID NO: 6759 - protein, 425 aa, Radiomyces spectabilis
VVVIGHVDSGKSTTTGHLIYKCGGIDKRTIEKFEKEAAELGKGSFKYAWVLDKLKAERERGITIDIALWKFETPKYHVTVIDAPGHRDFIKNMITGTSQADCGILIIAAGTGEFEAGISKDGQTREHALLAFTLGVRQLIVAINKMDSTKWSEARYNEIVKEVSAFIKKIGFNPKAVPFVPISGWHGDNMLEESTNMPWFKGWTKETKAGSKTGKTLLEAIDNIEPPVRPSDKPLRLPLQDVYKIGGIGTVPVGRVETGVIKAGMVVTFAPANVTTEVKSVEMHHEQLVEGVPGDNVGFNVKNVSVKDIRRGNVCSDSKNDPAKEAGSFTAQVIVLNHPGQIGAGYAPVLDCHTAHIACKFAELLEKIDRRSGKSLEAAPKFVKSGDSAIVKMVPSKPMCVEAYTEYPPLGRFAVRDMRQTVAVG

SEQ ID NO: 6760 - protein, 238 aa, Anabaena variabilis ATCC 29413
MSSNLANKLRVGTKKAHTMAENVGFVKCFLKGVVEKNSYRKLVANFYYIYSAMEEEMEKHSQHPIVSKINFSQLNRKQTLEQDLSYYYGANWREQIQLSPAGEAYVQRIREISATEPELLIAHSYTRYLGDLSGGQILKNIAVTAMNLNDGQGTAFYEFADITDEKAFKAKYRQTLDELAIDEATADRIVDEANAAFGMNMKMFQELEGNLIKAIGMMLYNTLTRKRTRGATELATAE

SEQ ID NO: 6761 - protein, 500 aa, Myxococcus xanthus
MACSLPSRRFLSALVLLPAATLGACGQAIGTASAASPAPTAQVAAAVPAQAAPPIQKALFNPAVAGSQGGITSLAPLVDAVKGAVVNVEVRARPRRSAAMQRLPPGMAERFGLPPGFGGEGNGPARQGAGSGFIIDASGIVLTNNHVVEDADQVRVKLDDGRAFDAEVMGRDPLTDVALLKLKGAPGNLPAVPLGDSDALRVGDAVMAIGNPFGLASSVSAGILSARARDIQAGPYDEFLQTDAAINPGNSGGPLFNMQGEVVGMNTAIVGGATGIGFAVPSKLIQALLPQLKETGVVRRGWLGLAVQDLTPDLARALGLEAMKGAVVAGVNRGSPGERAGLREEDVITSVNGKPVESAGGLTRAVALLQPDSRVKVNLLRGGKAQSLDVTLGTRPAQNGEQEVLPRNASASAPRRLGVQLSDARDGGAQVVAVEPGSPAERGGLVPGMVLVQVGDQKIASVSDAAQALTAAKPGAALLLRVRMPGSESTLLRAVEVPER

SEQ ID NO: 6762 - protein, 426 aa, Rhizomucor miehei
VVVIGHVDSGKSTTTGHLIYKCGGIDKRTIEKFEKEAAELGKGSFKYAWVLDKLKAERERGITIDIALWKFETPKYHVTVIDAPGHRDFIKNMITGTSQADCGILIIAAGTGEFEAGISKDGQTREHALLAFTLGVRQLIVAINKMDSTKYSEARYNEIVKEVSTFIKKIGYNPKAVPFVPISGWNGDNMLEESPNMPWFKGWTKETKAGNKTGKTLLEAIDNIEPPVRPVDKPLRLPLQDVYKIGGIGTVPVGRVETGTIKAGMVVTFAPANVTTEVKSVEMHHEQLVEGVPGDNVGFNVKNVSVKDIRRGNVCSDSKNDPAKESASFIAQVIVLNHPGQISAGYSPVLDCHTAHIACKFAELLEKIDRRSGKKLEDSPKSVKSGDSAIVKMIPSKPMCVEAYTEYPPLGRFAVRDMRQTVAVGV

SEQ ID NO: 6763 - protein, 267 aa, Chlorobium tepidum TLS
MKENRITRLVKQDKKLLIAYYMPEFPVPGATLPVLEALQESGVDLIELGMPYSDPIGDGSVIQDAAHKAISHGVHVGSIFELVRRARNGEGCKKITTPILLMGYCNPLIAYGGDCFMADAVKAGVDGLLIPDLPPEESEDFLERAKHFGLSVIYLISPVTPPDRIELIDSMSTDFSYCLAVNATTGTGKLDVAGMDEKIAEYLKRVRQHTKKKFVVGFGIKDRERVRKMWELADGAVVGSALLQHVATAKTPEETAELAAGFWKSLR

SEQ ID NO: 6764 - protein, 402 aa, Rhizomucor pusillus
GKSTTTGHLIYKCGGIDKRTIEKFEKEAAELGKGSFKYAWVLDKLKAERERGITIDIALWKFETPKYHVTVIDAPGHRDFIKNMITGTSQADCGILIIAAGTGEFEAGISKDGQTREHALLAFTLGVRQLIVAINKMDSTKYSEARYNEIVKEVSTFIKKIGYNPKAVPFVPISGWNGDNMLEESPNMPWFKGWTKETKAGNKTGKTLLEAIDNIDPPVRPVDKPLRLPLQDVYKIGGIGTVPVGRVETGTIKAGMVVTFAPANVTTEVKSVEMHHEQLAEGVPGDNVGFNVKNVSVKDIRRGNVCSDSKNDPAKESASFTAQVIVLNHPGQISAGYSPVLDCHTAHIACKFAELLEKIDRRSGKKLEDSPKAVKCGDSAIVKMIPTKPMCVEAYTEYPPLG

SEQ ID NO: 6765 - protein, 554 aa, Bacillus cereus ATCC 10987
MKRFVLTAVTVSAISLIAACSATTNTTSDQKNMNDKKVTQTETATKPLQVVKGPEVTLVAKEEKQKLSNGVVVPVWTFNGSSPGPEIRVKKGDKVKVTLKNELSAPASIHWHGYPVPNNMDGIPGVTQDAVEPGKSFTYEFEANVPGTYWYHSHQDSVNQLDRGLYGALVVEDTNEKYDKDYTLMLDEWVTDKKEIDKQIKEMTKGKVEKTDGDAKKNDDMKGMDHSGMDMGSDKKDSGSMEGMDHGNMKMDKNKESNGMQMEGHDMSMYDLFTINGKSGDLIEPLKVKKGDKVRLRFVNAGYLSHDIHVHGHDIKVIATDGQPINDPKVIKDQVISIAPGERYDVEFTANNPGKWYVEDHAKDKGAKGMKAVIEYDGSKEMKDKANEKEKLPKLDMTKYGAKKLGGFTLDQQYTATYTMDLNTQMNGNEMVYTINGKTFPDIDPIQVKKGDLVKVKLVNKSKTDDHPMHLHGHFFQVLSKDGKPIEGSPIIKDTLNLKPGEEYEVAFVADNPGEWMFHCHDLHHASAGMVTEVKYKDYKSDYVPNPNIPNMPE

SEQ ID NO: 6766 - protein, 96 aa, Shewanella sp. MR-7
MNIRPLHDRVIVKRLEVESTSAGGIVLTGSAAEKSTRGEVLAVGNGRILENGTVRPLDVKVGDVVIFNEGYGVKKEKIDGQEVLILSEADLMAIVG

SEQ ID NO: 6767 - protein, 413 aa, Acinetobacter sp. ADP1
MYSNNQRSRIGSHTWKIAFLFAFLALLVDGADLMLLSYSLNSIKAEFNLSTVEAGMLGSFTLAGMAIGGIFGGWACDRFGRVRIVVISILTFSILTCGLGLTQSFIQFGVLRFFASLGLGSLYIACNTLMAEYVPTKYRTTVLGTLQAGWTVGYIVATLLAGWLIPDHGWRVLFYVAIIPVLMAVLMHFFVPEPAAWQQSRLAPSKQTETVKTSAFKLIFQDKRNRNMFILWALTAGFLQFGYYGVNNWMPSYLESELGMKFKEMTAYMVGTYTAMILGKILAGFMADKLGRRFTYAFGAIGTAIFLPLIVFYNSPDNILYLLVIFGFLYGIPYGVNATYMTESFPTAIRGTAIGGAYNVGRLGAAIAPATIGFLASGGSIGLGFVVMGAAYFICGVIPALFIKEKQYDPQQS

SEQ ID NO: 6768 - protein, 545 aa, Shewanella sp. MR-7
MAAKEVVFGNDARVKMLAGVNILANAVKVTLGPKGRNVVLDKSFGSPLITKDGVSVAKEIELEDKFENMGAQMVKEVASKANDAAGDGTTTATVLAQAIVTEGLKAVAAGMNPMDLKRGIDKAVAAAVIELKNLSQDCADSKAIAQVGTISANSDESIGEIIATAMEKVGKEGVITVEEGQALENELDVVEGMQFDRGYLSPYFINKPETGSVELDHPFVLLVDKKISNIRELLPILEGLAKTGKPLLIVAEDVEGEALATLVVNNMRGIVKVAAVKAPGFGDRRKAMLQDVAILTGGTVIAEEIGLELEKATLEDLGTAKRVVITKDNTTIIDGNGEQAQIEARVSQIKQQIEESTSDYDKEKLQERMAKLAGGVAVIKVGAATEVEMKEKKARVEDALHATRAAVEEGVVPGGGVALVRVASKIADVEVANEDQKHGVVIALRAMEAPLRQIATNAGEEASVVANTVKNGSGNYGYNAGNDTYGDMLEMGILDPTKVTRSALQFAASIAGLMITTEAMVAELPKADAPDMGGMGGMGGMGGMM

SEQ ID NO: 6769 - protein, 365 aa, Rhizopus azygosporus
GKSTTTGHLIYKCGGIDKRTIEKFEKEAAELGKGSFKYAWVLDKLKAERERGITIDIALWKFETPKYNVTVIDAPGHRDFIKNMITGTSQADCGILIIAAGTGEFEAGISKDGQTREHALLAFTLGVRQLIVAINKMDTTKWSEARYNEIVKEVSSFIKKIGYNPKSVPFVPISGWHGDNMLEESTNMPWFKGWTKETKAGNKTGKTLLEAIDNIDPPTRPVDKPLRLPLQDVYKIGGIGTVPVGRVETGVIKAGMVVTFAPANVTTEVKSVEMHHETLTEGLPGDNVGFNVKNVSVKDIRRGNVCSDSKNDPAKESGSFTAQVIILNHPGQIGAGYAPVLDCHTAHIACKFAELIEKIDRRSGK

SEQ ID NO: 6770 - protein, 227 aa, Bacillus cereus ATCC 10987
MIDILLVDDEPRMLDLLSLYLTPRGYHCIKATSGKEAISLVEAKEFRLLLLDIMMPEMNGWETCNKIREFSSVPIIMLTARDDTQDVIQGLKKGADDYVTKPFHEEELLARIEAVLRRTKRHHKIEYKGLIWDEARHTAAMNGNELLFTPIEFSLLGLFLNNLNYVFTREQLIERIWGHASETEDRTVDSHIRNLREKLRKASFPINEHLKTIYGIGYRWAHEEKDI

SEQ ID NO: 6771 - protein, 269 aa, Oryza sativa
MRSPAALLPVVADGGGGVGVEEEMDVDEDMAMCGGRGGGGGEKKRRLSVEQVRALERSFETENKLEPERKARLARDLGLQPRQVAVWFQNRRARWKTKQLERDYAALRQSYDALRADHDALRRDKDALLAEIKELKGKLGDEDAAASFSSVKEEEDPAASDADPPATGAPQGSSESDSSAVLNDAEILPHKPAPAAAADAAASEETEAVVTGAALLHHAEVFFHGQLLKVDDDEAAFLGDDGAACGGFFADEHLPSLPWWAEPTEQWTT

SEQ ID NO: 6772 - protein, 330 aa, Oryza sativa (japonica cultivar-group)
MGNSRRPAAAATAPSPSPPASDLEVGFAKLQGEDFEYYMQTYSIVLGRHSRRRNQPVGVGVGVGVGGGGGGGGDAAADDVDVDLGILGGGMNVSRRHARIFYDFPRRRFALEVLGKNGCLVEGVLHEPGGEPVKLDSQDLLQMGDAQFYFLLPTRSVFATDAARRASAAARRAVPPPPSSSSDGDDGEEEREAAVAKRPRNGDAGSLAGRKSEKGSKGYRQSDNLQLLQLEEKDVISSTATVLSDLCGPQEWVPMDRLHEVMFEKYGDLWHHNRVRKYLTSEDWPKSETDGRPWHGLSLLLRKYPEHFVINIRMSGGRSIEFVSLVSLQP

SEQ ID NO: 6773 - protein, 388 aa, Zea mays
SFQIGLPAKFTIFNFGAQKDVSNWGLFFCVAVGLWAGLIIGFVTEYYTSNAYSPVQDVADSCRTGAATNVIFGLALGYKSVIIPIFAIAVSIYVSFSIAAMYGIAMAALGMLSTMATGLAIDAYGPISDNAGGIAEMAGMSHRIRERTDALDAAGNTTAAIGKGFAIGSAALVSLALFGAFVSRAGVKVVDVLSPKVFIGLIVGAMLPYWFSAMTMKSVGSAALKMVEEVRRQFNTIPGLMEGTAKPDYATCVKISTDASIKEMIPPGALVMLTPLIVGTLFGVETLSGVLAGALVSGVQIAISASNTGGAWDNAKKYIEAGASEHARTLGPKGSDCHKAAVIGDTIGDPLKDTSGPSLNILIKLMAVESLVFAPFFATQGGLLFKYL

SEQ ID NO: 6774 - protein, 394 aa, Anabaena variabilis ATCC 29413
MVSNNVLNEFKTCTQLQYNGQLIINSPKGQQWTFYYRLGRIVWATGGTHPFRRWRRLMAQHCPQIDVDKMQLRPQDISMSYWDYRLLEILYKKQKIQREQIHNIVDNTINELLFELAQQSNFVSISCERNQKVILETPMSFTSADVSMKQMLESWKNWSEAGLVNICPDLAPVICRPEQLQQQVSPSVYKNFVTLINGKSTLRDLAAKMKQNVLPVSRSLLPYVLKGIIELVELPDLPLAVVETLNKATSAQPTKSKVPVIACVDDSPQVCKLLEDIITANGMKFIKIQDAVQALPLLIQEKPDLIFLDLIMPVASGYEICTQLRRIPTFANTPVIILTGNDGLLDRVRAKVVGSTDFLTKPVAADRVMSVVRKYLPMQTTSPAKTGSHLEFCQ

SEQ ID NO: 6775 - protein, 140 aa, Arabidopsis thaliana
  misc_feature (31)..(31): Xaa can be any naturally occurring amino acid
  misc_feature (67)..(67): Xaa can be any naturally occurring amino acid
  misc_feature (73)..(73): Xaa can be any naturally occurring amino acid
  misc_feature (79)..(79): Xaa can be any naturally occurring amino acid
  misc_feature (132)..(132): Xaa can be any naturally occurring amino acid
  unsure (1)..(140): unsure at all Xaa locations
PFVLHTDCPHYWRFHLPGETEEEFSTRLAKXLEDLIIKEGPETIGAFIAEPVMGAGGVIPPPATYFXKVQAVXKKYDIXFIADEVICAFGRLGTMFGCDKYNIKPDLVTLAKGLSSAYMPIGAILMSPEVAXVINSHSTS

SEQ ID NO: 6776 - protein, 220 aa, Corynebacterium diphtheriae NCTC 13129
MGWLFGAPRLVEEKDALKGGPHPVLPNPQPHAVLGTLRGQPGTETIYIGIGCYWGAEKLFWETPGVVYTSVGFAGGITPNPTYRETCTGRTNHTEIVEVVYDPTQVTFDELVVKAMEAHDPTQGYRQGNDTGTQYRSAIYTAGPNAEQQAQRAREIVEHYAPKLAAAGLGRITTEILPLASTPAGEYYMAEDEHQQYLHKNPLGYCPHHSTGVACGIPEA

SEQ ID NO: 6777 - protein, 329 aa, Frankia sp. EAN1pec
MRILVTGASGFVGGVTADLLSAAGHQVTALVRDATARTRLSRVIEVVQADLLEPRQLAAAGVSRGFDGVCHLAALTRVRESRETPLRYFAANVTGTTNLLAALDAGTRATGVAPRFVFGSSCAVYGDTGTSPIPETRAPAPTNPYGASKLAAEQAVAYQAATGRLGAVVLRSFNVAGAVGSHADRDSSRIIPAALGVATGRRDAFRVNGDGASIREYVHVVDMARAYLTALRATVPGRCTVYNVGSGLGVSVTDVLRTVESVTGRDVPRVTLPPVPEPRALIADSRRIRADLGWTSPSSTIEKIVTDAWRSTAVPEPVAARRGDVPIVS

SEQ ID NO: 6778 - protein, 551 aa, Escherichia coli O157:H7 EDL933
MTNLPHWWQNGVIYQIYPKSFQDTTGSGTGDLRGVIQRLDYLHKLGVDAIWLTPFYVSPQVDNGYDVANYTAIDPTYGTLDDFDELVTQAKSRGIRIILDMVFNHTSTQHAWFREALNKESPYRQFYIWRDGEPETPPNNWRSKFGGSAWRWHAESEQYYLHLFAPEQADLNWENPAVRAELKKVCEFWADRGVDGLRLDVVNLISKDPRFPDDLDGDGRRFYTDGPRAHEFLHEMNRDVFTPRGLMTVGEMSSTSLEHCQRYAALTGSELSMTFNFHHLKVDYPGGEKWTLAKPDFVALKTLFRHWQQGMHNVALNALFWCNHDQPRIVSRFGDEGEYRVPAAKMLAMVLHGMQGTPYIYQGEEIGMTNPHFTRITDYRDVESLNMFAELRNDGRDADELLAILASKSRDNSRTPMQWSNGDNAGFTAGEPWIGLGDNYQQINVEAALADESSVFYTYQKLIALRKQEAILTWGNYQDLLPNSPVLWCYRREWKGQTLLVIANLSREIQPWQPGQMRGNWQLVMHNYEEASPQPCAMTLRPFEAVWWLQK

SEQ ID NO: 6779 - protein, 185 aa, Pharus virescens
EMRRIENKINRQVTFAMRRNGLLKKAYELSVLCDAEVALIIFSNRGKLYEFCSGQSMTKTLERYQKCSYGGPETAIQNKENELVQSSRNEYLKLKARVENLQRTQRNLLGEDLGSLGIKELEQLEKQLDSSLRHIRSTRTQQMLDQLTDLQRREQMLCEANKCLRRKLEESNQVHGQQVWEHGAN

SEQ ID NO: 6780 - protein, 114 aa, Arabidopsis thaliana
MDRIKEKFPLGEKPGGDDVPVVTTMPAPHSVEDHKPEEEEKKGFMDKIKEKLPGHSKKPEDSQVVNTTPLVETATPIADIPEEKKGFMDKIKEKLPGYHAKTTGEEEKKEKVSD

SEQ ID NO: 6781 - protein, 355 aa, Rhodococcus sp.
SIDSALNWDGEMTVTRFDAMTGAHFVIRLDSTQLGPAAGGTRAAQYSNLADALTDAGKLAGAMTLKMAVSNLPMGGGKSVIALPAPRHSIDPSTWARILRIHAENIDKLSGNYWTGPDVNTNSADMDTLNDTTEFVFGRSLERGGAGSSAFTTAVGVFEAMKATVAHRGLGSLDGLTVLVQGLGAVGGSLASLAAEAGAQLLVADTDTERVAHAVALGHTAVALEDVLSTPCDVFAPCAMGGVITTEVARTLDCSVVAGAANNVIADEAASDILHARGILYAPDFVANAGGAIHLVGREVLGWSESVVHERAVAIGDTLNQVFEISDNDGVTPDEAARTLAGRRAREASTTTATA

SEQ ID NO: 6782 - protein, 355 aa, Rhodococcus sp.
SIDSALNWDGEMTVTRFDSMTGAHFVIRLDSTQLGPAAGGTRAAQYSQLADALTDAGKLAGAMTLKMAVSNLPMGGGKSVIALPAPRHSIDPSTWARILRIHAENIDKLSGNYWTGPDVNTNSADMDTLNDTTEFVFGRSLERGGAGSSAFTTAVGVFEAMKATVAHRGLGSLDGLTVLVQGLGAVGGSLASLAAEAGAQLLVADTDTERVAHAVALGHTAVALEDVLSTPCDVFAPCAMGGVITTEVARTLDCSVVAGAANNVIADEAASDILHARGILYAPDFVANAGGAIHLVGREVLGWSESVVHERAVAIGDTLNQVFEISDNDGVTPDEAARTLAGRRAREASTTTATA

SEQ ID NO: 6783 - protein, 355 aa, Rhodococcus sp.
SIDSALNWDGEMTVTRFDSMTGAHFVIRLDSTQLGPAAGGTRAAQYSNLADALTDAGKLAGAMTLKMAVSNLPMGGGKSVIALPAPRHSIDPSTWARILRIHAENIDKLSGNYWTGPDVNTNSADMDTLNDTTEFVFGRSLERGGAGSSAFTTAVGVFEAMKATVAHRGLGSLDGLTVLVQGLGAVGGSLASLAAEAGAQLLVADTDTERVAHAVALGHTAVALEDVLSTPCDVFAPCAMGGVITTEVARTLDCSVVAGAANNVIADEAASDILHARGILYAPDFVANAGGAIHLVGREVLGWSESVVHERAVAIGDTLNQVFEISDNDGVTPDEAARTLAGRRAREASTTTATA

SEQ ID NO: 6784 - protein, 474 aa, Aspergillus niger
MASTLRLGTSALRSTSIAAKPVVQSAAFNGLRCYSTGKAKSLKETFAEKLPAEIEKVKKLRKEHGSKVIGEVTLDQAYGGARGVKCLVWEGSVLDSEEGIRFRGRTIPECQELLPKAPGGQEPLPEGLFWLLLTGEIPTEQQVRDLSAEWAARSDLPKFIEELIDRCPSTLHPMSQFSLAVTALEHESAFAKAYAKGINKKDYWNYTFEDSMDLIAKLPTIAAKIYRNVFKDGKVAPIQKDKDYSYNLANQLGYGDNNDFVELMRLYLTIHSDHEGGNVSAHTTHLVGSALSSPMLSLAAGLNGLAGPLHGLANQEVLNWLTKMKAAIGNDLSDEAIKNYLWSTLNAGQVVPGYGHAVLRKTDPRYVSQREFALRKLPDDPMFKLVSQVYKIAPGVLTEHGKTKNPYPNVDAHSGVLLQYYGLTEANYYTVLFGVSRALGVLPQLIIDRALGAPIERPKSYSTEAFAKLVGAKL

SEQ ID NO: 6785 - protein, 355 aa, Rhodococcus sp.
SIDSALNWDGEMTVTRFDKMTGAHFVIRLDSTQLGPAAGGTRAAQYSQLADALTDAGKLAGAMTLKMAVSNLPMGGGKSVIALPAPRHSIDPSTWARILRIHAENIDKLSGNYWTGPDVNTNSADMDTLNDTTEFVFGRSLERGGAGSSAFTTAVGVFEAMKATVAHRGLGSLDGLTVLVQGLGAVGGSLASLAAEAGAQLLVADTDTERVAHAVALGHTAVALEDVLSTPCDVFAPCAMGGVITTEVARTLDCSVVAGAANNVIADEAASDILHARGILYAPDFVANAGGAIHLVGREVLGWSESVVHERAVAIGDTLNQVFEISDNDGVTPDEAARTLAGRRAREASTTTATA

SEQ ID NO: 6786 - protein, 199 aa, Triticum aestivum
  misc_feature (65)..(65): Xaa can be any naturally occurring amino acid
  misc_feature (76)..(76): Xaa can be any naturally occurring amino acid
  misc_feature (90)..(90): Xaa can be any naturally occurring amino acid
  misc_feature (100)..(100): Xaa can be any naturally occurring amino acid
  misc_feature (124)..(124): Xaa can be any naturally occurring amino acid
  misc_feature (132)..(132): Xaa can be any naturally occurring amino acid
  misc_feature (134)..(134): Xaa can be any naturally occurring amino acid
  misc_feature (141)..(141): Xaa can be any naturally occurring amino acid
  misc_feature (143)..(143): Xaa can be any naturally occurring amino acid
  misc_feature (146)..(146): Xaa can be any naturally occurring amino acid
  misc_feature (151)..(151): Xaa can be any naturally occurring amino acid
  misc_feature (154)..(154): Xaa can be any naturally occurring amino acid
  misc_feature (158)..(158): Xaa can be any naturally occurring amino acid
  misc_feature (165)..(165): Xaa can be any naturally occurring amino acid
  misc_feature (173)..(173): Xaa can be any naturally occurring amino acid
  unsure (1)..(199): unsure at all Xaa locations
GFLTKARKYTFFKPKFIFYATYLSEKIGYWRYITIFRHLKANPEYQVYPIFKVTSENWVPRTEEXRHGDSSSALLXGASRIPSNGLGRPXSWARFFRLSXCYITMLPERTANVMPSYERNLALXTQDSDMHXTXETNRTTXRXFPXVPDVXNPXFKRXLDRMVIXTEIISIGXPTTSPGENLKRSPYANCRILKQSIGR

SEQ ID NO: 6787 - protein, 552 aa, Sarcina ventriculi
MKITIAEYLLKRLKEVNVEHMFGVPGDYNLGFLDYVEDSKDIEWVGSCNELNAGYAADGYARLRGFGVILTTYGVGSLSAINATTGSFAENVPVLHISGVPSALVQQNRKLVHHSTARGEFDTFERMFREITEFQSIISEYNAAEEIDRVIESIYKYQLPGYIELPVDIVSKEIEIDEMKPLNLTMRSNEKTLEKFVNDVKEMVASSKGQHILADYEVLRAKAEKELEGFINEAKIPVNTLSIGKTAVSESNPYFAGLFSGETSSDLVKELCKASDIVLLFGVKFIDTTTAGFRYINKDVKMIEIGLTDCRIGETIYTGLYIKDVIKALTDAKIKFHNDVKVEREAVEKFVPTDAKLTQDRYFKQMEAFLKPNDVLVGETGTSYSGACNMRFPEGSSFVGQGSWMSIGYATPAVLGTHLADKSRRNILLSGDGSFQLTVQEVSTMIRQKLNTVLFVVNNDGYTIERLIHGPEREYNHIQMWQYAELVKTLATERDIQPTCFKVTTEKELAAAMEEINKGTEGIAFVEVVMDKMDAPKSLRQEASLFSSQNNY

SEQ ID NO: 6788 - protein, 294 aa, Rickettsia helvetica
DFLEVAYLLIYGELPSSEQYNNFTKQVAHHSLVNERLHYLFQTFCSSSHPMAIMLAAVGSLSVFYPDLLNCKEADYKLTAIRMIAKIPTIAAMSYKYSIGQPFIYPDNSLDFTENFLHMMFATPCTKYKVNPIIKNALNKIFILHADHEQNASTSTVRIAGSSGANPFACISTGIASLWGPAHGGANEAVINMLKEIGSSENIPKYIAKAKDKNDPFRLIGFGHRVYKNYDPRAAVLKETCKEVLKELGQLENNPLLQIAIELEAIALKDEYFIERKLYPNVDFYSGIIYKAMG

SEQ ID NO: 6789 - protein, 599 aa, Pasteurella multocida subsp. multocida str. Pm70
MQTVNVDIAIVGAGGGGLRAAIAAAEANPNLKIALVSKVYPMRSHTVAAEGGAAAVIKEEDSYDKHFHDTVAGGDWLCEQDVVEYFVQHSPVEMTQLERWGCPWSRKQDGDVNVRRFGGMKIERTWFAADKTGFHLLHTLFQTSIQYPQIVRFDEHFVLDILVDDGHARGMVAMNMMEGTLVQINANAVVIATGGGCRAFRFNTNGGIVTGDGLSMAYRHGVPLRDMEFVQYHPTGLPNTGILMTEGCRGEGGILVNKDGYRYLQDYGLGPETPIGKPENKYMELGPRDKVSQAFWQELQKGNTLKTAKGVDVVHLDLRHLGEKYLHERLPFICELAQAYEGVDPAKAPIPVRPVVHYTMGGIEVDFNSETRIKGLFAVGECASSGLHGANRLGSNSLAELVVLGRVAGEYAAQRAVEAPAVNQTAVDAQARDIVQRLEDLYHQEGNESWSEIRDEMGDAMEEGCGIYRTQESMQKAVDKIAELKERYKRIRITDRSSVFNTNVLYTVELGYILDVAQSIANSAIERKESRGAHQRLDYTERDDVNYLKHTLAFYNGDDAPRIEYSDVKITKSQPAKRVYGAEAEAQEAAKANKENANG

SEQ ID NO: 6790 - protein, 185 aa, Zea mays
  misc_feature (76)..(76): Xaa can be any naturally occurring amino acid
  unsure (1)..(185): unsure at all Xaa locations
LVSTSRLRVHTLSTVLVSFSLFTHAFILPLIALCPFQDERCSKLKIYPILQKVYLERILRKPEIDAFAEELRPHQXKALLPDKSTVLDRAMIEHNLLSASKLYTNISFDELGTLLGIDPRKAEKIASRMIYEDRMRGSIDQVEAVIHFDDDTEELQQWDQQIAGLCQALNDILDSMSSKGITIPG

SEQ ID NO: 6791 - protein, 154 aa, Vibrio vulnificus
MHKKSSTLIRKREISDVTKESKVVLKSDQQWREQLSEQEYHVCREQGTEPPFSGKLLHNKDSGEYACTCCHAPLFSSVNKYDSGCGWPSFDAPINETAVLYLDDFSHGMKRVEIRCARCDSHLGHVFPDGPKTTGERFCVNSVSLIFNKIETNE

SEQ ID NO: 6792 - protein, 417 aa, Rhizopus microsporus var. microsporus
GKSTTTGHLIYKCGGIDKRTIEKFEKEAAELGKGSFKYAWVLDKLKAERERGITIDIALWKFETPKYNVTVIDAPGHRDFIKNMITGTSQADCGILIIAAGTGEFEAGISKDGQTREHALLAFTLGVRQLIVAINKMDTTKWSEARYNEIVKEVSSFIKKIGYNPKSVPFVPISGWHGDNMLEESNNMPWFKGWTKETKAGNKTGKTLLEAIDNIDPPTRPVDKPLRLPLQDVYKIGGIGTVPVGRVETGVIKAGMVVTFAPANVTTEVKSVEMHHETLTEGLPGDNVGFNVKNVSVKDIRRGNVCSDSKNDPAKESGSFTAQVIILNHPGQIGAGYAPVLDCHTAHIACKFAELIEKIDRRSGKKLEDAPKFVKSGDSAIVKMVPSKPMCVEAYTDYPPLGRFAVRDMRQTVAVGV

SEQ ID NO: 6793 - protein, 233 aa, Pirellula sp. 1
MQVFESLDELSNAAADAFCKAAKEAIEQRGVFRVTLSGGSTPKRLYELLATKELPWQNIEFYWGDERNVTEDNLDSNYRMVREALLSHLPADSLHAFPVPVDPDNPAATAEAYEKTLRETFAGSDVPTWDLALLGMGDDAHTASLFPETKAIEQNDRWFVENWVPKMKTYRYTLTAPAINSARQRWFLIGGSNKRQALASVRSSASDLPAALFPSRLIESPTWFVTRDAVATA

SEQ ID NO: 6794 - protein, 386 aa, Lactococcus lactis subsp. lactis
MDSPKTLARVEVKENGDTFNVKAYEKAVKSYITKRKPLGEALDEEIMDELSVKFGIVDDALEDLFKQIQDAGISIVDKDGNPSPLALVTDEIEKEEVSDTAMDEIVTNVRIDDPVRMYLKEIGRYPLISLDEETKLAEAIIAGGEGAEFAKQMLAEANLRLVVSIAKRYSGRGMQFLDLIQEGNMGLMKAVDKFDHTKGFKFSTYATWWIRQAITRAIADQARTIRIPVHMVETINKLIRVQRNLLQELGRDPSPEEIGKELHMAPDKVREVLKIAQEPVSLETPIGEEDDSHLGDFIEDDVIESPVDYTNRILLREQLDEVMDTLTDREENVLRMRFGLDDGRMHTLEDVGKQFKVTRERIRQIEAKAIKKLRHPRRSKPLRDFM

SEQ ID NO: 6795 - protein, 417 aa, Rhizopus microsporus var. rhizopodiformis
GKSTTTGHLIYKCGGIDKRTIEKFEKEAAELGKGSFKYAWVLDKLKAERERGITIDIALWKFETPKYNVTVIDAPGHRDFIKNMITGTSQADCGILIIAAGTGEFEAGISKDGQTREHALLAFTLGVRQLIVAINKMDTTKWSEARYNEIVKEVSSFIKKIGYNPKSVPFVPISGWHGDNMLEESTNMPWFKGWTKETKAGNKTGKTLLEAIDNIDPPTRPVDKPLRLPLQDVYKIGGIGTVPVGRVETGVIKAGMVVTFAPANVTTEVKSVEMHHETLAEGLPGDNVGFNVKNVSVKDIRRGNVCSDSKNDPAKESGSFTAQVIILNHPGQIGAGYAPVLDCHTAHIACKFAELIEKIDRRSGKKLEDAPKFVKSGDSAIVKMVPSKPMCVEAYTDYPPLGRFAVRDMRQTVAVGV

SEQ ID NO: 6796 - protein, 401 aa, Acinetobacter sp. ADP1
MLNAYIYDGLRTPFGRHAGELASIRPDDLAGLVIQRLIEKTGVAGADIEDVIFGDTNQAGEDSRNIARHAALLAGLPVTVPGQTVNRLCASGLAAIIDSARAITCGEGDLYIAGGVESMSRAPFVMGKAESAYSRDAKIYDTTIGTRFPNKKIVAQYGGHSMPETGDNVAVEYGISREQADLFAAQSQAKYQKALEEGFFAGEITAVEVSQGKKLPPKQVTEDEHPRPSSTLEALSKLKPLFEGGVVTAGNASGINDGAAALLIGSEVAGQKYGLTPMAKILSAAAAGVEPRIMGAGPIEAIKKAVARAGLTLDDLDIIEINEAFASQVLSCLKGLGIDFNDPRVNPNGGAIAVGHPLGASGARLALTVARELQRRNKKYAVVSLCIGVGQGLAMVIENVS

SEQ ID NO: 6797 - protein, 257 aa, Glycine max
LDSLYFELVDWTPELHRRFVQAVEQLGVDKAVPSRILEIMGIDCLTRHNIASHLQKYRSHRKHLLAREAEAASWSQRRQLYAGGGKREGNPWLAPIMGFPPMTTPMHHFRPLHVWGHPSMSLVHMWPKHLSNSPPLLWPLSPPAVPPQDPSFWQQLAPNALIPGTACFPQLLTPTRFGSPPVPGIPPHAMYKADHDIGLPGPLFDFYPSKECIDAAIGDVLSKPWLPLPIGLKAPALDSVMSELQRQGIPNIPPSSA

SEQ ID NO: 6798 - protein, 417 aa, Rhizopus microsporus var. oligosporus
GKSTTTGHLIYKCGGIDKRTIEKFEKEAAELGKGSFKYAWVLDKLKAERERGITIDIALWKFETPKYNVTVIDAPGHRDFIKNMITGTSQADCGILIIAAGTGEFEAGISKDGQTREHALLAFTLGVRQLIVAINKMDTTKWSEARYNEIVKEVSSFIKKIGYNPKSVPFVPISGWHGDNMLEESNNMPWFKGWTKETKAGNKTGKTLLEAIDNIDPPTRPVDKPLRLPLQDVYKIGGIGTVPVGRVETGVIKAGMVVTFAPANVTTEVKSVEMHHETLTEGLPGDNVGFNVKNVSVKDIRRGNVCSDSKNDPAKEAGSFTAQVIVLNHPGQIGAGYAPVLDCHTAHIACKFSELIEKIDRRSGKSLEAEPKFVKSGDSAIVKMIPSKPMCVEAYTDYPPLGRLAVRDMRQTVAVGV

SEQ ID NO: 6799 - protein, 417 aa, Rhizopus oryzae
GKSTTTGHLIYKCGGIDKRTIEKFEKEAAELGKGSFKYAWVLDKLKAERERGITIDIALWKFETPKYQITVIDAPGHRDFIKNMITGTSQADCAILIIAGGTGEFEAGISKDGQTREHALLAFTLGVRQLIVAVNKMDTTKWSEARFNEIVKEVSSFIKKIGYNPKSVPFVPISGWHGDNMLEESTNMPWYKGWNKETKAGAKSGKTLLDAIDNIDPPTRPVDKPLRLPLQDVYKIGGIGTVPVGRVETGVIKAGMVVTFAPAAVTTEVKSVEMHHETLTEGLPGDNVGFNVKNVSVKDIRRGNVCSDSKNDPAKEAGSFTAQVIILNHPGQIGAGYAPVLDCHTAHIACKFAELIEKIDRRSGKSLEATPKFVKSGDSAIVKMIPSKPMCVEAYTDYPPLGRFAVRDMRQTVAVGV

SEQ ID NO: 6800 - protein, 165 aa, Anabaena variabilis ATCC 29413
MKMELKSGSTETPMEKATFGAGCFWGVEAAFRQVKGVVSTSVGYMGGHFPNPCYLDVLSRITGHAEVVQIEYDPQLVSYEDLLAVFWDIHDPTTLNRQGPDKGEQYRSVIFFHNEQQAEAARQSKAKLQVSGRFERDIVTEIKHKSEYYLATEEHQQYFEKQAKR

SEQ ID NO: 6801 - protein, 149 aa, Ustilago maydis 521
MADQLTEDQIAEFKEAFSLFDKDGDGTITTKELGTVMRSLGQNPTEAELQDMVNEVDADGNGTIDFPEFLTMMARKMKDTDSEEEIKEAFKVFDKDGNGFISAAELRHVMTNLGEKLSDNEVDEMIREADVDGDGQINYDEFVKMMLSK

SEQ ID NO: 6802 - protein, 417 aa, Rhizopus stolonifer
GKSTTTGHLIYKCGGIDKRTIEKFEKEAAELGKGSFKYAWVLDKLKAERERGITIDIALWKFETPKYQITVIDAPGHRDFIKNMITGTSQADCAVLIIAGGTGEFEAGISKDGQTREHALLAFTLGVRQLIVAVNKMDTTKWSEARFNEIVKEVSSFIKKIGYNPKSVPFVPISGWHGDNMLDESTNMPWYKGWNKETKAGAKSGKTLLEAIDNIDPPTRPSDKPLRLPLQDVYKIGGIGTVPVGRVETGVIKAGMVVTFAPAAVTTEVKSVEMHHETLSEGAPGDNVGFNVKNVSVKDIRRGNVCSDSKNDPAKEAGSFTAQVIVLNHPGQIGAGYAPVLDCHTAHIACKFSELIEKIDRRSGKSLEAEPKFVKSGDSAIVKMIPSKPMCVEAYTDYPPLGRFAVRDMRQTVAVGV

SEQ ID NO: 6803 - protein, 235 aa, Streptochaeta angustifolia
EMRRIENKISRQVTFAERRNGLPKKAYELSLLCDAEVALIIFSSGRLFEFSSASCMYRTLERYRTCNYRSHEAAAPIETESNYQEYLKLKTRVEFLQTTQRNLPGEDLGPLNMKELEQLENQIESSLKNIRSTKNQTLLDQLFDLRHKQQQLQDLNKDLRRKLQEVGGHDNALQVWEDGGPSGSAGHEHLQGLLQPSEIDPSLQIGYHQAYLDQLNNGQIAQYPNGHLPSSAPWI

SEQ ID NO: 6804 - protein, 357 aa, Yarrowia lipolytica CLIB122
MSSNPSFVLRKPLDLVFEDRPDPKIQDPHSVKVAVKKTGVCGSDVHYYLHGGIGDFIVKAPMVLGHESAGEVVEVGPEVKDLKVGDRVALEPGVPSRLSQEYKEGRYNLCPCMVFAATPPYDGTLCRHYIIPEDFCVKLPDHVSLEEGALVEPLSVAVHCNKLAKTTAQDVVIVFGAGPVGLLAVGVANAFGSSTIVCVDLVPEKLELAKKFGATHTFVPTKGDSPNESADKIRALIKGAGLSDSPNVALECTGAEPSIQTAVSVLATSGRLVQVGMGKDDVNFPITKCIVKEITVLGSFRYCHGDYPLAVQLVASGKIDVKKLVTNRFTFKEAEQAYKTAAEGKAIKIIIDGPEEE

SEQ ID NO: 6805 - protein, 219 aa, Sorghum bicolor
EMRRIENKISRQVTFAKRRNGLLKKAYELSVLCDAEVALIIFSSRGRLFEFSTSSCTYKTLERYRSCNFASEASAPLEAELNNYQEYLKLKTKVEFLQTTQRNLLGEDLGPLNVKELEQLENQIEISLKHIRSSKNRQMLDQLFDLKRKEQQLQDANKDLRRKGPETSEENVLRLSCQDIGCSGSSGHPGEANQERLHLALDPSLHIGYQAYRDHMNNN

SEQ ID NO: 6806 - protein, 222 aa, Chasmanthium latifolium
ELRRIENKISRQETFAKRRNGLLKKAYELSVLCDAEVAHIIFSSRGRLYEFSTSSCIYKTLERYRSCSYASEASAPMEAELSNYQGYLKLKTRVEFLLTTQRNLLGEDLGPLSAKELEQFENQVEISLKHIRSTKSRQLLDQLFELKRKEQQLQDANKDLRRKIQDTSGENMLRMTCKDIGSSGSSSGHARDAKHQELPHSGVCDPSLRIGYQAYMDQLNNE

SEQ ID NO: 6807 - protein, 373 aa, Arabidopsis thaliana
  misc_feature (171)..(171): Xaa can be any naturally occurring amino acid
  unsure (1)..(373): unsure at all Xaa locations
MGYLLEETLSSNSKTPIVIDDDNELGLMAVRLANAAAFPMVLKAALELGVFDTLYAEASRSDSFLSPSEIASKLPTTPRNPEAPVLLDRMLRLLASYSVVKCGKVSEGKGERVYRAEPICRFFLKDNIQDIGSLASQVIVNFDSVFLNTWAQLKDVVLEGGDAFGRAHGGXKLFDYMGTDERFSKLFNQTGFTIAVVKKALEVYQGFKGVNVLVDVGGGVGNTLGVVASKYPNIKGINFDLTCALAQAPSYPGVEHVAGDMFVDVPTGDAMILKRILHDWTDEDCVKILKNCWKSLPESGKVVVIELVTPDEAENGDINANIAFDMDMLMFTQCSGGKERSRAEFEALAAASGFTHCKFVCQAYHCWIIEFCK

SEQ ID NO: 6808 - protein, 338 aa, Glomerella cingulata
MAPIKVGINGFGRIGRIVFRNAIEHPEVEIVAVNDPFIETKYAAYMLKYDSTHGIFNGEIKQEGNDLVINGKTVKFYTERDPAAIPWKETGADYVVESTGVFTTTDKAKAHLQGGAKKVIISAPSADAPMYVMVVNEKSYDGSADVISNASCTTNCLAPLAKVINDKFGIVEGLMTTVHSYTATQKTVHGPSAKDWRGGRTAAQNIIPSSTGAAKAVGKVIPELNGKLTDMSMRVPTTNVSVVDLTARIEKGASYDEIKQAIKEAAEGPLKGVLAYTEDDVVSTDMIGNPNSSIFDAKAGISLNNNFVKLVSWYDNEWGYSRRVLDLLAHVAKVDASK

SEQ ID NO: 6809 - protein, 221 aa, Pennisetum glaucum
  misc_feature (12)..(12): Xaa can be any naturally occurring amino acid
  misc_feature (202)..(202): Xaa can be any naturally occurring amino acid
  unsure (1)..(221): unsure at all Xaa locations
EMRRLENKISRXVTSAKRRNGLLKKAYEVAVLCDAEVALIIFSSRGRLFEFSTSSCMYETLEQYRSCNFTSEASSAPIEAELSNYEEYLKLKTRIEFLQTTQRNLLGEDLGPLSTKELEQLENQIEISLKHIRSSKNQQMLDQLFELKRKEQQLQDSNKDLRKKIQETSEENVLRPTFQDLGACGSSGHPRDANQEYLRQLXCDPTLRIGYQSYIDHLSNE

SEQ ID NO: 6810 - protein, 287 aa, Brassica napus
  misc_feature (183)..(183): Xaa can be any naturally occurring amino acid
  misc_feature (200)..(200): Xaa can be any naturally occurring amino acid
  unsure (1)..(287): unsure at all Xaa locations
MAKDVEGAEGFAARDYEDPPPTPFFDAEELTKWSLYRAVIAEFVATRLFLYVTVLTVIGYKISSDTKAGGDECGGVGILGISWAFGGMIFILVYCTAGISGGHINPAVTFGLFLARKVSLIRAVLYMVAQCLGAICGVGFVKAFQSSYYVRYGGGANSLADGYSTGTGLAAEIIGTFVLVYTXVFSATDPKRNARDSHVXPVLAPLSNGFAVVMVHLATIPITGTGINPARSFGAAVIFNESKPWNDHWIFWVGPFIGAAIAAFYHQFVLRASGSKSLGSFRSAANV

SEQ ID NO: 6811 - protein, 109 aa, Oryza sativa (japonica cultivar-group)
MVVVAPKGCVTVRVGAEGEEQRRFAVPLAHLKHPLFGALLEEAEREYGFAQRGAIAIPCRVDRFVHVEHLIVQDLHGAAASHLLDLDSSSHHHTQIHLHLPRFAGCFRA

SEQ ID NO: 6812 - protein, 351 aa, Streptomyces avermitilis MA-4680
MSTEDLSFPEDEKVLVTGGSGFVGAHTVVRLLREGHRIRVAVRGPAQEAQVLAALRQAGVDRADLLEFAVADLSADDGWAQAMDGIAHVLHHASPFPPTPPETEDEVILPARDGALRVIAAARSAGIPRVVMTSSFAAVGYTLTPDDHYTEENWTDPNTPGLPAYHKSKVLAEAAAWDYVKTNGGIELAVVNPTGIFGPQLVDRPSGSIGLIKALMAGEMPVVPVWNFGVVDVRDVVDLHLRAMLHPAAAGERFLANSGSSSLFKIANILREQFPAAADRLPATELTIDQVREAAKTEPALKDAAVLGGRIPEISHEKASSILGWEPLDVRDTIVATAEALIELGAVTLPE

SEQ ID NO: 6813 - protein, 381 aa, Fusobacterium nucleatum subsp. nucleatum ATCC 25586
MRNVMQKEKIIQELQELKNDNRFRTVKTNDKSLYNFSSNDYLSLAHDKDLLQKFYQNYNFDNYKLSSSSSRLIDGSYLTVMRLEKKVEEIYGKPCLVFNSGFDANSSVIETFFDKKSLIITDRLNHASIYEGCINSRAKILRYKHLDVSALEKLLKKYSENYNDILVVTETVYSMDGDCAEIKQICDLKEKYNFNLMVDEAHSYGAYGYGIAYNEKLVNKIDFLVIPLGKAGASVGAYVICDEIYKNYLINKSKKFIYSTALPPVNNLWNLFVLENLVNFQDRIEKFQELVTFSLNTLKKLNLKTKSTSHIISIIIGDNLNAVNLSNNLKELGYLAYAIKEPTVPKDTARLRISLTADMKKEDIETFFKTLKAEMKKIGVI

SEQ ID NO: 6814 - protein, 917 aa, Botryotinia fuckeliana
MPSLHGLWSHINVTLANLTNNRDEDGDHIDSDTPRSGVATPQPDPSDKRTPGILHSFYGQVGLGSSSSQNSAKHISRTSQNPNTSALEGHYTSPRQRFEAEGALLKATPSSLDERRIDGGVEKENSLLPPHELLGSSQISKQQYPYPTPPVSHPSSLHKVKLSDASFEDIGNNVQKTAAPTDRDCISESIPSHARRASSMTPLSNIVTPSNVHAAHFSNPSDTPSEHKLSTPPLSRLNSEFHKSPSYDRLKKLTCDGLKSIPSTPTRALSNQTSKSDQSVMSTNSEHVAQNGKSGASERPAVTPRTDSSMGGTVVPPKGKLTVKINEARGLRRSVDPYVVAVFQRNELVSKGPQSEEDDEDDGNSHSPGGIPIGGIPIGGIPITRSGSDSGRSMAIPMKSRQSSNTSLSEYRDFKNKGRKMFTHPKWDAEAVFDVVGSDTRVNITIYDRAQQAEEFLGHVDLQANLVENVDAPVSGWFQLRGKDMTSNAGNVGEVHVEISFQRTEKRHYGPDDFQILKLIGKGTFGQVYQVRKKDTKRIYAMKVLQKKVIVQKKEVAHTVGERNILVRTATADSPFIVGLKFSFQTPTDLYLVTDYMSGGELFWHLQKEGRFDEQRAKFYIAELILALEHLHKHDIVYRDLKPENILLDANGHIALCDFGLSKANLTKNATTNTFCGTTEYLAPEVLLDEAGYTKMVDFWSLGVLVFEMCCGWSPFYAEDTQQMYKNIAFGKVRFPRDTLTTEGRNFVKGLLNRNPKHRLGATDDAEELKRHPFFQDIDWHALTQKLITPPFKPKLKSETDTSNFDPEFTNALNGASSLNARAAALAAGMATSTPLSPGMQANFKGFTFVDESSIEENMKDRIKDEYEDRMDQDNNDPERDWEDTFDIPDKSRMDRMSGVVRNHNEDERMFNGDDFH

SEQ ID NO: 6815 - protein, 504 aa, Neisseria meningitidis MC58
MTTSKCPVTHLTMNNGAPVADNQNSLTAGPRGPLLAQDLWLNEKLADFVREVIPERRMHAKGSGAFGTFTVTHDITKYTRAKIFSEVGKKTEMFARFTTVAGERGAADAERDIRGFALKFYTEEGNWDVVGNNTPVFFLRDPRKFPDLNKAVKRDPRTNMRSATNNWDFWTLLPEALHQVTIVMSDRGIPAGYRHMHGFGSHTYSFWNEAGERFWVKFHFRTQQGIKNLTNEEAAKIIADDRESHQRDLYEAIERGEFPKWTMYIQVMPEADAEKVPYHPFDLTKVWPKKDYPLIEVGEFELNRNPENFFADVEQSAFAPSNLVPGVGASPDKMLQARLFNYADAQRYRLGVNFRQIPVNRPRCPVHSNQRDGQGRADGNYGSLPHYEPNSFGQWQQQPDFAEPPLKINGDAAHWDYRQDDDDYFSQPRALFNLMNDAQKQALFGNTAAAMGDAPDFIKYRHIRNCYRCDPAYGEGVAKALGLTVEDAQAARATDPALGQAGLL

SEQ ID NO: 6816 - protein, 328 aa, Kluyveromyces lactis NRRL Y-1140
MPASSDKLQPKDQQTIELEQKLAVQSIRVFLQSKTSYDVLPVSYRLIVLDTSLLVKKSLNILLQNNVVSAPLWDAQTSKFAGLLTSSDFINVIQYYFHNPDKFELVDKLQLNGLKDIERAIGIQPYDTRSIHPFRPLYEACVKMIESRSRRIPLIDQDEETQREIVVSVLTQYRILKFVALNCKEIRYLKRPLRELDIISTNNIMSCQMSTPVIDVIQLLTLAGGVSSVPIVDEQGKLVNVYEAVDVLGLIKGGIYNDLSLSVGEALMRRSDDFEGVFTCTENDKLSSILDTVRKSRVHRFFVVDSNGFLTGVLTLSDILKYILFAES

SEQ ID NO: 6817 - protein, 415 aa, Neisseria meningitidis MC58
MSQRRVVITGLGQVSPVGNTVAEAWDTLLTGKSGIGAITRFDTSDINSRVAGEVRGFDIGQYISAKEARRMDVFIHYGIAAALQAIADSGLDDVENLDKDRIGVNIGSGIGGLPGIEVTGKAVIEGGARKINPFFIPGSLINLISGHVTILKGYRGPSYGMVSACTTGAHAIGDSLRMIKYGDADIMVAGGAEGAISTLGVGGFAAMKALSTRNDDPATASRPWDKGRDGFVIGEGAGILVLEELEHAKKRGAKIYAEIVGFGMSSDAYHITAPNEEGPALAVTRALKDAGINPEDVDYVNAHGTSTPLGDANETKALKRAFGEHAYKTVVSSTKSMTGHLLGAAGGVEAVYSILAIHDGKIPPTINIFEQDVEAGCDLDYCANEARDAEIDVAISNSFGFGGTNGTLVFKRFKG

SEQ ID NO: 6818 - protein, 461 aa, Fusobacterium nucleatum subsp. nucleatum ATCC 25586
MKVLFATGEAFPFVKTGGLGDVSYSLPKTLKQKENVDIRVILPKYSKISNELLKDARHLGHKEIWVAHHNEYVGIEEVELEGVIYYFVDNERYFKRPNVYGEFDDCERFLFFCKAVVETMDITKFKPDIIHCNDWQSALIPIYLKERGIYDVKTIFTIHNLRFQGFFFNNVIEDLLEIDRAKYFQEDGLKYYDMISFLKGGVVYSDYITTVSDSYAEEIKTQELGEGIHGLFQKYDYKLSGIVNGIDKISYPLSKKPHKILKADLQKKLGLDVEEDTPLIVIITRLDRQKGLDYIVEKFDEMMSLGIQFILLGTGEKRYEHFFAYQEYLHKGQVCSYIGFNQELSTEIYAGADIFLMPSVFEPCGLSQMIAMRYGCIPVVRETGGLKDTVKPYNEYTGEGDGFGFKQANADDMIKTLKYAIKMYHRPNVWQEIIKNAKKRDNSWDKPAKRYKELYQRLIEG

SEQ ID NO: 6819 - protein, 681 aa, Leptospira interrogans serovar lai str. 56601
MAENLAQLFRESAEKYRDLPAFFSKDSKKNYYPTTYSQLYEQGIQLAEALIELGVQQKQKVGLLADNRIEWIIADYGVILTGAANVPRGTDITDSEIVYILNHSEVEVVFIENDKMLEKFNRNKSQLTNVKTLIMMDPTSNSPGVLKMQELIEKGKALRAGGSKKAEERIAAIDPEDLFTLIYTSGTTGLPKGVMLKHSNMMHQVNYVSPMLDIKAGARLLSILPIWHVFERVVEYVCIGLGAATYYTNVRDLRQDLATVKPTFMGSAPRLWENIYNGIYTRINDPAQTPALRRGLFKLAYFFSRKKNQALRFLKGIEVDYTGRNPIVSFFYGILMFFQFLLTGPFTLTVLAGALGAYFAGTELYFLTSPFYTVAGLALVLNSFTLDKVVLAKIRAATGGQLEASISGGGALPRHVDEFFGNIGINVLEGYGMTETSPVISVRTFEKLIIGSVGVIVPKTRLQIRNDNNAVLTEIDESGNITQGKMGLKGVVFIKGPQVMKGYFKNEEATSKAISDGWMNTGDMGMINFKKTLTLTGRAKDTVVLLGGENVEPVPIENKLQESAYISQCMVIGQDQKNLGAIVVPDFEKLQEWAKENGINESNNEKLIENPKIYDLYRKEIKALNNTKNGFKSFEQVTPFILISKPFEVGDELNNMMKMKRHVITEKYSDKIKKIYSTNQD

SEQ ID NO: 6820 - protein, 387 aa, Fusobacterium nucleatum subsp. nucleatum ATCC 25586
MIRSYMAIIYLGDSKKNISPLTKVRALASIPVGGSYRIIDFSLSNVVNAGIRNVGLFCGNEELNSLTDHIGMGAEWDLARKKDGIFIFKRMLDDNFSLNQARISKNMEYFFRSTQQNIVVLNAHMVYNLDVSDLIEKHEASGKEITMVYKKVKKANEHFNHCSSVKIDENNRVIGIGQNLFFKEEENISLDAFVLSKELMLKLLVDSIQEGKYNVLSELIARNLPSLNINAYEFKGYLQCINSTREYFNFNMNLLNQKIRDDVFGIKSGRKIFTKVKDTPPTLFKETADVENSLVSNGCIIEGTVKNSILSRGAIIEKDVVLEECVILQDCHIKKGAHLKNVIVDKNNIIHENEKLSASKEYPLVIEKSMKWDTKQYQDLMDYIRNK

SEQ ID NO: 6821 - protein, 485 aa, Candida tropicalis
MAPTFTNSNGQPIPEPFATQRVGQHGPLLLQDFNLIDSLAHFDRERIPERVVHAKGSGAYGVFEVTDDITDVCAAKFLDTVGKKTRIFTRFSTVGGELGSADTARDPRGFATKFYTEEGNLDLVYNNTPVFFIRDPSKFPHFIHTQKRNPETHLKDANMFWDYLTSNEESVHQVMVLFSDRGTPASYREMNGYSGHTYKWSNNKGEWFYVQVHFISDQGIKTLTNEEAGSLAGSNPDYAQEDLFKNIAAGNYPSWTCYIQTMTEAQAKEAEFSVFDLTKVWPHGKYPMRRFGKFTLNENPKNYFAEVEQAAFSPAHTVPHMEPSADPVLQSRLFSYADTHRHRLGTNYTQIPVNCPVTGAVFNPHMRDGAMNVNGNLGNHPNYLASDKPVEFKQFSLQEDQEVWHGAATPFHWKATPADFKQATELWKVLKKYPNQQEHLAHNVAVHASAADAPIQDRVIAYFTKVHPDLGDLIKKEILELSPRK

SEQ ID NO: 6822 - protein, 406 aa, Burkholderia fungorum LB400
MHAVPPLEQDTGDATVDVSPAQAASQKSAHAPAQAANDAPVRDLRRVGIHPDYWYPLAWSHEVKRGKTHGVTFAGDPIVLARTEGGKVFALEDRCAHRQVPLHQGVVDGESIRCGYHGWTYDCSGKCIDVPYLGRERLPNGVRSYPCREVEGLIFVFPGNAALAEQRPLPDLSSVSDKKYKTRRFGRPVNCHYSFMHENLMDMNHQFLHRKQMGQMRARSLGRRTGEGWVEVDYTFARMAGQQPIGEAIVFGQSRKTGGDNDKDVMTIRTEYPYQTLQIRTSEQTLVMNLWIVYVPLDREQRTNRTFGLLSIRKPGVPGVLNLAWPLLVWFTERIFKEDREIVEAEQRAHDSQGADWNHEVFPVINELRALLRERGAPDQVVGAGTGDTEVIRFWDSRNGSPLAKS

SEQ ID NO: 6823 - protein, 247 aa, Glycine max
MGRSPCCEKAHTNKGAWTKEEDDRLISYIRAHGEGCWRSLPKAAGLLRCGKSCRLRWINYLRPDLKRGNFTEEEDELIIKLHSLLGNKWSLIAGRLPGRTDNEIKNYWNTHIRRKLLNRGIDPATHRPLNEAATAATVTTNISFGKQEQQETSSSNGSVVKGSILERCPDLNLELTISPPRQQQQTQKNLCFVCSLGLHNSKDCSCNVSNAVTVNNTTPSSAAAAAAYDFLGMKTSGVWDCTRLEMK

SEQ ID NO: 6824 - protein, 110 aa, Arabidopsis thaliana
  misc_feature (89)..(89): Xaa can be any naturally occurring amino acid
  misc_feature (91)..(91): Xaa can be any naturally occurring amino acid
  misc_feature (102)..(102): Xaa can be any naturally occurring amino acid
  misc_feature (105)..(105): Xaa can be any naturally occurring amino acid
  misc_feature (107)..(107): Xaa can be any naturally occurring amino acid
  unsure (1)..(110): unsure at all Xaa locations
MNREKLMKMANTVRTGGKGTVRRKKKAVHKTTTTDDKRLQSTLKRVGVNSIPAIEEVNIFKDDVVIQFINPKVQASIAANTWVVSGTPXQXEKLQGILPQVXSHXGXPAT

SEQ ID NO: 6825 - protein, 417 aa, Saksenaea vasiformis
GKSTTTGHLIYKCGGIDKRTIEKFEKEAAELGKGSFKYAWVLDKLKAERERGITIDIALWKFETPKYHVTVIDAPGHRDFIKNMITGTSQADCGILIIAAGTGEFEAGISKDGQTREHALLAFTLGVRQLIVAINKMDSTKWSEARYNEIVKEVSAFIKKIGFNPKAVPFVPISGWHGDNMLEESTNMPWFKGWTKETKAGSKTGKTLLEAIDNIEPPVRPSDKPLRLPLQDVYKIGGIGTVPVGRVETGVIKAGMVVTFAPANVTTEVKSVEMHHEQLAEGVPGDNVGFNVKNVSVKDIRRGNVCSDSKNDPAKESASFTAQVIVLNHPGQIGAGYAPVLDCHTAHIACKFAELLEKIDRRSGKSLESSPKYVKSGDSAIVKMVPSKPMCVESYTEYPPLGRFAVRDMRQTVAVGV

SEQ ID NO: 6826 - protein, 414 aa, Yarrowia lipolytica CLIB122
MASTDEKKVAKTINDTKTDATVPTTRADEDDDEIPMLVSGPPPTGMFQTQSEHHYSTFDVPQVEDRVPITIITGYLGSGKSTLLNFLSKQKEKKIAIILNEFGDSAEVERSLTVTQDGQIFEEWLELDNGCLCCTVKDSGVAAIENLMTKKGNFDLIMLETTGVADPGPIANMFWLDSALASSIYLDGIVTVLDATNIVKCLDDVTVDDAHHGENKELQPLSTACIQIAHADILILNKVDKIGSAEELEYIKNRIKGINGLAPIIETTYGQIELPKILNLKAYEEKVNLEHAHSHDHGWHDHRITTVSVGFPPVSLQQAEQLESYIQQATWDNQLLGVPVEIHRTKGKLVDTNGNVRVIQGVRDTYDVMDTSQVENLSEVGHKHPSKLVFIGKNLSKQLVLESFARFMGITDII

SEQ ID NO: 6827 - protein, 394 aa, Arabidopsis thaliana
MAQNGYLVPADPSAVVTVKKKTPQASWALIDATGQSEPLDVDKYEIMHRVQIHARDLRILDPNLSYPSTILGRERAIVLNLEHIKAIITSEEVLLRDPSDENVIPVVEELRRRLPVGNASHNGGQGDGKEIAGAQNDGDTGDEDESPFEFRALEVALEAICSFLAARTAELETAAYPALDELTSKISSRNLDRVRKLKSAMTRLTARVQKVRDELEQLLDDDDDMADLYLSRKLSSASSPISSIGEPNWYTTSPTIGSKISRASRASLATVHGDENDVEELEMLLEAYFMQIDSTLNRLTTLREYIDDTEDYINIQLDNHRNQLIQLELVLSSGTVCLSMYSLVAGIFGMNIPYTWNDGHGYMFKYVVGLTGTLCVVVFVIIMSYARYKGLVGS

SEQ ID NO: 6828 - protein, 459 aa, Arabidopsis thaliana
  misc_feature (69)..(69): Xaa can be any naturally occurring amino acid
  misc_feature (433)..(433): Xaa can be any naturally occurring amino acid
  unsure (1)..(459): unsure at all Xaa locations
MVRRQEEEKKAEKGMRLGKYELGRTLGEGNFGKVKFAKDTVSGHSFAVKIIDKSRIADLNFSLQIQFLXSVQIKREIRTLKMLKHPHIVRLHEVLASKTKINMVMELVTGGELFDRIVSNGKLTETDGRKMFQQLIDGISYCHSKGVFHRDLKLENVLLDAKGHIKITDFGLSALPQHFRDDGLLHTTCGSPNYVAPEVLANRGYDGAASDIWSCGVILYVILTGCLPFDDRNLAVLYQKICKGDPPIPRWLSPGARTMIKRMLDPNPVTRITVVGIKASEWFKLEYIPSIPDDDDEEEVDTDDDAFSIQELGSEEGKGSDSPTIINAFQLIGMSSFLDLSGFFEQENVSERRIRFTSNSSAKDLLEKIETAVTEMGFSVQKKHAKLRVKQEERNQKGQVGLSVTAEVFEIKPSLNVVELRKSYGDSCLYRQXVRETIKRRGHILAGARDSNLGVGVFG

SEQ ID NO: 6829 - protein, 416 aa, Spinellus fusiger
GKSTTTGHLIYKCGGIDKRTIEKFEKEAAELGKGSFKYAWVLDKLKAERERGITIDIALWKFETPKFMVTVIDAPGHRDFIKNMITGTSQADCGVLIIAAGTGEFEAGISKDGQTREHALLAFTLGVRQLIVAINKMDTTKWSEARYNEIVKEVSSFIKKIGFNPKSVPFVPISGWHGDNMLEESVNMGWFKGWTKETKAGSKTGKTLLEAIDNIEPPVRPSDKPLRLPLQDVYKIGGIGTVPVGRVETGVIKAGMIVNFAPSNVTTEVKSVEMHHEQLVEGLPGDNVGFNVKNVSVKDIRRGNVCSDSKNDPAKESGSFTAQVIVLNHPGQIGAGYSPVLDCHTAHIACKFAELLEKIDRRSGKKLEDAPKFIKSGDSAIVKMVPSKPMCVEAYTDYPPLGRLAVRDMRQTVAVG

SEQ ID NO: 6830 - protein, 550 aa, Salmonella typhimurium
MQNPYTVADYLLDRLAGCGIGHLFGVPGDYNLQFLDHVIDHPTLRWVGCANELNAAYAADGYARMSGAGALLTTFGVGELSAINGIAGSYAEYVPVLHIVGAPCSAAQQRGELMHHTLGDGDFRHFYRMSQAISAASAILDEQNACFEIDRVLGEMLAARRPGYIMLPADVAKKTAIPPTQALALPVHEAQSGVETAFRYHARQCLMNSRRIALLADFLAGRFGLRPLLQRWMAETPIAHATLLMGKGLFDEQHPNFVGTYSAGASSKEVRQAIEDADRVICVGTRFVDTLTAGFTQQLPAERTLEIQPYASRIGETWFNLPMAQAVSTLRELCLECAFAPPPTRSAGQPVRIDKGELTQESFWQTLQQYLKPGDIILVDQGTAAFGAAALSLPDGAEVVLQPLWGSIGYSLPAAFGAQTACPDRRVILIIGDGAAQLTIQEMGSMLRDGQAPVILLLNNDGYTVERAIHGAAQRYNDIASWNWTQIPPALNAAQQAECWRVTQAIQLAEVLERLARPQRLSFIEVMLPKADLPELLRTVTRALEARNGG

SEQ ID NO: 6831 - protein, 417 aa, Sporodiniella umbellata
GKSTTTGHLIYKCGGIDKRTIEKFEKEAAELGKGSFKYAWVLDKLKAERERGITIDIALWKFETPKYQITVIDAPGHRDFIKNMITGTSQADCAILIIAGGTGEFEAGISKDGQTREHALLAFTLGVRQLIVAVNKMDTTKWSEARFNEIVKEVSSFIKKIGYNPKSVPFVPISGWHGDNMLEESQNMSWYKGWNKETKAGAKSGKTLLEAIDNIDPPTRPSDKPLRLPLQDVYKIGGIGTVPVGRVETGVIKAGMVVTFAPAAVTTEVKSVEMHHETLSEGAPGDNVGFNVKNVSVKDIRRGNVCSDSKNDPAKEAGSFTAQVIILNHPGQIGAGYAPVLDCHTAHIACKFSELIEKIDRRSGKSLEAEPKFVKSGDSAIVKMTPSKPMCVEAYTDYPPLGRFAVRDMRQTVAVGV

SEQ ID NO: 6832 - protein, 249 aa, Sorghum bicolor
MEYGVADDYGYGYGGYDDQQDLPSSSSVDGDEYATVLSAPPKRPAGRTKFRETRHPVYRGVRRRGPAGRWVCEVREPNKKSRIWLGTFATAEAAARAHDVAALALRGRAACLNFADSARLLRVDPATLATPDDIRRAAIQLAEDSSSSTPDASAAAAAVAVASSASVGQATPSSSAYQAGDDATGAAMYGAEYAAAAMYGAGMDFDHSYYYDGMVGGNEWQSAGSSGWHSNVDAGDDEGAGDMSLWSYY

SEQ ID NO: 6833 - protein, 316 aa, Salmonella enterica subsp. enterica serovar Typhi
MNQLDGIKQFTTVVADSGDIESIRHYQPQDATTNPSLLLKAAGLEQYGHLIEDAIAWGKKHGGTQEQQVAAASDKLAVNFGAEILKSIPGRVSTEVDARLSFDKEKSIEKARHLVDLYQQQDVDKSRILIKLAATWEGIRAAEQLEKEGINCNLTLLFSFAQARACAEAGVYLISPFVGRIYDWYQARSPLEPYVVEEDPGVKSVRNIYDYFKQHRYETIVMGASFRRTEQILALTGCDRLTISPNLLKELKEKEEPVIRKLVPSSQMFHRPTPMTEAEFRWEHNQDAMAVEKLSEGIRLFAVDQRKLEDLLAAKL

SEQ ID NO: 6834 - protein, 417 aa, Syncephalastrum monosporum var. pluriproliferum
GKSTTTGHLIYKCGGIDKRTIEKFEKEAAELGKGSFKYAWVLDKLKAERERGITIDIALWKFETPKYHVTVIDAPGHRDFIKNMITGTSQADCGILIIAAGTGEFEAGISKDGQTREHALLAFTLGVRQLIVAINKMDSTKYSEARYNEIVKEVSTFIKKIGFNPKSVPFVPISGWNGDNMLEESSNMPWFKGWKKETKAGEKSGKTLLEAIDNIDPPVRPSDKPLRLPLQDVYKIGGIGTVPVGRVETGVIKAGMVVTFAPANVTTEVKSVEMHHEQLVEGVPGDNVGFNVKNVSVKDIRRGNVCSDSKNDPAKESASFTAQVIVLNHPGQIGAGYAPVLDCHTAHIACKFAELLEKIDRRSGKKLEESPKFVKSGDSAIVKMVPSKPMCVEAYTEYPPLGRFAVRDMRQTVAVGV

SEQ ID NO: 6835 - protein, 411 aa, Glycine max
MDSLLLRSFPNINNASSLTTTGANFSRTKSFANIYHASSYLPNASWHNRKIQKEYNFLRFRWPSLNHHYKSIEGGCTCKKCNIKFVVKATSEKSFESEPQAFDPKSILDSVKNSLDAFYRFSRPHTVIGTALSIISVSLLAVDKISDISPLFFTGVLEAVVAALFMNIYIVGSNQLFDVEIYKINKPYLPLASGEYSFETGVTIDASFSILSFWLGWVVGSWPLFWALFEIFVLGTAYSINVPLLRWKRFAVLAAMCILAVRAVIVQLAFFLHIQTHVYKRPPVFSRSLIFATAFMSFFSVVIALFKDIPDIEGDKVFGIQSFSVRLSQKPVFWTCVTLLEIAYGVALLVGAASPCLWSKIFTGLGHAVLASILWFHAKSVDLKSKASITSFYMFIWKLFYAEYLLIPFVR

SEQ ID NO: 6836 - protein, 365 aa, Syncephalastrum racemosum
GKSTTTGHLIYKCGGIDKRTIEKFEKEAAELGKGSFKYAWVLDKLKAERERGITIDIALWKFETPKYHVTVIDAPGHRDFIKNMITGTSQADCGILIIAAGTGEFEAGISKDGQTREHALLAFTLGVRQLIVAINKMDSTKYSEARYNEIVKEVSTFIKKIGFNPKSVPFVPISGWNGDNMLEESPNMPWFKGWKKETKAGEKSGKTLLEAIDNIDPPVRPSDKPLRLPLQDVYKIGGIGTVPVGRVETGVIKAGMVVTFAPANVTTEVKSVEMHHEQLVEGVPGDNVGFNVKNVSVKDIRRGNVCSDSKNDPAKESASFTAQVIVLNHPGQIGAGYAPVLDCHTAHIACKFAELLEKIDRRSGK

SEQ ID NO: 6837 - protein, 679 aa, Orobanche minor
MGTSGGGCSIVWFRRDLRVEDNPALAAGVRAGAVLPLFIWAPEEEGHYYPGRVSRWWLKQSLSHLDISLRSLGTSLVTRRSTDSVSSLLEVIKLTGAKQIFFNHLYDPISLVRDHRAKEVLTAEGVAVRSFNADLLYEPWEVHDQEGQPFTTFAGFWERCLSMPYDPEAPLLPPKRIISGDLSRCTSDTLVFEDESEKGSNALLARAWSPGWSNADKALTVFTNGPLLEYSKNRRKADSATTSFLSPHLHFGEVSVRKIFHLARIKQVLWANEGNKAGEESINLFLKSIGLREYSRYMSFNHPYSHERPLLGHLKYFPWVIDEGYFKAWRQGRTGYPLVDAGMRELWATGWLHDRIRVVVSSFFVKVLQLPWRWGMKYFWDTLLDADLESDALGWQYISGSLPDGCELDRIDNPQFDGYKCDPNGEYVRRWLPELARLPTEWIHHPWNTPESVLQAAGIELGSNYPLPIVGIDTAKARLQEALSQMWQHETASRAAIENGVEEGLGESSEFTPIAFPPNTQIDMDNEPVRNNPINAITRRYEDQMVPTMTSSLIRVVDEETSIGLDISDNDGRAEVPSNIVNFMEEPRGGPHDDNGVIVDGNDNNGFLQYEFLRGRRHSEDSTAESSSSGRRERDGGVVPVWSPSNSTYPNQFPGEDSGIGTSSSFLPRHPQSASLTSW

SEQ ID NO: 6838 - protein, 495 aa, Arabidopsis thaliana
  misc_feature (222)..(222): Xaa can be any naturally occurring amino acid
  misc_feature (257)..(257): Xaa can be any naturally occurring amino acid
  misc_feature (263)..(263): Xaa can be any naturally occurring amino acid
  misc_feature (279)..(279): Xaa can be any naturally occurring amino acid
  misc_feature (306)..(306): Xaa can be any naturally occurring amino acid
  unsure (1)..(495): unsure at all Xaa locations
MVSETTKSSPLHFVLFPFMAQGHMIPMVDIARLLAQRGVIITIVTTPHNAARFKNVLNRAIESGLPINLVQVKFPYLEAGLQEGQENIDSLDTMERMIPFFKAVNFLEEPVQKLIEEMNPRPSCLISDFCLPYTSKIAKKFNIPKILFHGMGRFCLLSMHVLRKNREILDNLKSDKELFTVPDFPDRVEFTRTQVPVETYVPAGDCKDIFDGMVEANETSYXVIVNSFKELEPAYAVAFDDGVSTLCARTGTSWTIXKAGKGXALGPNFPDIDQDECLXWLDSKKHGSVLYVCLGSICNLPVSQLXELGLGLEESQRPFIWVIRGWEKYKELVEWFSESGFEDRIQDRGLLIKGWSPQMLILSHPSVGGFLTHCGWNSTLEGITAGLPLLTWPLFADQFCNEKLVVEVLKAGVRSGVEQPMKWGEEEKIGVLVDKEGVKKAVEELMGESDDAKERRRRAKELGDSAHKAVEEGGSSHSNISFLLQDIMELAEPNN

SEQ ID NO: 6839 - protein, 582 aa, Neurospora crassa
MADNLDRVWWKDGVVYQIYPASFKDSNGDGLGDIPGIISKLDYIQNLGVDIIWVSPMFESPQIDMGYDVSNYEEVYPPYGTVKDMENLIEACHKRGMRLVLDLVVNHTSDQHAWFKESRSSKDNPKRDWYIWKPPRYAEDGTRLPPTNWRSYFSGSAWEYDEHTNEYYLHLFAKEMPDLNWESEECRKAIYDSAMRFWLDKGVDGFRVDCVNMYSKSTEFLDAPIVDSRFYEQPAWCYYANGPRMHEFLREMNEKVLDRYDAMTVGELPHTPDPKRVLDYVGRKDKQLSMVFQFDIVDIGQGGTHKYHFEEWKLPVLKKIVEKWQRFIEGTDGWTTSFCENHDQGRSISRFASDAPEYRVLSGKMLSLMMCSLTGTLFIYQGQEIGMINVPKDWPIDYYQDIESVNFYKLMAAKTNNDPEEMAYVMRSLQTLSRDNARIPMQWDDSPYAGFTERKEGAWAHVHDLYPEINVAKQLDDPNSTLSFWKDMIRFRKQHSEVLVHGTFEACDIENEKTFVFVKRFGGKRVVVTLNFSNEEQEVVLPEHEKGLKFMVGNYGNEEGGMGERRRLRPWEGRLYMAGGEA

SEQ ID NO: 6840 - protein, 584 aa, Streptococcus thermophilus CNRZ1066
MAFEIIMPKLGVDMQEGEIIEWKKQEGDVVNEGDILLEIMSDKTNMELEAEDSGVLLKITRQAGETVPVTEVIGYIGAEGEVVADNSTSAPAAEATAQLEAAGLEVPKAPSQPSPATAEKAALADNEYDIVVVGGGPAGYYAAIRGAQLGGKVAIVEKSEFGGTCLNKGCIPTKTYLKNAEILDGLKIAAGRGINLASTNYTIDMDKTVDFKNSVVKTLTGGVQGLLKANKVTIFNGLGQVNPDKTVTIGSETIKGRNIILATGSKVSRIDIPGIDSQLVMTSDDILDLRELPKSLAVMGGGVVGIELGLVYASYGVDVTVVEMADRIIPAMDKEVSLELQKILSKKGMKIMTSVGVSEIVEGNNQLTLKLNNGEEIVAERALLSIGRVPQLNGLENLNLELDRGRIKVNEYQETSIPGIYAPGDVNGTKMLAHAAYRMGEVAAENAMHGNVRKAHLDYTPAAVYTHPEVAMCGLTEEDARAKYGDVLIGKSSFAGNGRAIASNEAHGFVKVVADAKYHEILGVHIIGPAAAELINEAATIMENELTVDELLQSIHGHPTFSENMYEAFADVLGEAVHNPPKRK

SEQ ID NO: 6841 - protein, 384 aa, Fusobacterium nucleatum subsp. nucleatum ATCC 25586
MVMKKKRIIAMILAGGQGTRLKELTEDLAKPAVAFGGKYRIIDFTLTNCSNSGIDTVGVLTQYEPRILNNHIGRGSPWDLDRMDGGVTVLQPHTRKNDEKGWYKGTANAIYQNIKFIEEYDPEYVLILSGDHIYKMNYDKMLQFHIQKDADATIGVFKVPLVDAPSFGIMNTKDDMSIYEFEEKPKEPKSDLASMGIYIFNWKLLKKYLDEDEKDPNSSNDFGKNIIPNMLNDGKKMFAYPFKGYWRDVGTIQSFWDAHMDLLSEDNELDLFDKSWRVNTRQGIYTPSYFTKESKIKNTLIDKGCIVEGEIEHSVIFSGVKIGKNSKIIDSIIMADTEIGDNVTIQKAIIANDVKIVDNIVIGDGKKIAVVGEKKIIDSQSLVK

SEQ ID NO: 6842 - protein, 674 aa, Mesorhizobium loti MAFF303099
MATKEKEEVETEREGATDGPLLDLSDDAVKKMIKAAKKRGYVTMDELNSVLPSEEVTSEQIEDTMAMLSDMGINVVEDDEQGEEAEAGDTAADAEEDANELAEQTGTAVAATTTKKEPTDRTDDPVRMYLREMGSVELLSREGEIAIAKRIEAGRETMIAGLCESPLTFQAIIIWRDELNESKILLREIIDLEATYAGPEAKQAPVVERIEEAPKAEEKPRRGRDDEDDVTNVGADTRGIGDDDEEDEDEASLSLAAMEAELRPQVMETLDVIADTYKKLRKLQDQQVENRLAAAGTLSPSQDRRLKELKDQLIKAVKSLSLNTARIEALVEQLYDINKRLVQNEGKLLRLAESYGVRREEFLKEYQGSELDPNWTRAIGNLTSRGWKEFTKNEKDAIKDLRAEIQHLATETAISILEFRKIVNQVQKGEREAAIAKKEMVEANLRLVISIAKKYTNRGLQFLDLIQEGNIGLMKAVDKFEYRRGYKFSTYATWWIRQAITRSIADQARTIRIPVHMIETINKIVRTSRQMLHEIGREPTPEELAEKLAMPLEKVRKVLKIAKEPISLETPVGDEEDSHLGDFIEDKMAILPIDAAIQANLRETTTRVLASLTPREERVLRMRFGIGMNTDHTLEEVGQQFSVTRERIRQIEAKALRKLKHPSRSRKLRSFLDS

SEQ ID NO: 6843 - protein, 323 aa, Streptococcus thermophilus CNRZ1066
MVKLSKETHLEMFTKMERIREFDSRINKLVRRGFVQGMTHFSVGEEAANVGAVQHLSYDDIFFSNHRGHGQSIAQDMDLNKMMAELAGKATGVSKGRGGSMHLADFEKGNYGTNGIVGGGYALAVGAALTQQYKETGNIVVAFSGDGATNEGSFHESVNMAATWKLPVIFFIINNRYGISMDIRRATNTPHLYTRAEAYGIPGFYCEDGNDVMAVYDTMGKAVDHVRGGNGPAIVEVESYRWFGHSTADAGVYRTKEEVDEWKNNNDPIIRYRDYLVSENIASVEELDAIQSQVKAQVDAAYEFAKNSPDPELSVAFEDVWVD

SEQ ID NO: 6844 - protein, 590 aa, Mycobacterium leprae TN
MRKHPQSATKHLFVSGGVASSLGKGLTASSLGQLLTARGLHVTMQKLDPYLNVDPGTMNPFQHGEVFVTEDGAETDLDVGHYERFLDRDLSGSANVTTGQVYSTVIAKERRGEYLGDTVQVIPHITDEIKQRIMAMAQPDGGDNRPDVVITEIGGTVGDIESQPFLEAARQVRHDLGRENVFFLHVSLVPHLAPSGELKTKPTQHSVAALRSIGITPDALILRCDRDVPESLKNKIALMCDVDIDGVISTPDAPSIYDIPKVLHREELDAFVVRRLNLPFRDVDWTEWDDLLRRVHEPHGTVRIALVGKYVDFSDAYLSVSEALHAGGFKHYAKVEVVWVASDDCETATGAAAVLADVHGVLIPGGFGIRGIEGKIGAIRYARARGLPVLGLCLGLQCIVIEATRSVGLVQANSAEFEPATPDPVISTMADQKEIVAGEADFGGTMRLGAYPAVLQPASIVAQAYGTTQVSERHRHRYEVNNAYRDWIAESGLRISGTSPDGYLVEFVEYPANMHPFVVGTQAHPELKSRPTRPHPLFVAFVGAAIDYKSAELLPVEIPAVPEISEHLPNSSNQHRDGVERSFPAPAARG

SEQ ID NO: 6845 - protein, 147 aa, Zea mays
RGRPGRGLLAAKKKERRKEDSQLIFAVPAADVCGEADNSACFSCCFDFFQAFHCRHGKAYLFHKVANVTSGVKEDRMMMTGMHTVSDIFCVGCGSIVGWKYEAAHEKSQRYKEGKFILERYKVSGPDGSQYWIPQDPHLGGSDADDI

SEQ ID NO: 6846 - protein, 200 aa, Brassica napus
LISTIQSSFFSASTRLDSISKPSLSGFACRSLTKPRNLNLSVLLRCSMGSFNSSQKSDNVQEAAKSDFASISEGEWKKRLTPEQYYITRQKGTERAFTGEYWNTKTPGVYKCICCDTPLFDSSTKFDSGTGWPSYYQPIGNNVKSKLDLSIIFMPRQEVICAVCNAHLGHVFDDGPRPTGKRYCLNSAALKLESLERTRE

SEQ ID NO: 6847 - protein, 57 aa, Zea mays
MAFTASDICKIIFAVLLPPLGVFLERGCGGDLCINILLTILGYIPGIIHALYIILKY

SEQ ID NO: 6848 - protein, 242 aa, Cyanidium caldarium
MFIAYLTAGAPDLNTTKQALLNLANDGADVIEIGVPYSDPLADGMILQKASQQALKNGFRLEQLWHLLAEIELPVPVVILAYYNQIFHYGVEKWVTTLVNLKVKALIVPDLPYEEAAILRAACARHHLHMIWLISPTTPKVRAKQLALACDDWIYLVSRTGVTGVDAHFDNQIPNMIAELKQVTTTPIALGFGIHQKQQLQLVKSWGADGVIIGTACMQILLEKGVDQLTEWISAMKKSSYP

SEQ ID NO: 6849 - protein, 589 aa, Glycine max
MVWVNEKLKGFVGHRWVVFVCAMWDMSFAGTSYMFGSISPVIKSSMGFNQKQVAFLSVAKDLGDNVGLLAGKISQSSPIWALILVGVVQNVVGYGLVWLIVTHQFPALPLWLLCILIFVGQNGSTYYNTAALVSCVQSFPESRGPVVGILKGFVGLSGAIWTQLIAMAQLPDQASLIFIIAVGPAMVSLAFMFIIRPVESYRQSRASDGTGFTFIYSICLLLAAYLMGVLLLENMFDLDQSTITLFAVILIILILLPIIVPILLVFFSGPQKSADQESLLEPPMLEATKPNKHFVGESSSSTTKVIKHVENEKSPSKLEVLPLSSEGPRDVFQCQARLWQAVTKAVKKIKRRNGPHRGEDFTLSQAMAKADFWVMFFSLVMGCGSGLTIINNMGQICQSLGDNNVNVYVSVISISNFLGRVGGGYFSEVIVRSFGYPRLAALAVIQAGMSLGLCYYVFGLAGQVYAVAISNGFGYGAHWSIALAAASELFGLKNFGTLYNFLTMASPAGSLFLSGFVASTIYDYYAEQQVKHRMLTGNNNDLLLCEGNICFSITFGILAVVCLCAASLSLIVAHRTRKFYAQLYEESQT

SEQ ID NO: 6850 - protein, 612 aa, Arabidopsis thaliana
  misc_feature (386)..(386): Xaa can be any naturally occurring amino acid
  unsure (1)..(612): unsure at all Xaa locations
MKMDKKTIVWFRRDLRIEDNPALAAAAHEGSVFPVFIWCPEEEGQFYPGRASRWWMKQSLAHLSQSLKALGSDLTLIQTHNTISAILDCIRVTGPTKVVFNHLYDPVSLVRDHTVKEKLVERGISVQSYNGDLLYEPWEIYCEKGKPFTSFNSYWKKCLDMSIESVMLPPPWRLMPITAAAEAIWACSIEELGLENEAEKPSNALLTRAWSPGWSNADKLLNEFIEKQLIDYAKNSKKVVGNSTSLLSPYLHFGEISVRHVFQCARMKQIIWARDKNSEGEESADLFLRGIGLREYSRYICFNFPFTHEQSLLSHLRFFPWDADVDKFKAWRQGRTGYPLVDAGMRELWATGWMHNRIRVIVSSFGVKFLLLPWKWGMKYFWDTLXDADLECDILGWQYISGSIPDGHELDRLDNPALQGAKYDPEGEYIRQWLPELARLPTEWIHHPWDAPLTVLKASGVELGTNYAKPIVDIDTARELLAKAISRTREAQIMIGAAPDEIVADSFEALGANTIKEPGLCPSVSSNDQQVPSVVRYNGSKRVKPEEEEERDMKKSRGFDERELFSTAESSSSSSVFFVSQSCSLASEGKNLEGIQDSSDQITTSLGKNGCK

SEQ ID NO: 6851 - protein, 358 aa, Zea mays
MVPGYDCAASVLLCAEDNAAILGLDDDGEESSWAAAATPPRDTVAAAAATGVAVDGILTEFPLLSDDCVATLVEKEVEHMPAEGYLQKLQRRHGDLDLAAVRKDAIDWIWKVIEHYNFAPLTAVLSVNYLDRFLSTYEFPEGRAWMTQLLAVACLSLASKIEETFVPLPLDLQVAEAKFVFEGRTIKRMELLVLSTLKWRMHAVTACSFVEYFLHKLSDHGAPSLLARSRSSDLVLSTAKGAEFVVFRPSEIAASVALAAIGECRSSVIERAASSCKYLDKERVLRCHEMIQEKITAGSIVLKSAGSSISSVPQSPIGVLDAAACLSQQSDDATVGSPAVCYHSSSTSKRRRITRRLL

SEQ ID NO: 6852 - protein, 612 aa, Arabidopsis thaliana
  misc_feature (386)..(386): Xaa can be any naturally occurring amino acid
  unsure (1)..(612): unsure at all Xaa locations
MKMDKKTIVWFRRDLRIEDNPALAAAAHEGSVFPVFIWCPEEEGQFYPGRASRWWMKQSLAHLSQSLKALGSDLTLIQTHNTISAILDCIRVTGPTKVVFNHLYDPVSLVRDHTVKEKLVERGISVQSYNGDLLYEPWEIYCEKGKPFTSFNSYWKKCLDMSIESVMLPPPWRLMPITAAAEAIWACSIEELGLENEAEKPSNALLTRAWSPGWSNADKLLNEFIEKQLIDYAKNSKKVVGNSTSLLSPYLHFGEISVRHVFQCARMKQIIWARDKNSEGEESADLFLRGIGLREYSRYICFNFPFTHEQSLLSHLRFFPWDADVDKFKAWRQGRTGYPLVDAGMRELWATGWMHNRIRVIVSSFAVKFLLLPWKWGMKYFWDTLXDADLECDILGWQYISGSIPDGHELDRLDNPALQGAKYDPEGEYIRQWLPELARLPTEWIHHPWDAPLTVLKASGVELGTNYAKPIVDIDTARELLAKAISRTREAQIMIGAAPDEIVADSFEALGANTIKEPGLCPSVSSNDQQVPSVVRYNGSKRVKPEEEEERDMKKSRGFDERELFSTAESSSSSSVFFVSQSCSLASEGKNLEGIQDSSDQITTSLGKNGCK

SEQ ID NO: 6853 - protein, 968 aa, Phaseolus vulgaris
MANRNLEKMASIDAQLRQLAPSKVSEDDKLIEYDALLLDRFLDILQNLHGEDLKETVQEVYELSAEYEGKHDPKKLEELGNVITSLDAGDSIVVAKSFSHMLNLANLAEEVQISRRRRNKLKKGDFADENNATTESDIEETLKKLVFELKKSPQEVFDALKNQTVDLVLTAHPTQSVRRSLLQKHARIRNCLSKLYAKDITPDDKQELDEALQREIQAAFRTDEIRRTPPTPQDEMRAGMSYFHETIWNGVPSFLRRVDTALNNIGIKERVPYNAPLIQFSSWMGGDRDGNPRVTPEVTRDVCLLARMMAANMYYSQIEDLMFELSMWRCNDELRVHADEVHRSSNKDEVAKHYIEFWKKVPTNEPYRVVLGEVRDRLYQTRERSRHLLSNGYSDIPEENTFTSVEEFLQPLELCYRSLCACGDRAIADGSLLDFLRQVSTFGLSIVRLDIRQESDRHTDVLDAITKHLEIGSYQEWSEEKRQEWLLSELSGKRPLFGPDLPQTEEIRDVLDTFHVIAELPPDNFGAYIISMATAPSDVLAVELLQRECHVKHPLRVVPLFEKLADLEAAPAALARLFSVDWYKNRIDGKQEVMIGYSDSGKDAGRFSAAWQLYKAQEELVKVAKKFGIKLTMFHGRGGTVGRGGGPTHLAILSQPPDTIHGSLRVTVQGEVIEQCFGEQHLCFRTLQRFTAATLEHGMNPPISPKPEWRAMMDQMAVIATEEYRSIVFKEPRFVEYFRLATPELEYGRMNIGSRPAKRRPSGGIETLRAIPWIFAWTQTRFHLPVWLGFGAAFKQVLDKNAKKNLSMLQEMYNQWPFFRVTLDLVEMVFAKGDPKIGALNDRLLVSKDLWPFGDQLRNKYEETKKLLLQVAGHKEILEGDPYLKQRLRLRHSPITTLNVFQAYTLKRIRDPNYKVKARPRISKESAEASKSADELIKLNPTSEYAPGLEDTLILTMKGIAAGMQNTG

SEQ ID NO: 6854 - protein, 401 aa, Acinetobacter sp. ADP1
MKHAYIVDAIRTPFGRYAGGLAAVRADDLGAIPIAALIERNPSVNWAQVDDVIYGCANQAGEDNRNVGRMSALLAGLPVEVPATTVNRLCGSSLDAIAMAARAIKAGEAHLIIAGGVESMSRAPYVMGKSEGAFGRTQKIEDTTMGWRFINPKLKAMYGVDTMPQTAENVAEQFGIQREDQDQFAYTSQQRTAAAQAKGYFAKEIVPVTIPQRKGEPVVIDTDEHPRASTTLEGLAKLKGVVKPEGSVTAGNASGINDGAAAVLIASDEAVAQYQLKARAKIIASTTVGIEPRIMGFAPAPAIKKLLKQANLTLDQMDVIELNEAFAAQALACTRDLGLADDDARVNPNGGAIALGHPLGASGARLVTTALNQLEQSGGKYALCSMCIGVGQGIALIIERV

SEQ ID NO: 6855 - protein, 417 aa, Syzygites megalocarpus
GKSTTTGHLIYKCGGIDKRTIEKFEKEAAELGKGSFKYAWVLDKLKAERERGITIDIALWKFETPKYQITVIDAPGHRDFIKNMITGTSQADCAILIIAGGTGEFEAGISKDGQTREHALLAFTLGVRQLIVAVNKMDTTKWSEARFNEIIKEVSSFIKKIGYNPKSVPFVPISGWHGDNMLEESTNMPWYKGWAKETKAGAKSGKTLLEAIDNIDPPTRPSDKPLRLPLQDVYKIGGIGTVPVGRVETGVIKAGMVVTFAPAAVTTEVKSVEMHHETLSEGAPGDNVGFNVKNVSVKDIRRGNVCSDSKNDPAKEAGSFTAQVIILNHPGQIGAGYAPVLDCHTAHIACKFSELIEKIDRRSGKSLEAEPKFVKSGDSAIVKMVPSKPMCVEAYTDYPPLGRFAVRDMRQTVAVGV

SEQ ID NO: 6856 - protein, 365 aa, Thamnidium elegans
GKSTTTGHLIYKCGGIDKRTIEKFEKEAAELGKGSFKYAWVLDKLKAERERGITIDIALWKFETPKYMVTVIDAPGHRDFIKNMITGTSQADCAILIIAGGTGEFEAGISKDGQTREHALLAFTLGVRQLIVAINKMDTTKWSEARYTEIVKEVSSFIKKIGFNPKSVPFVPISGWHGDNMLDESKNMGWFKGWTKETKAGSKTGKTLLEAIDAIEPPVRPSDKPLRLPLQDVYKIGGIGTVPVGRVETGTIKAGMVVNFAPAAVTTEVKSVEMHHETLTEGLPGDNVGFNVKNVSVKDIRRGNVCSDSKNDPAKEAGSFTAQVIILNHPGQISNGYSPVLDCHTAHIACKFAELVEKIDRRSGK

SEQ ID NO: 6857 - protein, 457 aa, Acinetobacter sp. ADP1
MPKEANMASQDYATQRSSLDAQALINDAPLSRYQWLIAIVCFLIVFVDGIDTAAMGFIAPALAQDWGVDRSQLGPVMSAALGGMIIGALVSGPTADRFGRKIVLSMSMLVFGGFTLACAYSTNLDSLVIFRFLTGIGLGAAMPNATTLFSEYCPARIRSLLVTCMFCGYNLGMAIGGFISSWLIPAFGWHSLFLLGGWAPLILMLLVIFFLPESYRFLIVKGKNTKKVRQILSRIAPQKVQGVTEFHVPEEKVEAGTKKGVFGMLFSAKYVKGTVLLWVTYFMGLVMIYLLTSWLPTLMRETGASLERAAFLGGLFQFGGVLSALFIGWAMDRFNPNRIIAGFYLAAGIFAVIVGQSLSNPTLLALFILCAGIAVNGAQSSMPVLSARFYPTQCRATGVAWMSGIGRFGAVFGAWIGAVLLGNNWSFTMILSMLIIPAAAAAIAIFVKSLVAHTDAT

SEQ ID NO: 6858 - protein, 477 aa, Neisseria gonorrhoeae FA 1090
MSQYDVVVIGAGPGGYVAAIRAAQLGFKTACVDAGVNKAGNAPALGGTCLNVGCIPSKALLQSSEHFHAAQHDFAEHGITVGDVKFDAAKMIERKDAIVTKLTGGVKFLFQKNKVTSLFGTASFAGKNGDAYQIEVDNKGEKTVIEAKHVIVATGSVPRPLPQVAIDNVNVLDNEGALNLTEVPAKLGVIGSGVIGLEMGSVWNRVGAEVTILEAAPTFLAAADQQIAKEAFKYFTKEQGLSIELGVKIGDIKSEGKGVSVAYETAAGEAKTEVFDKLIVAIGRIPNTKGLNAEAVGLEKDERGFIKVDGECRTNLPNVWAIGDVVRGPMLAHKASDEGVAVAERIAGQKPHIDFNNVPFVIYTDPEIAWVGKTEEQLKAEGVEYKKGTSGFGANGRALAMGKAKGTVKVLADAKTDRILGVHMIGPVVSELVTEGVTALEFFASSEDIARIIHAHPTLSEVVHEAALAADKRALHG

SEQ ID NO: 6859 - protein, 370 aa, Oryza sativa (japonica cultivar-group)
MSRVPTSWGFVYSRVNKVSEEPNVVNRITTAFWELQLPACSDEPISSGTPSSPSSPPTKETGDANTVVIDDLFLAHSDAILPAGGDQKEEHQLGDDLGQQQAATAMEIDDDVIYSLIRNWDNDSSSSWIELLDHAIVSPASCFVPWKRTELDKEAVAGGEAAQRLLKKVVGGGGAWMNRAAGSCSIKNHVMSERRRREKLNEMFLILKSLVPSIDKVDKASILSETIAYLKELERRVQELESGKKVSRPAKRKPCSETIIGGGGGGGGAGAVKEHHHWVLSESQEGTPSDVRVIVMDKDELHLEVQCRWKELMMTRVFDAIKSLRLDVVSVQASAPDGLLGLKIRAKYASSAAVVPAMISETLRTAVAGY

SEQ ID NO: 6860 - protein, 417 aa, Thamnostylum piriforme
GKSTTTGHLIYKCGGIDKRTIEKFEKEAAELGKGSFKYAWVLDKLKAERERGITIDIALWKFETPKYHVTVIDAPGHRDFIKNMITGTSQADCGILIIAAGTGEFEAGISKDGQTREHALLAFTLGVRQLIVAINKMDSTKYSEARYTEIVKEVSTFIKKIGFNPKSVPFVPISGWNGDNMLEESPNMPWFKGWTKETKAGSKTGKTLLEAIDAIDPPVRPSDKPLRLPLQDVYKIGGIGTVPVGRVETGVIKAGMIVTFAPANVTTEVKSVEMHHEQLVEGVPGDNVGFNVKNVSVKDIRRGNVCSDSKNDPAKEAGSFTAQVIVLNHPGQIGAGYSPVLDCHTAHIACKFAELLEKIDRRSGKKLEDAPKFVKSGDSAIVKMVPSKPMCVEAYTEYPLLGRFAVRDMRQTVAVGV

SEQ ID NO: 6861 - protein, 339 aa, Thermotoga maritima MSB8
MKVVTFGEIMLRLSPPDHKRIFQTDSFDVTYGGAEANVAAFLAQMGLDAYFVTKLPNNPLGDAAAGHLRKFGVKTDYIARGGNRIGIYFLEIGASQRPSKVVYDRAHSAISEAKREDFDWEKILDGARWFHFSGITPPLGKELPLILEDALKVANEKGVTVSCDLNYRARLWTKEEAQKVMIPFMEYVDVLIANEEDIEKVLGISVEGLDLKTGKLNREAYAKIAEEVTRKYNFKTVGITLRESISATVNYWSVMVFENGQPHFSNRYEIHIVDRVGAGDSFAGALIYGSLMGFDSQKKAEFAAAASCLKHTIPGDFVVLSIEEIEKLASGATSGRVER

SEQ ID NO: 6862 - protein, 6889 aa, Ralstonia solanacearum
MSKNDQTLPRDPDTLVALLESLAATRPDDTAYVFLQDGDEGESRMTYAELHDAARRVAVHLLGNGCGQDDPVLLIFNPGLDYICAFFGCLYAGAIPVPAYPPAHARRLERLQAVAVDAGARFALTVSEELSRIASFETQQGKRLPVERWLAIDRADSDAGDWTDPGLDGSRIAFLQYTSGSTGAPKGVMVTHRNLFANVAAMTAEGRMGRDEVMVYWLPPYHDFGLIGGILQPLVLGCTVVLMRPAAFLLNPYRWLKAITDYRATVAGAPNFAFDLCVRSITPAQRATLDLSRLRVLASGAEPVRPGTLEKFTAAFAPHGFNPAAWFAAYGMAEATLLIAFGWAIRFQGQPRCLPFSRLALQKGMAVAADDEADRIALASHGSALTGHQLAIVDPETLRRCEPGRVGEIWVSGPSVAQGYWRRDEDSRRSFAGEMAEPADGERYLRTGDLGFLHAGELYICGRLKDLIILNGLNIYPQDVELAAFESHARLRENGTIAFAVDRDDTEQLVIVQELEFRQPVEPGMFECMASAVSMNVGVTPDVIVLVKAGAIPRTSSGKIRRQQCRADFLADRLPAMARWDRPVLAASPVPVAPGAPVLAAAREPVAVSAAVVEARLRAELAARLGLDAEAIDREQPFAFYGLDSMSAVQLAEALSVWMRVTVAPVVFWEHPNIARLAGFLAELSAAGQGDRHPAEAAPDAPAQAADAPIAIIGLGCRFPGADDADAFWDALDGQVDAIGAVPQARRAAGTFDEPRAELPSQVRLGGFLDRVDAFDAAFFSISPLEAARMDPQQRLALEVAWQALEDAGIAASGLAGSTTGVFIGISTHDYENLQDRAGSELSVYSATGNAGSIVANRLSYCLDLRGPSLAIDTACSSSLVAVHAACQSLRDGESTLALAGGVNLVLSTLSSEPFARAGMLSPDGRCKAFDASANGYVRGEGCGVVVLKRLSDALRDGDPVRAVILGSAVMQDGRGNGLIAPNGSAQAAVVRQALARARLRPEQIGYIEAHGTGTALGDPIELNALKSVFAHAPEAGRCAVGSVKTNIGHLEAAAGVASLIKVVLALEHETLPANLHYREPNPHCALDGSALSIVSRSQPWPGNAGRRHAGISSFGFGGTLAHMIVAQAPPAATAHGAQWPWHLLSLSAKTAPALEAMTEAVAGQLRDLPDAALADAAYTHQAGRNAFAWRRMLVARDREDAAEALRARDPRRVFTAQVRPAVPAPVVFMFPGQGAQQVGMARELYQEIAAFRAVVDRCAQVLRERAGFDLIQSLYGDGDPEASHLALTRTEAAQPALFVIEYALARLWMDWGMKPAALIGHSVGEYVAACLAGVFSLDDALVLVAERGRLMQSLPAGAMLSVALDEASLRAQLDGTLALAAVNGRQRCVVAGETTAVAALERRLDAQGISHRRLATSHAFHSHMTEPILPAFADSVARLTLRAPAIPFVSNLTGAWIEPAQATDPGYWAAHLRGTVRFADGLQTLMQGGPHAWIEVGPGQTLSALARPCAGDALVLPSLGGGEGPKSDLAVLLGSAGQLWLAGQALDWRALYAGQQRRTLRLAPYPFQRERHWLDAPAAPQQDAQASVEPSRAVTSMPVAAAMSSSVSNSASRAQAIQGALRGMVAKMLHADVARVDPDLPLLELGADSLMMVQAIGSIEQTYGVTVTVRQLFEELTTIAAIADYVDRQMPREARLEAAAEAPATVPAAAVMPMPAPAPAAPVAAIAVDARPDAVPPLAAIPALPQSSLERLLSQQLDALSQLTARQLALFQGGTVAATAGGPASVAGETSPVVPTVMPAAVPVVAPAPASTAAPGGTHKPYVPYQPVRVTAKADPFRDLSARQRAYLDGFVARYTERTRGSKALVQRYRPVLADNRVSAGFRFSTKEMLYPVVSERSEGAYLWDPDGNVYIDLTMGFGVNLFGHRPAFVQEALDAQLKTGLELGPQTRLAGEVAELVTRLTGLERVAFCNSGTEAIMLALRLARTVTRRDKIVVFAGSYHGWSDDTLMVADGAGTVAMAPGLQPGASAHTIVLDYGAPESLARIREHAHELAAVLVEPVQSRRPHWQPREFLHALRELTREHGIALIFDEIIMGFRLHPGGAQAWYGIEADMATYGKVIGGGMPAGMVAGSAAYLDAVDGGQWRYGDASYPQADTTFYAGTFCKHPLMLVAARAVLQRLAQEGPALQETLNARTAELVRRLNGVFADARVPVRAVHCGSSFRLLEASPSIDLLYYHLLAGGLYIWEGRGMFLSTAHSDADVDRVVEIFADSVRAMLDGGFFEDGAPTPPSGGGGRSPFAAARVGGPASTDAPVAPALAEAAVARLSAAPVPPATGGGIRFGISFFGHYASGYDAQKYRLLFEAARYADAGGFSSLWLPERHFHAFGGLSPNPSVLSAALARETSHIQLRAGSVVLPLHHPVRVAEEWSMVDNLSQGRVGIACASGWHPNDFVFAPEAFGSHRELMFQRIEQIQALWRGEPLRVRDGSSREIEVKLFPMPRQPELPIWITIVGNPDTYRRAGEIGAGILTNLMGQTVEALECNLALYRQALVEHGHGVERSRVSVLLHTFVCEDAAEARAVARAPFIHYLRSSVGLFQNMVDSLGLQADVSTLSEDDRDYLLSVAYERYVEHSALIGSPATCRALVERLQAIGVDEIGCFIDFGVDPDTVLGRLDQLALLKQSFETAAVDDDAAERYPLVPAQKGIWFECQISHEAALSYNTTTVLGLRGALDHAALARALQQVVDRHAALRSVVEADGEHQRVLPAVEVGLPLVDFSREADRDAAIGQWFVDNNHRPMDPGHGPLVRACLLRKGEAEHLLAITFHHVIIDGYSQEIVLQELAACYRAACRGGAPGLPAASPFREQVERHQAYLRSDRYQQDRAYWRGQFGSLPPSLELSGRHARPSAPSHRARRHHLTIDGERYARLQQLSRKLGGTLFMTMLAGVAVLLQRLSGQAQMVIGVPMVVGRAEGSEASLVGCTLNLVPVRCDGSGDPSFAEFLGRIKRSVLEAHAHADYPFGHLLRDLDLRASQRRPLAPVLFNLNRSLALPQFDALQAWLEQSPISFSPDDLTIDVMQLPDRLQVMFQYQEVLFEHEAIERMAAQFVQLLDGIVADPACSIGRLALLSAEERRQIVDVWNAGEPVPEPSETLHAVFEAQVRRTPEAIAVEHEGWRVSYAELNARANRVAHALIGLGVGPDARVGLCAERSVELVIGLLGILKAGGGYVPLDPSYPRDRLAYMLEDSAPVAVLAQSNTREPLGALSVPVLDLENPLEGEAEHDPQVTGLEPNHLAYVIYTSGSTGQPKGVLVEHRQVARLFTSTQPWFGFGAEDVWTLFHSFAFDFSVWELFGALLHGGRLVVVPKLTARSPQAFYALLCEAGVTVLNQTPSAFRQLMAAQQEAPAARHRLRQVILGGEALEVGALRPWYERAENAGTQLANMYGITETTVHVSYRALEAADAQGTGSPIGRRIPDLRVYVLDAHGEPVPVGVTGEMYIGGAGVARGYLNRPELTAERFVVNPFHGEGRERMYRTGDLGRWLPDGSLEYQGRADAQVKLRGFRIELGEIEASLSQCAGVREAVVTVREDVPGEQRLVAYYVSGEAIEAQALREQLQGSLPAYMVPAAYVRLAHLPLTSNGKLDRKGLPAPEGHAYASTAYEAPQGEVEQTLAGIWQTLLGVERVGRHDDFFALGGHSLQAVRLVTQVRVQLGAELGLTALFAQPSLSAVAQAIVRGQGSALQAITAADRSEALPLSFAQQRLWLLAQMEGGSEAYHIPVGLRLKGELDEDALGRALDRIVARHEALRTRFEVREGQAIQRVASADVGFALDRVDLQGQADREQTLAALSEREANTPFDLEQGPLIRGCLVKLGEQEHVLLITMHHIVSDGWSQGVLARELGALYEAYRSGGEDPLPALPIQYADYAVWQRRWLEGGELQRQGAYWEQALAGAPTLLSLPTDRARPAQQDYAGGSVEVVFDETLSADLKRLSQRHGTTLFMTVLAGWSALLSRLSGQEEVVVGSPVANRTRSEVEGLIGFFVNTLALRVNVGSATVSELLDRVKAKVLEAQAHQDLPFEQVVERVKPVRSLSHSPIFQAVFSWHNTEAVDLSLRALSLESLARENATAKLDIQLELAEADGRIVGTLNYATALFERSTAQRYADYLQRMLQAMVADDGQQVGRIALLGEAERAQVLQAWNATERAWPAATLPALFEAQVMRTPDAVALKHADQQVSYRELDARANRLAHHLRELGVAADVLVGLCVDRSIEMIVGLLGILKAGGAYVPLDPDYPQARLAYIFQDAMLSVLVSKRALAQRLPIAWTQVVELDDAEPAWADYPPTPPQVQGEPGQLAYVIYTSGSTGQPKGVAVTHQGVASLVYSQCERFGVSSQSRVLQFASISFDAAVSEIGMGLLCGACLVLAPAQALMPGAALTHLLDRERITHVTLPPAVLALMPEQALPADCHLIVAGEACPPSLVRLWSEGRTMINAYGPTEATVCATMSRALTAQDAPSIGGPIGNVRVYVLDAYLQPVPVGVTGELYIAGSGLARGYWQRAGLTAERFMANPFALGERMYRTGDLGRWLPDGSLEYQGRADAQVKLRGFRIELGEIEARLSQCAGVSEAVVTVREDAPGEQRLVAYYVSGEAIEAQTLREQLQSRLPEYMVPAAYVRLEHLPLTPNGKLDRKGLPAPEGQAYASTAYEAPQGEVEQTLAGIWQTLLGVERVGRHDDFFALGGHSLQAVRLVAQVRTQLGAELGLTELFAQPSLSAVAQAIVRGQGSALPAITVADRSGPLPLSFSQQRLWFLAQMEGGSEAYHIPVGLRLKGELDEDALRRSLDRIVARHEALRTRFVTEEGQAVQRVASADVGFALDCVDLQGQADREQALATLSEREANTPFDLAHGPLIRGRLVKLGEQEHVLLITMHHIVSDGWSQGVLARELGSLYEAYRAGNADPLPALPIQYADYAVWQRRWLEGGELQRQGTYWEQALAGAPTLLSLPTDRARPPQQDYAGGSVEVVFDAELSTGLRTLSQRHGTTLFMTVLAGWSALLSRLSGQGEVVVGSPVANRTRSEVEGLIGFFVNTLALRVEVGGATVSELLERVKAKVLEAQAHQDLPFEQVVERVRPVRSLSHSPVFQAALSWLNTEAVGLSLELEGLTIEGVDAGQAAAKFDLTLELRETSEGLAGSLDYATALFDRATIERYLGYLHRLLKAMAADDSQEVNRIALLDEGERTQLLESWNETKAPYPRASTIHGLFEAQVRRTPEAIAVVHEGQQVSYAELNARANRVAHALRRLGVGPDARVGLCAERSVELVVGLLGILKAGGGYVPLDPSYPQDRLTYMLEDSAPVAVLTQSNTREQLGALSVPVLDLDGPLEEAEHDPQVTGLEPHHLAYVIYTSGSTGRPKGVMNEHRGVVNRLWWAQQTYRLDASDRVLQKTPFGFDVSVWELFWPLLAGARLVMARPEGHKDPAYLAATIEQAGITTLHFVPSMLQLFLDQVEAGRCQGLRRMLCSGEALSHALQQRSLARFPHSELHNLYGPTEAAIDVTAWRCNAEIHPGVVPIGRPIANTQMYVLDGHQQPVPLGVTGEIYIGGIGVARGYLNRPELTAERFVVNPFHGEGRERMYRTGDLGRWLPDGSLAYQGRADAQVKLRGFRIELGEIEARLSQCAGVSEAVVAMREDVPGEQRLVAYHVSDEAIEAQTLREQLQASLPEYMVPAAYVRLEHLPLTPNGKLDRKGLPAPDGQAYASAAYEAPQGEVEQTLAGIWQTLLGVERVGRHDDFFALGGHSLQAVRLVAQVRTQLGAELGLTELFAQPSLSAVAQAIVRGQGTALPAITVADRGEALPLSFAQQRLWFLAQMEGGSEAYHIPVGLRLKGELDEDALRRSLDRIVARHEALRTRFEVQEGQAVQRVASADVGLTLDWADLSAEAASEHQLGLLAEAWARAPFDLEQGPLIRGRLVKLGEQEHVLLITMHHIVSDGWSQGVLARELGALYEAYRAGNSDPLPALPIQYADYAVWQRRWLEGGELQRQGTYWEQALAGAPTLLSVPTDRARPPQQDYAGGSVEVIFDETLSAGLRKLSQRHGTTLFMTVLAGWSALLSRLSGQEEVVVGSPVANRTRSEVEGLIGFFVNTLALRVEVGSATVSELLGRVKSRVLEAQAHQDLPFEQVVERVRPVRSLSHSPVFQAALSWLNTEAMVLKLDGLTIEHLADESYTAKFDLSLALREHDGRIAGSLDYATALFDRETIERYLGYLHRLLAAMVENDSQQVSRIGLLDEGERAQLLESWNETKAAYPDASTIHGLFEAQVRRTPEAIAVEHEGQQVSYAELNARANRVAHALRRLGVGPDARVGLCAERSVELVVGLLGILKAGGGYVPLDPSYPQDRLAYMLEDSAPVAVLAQSNTREQLGALSVPVLDLDRPLLEEAEHDPQVTGLEPHHLAYVIYTSGSTGRPKGVMVEHRGLSNLLDWYLEDLGLRSDDTVLLVSSYSFDLTQKNILGPLLAGGRLHLAGPFVPDALVAQIRREGITHINLSPSAFHALIDAAGAEGLGGLRRVVLGGEPIQPARLQGLPEPRPRFINSYGPTECSDVVAWHALDAELDRYRAASVPLGRSVRNVRLYVLDAHRQPVPTGVAGEIYVGGAGVGRGYRNLPELTGACFLADPFHGEGQARMYKTGDLGRWLANGSLEYLGRSDDQVKLRGFRVELGEIGASLARCDGVREAAVLAREDAPGEPRLVAYYVAEPGAAVEASALRRHMQAQLPEHMVPAAYVRLEHLPLTPNGKLDRRALPAPAADAYARRRYVAPQGDVETMLAELWQDLLGVERVGRHDDFFELGGHSLLAMSLMARMDELGLSADVRVLFTQPTLAGLAAEVEPMEIVL

SEQ ID NO: 6863 - protein, 475 aa, Prunus armeniaca
MSTLKARSVQARASDGDLENLVPSKPQGKSSGTVFPFVGVACLGAILFGYHLGVVNGALEYLSKDLGIAENAVLQGWVVSALLAGATVGSFTGGALADKFGRTRTFQLDVIPLAIGAFLCATSQSVQTMIVGRYLLAVGIGITSAIVPLYISEISPTEIRGALGSVNQLFICIGILGALVAGLPLAANPLWWRTMFGVAIVPSVLLALGMAASPESPRWLFQQGKISEAEKAIKTLYGKERVSEVMHDLTSATQGSVEPEAGWFDLFSSRYWKVVSVGAALFLFQQLAGINAVVYYSTSVFRSAGITSDVAASALVGAANVFGTAVASSLMDRQGRESLLLISFGGMAASMLLLSLSFTWKVLAPYSGPLAVAGTVLYVLSFSLGAGPVPALLLPEIFASRIRAKAVSLSLGMHWISNFVIGLYFLSFVTKFGISSVYLGFAGVCLLAVLYISGNVVETKGRSLEEIERALSVST

SEQ ID NO: 6864 - protein, 426 aa, Thermomucor indicae-seudaticae
VVVIGHVDSGKSTTTGHLIYKCGGIDKRTIEKFEKEAAELGKGSFKYAWVLDKLKAERERGITIDIALWKFETPKYYVTVIDAPGHRDFIKNMITGTSQADCGILIIAAGTGEFEAGISKDGQTREHALLAFTLGVRQLIVAINKMDSTKYSEARYNEIVKEVSIFIKKIGYNPKAVPFVPISGWNGDNMLEESPNMPWFKGWTKETKAGEKTGKTLLEAIDSIEPPVRPVDKPLRLPLQDVYKIGGIGTVPVGRVETGTIKAGMVVTFAPANVTTEVKSVEMHHEQLAEGVPGDNVGFNVKNVSVKDIRRGNVCSDSKNDPAKEAASFTAQVIVLNHPGQISAGYSPVLDCHTAHIACKFAELLEKIDRRSGKKLEDNPKSIKSGDSAIVKMVPTKPMCVESYTEYPPLGRFAVRDMRQTVAVGV

SEQ ID NO: 6865 - protein, 427 aa, Neisseria gonorrhoeae FA 1090
MSKSIKLNVPGRAGLELPVLEASIGHDVVDIRGLTKNTGLFAFDPGFVSTASCESKITYIDGDQGLLYYRGYPIEQLAEKSDYLEVCYLLIYGELPTPEQKAEFDNTVRRHTMVHEQLTWFFRGFRRDAHPMAMMVGVVGALSAFYQDSLDITNPEHRKIAIYRLISKIPTIAAMCYRYSNGLPFNYPKNNLSYSENFLHMMFATPCEDYKPNPVLARALDRIFILHADHEQNASTSTVRLAGSSGANPFACIAAGIACLWGASHGGANEAVLKMLDEIGDVSNVAAYMEGVKQRKYRLMGFGHRVYRNMDPRASIMRETCYEVLKELGLEDSPKFKLAMELEQIALKDPFFIERKLYPNVDFYSGIVLSALGIPTEMFTVIFALSRSVGWISHWHEMISDPSLKIGRPRQLYTGSERRDYVPAGER

SEQ ID NO: 6866 - protein, 399 aa, Arabidopsis thaliana
MANCFAPQLTFPSFSPRHFSPRMSHQSPKPSTSTTTSIFTSATKLLWGPSLPPGLLISTARTAWTTVWQLMMTQLAPSDSSGSYTRPTSKFRLDPTQFTSAASSELHLYVGLPCPWAHRTLIVRALKGLNDAVPVSIASPGQDGSWEFKNNNIPIKDKDKLIPSLDKANRCRNLKEVYKSRSGGYDGRCTVPMLWDLRKKDVVCNESYDIIEFFNSGLNKLARNDNLDLSPPELKEMIQGWNQIVYPKVNNGVYRCGFAQSQEAYDGAVNELFSTLDEIEDHLGSNRYLCGERLTLADVCLFTTLIRFDSVYNILFKCTKKKLVEYPNLYGYLREIYQIPGVAATCDISAIMDGYYKTLFPLNASGIQPAISSSGDQDSLWRPHNRDLVGKAIEAQLSV

SEQ ID NO: 6867 - protein, 275 aa, Triticum monococcum
MEADASHAPTTSSSSVSSSTLSTSSSSSSLATSALELPKSPKPKHPKKRKRAASDREQDAAANTNGVRGDESSCCSTDEDNAAASVKAAVPKSGFKHPSYRGVRRRSWGKWVSEIREPRKKSRIWLGTFPTAEMAARAHDVAALAIKGRSAHLNFPELAHELPRPDSTSPADIQAAAAKAAATAAVQCEAEPEHEPETPSSSSGAASETPEPAPCAEAAPADSGEVDNALFDLPDLLLDLRDGLFWSPVWPAALAAEEYDGGCCVGLSEPLLWAE

SEQ ID NO: 6868 - protein, 425 aa, Umbelopsis isabellina
VVIGHVDSGKSTTTGHLIYKCGGIDKRTIEKFEKEAAELGKGSFKYAWVLDKLKAERERGITIDIALWKFETPKYHVTVIDAPGHRDFIKNMITGTSQADCGILIIAAGTGEFEAGISKDGQTREHALLAFTLGVRQLIVAINKMDTTKWSGDRYEEIVKEVSSFIKKIGFNPKSVPFVPISGWHGDNMLEESTNMPWFKGWTKETKAGAKSGKTLLEAIDAIDPPTRPTDKPLRLPLQDVYKIGGIGTVPVGRVETGIIKAGMVVTFAPANVTTEVKSVEMHHEQLVEGVPGDNVGFNVKNVSVKDIRRGNVCSDSKNDPAKEAGSFTAQVIVLNHPGQIGAGYAPVLDCHTAHIACKFAELIEKIDRRSGKKLEDNPKFVKSGDSAIVKMVPSKPMCVEAYTDYPPLGRFAVRDMRQTVAVGV

SEQ ID NO: 6869 - protein, 587 aa, Neisseria gonorrhoeae FA 1090
MGFPVRKFDAVIVGGGGAGLRAALQLSKSGLNCAVLSKVFPTRSHTVAAQGGISASLGNVQEDRWDWHMYDTVKGSDWLGDQDAIEFMCRAAPEAVIELEHMGMPFDRVESGKIYQRPFGGHTAEHGKRAVERACAVADRTGHAMLHTLYQQNVRANTQFFVEWTAQDLIRDENGDVVGVTAMEMETGEVYIFHAKAVMFATGGGGRIYASSTNAYMNTGDGLGICARAGIPLEDMEFWQFHPTGVAGAGVLITEGVRGEGGILLNADGERFMERYAPTVKDLASRDVVSRAMAMEIYEGRGCGKNKDHVLLKIDHIGAEKIMEKLPGIREISIQFAGIDPIKDPIPVVPTTHYMMGGIPTNYHGEVVVPQGDEYEVPVKGLYAAGECACASVHGANRLGTNSLLDLVVFGKAAGDSMIKFIKEQSDWKPLPANAGELTRQRIERLDSQTDGENVDALRRELQRSVQLHAGVFRTDEILSKGVQEIMAIAERVKRTEIKDKSKVWNTARIEALELDNLIEVAKATLVSAEARKESRGAHASDDHPERDDENWMKHTLYHSDTNTLSYKPVHTKPLSVEYIKPAKRVY

SEQ ID NO: 6870 - protein, 756 aa, Yarrowia lipolytica CLIB122
MVLSSVLGFPRIGANRELKKITESYWGQKASVDELFKVGKELREINWKKQKDAGVDIIPSNDFSFYDHILDHSQLFNVIPERYAKYNLAPIDTVFAMGRGLQRDNVDVPALEMVKWFDSNYHYVRPTFTNATEFKLNGQKPVDEYLEAKALGIETRPVLIGPVSFLALGKADTDSLDLEPITLLEKLLPVYTEILQKLHAAGAKTVQIDEPVLVLDLNEKVQAAFKTAYDYLAKQKDIPEITIATYFGDVRPNLKAIEGLPVAGFHFDFVRVPEQLEDAIKLVGDDKTLSVGVINGRNIWKTDFAKAIKVVEQAKEKLGDRVVVATSSSLLHTPVDLANEHKLDPSIKDWFAFATQKLGEVVTVAKAVSGADVKADLEANAASIKARAESPITFNKEVRDRQAQINEEWKNRKSAFPQRLEAQKKHLNLPLFPSTTIGSFPQTKDIRINRNKFTKGEITAEEYEKFIEKEIQDVVKFQDEVGLDVYVHGEPERNDMVQYFGERLNGYVFTQNGWVQSYGSRYVRPPIIVGDISRARPMSVKESQYAQSITKKPMKGMLTGPVTCLRWSFPRDDISDKDQSEQLALALRDEVLDLEKAGVYVIQVDEPAIREGFPLRDGPARDDYLKWAVDSFRISTAGVEDSTQIHSHFCYSDFNPSTIVSLDADVVSIEFSKKNEPQYLKDFASYPNQIGLGLFDIHSPRVPPQEEFEQRIEEILKFIPKEKVWINPDCGMKTRKWEETKKQLTNMVKAIEKFRN

SEQ ID NO: 6871 - protein, 718 aa, Zea mays
MEVNSSGEETVIKVRKPYTITKQRERWTEAEHKRFLEALKLYGRAWQRIEEHVGTKTAVQIRSHAQKFFTKLEKEAINNGTSPGQAHDIDIPPPRPKRKANSPYPRKSGLSSETPTKELPSDKSTKPNMPLSNENVLMAGDASLQKFQRKELSGKESCSEVLNLFRDAPSPSFSSVNKSSSNHGAPIEASKTKIRDMTIMENSSLNPNMQEDVKEINDQEMERLNGTQISSKCEHSHEGYLDISMQQMKLKPESVETTYVDKQTARASHSLAERTGTTSIPVTATEETHSVLTSDQVGINGSMNPSIHPMFPADPKFDSSATPQPFPHNYAAFAPMMQCNCNQDTHRSLVNMSSTFSSMLVSTLLSNPAIHAAARLAASYWPAAEGNTPIDPNQENLADGVQGRSIGSPPSMASIVAATVAAASAWWATQGLLPFFAPPMAFSFVPAPSAAFPTVDVPRPSEKDRDCPAENAQKECQEARKQGQFEGFRVAASSEYDGSGKGEVSVHTELKISPVQNADATSAAGADTTDAFMNKKKQDRSSCGSNTPSSSDVDVDNVPEKEGNGNEKAKQASCSNSSAGDTNHRRFRSSGSTSDSWKEVSEEGRLAFHALFSREKLPQSFSPPQAEGSKEVGKEEEDEVTTVAVDLNKSTTSIDHDLDTIGEPRASFPNELSPLKLKLRRTGFKPYKRCSVEAKENRVPASDEVGTKRIRLDSEAST

SEQ ID NO: 6872 - protein, 916 aa, Frankia sp. EAN1pec
MDTTGDDQTTDARPGTDKAKAPSVPVPAPRSRAAEGTVPSSGGVSRPVPASLPLHGPERRPATERRPGPEARADTPRRPASAAERPPFVEPVRATTRGSVPTTGRPSSTGSSSTTGNAGATGGTRDETTRRVGGKRDGAGPRGPAARATSGREPADREASSREAPSRATAAREAAAAPKGPAGRQGAVPPGASDGAAAAKTPLVREGRAAQNGSSSQNGSATRDAAGRNGSSSQNGAASRDAAARTGSMGPESVARTPIASPTGDPGRRDTASRAGAPERDGGGRGVQGTGAASGPGPAPGAGSAPGAPAARGGSDPGSAAKARVTAQPRPAVARESSRPSVPPPQGPLPSASREAVPRESSREAVSREGTRGSVSREVSREAVSRESARGSVPREVSREAVSRETGRAPVSRETSREAVSRDGARGSVPREGLRETTSRDADQRGAGRPLADPLVDLVGPRRAPRPPTPPPSELAPSGRSAPSSATPAPSAPSVPATSAAGTSGAGKSAPASAAGGSTSGVSTTDAARATADAARAASAATHHRAAAPKIRHGRRALVITAVIAGLLGGATGGWVTSLILGDSEGTSSPTASAEAAPTVIDPGSVAGVVARVLPSVVTIDVTAGAEGGNGSGVIIRSEGYVLTNNHVIAPAANAGGQVMITMSDGAEPVLAEIAGRDASSDLAVLRIPGASGLPAATLGRSGSLVAGAPVIAIGAPFGLSGTVTTGIVSALDRNPTVPAEGGGASVIIGAIQIDAAINPGNSGGPLLDARGQVVGLNTAIATAPGGQAPSGSVGVGFAIPIDYAASVADEIIRTGRATHPYTGVSAATVTAAEARARGTTPGAIIRDVEPAGPAAAAGLLPGDIITRVDDTVVTSTNDLTAATRLHHVGDTVTVTFQRNGVESTARVVLQEQSPG

SEQ ID NO: 6873 - protein, 416 aa, Shewanella sp. MR-7
MEELTKLGVTVSELRFALDTFYFLISGALVMWMAAGFAMLEAGLVRSKNTTEILTKNVVLYAIACVMYLLVGYNIMYVDNAEGGWLPSLGTLIGSQAEDANHALESDFFFQVVFVATAMSIVSGAVAERMKLWAFLFFSVVMTGIIYPVEGYWTWGKGFISSLGFVDFAGSGIVHMTGAAAAIAGVLLLGARKGKYGPNGQVNPIPGSNLPMATLGMFILWMGWFGFNGGSQLMVSDAANASSVAKVFVNTNTAAAFGAISALVVCKMIWGKADLTMILNGILAGLVAITADPLSPSLLMAGVIGVVAGGLVVFSIVGLDRIKIDDPVGAISVHGVAGFLGLMCVPLSNADATITAQLTGAAIIFAWVFSASFAVWFVLKMTMGIRVSEEEEYNGMDASDCGIDAYPEFVTVKSAG

SEQ ID NO: 6874 - protein, 144 aa, Zea mays
  misc_feature (72)..(72): Xaa can be any naturally occurring amino acid
  misc_feature (78)..(78): Xaa can be any naturally occurring amino acid
  misc_feature (94)..(94): Xaa can be any naturally occurring amino acid
  misc_feature (107)..(107): Xaa can be any naturally occurring amino acid
  misc_feature (118)..(118): Xaa can be any naturally occurring amino acid
  unsure (1)..(144): unsure at all Xaa locations
MGRLFVVHLEGKIYSCKHCKTHLALYEDIISKSFHCKHGKAYLFNKVSNVTIGETEDRMMMTGKHTVADIFXVSCGSXIVYLRYETAHEKSQKXYKEGRSVPGKIKXIRGPDGSNYLXVVAHGRDLSGRDANDSGNPPPIVRNG

SEQ ID NO: 6875 - protein, 429 aa, Sinorhizobium meliloti
MSEKSATVTFGGKSADLPVRSGSIGPDVVDIGSLYKQTTMFTYDPGFTSTASCESKITYIDGDEGVLLHRGFPIEQLAEHGDFLEVCYLLLYGELPTKAQKADFDYRVTHHTMVHEQMSRFFTGFRRDAHPMAVMCGCVGALSAFYHDSTDITDPHQRMVASLRMIAKMPTIAAMAYKYHIGQPFVYPKNDLDYASNFLRMCFAVPCEEYVVNPVLARAMDRIFILHADHEQNASTSTVRLAGSSGANPFACIAAGIACLWGPAHGGANEAALNMLAEIGTVDRIPEYITKAKDKNDPFRLMGFGHRVYKNYDPRAKIMQKTTHEVLAELGHKDDPLLEVAMELERIALTDEYFIEKKLYPNIDFYSGITLKALGFPTTMFTVLFALARTVGWIAQWNEMIEDPEQRIGRPRQLYVGAPLRDYVPISKR

SEQ ID NO: 6876 - protein, 254 aa, Glycine max
MTMHRESWAFVFGVMGNIISFGVFLAPLPTFYQIYKKKSTEGFQSLPYVVALFSAMLWIYYAFVKRETALLLITINTFGIVVESIYLSIFLIYAPRKPRLTTIKLLLLLNVFGFGAMLLSTLYLSKGAKRLAIIGWICLVFNISVFAAPLFIIRRVIKTRSVEYMPFTLSMFLTINAVMWFFYGLLLRDYYVALPNTLGFVFGIIQMVMYLMYRNATPVALEEPVKAQELNGHIIDVVKIGTMEPNHGGAVGKV

SEQ ID NO: 6877 - protein, 591 aa, Sinorhizobium meliloti 1021
MCGICGEVRFDGGSPSVTAVSIMADVLAPRGPDASGVVVRGNVGLGHRRLRILDLSDKSQQPMVDSDLGLSLVFNGCIYNFRELRLELEEKGYRFFSSGDTEVILKAWHAWGEECVSRFHGMFAFVIHERDSGRVVMARDRFGIKPLYIAEVQGALRFASALPALVKAGGVDTSIDVAALHNYMTFHAVVPPPRTILNGVRKLPPATLRVYERDGSFEDRRYWDPPYRRQAGDAAISREEWQEQLLDALRIAVKRRMVADVPVGVLLSGGVDSSLIVGLLAEAGQRGLMSFSVGFEEANGEKGDEFVYSDLIAGHFGTDHRKIFVPSADLMGALPGTIAAMSEPMVSYDNVGFYLLSKEVSKHVKVVQSGQGADEVFGGYHWYPPLMNSNDVVADYGKAFRDRSHAVLTTQLSDAWIADHDVSGDLLNEHLLREGAATPVDQALRLDSNVMLVDDPVKRVDNMTMAWGLEARVPFLDHELVELAARMPPEEKLRDGGKGILKDVARRVIPSEVIDRKKGYFPVPQLKYIAGPYLDLIRDTLRSQKARERGLFQDAYLDRLFQEPSDHITPLRGSELWQVGLLEMWLEAQGV

SEQ ID NO: 6878 - protein, 281 aa, Frankia sp. CcI3
MVLSPVPTVPLAHGARMPRLGLGTWPLNDREVQGVVEQALGLGYRLIDTAHNYGNEKGVGAGLRAAGVPREELFVTTKFNKRSHSVRGVRRAAVESTRRMGLDYLDLLLIHWPNPWRDRYVEAWKGLVELLKDGQVRAIGVSNFKTTHLDRLLAQTGVAPDVNQIQLDPRLGRSAIRAYHAEQGIVTEAWSPLGAGTGLLDEPVITRIAAAHERTPAQVALRWHIELGIVVVPKSASPRRMAENIDVFDFTLSAEEIAAISGLDRGAAGEADALDSDVFGH

SEQ ID NO: 6879 - protein, 138 aa, Amborella trichopoda
MKKPIPRIGSRRNGRIGSRKNGRRIPKGVIHVQASFNNTIVTVTDVRGRVVSWCSAGTCGFRGTRRGTPFAAQTAATNAIRTVVDQGMQRAEVMIKGPGLGRDAALRAIRRSGVLLSFVRDVTPMPHNGCRPPKKRRV

SEQ ID NO: 6880 - protein, 525 aa, Streptococcus thermophilus CNRZ1066
MASKRLRHVLKVFSSVGLLFYREKHLPQDQQTTPVKLRQAFEQLGPSFVKIGQILSTRSDLLPEAYIRELSKLQSSVPPLNKEEVMTAIRQELPTDLSEVFVDFSKEPLASGSVAQTHRARLLSGQEVIIKIQRPGIDDIVKEDIQLLIKLARHIPKHFISMVDVQEVLENLCETLIKELDFKNEAEAMKRFRANNKRVVCLGVPEVYDEFTTPHLIVEEYINGIPLNHYSQLLEAGYDLEDVGKKLMLSFIKQVFKDGYFHGDPHPGNLLVRDGKIYFIDFGIMGELEVGMRSSLNDILYSFTAQDVDGMTKAILSITQFDNGLNSAVLSQDVEQMLGRYSGVDIGSLSMTDLLEDLLTVFQKNHLKASSQITILEKASLEIEGIFREFAPNIDLMTLAKDYFLENMGPDMLKQALNKETVLIELFYLLRNGKNIPRHLHQLLEQILNGRIVLNHDFINFSGRVKVFEKVLNNMVLALLTLAFLLSGALLSNKSDFQNLAWLFLGLGTVLALVTVGRIIFKKKG

SEQ ID NO: 6881 - protein, 486 aa, Zea mays
MHTSVICPLPVPRMAVFSASKAVSDESAFRVAGRVFVFVSSRLVPNTRTRHADTRIVPPNFCSEISSSRLISLFQSITSSNLYPKPYTGGRGMVKKAVSTAPADAEADERRRLRSLAFSNGLLQRGDPAAPRAPLAPAAAVTRLQGRDVVRRGGQRKSRYLFSFPGLLAPAASGGRVGELADLGTKNPLLYLEFPQGRMKLFGTHVYPKNKYLTLQMTRSAKGVVCEDVFESLIVFSEAWWVGTKEDNPEELKLEFPKEFQNDGTTADCDFRGGAGGAIDEATGSKAGKEIAEPRSPKFASDDDAPEDSNHKDENNTQTMSGTPVRQSARNAGKTLKRYTDLSSGGESSDNNNETDISEDLDDKEVESPEIKDEIESEDVKPADSSAISLSSKKEPLVQATLSSMFIRAEEKKRSTRSPKGSPATKGAAAKKQRASPMAKQPAGIKKVSGTRGKKKPKVGEDEIEELSSSSQDNDADDDSDEDWAE

SEQ ID NO: 6882 - protein, 832 aa, Fusobacterium nucleatum subsp. nucleatum ATCC 25586
MSIKYLYDRKKIAVTYGEEKYSYADIIKYVNYYSEFLDISKGDRVALMMENRPESIFSFFSIWAKKGIALSLDAGYTVEQLAFVLNDSKPKYIFVSNKIKEVVEKANEQVGNIVKIMVVDEITLPTDYVIKQEEYENDSNEDLAVIVYTSGTTGNPKGVMITYENIKTNMEGVRAVDLVTETDVILAMLPYHHIMPLCFTLILPMYMGVPIVLLTEISSASLLKALQENRVTVILGVPRVWEMLDKAIMTKINQSSLAKFMFKMASKINSMSIRKMLFSKVHKQFGGNIRLMVSGGAKIDKNILEDFRTMGFCAIQGYGMTETAPIITFNVPGRERSDSAGEVIPNVEVKIADDGEILVKGKNVMKGYYNNEQATKEAFDKDGWFHTGDLGKMDGKYLIIIGRKKEMIVLPNGKNIDPNDIEAEIIKNTDLIKEIAVTEYKEQLLAIIYPDFDQIKAKQIVNIKDAIKWEVIDKYNVTAPNYKKIHDIKIVKEELPKTRIGKIRRFMLKDLIEEKTENTDKKEAKKIIEVPAEMKEKFDIINKYMDERYQKAIDLDSHIELDLGFDSLDIVEFMNFLNSTFEITIVEQDFVENKTISAIIKLINDKAGKLVEKIDKNENLKKIIESDSNVKLPKDARYAKVLKFILSLMFRYYFKYKYRGKENLGEGAGIIVGNHQSYLDAFMLNNAFTYKELGGNYYIATALHFKSNFMKYLAGHGNIILVDANRNLKNTLQAAAKVLKSGKKLLIFPEGARTRDGQLQEFKKTFAILSKELNVPIYPFVLKGAYEAFPYNKKFPKRNNISVQFLEKIEPNDKTVEELVEETKNNIAKNYY

SEQ ID NO: 6883 - protein, 320 aa, Frankia sp. CcI3
MDRVPVSVVIPAYNEAMRLPGSLPPLISVMHRIPGAEVIVVDDGSTDGTAAIAEELLADLPGGRVLRLPWNSGKGAAVRMGVSAAHGESIAFLDADGASDVNDLPLLLAALEHAEVALGSRRVGAGAVRSSGRRVGSWAFNQITRSLTSLDVADTQCGFKAFRGPEAKLLFSLARSSGFGFDVEVLSIARSIGYRIAEVPVRWAEIPGGTFRVTRHTPAMLVDVMRARRYLNRSAPGLVVTRPTVQSPAAAAAPVRPGDGASPAAQVRVPPSAVSVPAPAEPVTAGPPPAVLTAAVGGVEKPLRLPADLGGVTPLPRKAV

SEQ ID NO: 6884 - protein, 194 aa, Akebia trifoliata
LCDAEVALIVFSPRGKLYEFASSSTRKTIERYQRHTKDVQINIGGMEENMQHLKFEAANMAKKIDLLEASKRKLLGEGLGSCSIEELQQMETQLERSLSNIRMRKTQLFIEKIEELKEKERILLEENKMLCEKCGVLPGQELKQQLLEIAPFSQNSQNSDVETEIVPYSQDSQNSEVETELYIGQPTRYPSHQG

SEQ ID NO: 6885 - protein, 130 aa, Nanoarchaeum equitans Kin4-M
MAKERWGVAHIYSSENNTIIHITDITGAETIAVGSGGMVVNADRLEGSPTAAILAAKRAAALAKERGITGLHIKVRAPGGHNGPWIPGPGASAAIKTLAREGLKIGIIEDVTPTPHDGCRRKGGKRGRRV

SEQ ID NO: 6886 - protein, 426 aa, Umbelopsis nana
VVVIGHVDSGKSTTTGHLIYKCGGIDKRTIEKFEKEAAELGKGSFKYAWVLDKLKAERERGITIDIALWKFETPKYHVTVIDAPGHRDFIKNMITGTSQADCGILIIAAGTGEFEAGISKDGQTREHALLAFTLGVRQLIVAINKMDTTKWSGDRYEEIVKEVSSFIKKIGFNPKSVPFVPISGWHGDNMLEESTNMPWFKGWTKETKAGSKAGKTLLEAIDAIDPPTRPTDKPLRLPLQDVYKIGGIGTVPVGRVETGIIKAGMVVTFAPTMVSTEVKSVEMHHEQLVEGVPGDNVGFNVKNVSVKDIRRGNVCSDSKNDPAKEAASFTAQVIVLNHPGQIGAGYAPVLDCHTAHIACKFAELVEKIDRRSGKKLEDNPKFVKSGDSAIVKMVPSKPMCVEAYTDYPPLGRFAVRDMRQTVAVGV

SEQ ID NO: 6887 - protein, 268 aa, Zea mays
MAPSSKDGATATEQPTSGDDDRENGGTGEPKEGAVVAGNRRPRGRPPGSKNKPKPPIFVTRDSPNALRSHVMEVAGGADVAESIAHFARRRQRGVCVLSGAGTVADVALRQPAAPGAVVALRGRFEILSLTGTFLPGPAPPGSTGLTVYLAGGQGQVVGGSVVGTLTAAGPVMVMASTFANATYERLPLDDADEEPAGQQAAQLPPGPGGGQPMVMGGMADPSAVPMFGGAGVPPSLMPAGAAAASSGAGLQLGHDRLAWAHARPPPY

SEQ ID NO: 6888 - protein, 416 aa, Utharomyces epallocaulus
GKSTTTGHLIYKCGGIDKRTIEKFEKEAAELGKGSFKYAWVLDKLKAERERGITIDIALWKFETPKYHVTVIDAPGHRDFIKNMITGTSQADCAILIIAGGTGEFEAGISKDGQTREHALLAFTLGVRQLIVAINKMDTTKWSEARYNEIVKEVSSFIKKIGFNPKSVPFVPISGWHGDNMLEESKNMPWFKGWNKETKAGAKTGKTLLEAIDAIDPPTRPSDKPLRLPLQDVYKIGGIGTVPVGRVETGTIKAGMVVTFAPANVTTEVKSVEMHHETLTEGLPGDNVGFNVKNVSVKDIRRGNVCSDSKNDPAKEAGSFTAQVIILNHPGQIGAGYAPVLDCHTAHIACKFAELIEKIDRRSGKKLEDNPKFVKSGDSAIVKMVPSKPMCVEAYTEYPPLGRLAVRDMRQTVAVG

SEQ ID NO: 6889 - protein, 328 aa, Vibrio vulnificus CMCP6
MNNKVPANIITGFLGVGKTTTILNLLKEKPANEKWAVLVNEFGEIGIDGAMMTDSGALIKEVPGGCMCCTAGVPMSVGINTLLRQKPDRLLIEPTGLGHPKQVIATLTSAQYEPYVDLKATIALVDPRNLSDEKYLNNQNFNDQLDSADVVIGSKVDLCTSHDIDVFNDWVTDQSPSKVFSKLIHDGQLPIEVLDIERVYGSASTHIEPHHHHHAEMEPQFELPPGRAFVRKENKGQGYYSCGWLIGAEYRFEFEALFSMFSALTAERVKAVVNTDQGCYAFNVANGVVSVNQMSLEGFESRIEVIDSQLMPWDELETILLKLANIHE

SEQ ID NO: 6890 - protein, 556 aa, Oryza sativa
  misc_feature (512)..(512): Xaa can be any naturally occurring amino acid
  misc_feature (526)..(526): Xaa can be any naturally occurring amino acid
  unsure (1)..(556): unsure at all Xaa locations
MTTVASLSLLPHLLIKPSFRQWFQGSVILQTPYLKTCCIEGVGRYGGIKVYAVLGDDGADYAKNNAWEALFHVDDPGPRVPIAKGKFLDVNQALEVVRFDIQYCDWRARQDLLTIMVLHNKVVEVLNPLAREFKSIGTLRKELAELQEELAKAHNQVHLSETRVSSALDKLAQMETLVNDRLLQDGGSSASTAECTSLAPSTSSASRVVNKKPPRRSLNVSGPVQPYNPSLKNFWYPVAFSSDLKDDTMVPIDCFEEQWVIFRGKDGRPGCVMNTCAHRACPLHLGSVNEGRIQCPYHGWEYSTDGKCEKMPSTKMLNVRIRSLPCFEQEGMVWIWPGNDPPKSTIPSLLPPSGFTIHAEIVMELPVEHGLLLDNLLDLAHAPFTHTSTFAKGWSVPSLVKFLTPSSGLQGYWDPYPIDMEFRPPCMVLSTIGISKPGKLEGKSTKQCSTHLHQLHICLPSSRNKTRLLYRMSLDFAPWIKHVPFMHILWSHFAEKVLNEDLRLVLGQQERXDQWRKCLELASIIXKLGIRYRLWRDAIERGVDRLPFSNQSESGS

SEQ ID NO: 6891 - protein, 543 aa, Lactobacillus gasseri
MAKDIKFSENARRSLLKGVDKLADTVKTTLGPKGRNVVLEKSYGAPDITNDGVTIAKSIDLKDHFENMGAKLVSEAAQKTNDIAGDGTTTATVLTQAIVREGMKNVTAGANPVGIRRGIETATKAAVDELHKISHKVSTKDEIAQVASVSSASTEVGNLIADAMEKVGHDGVITIEESKGIDTELSVVEGMQFDRGYLSQYMVTDNDKMEADLDNPYILITDKKISNIQDILPLLQEIVQQGKSLLIIADDVDGEALPTLVLNKIRGTFNVVAVKAPGFGDRRKAMLEDIAILTGGTVISSDLGLELKDTKIDQLGKAGKVTVTKDSTTIVEGAGSKDAISERVDQIKKQIADTTSDFDREKLQERLAKLAGGVAVIKVGAATETELKERKYRIEDALNATRAAVEEGYVAGGGTALVDVMKSIQGNVKGDSQDAQTGVNIVMKALGAPVRQIAENAGKDGAVILDHLEHEDPEIGYNAATDKWENMVKAGIIDPTKVTRSALQNAASIAALLLTTEAVVADAPEDDKNQAPAAPNPGMGMGM

SEQ ID NO: 6892 - protein, 624 aa, Yarrowia lipolytica CLIB122
MMILRLARVQPGVSLLRGPTTRIFSPGRLPVRQLVARTQTPLTLTSSCLISRQLSTTRLLAFSARKPVAEKKFDDYKKVSLNDVKNNPIYKFVYLSKPWYQSTGFRILAVTMGLATLLYLFSDGAHKVLRHTGHAIERIWVVMKATSRCVWLYRKTLKKEYPSEEEYKTALSKCHKKAAEITLQAIRKNSGVYIKLGQHIAALTYIFPPEWTETMIPLQDQCPESSMESIRAMIRKDTGKNLDDLFLEFNEVPMGVASLAQVHKAVTIDGREVAVKVQHPSLAEFVPLDVYMTRTIFTIVDHFFPDYPLSWLSDEMQRSIFTELDFTEEANNAVKTREYFKDTYKTTALRIPEVYWSKRRILVMEFVGGSRLDNRPYLEDNNISPDEVSACLSHIFDTMIFRPGAGLHCDPHGGNLAIRTRDNSRGGHNFEIVLYDHGLYRFVPTNIQRDYAHFWLALIDSNEAEMRKYAKRFANIDEDKFPLFAAAITGRDFKHATSDLKSKRSRAEIENMVSTIASDGLLSDIMTLLHSVPRVVLLIFKTNDLTRHLDETLNSSLGIERTFLIMATYCAKTVLEERRENLIKKYSRLDIRRWIGEGFAWASYLRRLLQLKAYDFGLMVSNLF

SEQ ID NO: 6893 - protein, 363 aa, Burkholderia fungorum LB400
MTSPNTTQGAADPIQSYLNQGLRNYWYPVAPSWQVGDAPVGITRLGDQIVLWRDKEGKVRALEDRCPHRGARLSLGWNLGGSVACWYHGIEVDGGGTVTKVPAVSNCPLEGQKCVKSYPVEEHAGAIFLWFGDDAHKEPAPLVLPEELVGEEYASFLCMSHWKCNYQYAIDNVMDPMHGAYLHATSHSMAEGDKQADMRVRKTETGLMFEKIGQRDVNFDWVELGETGCLWMRLAIPYKKKFGPGGNFGIIGFAVPVDEDNCQVYFWRTRKVQGWQRDAWRFMYRNRLEGLHWAVLEQDRYVLESMAPNARDHEFLYQHDVGMTRVRRMLRQRAQQHFADLDAHRAQAVSATPAAAEAGHSHA

SEQ ID NO: 6894 - protein, 317 aa, Brassica napus
MATLKVSSSVPSPSEDAEQLKSAFDGWGTNEELIISILAHRSAEQRKLIRQTYHESFGEDLLKSLEKELTSDFERAILLWTLEPGERDALLVNEATKRWTSSNQVLMEVACTRTSTQLLHARQAYHARFKKSIEEDVAHHTTGDFRKLLVSLVSSYRYEGEEVNMTLAKQEAKLIHEKIKDKHYSDEDVIRILSTRSKAQINATFNRYQDEHGEEILKSLEEGDEDDKFLGLLRSTIQCLTRPELYFVDVLRSAINKTGTDEGALTRIVTTRAEIDLKVIGEEYQRRNSIPLEKAITKDTRGDYEKMLVALLGEDDA

SEQ ID NO: 6895 - protein, 426 aa, Zychaea mexicana
VVVIGHVDSGKSTTTGHLIYKCGGIDKRTIEKFEKEAAELGKGSFKYAWVLDKLKAERERGITIDIALWKFETPKYHVTVIDAPGHRDFIKNMITGTSQADCGILIIAAGTGEFEAGISKDGQTREHALLAFTLGVRQLIVAINKMDSTKYSEARYNEIVKEVSTFIKKIGFNPKSVPFVPISGWNGDNMLDESPNMPWFKGWNKETKAGAKSGKTLLEAIDSIDPPVRPSDKPLRLPLQDVYKIGGIGTVPVGRVETGVIKAGMVVTFAPANVTTEVKSVEMHHEQLVEGVPGDNVGFNVKNVSVKDIRRGNVCSDSKNDPAKEAASFTAQVIVLNHPGQIGSGYSPVLDCHTAHIACKFSELLEKVDRRSGKKLEDAPKFVKSGDSAIVKMVPSKPMCVEAYTEYPPLGRFAVRDTRQTVAVGV

SEQ ID NO: 6896 - protein, 215 aa, Triticum aestivum
  misc_feature (161)..(161): Xaa can be any naturally occurring amino acid
  unsure (1)..(215): unsure at all Xaa locations
MEPSRRLLLSDYDGAIMSPLPSPSTSSAAPFKPGVAVVVGILTSVFSITFLLLLYAKHCKRSAAESSGPYGSGGGSGGGAAGERRNSGVERAVVESLPVFRFGALRGQKAGLECAVCLGRFEPTEALRLLPKCRHGFHVECVDTWLDAHSTCPLCRSRVDXPEDVLLLPEPPKPSTTGPPERRSRKLALPLLRSGQEQDATLGSWAWTLFGVAKD

SEQ ID NO: 6897 - protein, 758 aa, Neisseria gonorrhoeae FA 1090
MTTLHFSGFPRVGAFRELKFAQEKYWRKEISEQELLDVAKDLREKNWKHQAAANADYVAVGDFTFYDHILDLQVATGAIPARFGFDSQNLPLEQFFQLARGNKDQFAIEMTKWFDTNYHYLVPEFHADTEFKANAKHYVQQLQEAQTLGLKAKPTVVGPLTFLWVGKEKGSVEFDRLSLLPKLLPVYVEILTALVEAGAEWIQIDEPALAVDLPKEWVEAYKDVYATLNKVSAKILLGTYFGSVAEHAALLKSLPVDGLHIDLVRAPEQLDAFAGYDKVLSAGVIDGRNIWRANLNKVLETVGPLQAKLGERLWISSSCSLLHTPFDLSVEEKLKANKPDLYSWLAFTLQKTQELRVLKAALNEGRDSVAEELAASQAAADSRANSSEIHRADVAKRLADLPVNAGQRKSPFADRIKAQQAWLNLPLLPTTNIGSFPQTTEIRQARAAFKKGELSASDYEAAMKKEIALVVEEQEKLDLDVLVHGEAERNDMVEYFGELLSGFAFTQYGWVQSYGSRCVKPPIIFGDVSRPEAMTVAWSTYAQNLTKRPMKGMLTGPVTILQWSFVRNDIPRATVCKQIALALNDEVLDLEKAGIKVIQIDEPAIREGLPLKRADWDAYLNWAGESFRLSSAGCEDSTQIHTHMCYSEFNDILPAIAAMDADVITIETSRSDMELLAAFGEFKYPNDIGPGVYDIHSPRVPTEAEVEHLLRKAIEVVPVERLWVNPDCGLKTRGWKETLEQLQVMMNVTRKLRAELAK

SEQ ID NO: 6898 - protein, 417 aa, Zygorhynchus heterogamus
GKSTTTGHLIYKCGGIDKRTIEKFEKEAAELGKGSFKYAWVLDKLKAERERGITIDIALWKFETPKYNVTVIDAPGHRDFIKNMITGTSQADCAILIIAGGTGEFEAGISKDGQTREHALLAFTLGVRQLIVAINKMDTTKWSEARYNEIVKEVSSFIKKIGFNPKSVPFVPISGWHGDNMLEESKNMPWFKGWNKETKAGAKTGKTLLEAIDAIDPPTRPSDKPLRLPLQDVYKIGGIGTVPVGRVETGIIKAGMVVNFAPAAVTTEVKSVEMHHETLVEGLPGDNVGFNVKNVSVKDIRRGNVCSDSKNDPAKESASFLAQVIILNHPGQISAGYAPVLDCHTAHIACKFAELVEKIDRRSGKKMEDAPKFVKSGDSAIVKMIPSKPMCVEAYTDYPPLGRFAVRDMRQTVAVGV

SEQ ID NO: 6899 - protein, 143 aa, Zea mays
  misc_feature (66)..(66): Xaa can be any naturally occurring amino acid
  misc_feature (131)..(131): Xaa can be any naturally occurring amino acid
  unsure (1)..(143): unsure at all Xaa locations
TQEATTTSPISTQQAWRSREANDGSVVFGEEQEALVLKSWALMKNDIRNLCLRFLLKVFEIAPTAXRCPCCCADSDVPLEKNPKLKTHAMYDFVMTCEATAQLRKACKVTMRETTLNRLCATHLRLSVSDXHFEDTDFALLDT

SEQ ID NO: 6900 - protein, 401 aa, Pseudomonas aeruginosa PAO1
MSFDLASRLASRRAEDLYRQRPLLESAQGPDVVVDGQPLLAFCSNDYLGLANHPEVIAALRAGAERWGVGGGASHLVVGHSGPHHELELALAEFTGRPRALLFSTGYMANLGAVAALVGKGDTVLEDRLNHASLLDAGLLSGARFSRYLHNDPASLAARLDKAEGNTLVVTDGVFSMDGNLADLPALAAVAQARGAWLMVDDAHGFGPLGASGGGIVEHFGLGQEQVPVLIGTLGKGFGTAGAFVAGSEELIETLIQYARPYIYTTSQPPAVACATLKSLELLRRESWRRQHLAALIARFRHGAEALGLTLMDSFTPIQPILVGGSRQAVALAGMLRARGIMVGAIRPPTVPANSARLRVTLSAAHSEAQVDRLLEALGESWRQLSSSLLAEIEAEEGDDA

SEQ ID NO: 6901 - protein, 605 aa, Ralstonia solanacearum
MRMNHAPGLLLPNLPRRRFVQGLAAGGVIAGLGLGGIAPSAAAAGATALGTAPVLRGTEFDLVIDETPVNFTGKPAMATTVNGMLPGPTLRWREGDTVTLRVTNRLREPTSIHWHGILLPFQMDGVPGLSFHGIAPGETFTYRFQVRQSGSYWYHSHSGFQEMTGVYGGLIIDPAGSDPIRADRDYTVLLADWTDEDPMRILAKLKTQSDYYNYHQPTVADFFRDVASDGWQAALAKRRMWNQMRMSPTDLADLSGATLTHLANGITPAGNWTGLFAPGETVRLRFINGAGSTFYDVRIPGLKLKVVQVDGQDIEPVTVDEFRFGPGETCDVLVSPKDDAHTIFCQSMDRTGYARGTLAVRPGMQAPVPALDTPQWLTMTDMMGDMGGMGGMDHGGMTMMDAGDITPMAPADTDGMAMMDGSGGPDDLRVPSRKVRHARTEYGPGTDMRVDTPRTNLDDPGIGLRGNGRRVLVLADQHTLGGPLDRRGPQREIEMHLTGNMERYTWSIDGVEYGRSAPIHFRHGERLRVILHNDTMMTHPMHLHGMWSELEAPDGRFQVRRHTVPVQPAQRISFLVTADALGRWAWHCHLMLHMDAGMFREAVVA

SEQ ID NO: 6902 - protein, 1184 aa, Cryptococcus neoformans var. neoformans
MFVTRPPFSPLDHRGSPLEDDHTNTSGSSRDDVPSSHSTNTAFHEFKSSTPFPPHYLNVPSGLAFKTYLEKWGPEQIMGFLAIHGCEHHSGIFIKNSIDGKLLLDLDMSVLTSLGITKVGERVRLMAGIKCLRQRIAHEAEKDNVRSAHLCNGSLGMDRVKVMIHPKMSASLYVCRQGPFDSDPSTARRSRLTPSSSADRERNPSPMQRSQEVMKHSFITRSSGGQVIPPLWSGQIHNHGIDNSPTPGLYQPPMQRSVPLRSSVSYSDIAAKGMPLLVTQSINSAADHTFAVTDSHDTTSSLGGHLPRPDYFHSTNDAFQTCTKGEDNTISELPQRNQESSPSKWKKSGVICEDEAMLDSSPFAPTSPKHPFAINVTGNNVMEYPPNLPIKNCLSLRSFQSPDKSAGEDRLNMNPRAPSLDDLRRKLVKFVNAEDGTTRTVNVMKATSGAEVLERALRKFGKTGTGSAPFLDEENHNGGKYEGSLCIDGWGVFAEDLLGEEIGPMTEGDLFDICASLQNGAAIQRDALILRQTSESQKRKDMRFYLGNMPVLPTPVNLPISFYSPHSGQFERNSALQHTAQHQPLLSKNRSRASMMSIMSGLGVSHPDIKQPTHDSVQSPTSVTRSSSKKKSMYNFFGHRPPSELISSHLADYFPSAKKRDVAKVRGSMLRLNIAHTAEHDPRSVKSLGMIETDDMPFSSTEQSLTEQGGHYFDPSTCQPADTSSRGHVDHIITDHAGNSKGYYRLPCDEKASPTVKTQELHSANSANSILRACPPNLPPTYQSARLTDLHSDSTFSQLQLLRHSSSLSFKQPSSSHRRTVDEITAEMQHRQTSLSSNRPTSTIDSDISGPPCDSETSPDHTSDVSDVSESSSEYWDDQSSVSSKDSDHNTVEHTRAFTSNGSKRNIKWIKGALIGAGSFGSVFLGMDAQSGLLMAVKQVELPRGIAKMEARRRDMLSALEREIELLKDLQHENIVQYLDSSADANHLNIFLEYVPGGSVAALLNSYGAFEEALVGNFVRQILTGLNYLHERDIVHRDIKGANILVDNKGGIKISDFGISKKVENSLLNGLHPNRPSLQGSVFWMAPEVVKQTSYTSKADIWSVGCLVVEMLTGTHPWARLTQMQAIFQIGSMGQPDIPSDISAHAADFLSRAFALDYRMRPSATSLLQHAFIIHDGSGGNDEV

SEQ ID NO: 6903 - protein, 1239 aa, Ustilago maydis 521
MSSSQRPVVQPIPPFKGAPLQATDVQNRRPTAAEAYVALANRKAGANVVSTRATGCENHRPSQHQPTSHHASQRQQPAPAADRRVQQSQPSERPKPASRLEREKKRHHNDPKNIGHWRLDKLIGQGASGRVRLAIHDQTGQKAAVKIIPRTLINASRMSLRDADVKANKMILGIEREIVIMKLIEHPNLLGLWDVYETSKDLFLIMEYVAGGELFDHLVAQGKLSPRDARGYFRQIIFGMDYCHRFNICHRDLKPENLLLDETKKIVKVADFGMAALQPTEKMLETSCGSPHYASPEIVSGKRYKGTASDIWSCGIILFALLCGRLPFDDPNIQQLLGKVRAGKFIMPEWLEPASKDLIWRMLEVDPEKRIKMADIMRHPWFTNNGTESSVNPVSTSLDSLQMEELTLDTIDIDILGNLKTLWFELSEQDIIKELLAPGPSWQKTFYTLLVAHRENHSADDEDDMNDDILDEQIVTASAVPAHALLSTTSAAKTLEKPRPRRTSDAAGATSAPASPRLESVEMDRRHSTPEKGSVYHTTSRRPDNVTPPKVASPHVRPANPSPRLRPSPLDSPASTLDSAFVSASKLKVASPTKPRALGSSHGADKSGYVLPQISLQTASPQRNERPAVDLQRRNTSPTKPNTVGVTAPLSARIALANMYDAPTLSHTATASCGSTSSTASSTVSVSAARNRANRGSGSEMMPPLALPGRASSRPVSPTKSTFGAQATLPPQTAPQPAPPRPSTSRAYTTQPTPCIQVPQVGDATMQRFFQEIADELASIRATGEKPDALQSKLDQLKNSMAWQQQQQQQQLQSQPMAVTASAPSARTRNSEMNQFEDAEDDVSEGESMRSVSQASSHQQTYTPSTPMTPLSPVELIAPLALTDKSGAGARSSVASSSASASARNSVRSARSGTEASSSGTTSRPTSVFSNISTGSTGLGRKRSLLGLRRADKHAQQQHATATEANTIRSIAYESTPTPTALASVFAAPASGRFVPNGGATTASSVRMQRLNPGLGLDIGASSAAGIISPPSTPQSPNTATLSPAPAASASAIASASAPGKKDSWFAGLFNWKPATFTLMSSENFSETLTECIRRLQSYGVRVAMDDSSDVHHTTLKCSINEYRESNGVVTAAKPLRFRVDVHILAVGSPATNSAYMGGGLGLSLHGGAVGTNVNATSIMTHGLPSPALSTYSRASTPGGVTFATSVLVVQEKGALSTFKLIHARLRREWMLDLGSAII

SEQ ID NO: 6904 - protein, 294 aa, Zea mays
AEVLADLGRRYHFQRFDQPLADRERFLAALATADGLIGSTLPLGAELLDRAPALKAIASVSAGFDNYDLAYLRKRGIRLTNTPDAVTEATADTGFMLLMMAARRAGELAQMVRDGEWTHAIDATRFGRDVHGKTLGIVGLGRIGAAVARRGHFGFGMQVLYSGNSDKPEYEAQFAARRVPLQQLLGEAHFVCVCVPLSPATHHLFGREQFAAMRADAVFVNIARGAVVDEAALVQALVEGQLGAAGLDVFEQEPLPAASPLLALPQVVALPHIGSATVEARALMARTAAAELAA

SEQ ID NO: 6905 - protein, 341 aa, Shewanella sp. MR-7
MKALSKLKAEKGIWLVDAPKPEMGHNDLLIKIKKTAICGTDMHIYNWDEWSQKTIPVPMVVGHEYVGEVVDIGQEVRGFKIGDRVSGEGHITCGHCRNCRAGRTHLCRNTSGVGVNREGSFAEYLVIPAFNAFKIPDDISDDLASIFDPFGNAVHTALSFDLVGEDVLITGAGPIGIMAAAVCRHVGARHVVITDVNEYRLELARKMGATRAVNVAQENLKDVMKELGMTEGFDVGLEMSGVPSAFHAMLDTMNHGGKIAMLGIPGGEMAIDWSKVIFKGLVIKGIYGREMFETWYKMASLIQSGLDISPIITHHYKIDDFQKGFDAMGSGQSGKVILSWD

SEQ ID NO: 6906 - protein, 397 aa, Shewanella sp. MR-7
MASTSFYAQINQQLADVKAEGLYKSERVIASPQQTAIQVNHQEVVNFCANNYLGLANHPELIKAAQQGLDSHGFGMASVRFICGTQDIHKQLEASLSEFLGMEDTILYSSCFDANAGLFETLLDAEDAIISDALNHASIIDGVRLCKAKRFRYANNDMADLETQLIAAKDAGARNILIATDGVFSMDGVIANLQGVCDLADKYGALVMVDDSHAVGFVGLNGRGSHEHCGVMGRVDIITGTLGKALGGASGGFTSGKKEVIDWLRQRSRPYLFSNSLAPSIVTASIHVLEMLKSGQALREAVWENSRYFREKMSAAGFTLGGADHAIIPVMIGDAKLASDFANRLLAEHIYVIGFSFPVVPKGQARIRTQMSAAHTREQLDKAIEAFTRIAKEMAII

SEQ ID NO: 6907 - protein, 245 aa, Akebia trifoliata
MCILITDFPNRSSNNSPQRKMGRGKIEIKRIENTTNRQVTFCKRRNGLLKKAYELSVLCDAEVALVVFSNRGRLYEYSNNSVKTTIERYKKACVDSSNSGSVSEANAQFYQQESLKLRQQIGNLQNLNRHLMGEALGSMSIKELKQLETRIEKGISRIRSKKNELLFAEIEYMQKREIDLQNDNMYLRAKIAENERAGQHMNLMPGNEYEVMSSAPFDSRNFLQVNLLEPNNHYSHTDQTALQLG

SEQ ID NO: 6908 - protein, 467 aa, Pseudomonas putida KT2440
MQQAQGLKRGLSARHIRFMALGSAIGTGLFYGSASAIQMAGPAVLLAYLIGGAAVFMVMRALGEMAVHNPVAGSFGHYATTYLGPMAGFILGWTYAFEMVIVAIADVTAFGIYMGFWFPEVARWIWVLGIVFLIGGLNLCNVKVFGEMEFWLSLLKVGAIVAMILAGLGIMAFGFSQVGTGHAVGMSNLFDHGGFMPNGVGGLIASFAVVMFAFGGIEIIGVTAGEAKDPQRVIPKAINAVPLRILLFYVLTLFVLMCLYPWPQIGSQGSPFVQIFSNLGIGSAAAVLNVVVISAAISAINSDIFGAGRMMYGLAQQGHAPRGFSKLSKHGVPWMTVVVMGAALLIGVLLNYLIPENVFLLIASIATFATVWVWLMILLTQVAMRRSMSREQVAQLKFPVPFWPYGPAMAIAFMVFIFGVLGYFPDTQAALIVGVIWVVFLVASYLLWCKPRAGQGQPVAEPAELHR

SEQ ID NO: 6909 - protein, 510 aa, Glycine max
MANIDIEGILKQQPDDGRVPKTKIVCTLGPASRSVEMTEKLLRAGMNVARFNFSHGTHDYHQETLNNLKTAMHNTGILCAVMLDTKGPEIRTGFLKDGKPIQLKEGQEITITTDYDIKGDQEMISMSYKKLPVHLKPGNTILCSDGTITLTVLSCDPDAGTVRCRCENTATLGERKNVNLPGVVVDLPTLTEKDKEDILQWGVPNKIDMIALSFVRKGSDLVNVRKVLEPHAKTIQLMSKVENQEGVLNFDEILRETDAFMVARGDLGMEIPVEKIFLAQKMMIYKCNLVGKPVVTATQMLESMIKSPRPTRAEATDVANAVLDGTDCVMLSGESAAGAYPELAVKIMARICIEAESSLDYGAIFKEMIRSTPLPMSPLESLASSAVRTANKAKAKLIVVLTRGGSTAKLVAKYRPAVPILSVVVPVLSTDSFDWTCSDETPARHSLIYRGLIPILGEGSAKATDAESTEVILEAALKSATQRGLCKPGDAVVALHRIGTASVIKICIVK

SEQ ID NO: 6910 - protein, 159 aa, Neisseria meningitidis MC58
MANLVKTFLLGELVKGMGVTLKNFFARKDTIYFPEEKTPQSVRFRGLHAQRRYPNGEERCIACKLCEAVCPAMAINIESEEREDGTRRTKRYDIDLTKCIFCGFCEEACPTDAIVETHIFEYHGEKKGDLHMTKPILLAIGDKYEAEIAKRKAADAPYR

SEQ ID NO: 6911 - protein, 275 aa, Prochlorococcus marinus str. MIT 9312
MTDFLVAALQITSTSNVEANFVEAEEQIELAARRGAELIGLPENFAFLGEDDEKLRLAPELSMKCTNFLKTMSQRYQVFLLGGGYPVPAGDDRHTLNRSALFGRDGQVLAKYDKIHLFDVDLPDGNLYKESSTILSGEEYPPVVDVPGLCKIGLSICYDVRFPELYRYLSSNGAELIMIPAAFTAFTGKDHWQILLQARAIENTAYVVAPAQTGVHYGRRQSHGHAMVIDPWGTVLSDAGKTQGAAIAPADKKRVKKIREQMPSLKHRKNKLFSN

SEQ ID NO: 6912 - protein, 466 aa, Fragaria x ananassa
MAPVSNQVGGHVAVLAFPFSTHAAPLLNIVCRLAAAAPSTLFSFFNTKQSNSSILAGNTSVLRYSNVSVCEVADGVPEGYVFVGKPQEDIELFMKAAPDNFRRCLEASVAESGREVSCLVTDAFFWFGVHMADDMGGVPWVPFWTAGPASLSAHVHTDLIRSTTSGGCHDEKETITVIAGMSKVRPQDLPEGIIFGNLESLFSRMLHQMGQMPPLATAVFINSFEELDPVITNDLKSKFKRFLNVGPLDLLEPPASAATTTPQTAAEAVAGDGCLSWLDEQKVASVVYVSFGSVTRPSPEELMALAEALEASRVPFLWSLRDNLKNRQLDEFLSKGKLNGMVVPWAPQPQVLAHGSVGAFVTHCGWNSVLESVAGGVPLICRPFFGDQKLNARMVEDVWKIGLRLEGGVFTKNGMLKSLDMLLSQDKGTKMKNKINTLKQFAKQAVEPKGSSARNFESLLEMTTTN

SEQ ID NO: 6913 - protein, 647 aa, Flaveria bidentis
MISLNSSFLERSSVAGGSRTQSQSLRLSVRRPVVASMLNSNSLPERNVNVSVDSAVRDVNAPVAVEVDRSVGEKPFAVVGGGVEDMYGEDTATEDQYITPWSVSVASGYSLLRDPHHNKGLAFTEKERDAHFLRGLLPPVVVNHDLQVKKMMHNIRQYQVPLQRYQAMMDLQQRNERLFYKLLIENVEELLPIVYTPTVGEACQKYGSIFENSQGLFISLKDKGRILEILKIWPHKKIQVIVVTDGERILGLGDLGCQGMGIPVGKLALYTALGGVRPSACLPITIDVGTNNEKLLNDEFYIGLKQKRAAGQEYAELMNEFMSAVKQNYGEKVLIQFEDFANHNAFDLLEKYRTTHLVFNDDIQGTASVVLGGLISALKLVGGSLADQKFLFLGAGEAGTGIAELIALEISKQTNIPLEESRKKVWLADSKGLIVKSRLDSLQHFKKPWAHDHEPVNEFLDAIKTIKPTVLIGSSGTGQTFTKEVVETMSSLNEKPIILALSNPTSQSECTAEQAYTWSESRAIFASGSPFKPVEYNGKLYVSGQANNAYIFPGFGLGLIISGAIRVHDDMLLAASEALAEQVTQEHFDKGLIFPPFTSIRKISAHIAAKVAAKAYELGLASRLPQPENLVAYTESCMYSPKYRIYR

SEQ ID NO: 6914 - protein, 404 aa, Mycobacterium leprae TN
MTPTQTNTATMQQRWETVMMNNYGTPPIVLASGNGAVVTDVDSNTYLDLLGGIAVNVLGHRHPAVIEAVTHQITTLGHTSNLYATEPSITLAEELVALLGADTQTRVFFCNSGTEANELAFKLSRLTGRTKLVAAQAAFHGRTMGSLALTGQPAKQAAFEPLPGHVTHVPYGQVDALAAAVDNDTAAVFLEPIMGESGVIVPPEGYLAAARDITTRHGALLVIDEVQTGIGRTGAFFAHQHDSITPDVVTLAKGLGGGLPIGAFLATGPAAELLTLGLHGSTFGGNPVCTAAALAVLRVLATQGLVRRAEVLGDSMRIGIESLSHPLIDQVRGRGLLLGIVLTAPRAKDIEKAARDAGFLVNATAPEVIRLAPPLIITESQIDSFITALPGILDASIAELGKKA

SEQ ID NO: 6915 - protein, 145 aa, Glycine max
  misc_feature (30)..(30): Xaa can be any naturally occurring amino acid
  misc_feature (63)..(63): Xaa can be any naturally occurring amino acid
  misc_feature (84)..(84): Xaa can be any naturally occurring amino acid
  misc_feature (100)..(100): Xaa can be any naturally occurring amino acid
  unsure (1)..(145): unsure at all Xaa locations
AINVFGKSTLIGLALTFFGGLCILMVAPAXNISSHDQWDTLEKGGTHMTDYTGFFYFPISLFXIAVILNITLVYHPVLNLPMLXFKAYLADSDGIGSAMXAGLPLGLGNGLQFMGAHAPGYAAADAVQALALVSTFWCVILFGQS

SEQ ID NO: 6916 - protein, 404 aa, Nanoarchaeum equitans Kin4-M
MNPKEEALKVLKEADEVANIDVYEYLKEPERVVETYFPARTKNGIEYFKGYRVQYNTALGPAKGGIRFSPTVTKEEVEALALWMVIKNALLGLPFGGGKGGVVVNPKEYEEWELENIARGFVRSIAEFIGEDKDIPAPDVYTNERIMAYMMDEYEKIVRHKAFGVITGKPIILGGNPVRNIATSLGGYYVLNEAVKLKKVENTVAIQGFGNAGQGIAKLLDGQYKIVAVSDSKGGIYCKDGIDIEKLIEVKKKTGSVINYEGCEKITNEQLLELDVGILIPAAIEGVITKQNADKIKAKIILELANGPTTREADKILYEKGVLVLPDVLANAGGVTVSYIEWVGNKRGMPFNEKETKELLKEKMVHAFLDVLEVSNKYNIDMRLASYIIALERVKQAMRYRGLI

SEQ ID NO: 6917 - protein, 510 aa, Herbaspirillum seropedicae
MSMKKMFSGALAIGALLFAVSFTAPAQAQDAPKPEAAAAAAAAPAAAPAAPKAEAAAPAAAAPAAPAAAAAAPAPVPNKGDTAWMLVCTAFVILMTLPGLGLFYGGLVRSKNMLSVLMQCFMIFSLIYILWFVYGYSIAFTEGNAFFGGFDRLFLHGLTGDSNTGTFSKGVVIPELVFVAFQGAFAAITVALIIGAFAERVKFSAVILFSILWFTFSYLPMAHMVWFWPGPDAFTDAAAGEKATAISGWLFQKGALDYAGGTVVHINAAIAGLVGSYVIGKRIGFGKEAFKPHSLTLTMVGASLLWFGWFGFNAGSGLEANGTAALAFVNTILATAAAVLSWSFGEWIGKGKPSMLGAASGAVAGLVAITPAAGFVGVIGAVVMGLIAGLLCLWGVSGLKKILGSDDALDVFGVHGVGGILGAILTGVFAAPSLGGTGIYDYVANAVAPDYSIGGQVWIQFQGVLTTVVLSGVVSFIAYKIVDVVIGLRVTEEEEREGLDISSHGESAYH

SEQ ID NO: 6918 - protein, 430 aa, Mycobacterium avium subsp. paratuberculosis K-10
MDSDGTIGGVTTHQLPVHSSAHHRQQRTFAQSSKLQDVLYEIRGPVHQHAARLEAEGHRILKLNIGNPAPFGFEAPDVIMRDMIQALPYAQGYSDSQGILPARRAVVTRYELVDGFPRFDVDDVYLGNGVSELITMTLQALLDNGDEVLIPSPDYPLWTASTSLAGGTPVHYLCDETQGWQPDIADLESKITERTKALVVINPNNPTGAVYSGEILSQMVDLARKHELLLLADEIYDKILYDDAKHINVASLAPDMLCLTFNGLSKAYRVAGYRAGWLAITGPKDHAGSFIEGINLLANMRLCPNVPAQHAIQVALGGHQSIEDLVLPGGRLLEQRDVAWSKLNEIPGVSCVKPAGALYAFPRLDPEVYDITDDEQLVLDLLLQEKILVTHGTGFNWPAPDHLRIVTLPWARDLAAAIERLGNFLVGYRQ

SEQ ID NO: 6919 - protein, 586 aa, Bacillus cereus ATCC 14579
MFKEAIYHRPKDNYAYAYDEQTIHIRVRTKRDDIQSADLIYGDPYEWKDGKWISASTPMKKTGSTALFDYWSISIEPKFKRLRYAFELKSETDTLIYAERGFFSSIPNDDVGNFFCFPFIHADDVFKAPSWIKDTIWYQIFPERFANGDSTLNPENTLPWGSANPTPTNFFGGDFSGVIQNLDYLVKLGISGIYFTPIFKAHSNHKYDTIDYMEIDPQFGTKETFKELVEECHKHGIKVMLDAVFNHSGYFFEKFQDVLENGEKSAYKEWFHIHEFPIITEPLPNYDTFAFTPYMPKLNTAHPDVKEYLLEVGRYWVREFNIDGWRLDVANEVDHNFWREFRTEIKTLNPEVYILGEIWHDALPWLQGDQFDAVMSYPVTNALLSYFANDSIKASEFMKQITESLHSYSMNVNEAAFHLLDSHDTPRILTTCNGDKNKLKLLYVFHLSFIGSPCIYYGDEIGMDGGMDPDCRKCMIWDTKEQDHALFTHIQTLILLRKQHKAFGGHGTFQFIEANDEHNYISYTKTYEDETIFFVLNPTNSEVTVSLPLHVTGKKIINIYTNEEFSAEASVLQVTLPPYGFSILKW

SEQ ID NO: 6920 - protein, 558 aa, Bacillus cereus ATCC 14579
MEKQWWKESVVYQIYPRSFMDSNGDGIGDLQGIISKLDYLKELGIDVIWLSPVYESPNDDNGYDISDYCKIMNEFGTMEDWDELLHEMHERNMKLMMDLVVNHTSDEHNWFIESRKSKDNKYRDYYIWRPGKEGKEPNNWGAAFSGSAWQYDEMTDEYYLHLFSKKQPDLNWDNEKVRQDVYEMMKFWLEKGIDGFRMDVINFISKEEGLPAVETEAEGYVSGHKHFMNGPNIHKYLHEMNEEVLSHYDIMTVGEMPGVTTEEAKLYTGEERKELQMVFQFEHMDLDSGEGGKWDVKPCSLLTLKENLTKWQKALEHTGWNSLYWNNHDQPRVVSRFGNDGMYRIESAKMLATVLHMMKGTPYIYQGEEIGMTNVRFESIDEYRDIETLNMYKEKVIDHGEDIEKVMESIYIKGRDNARTPMQWNDQNHAGFTKGEPWITVNPNYKEINVKQAIQDEGSIFYYYKKLIELRKNNEIVVYGSYDLILNNDPSIFAYVRTYGDEKLLVIANFTADESVFEMPKDISYSESELFIHNYDVEIGSIDNIPLRPYEAIVFKLK

SEQ ID NO: 6921 - protein, 468 aa, Bacillus halodurans C-125
MDLYINGEWMRSGKTLDVTNPATGEVIDTVPFAGKKEAELAVSAAYEAFPQWSSQTASERSRYLMRWFQLIDEQQDEIGEIMTKEQGKPLREAIGEVQYANSFIQWYAEEAKRIYGDTIPASAINKRILVQKQPVGVIAAITPWNFPAAMITRKVAPALAAGCTAIVKPAEQTPLTALKLAQLAEEAGIPAGVLNVITGNAQDIGEAWLEDSRVRKITFTGSTEVGKLLMRGAAQTVKKISLELGGHAPFIIMDDANLEEAVDQVIASKFRNAGQTCVCANRIYVAREIAEAFTEKFAAKVNELKVGNGLEEGVTIGPLIDKAAVEKVEAHIHDALKKGGQVTVGGRWTNHFFEPTIITGATDEMLCMNEETFGPLAPVATFDTEEEVIERANHTPYGLAAYVFTENIGRAIRLSEKLEYGIVGVNDGMPSVAQAPFGGWKESGLGREGGKYGIEEYLEVKYVSVAFK

SEQ ID NO: 6922 - protein, 474 aa, Zea mays
  misc_feature (22)..(22): Xaa can be any naturally occurring amino acid
  misc_feature (79)..(81): Xaa can be any naturally occurring amino acid
  unsure (1)..(474): unsure at all Xaa locations
MDMALASKASPPPWNATAAEQXIPKRDKAAANDSTYLNPQAHDSVLGIILGGGAGTRLYPLTKKRAKPAVPLGANYRLXXXPVSNCLNSNISKIYVLTQFNSASLNRHLSRAYGSNIGGYKNEGFVEVLAAQQSPDNPNWFQGTADAVRQYLWLFEEHNVMEFLILAGDHLYRMDYEKFIQAHRETNADITVAALPMDEKRATAFGLMKIDEEGRIIEFAEKPKGEQLKAMMVDTTILGLDDVRAKEMPYIASMGIYVFSKDVMLQLLREQFPEANDFGSEVIPGATSIGKRVQAYLYDGYWEDIGTIAAFYNANLGITKKPMPDFSFYDRFAPIYTQPRHLPPSKVLDADVTDSVIGEGCVIKNCKINHSVVGLRSCISEGAIIEDSLLMGADYYETEADKKLLAEKGGIPIGIGKNSCIRRAIIDKNARIGDNVKVFQTDVPTVKNINLDFSLGYYIILDMPFCPLIFNIYF

SEQ ID NO: 6923 - protein, 139 aa, Nicotiana tabacum
LDIFDPFEGFPFSGTVANVPSSARETSAFANARIDWKETPDSHIFKMDVPGIKKEEVKVEVEEGRVLQISGERSREQEEKNDTWHRMERSSGKFMRRFRLPENAKMEEIKAAMENGVLTVTVPKEEEKKSEVKAIDISG

SEQ ID NO: 6924 - protein, 460 aa, Francisella tularensis subsp. tularensis SCHU S4
MQTEKKINFVVVHVAIIAALAGLLFGMDIGYVNGSLHFISETFGLSVEQSGHVSSVLLLGAACGALFSGFLSKRYGRRKVLLIAAAIFSIFTIVGILAPNYQIFISSRFILGIAVGIASFIAPLYLSEIAPKEFRGALIALYQLMITIGLFLVFLTNSALERTGSWRVMLAVLAIPSVIMFFGCLTLPRSPRWLILKGNDNEAALVLKKIRSSEAEALEEHNEIKQTTHRGVSVFSLLKQKFFIKVVLLGIALQAFQQFTGMNAFMYYSTDIFKLAGFTNPSTSTIVIGLLNMLTTFLAIKYVDKFGRKPILYFGLSLLIISCIIVGFIFKTHFVYGQAMVLSQTLQWTALIFCLLFIFGFAISMGPVIWILCSEIQPIEGRDFGVTASTMSNWICNAIIGNFALTWLTFHPDSTFFGFAISCIICILFVKFFVPETKDVSLEEIENNLRSGKSLAKIGR

SEQ ID NO: 6925 - protein, 706 aa, Fusarium oxysporum
MAPRGFEDEELTISLSSSHVRRPQQQQQQQSQQQQQHASSDAPTPGSRPADAPLKERIKTEQRIGAYKVLRTLGEGSFGKVKLAIHNGTGQQVALKIIARKKLISRDMAGRVEREIEYLQLLRHPHIIKLYTPNEIIMVLEYAGGELFDYIVQHGRMKEPEARRFFQQMLCAVEYCHRHKIVHRDLKPENLLLDENLNVKIADFGLSNIMTDGNFLKTSCGSPNYAAPEVIGGKLYAGPEVDVWSCGVILYVLLVGRLPFDDEHIPSLFAKIAKGTYSIPQWMPAGAANLIKKMLVVNPVHRATIEDIRADPWFTTDLPAYLQLPVEEFFNTGVDPNKAIKKNDIAPNASEKVQERLHNEVTEKISKTMGYGKSDVEEALQAAEPAAIKDAYMIVRENKMMQVNHNPEALLAEPEGSSPMLSMSSARSTTSQATTTPRPYVSKVGILPSSLPAYHKDYMEREKAGSVENSPPKVLINDEPPSNRTDAEKEETARRLRPHSRSQLRMDEANTRPQGMTPINPPKKNKPVRWQFGIRSRNSPWEALLCIHKALHKLGATYIPDEDYESRTAEERAEASGEGSFADSHDNNRGSSSSIDPKKRYNLPADPWHINVRWDTSAIKKKAASVPGTPSSPSTPEGQHHPKEPFVALHMDIQIYEMEHGVYLVDFKCSGYETAHGRLLEEKDVTSPFPFLDMAAKLIMQLAEAD

SEQ ID NO: 6926 - protein, 137 aa, Nicotiana tabacum
IFDPFEGFPFSGTVANVPSSARETSAFANARIDWKETPDSHIFKMDVPGIKKEEVKVEVEEGRVLQISGERSREQEEKNDTWHRMERSSGKFMRRFRLPENAKMEEIKAAMENGVLTVTVPKEEEKKPEVKAIDISG

SEQ ID NO: 6927 - protein, 377 aa, Frankia sp. EAN1pec
MGWGGYADGGRLGGRIRSSLVLIAVQHCNREEDRMDAGATANPGPEDQIALPDGTAPSDDRGEAALDAYSRVVTRVAERVGPSVGSLRVRTSRGAGAGSAVLFTEDGFLLTSAHVVEGRPGTGRAGEPAGTVEFVDGTERAVDLVGADPLSDLAVLRARGSTPRPAELGDAAMLRVGQLVVAVGNPLGLTGSVTAGVVSALNRSLPTRSGSAVRVVDEVIQTDAALNPGNSGGALVTADGRVVGVNTAVAGVGLGLAVPVNATTRRILAALIRDGRVRRAYLGVAGARVPLPPALAERTGQRHGVRLAEVVQGSPAGQAGLFTDDLVLSIAGTPVAGPGDLQRLLTEDTIGQPVEMTVWRRGALVDVIAVPRELVTP

SEQ ID NO: 6928 - protein, 617 aa, Zea mays
  misc_feature (62)..(62): Xaa can be any naturally occurring amino acid
  misc_feature (85)..(85): Xaa can be any naturally occurring amino acid
  misc_feature (103)..(103): Xaa can be any naturally occurring amino acid
  misc_feature (156)..(156): Xaa can be any naturally occurring amino acid
  misc_feature (402)..(402): Xaa can be any naturally occurring amino acid
  unsure (1)..(617): unsure at all Xaa locations
ITMDPTKFRPSSSHDTTVTTTNAGAPVWNDNEALTVGPRGPILLEDYHLIEKVAHFARERIXPERVVHARGASAKGFFECTHDVXPSLTCADFLRAPGVRTPXVIVRFLDGDPRERGSPGDDPRTPRGVPPVKVLPPARGNWGTCLGKQTFPVFFXIRDGIKFPDVIHAFKPNPRSHVQEYWRVFDFLSHLPESLHTFFFLFDDVGVPSDYRHMEGFGVNTYTFVSAAGKAQYVKFHWKPTCGVRCILTDEEAALVGGRNHSHATQDLYDSIAAGSFPEWTLYVQVMEPDTEEQYDFDPLDDTKTWPEDLLPLRPVGRLVLDRNVDNFFNENEQLAFGPGLVVPGIYYSDDKMLQCRVFAYADTQRYRLGPNYLMLPVNAPRCAHHNNHYDGAMNFMHRDEXVDYYPSRHAPLRQAAPPTPLPPRPVAGRREKATIRKPNDFKQPGERYRSWDADRQDRFVRRFADSLGHPKVSQELRSIWIDLLAKCDASLGMKIATRLNMKANIVGVHTAAFCHPQAAAPQAPRRRPAAAAAASTHGAVASINRQRALRTPAIREKSSIHGVIGCNSPRDPRYLHCPRDPRSLHCHRDAASPSPPPVADFADLHARRGFRLPQAP

SEQ ID NO: 6929 - protein, 122 aa, Brassica napus
MAGEDQRRRWSLQGKTALVTGGTKGIGHAIVEELAGFGAIIQTCARDEAHLNECLSDWKNKGFQVTGSVCDASSWTEREKLMQTVSTLFDANLSILINNVGGIRSKPTIENTAADANCVHFV

SEQ ID NO: 6930 - protein, 432 aa, Sulfolobus tokodaii str. 7
MDCIFIFRRDLRLEDNTGLNYALSECDRVIPVFIADPRQLINNPYKSEFAVSFMINSLLELDDELRKKGSRLNVFFGEAEKVVSRFFNKVDAIYVNEDYTPFSISRDEKIRKVCEENGIEFKAYEDYLLTPKSLFHHRNFTSFYNEVSKVKVREPETMEGSFDVTDSSMNVDFLLTFKKIESPLFRGGRREGLYLLHRNVDFRRRDYPAENNNYRLSPHLKFGTISMREAYYTQKGKEEFVRELYWRDFFTLLAYYNPHVFGHCYRREYDNISWENNESYFEAWKEGRTGYPIIDAGMRMLNSTGYINGRVRMLVAFFLVKVLFVDWRWGERYFATKLVDYDPAINNGNWQWIASTGVDYMFRVFNPWKQQEKFDPEAKFIKEWVEELKDVPPSIIHSIYKTKVPGYPSPIVNWLERVNYVKSEYKNVKAVL

SEQ ID NO: 6931 - protein, 502 aa, Thermotoga maritima MSB8
  misc_feature (1)..(1): Xaa can be any naturally occurring amino acid
  misc_feature (13)..(13): Xaa can be any naturally occurring amino acid
  misc_feature (32)..(32): Xaa can be any naturally occurring amino acid
  misc_feature (43)..(43): Xaa can be any naturally occurring amino acid
  misc_feature (227)..(227): Xaa can be any naturally occurring amino acid
  misc_feature (265)..(265): Xaa can be any naturally occurring amino acid
  misc_feature (382)..(382): Xaa can be any naturally occurring amino acid
  misc_feature (448)..(448): Xaa can be any naturally occurring amino acid
  unsure (1)..(502): unsure at all Xaa locations
XGSDKIHHHHHHXKEIDELTIKEYGVDSRILXERAGISVVLAXEEELGNLSDYRFLVLCGGGNNGGDGFVVARNLLGVVKDVLVVFLGKKKTPDCEYNYGLYKKFGGKVVEQFEPSILNEFDVVVDAIFGTGLRGEITGEYAEIINLVNKSGKVVVSVDVPSGIDSNTGKVLRTAVKADLTVTFGVPKIGHILFPGRDLTGKLKVANIGHPVHLINSINRYVITREXVRSLLPERPRDSHKGTYGKVLIIAGSRLYSGAPVLSGXGSLKVGTGLVKLAVPFPQNLIATSRFPELISVPIDTEKGFFSLQNLQECLELSKDVDVVAIGPGLGNNEHVREFVNEFLKTLEKPAVIDADAINVLDTSVLKERKSPAVLTPHPGEXARLVKKTVGDVKYNYELAEEFAKENDCVLVLKSATTIVTDGEKTLFNITGNTGLSKGGSGDVLTGXIAGFIAQGLSPLEASTVSVYLHGFAAELFEQDERGLTASELLRLIPEAIRRLKE

SEQ ID NO: 6932 - protein, 489 aa, Triticum aestivum
  misc_feature (311)..(311): Xaa can be any naturally occurring amino acid
  misc_feature (481)..(481): Xaa can be any naturally occurring amino acid
  unsure (1)..(489): unsure at all Xaa locations
MVISHASSSAGEAVYSTFSSRYVREELPRYRMPEGSIPKEAAYQIISDELMLDGNPRLNLASFVTTWMEPECGKLMMDSVNKNYVDMDEYPVTTELQNRCVNMIAHLFNAPIGEDETAIGVSTVGSSEAIMLAGLAFKRKWANKMKEQGKPCDKPNIVTGANVQVCWEKFARYFEVELKEVKLTEGYYVMDPKKAVEMVDENTICVAAILGSTLTGEYEDVKLLNDLLVEKNKKTGWNVPIHVDAASGGFIAPFLQPELEWDFRLPLVKSINVSGHKYGLVYPGVGWVIWRSKDDLPDELIFHINYLGTDXQPTFTLNFSKGASQIIAQYYQLIRLGFEGYKHIMENCKLNAAVLKEGIDATGRFDVLSKADGVPLVAIRLKDSTNFSVFDISENLRRFGWIVPAYTMPADAEHVAVLRIVIREDFNRSLAQRLLADINKIVAELDAHAVHAIKLSNAAAAEGASKSTVDAVTEAFKGLAXGNKKAGVC

SEQ ID NO: 6933 - protein, 180 aa, Amborella trichopoda
MFPMVTGFMNYGQQAVRAARYIGQSFMITLSHANRLPVTIQYPYEKSITSERFRGRIHFEFDKCIACEVCVRVCPIDLPVVDWRFETDIRKKRLLNYSIDFGICIFCGNCVEYCPTNCLSMTEEYELSTYDRHELNYNQIALGRLPIPVVGDYTIQTIMNSNQTKIAMNKPLDSRTITNY

SEQ ID NO: 6934 - protein, 268 aa, Dechloromonas aromatica RCB
MSRIKSAFERLNGEGRKALIPFITAGDPDAALTLPLMHTLVEAGADVIELGVPFSDPMADGPTIQRASERALARGMTLRKVLQLVVEFRKTDGKTPVVLMGYANPVEAMGLEKFAAAAAQAGVDGVLIVDYPPEEAAAFGAAMKAQGMDPIFLLAPTSSAERIAHVAEIASGYVYYVSLAGVTGSGALNVEAVAERLPLIREKTGLPVGVGFGIRDAATAARIAGIADAVVVGSRIIEEIEKSTAETACANVKALVADIRRGVDEVKK

SEQ ID NO: 6935 - protein, 394 aa, Staphylococcus aureus subsp. aureus MSSA476
MNSIIELTDYYSSNNYAPLKLVISKGKGVKVWDTDGKQYIDCISGFSVANQGHCHPTIVKAMTEQASKLSIISRVLYSDNLGKWEEKICHLAKKDKVLPLNSGTEAVEAAIKIARKWGSEVKGITDGQVEIIAMNNNFHGRTLGSLSLSNHDAYKAGFHPLLQGTTTVDFGDIEQLTQAISPNTAAIILEPIQGEGGVNIPPKGYIQAVRQLCDKHQILLIADEIQVGLGRTGKWFAMEWEQVVPDIYILGKALGGGLYPVSAVLANNDVMRVLTPGTHGSTFGGNPLAIAISTAALDVLKDEQLVERSERLGSFLLKALLQLKHPSIKEIRGRGLFIGIELNTDAAPFVDQLIQRGILCKDTHRTIIRLSPPLVIDKEEIHQIVAAFQDVFKN

SEQ ID NO: 6936 - protein, 244 aa, ASPERGILLUS NIDULANS FGSC A4
MAAVAENAPPVTNENTAPPAVAVEEKTEKANGDIVTVFHDPENFNVKHPLMHEWTLWFTKPPSGKGDNWNDLLKEVVTFNSVEEFWGIYNNITPTSELGLKADYHLFKKGVRPEWEDPQNKHGGKWSFSFKDKRSVPIDDLWLHAQLAAIGETLENDGDNEVMGVVVNVRKGFYRVGLWTRTVGKTLPGDKSGRTPAQGKEVLESIGRRFKEVLRLGPNDSVEFSGHTDSAHSGSTRAKAKYTV

SEQ ID NO: 6937 - protein, 202 aa, ASPERGILLUS NIDULANS FGSC A4
MLRWYQAKLAKQPILTASVTSALTPCPFKVLFGAGDALAQQAVERRGLEKHDFARTGRMTFYGGANADQAVFGPVATLWFRFLQRNIALNNPKATIIARVAADQCLFAPAHLTFFLSSMAIMEGTDPVAKWKQSFVPGYKANLAVWPLVQGINFAFVPLELRVLVVNVISLGTYRSSPSHPTLLTCPSGWNCVLSVINSGGK

SEQ ID NO: 6938 - protein, 546 aa, Staphylococcus aureus subsp. aureus MSSA476
MKQRIGAYLIDAIHRAGVDKIFGVPGDFNLAFLDDIISNPNVDWVGNTNELNASYAADGYARLNGLAALVTTFGVGELSAVNGIAGSYAERIPVIAITGAPTRAVEHAGKYVHHSLGEGTFDDYRKMFAHITVAQGYITPENATTEIPRLINTAIAERRPVHLHLPIDVAISEIEIPTPFEVTAAKDTDASTYIELLTSKLHQSKQPIIITGHEINSFHLHQELEDFVNQTQIPVAQLSLGKGAFNEENPYYMGIYDGKIAEDKIRDYVDNSDLILNIGAKLTDSATAGFSYQFNIDDVVMLNHHNIKIDDVTNDEISLPSLLKQLSNISYTNNATFPAYHRPTSPDYTVGTEPLTQQTYFKMMQNFLKPNDVIIADQGTSFFGAYDLALYKNNTFIGQPLWGSIGYTLPATLGSQLADKDRRNLLLIGDGSLQLTVQAISTMIRQHIKPVLFVINNDGYTVERLIHGMYEPYNEIHMWDYKALPAVFGGKNVEIHDVESSKDLQDTFNAINGHPDVMHFVEVKMSVEDAPKKLIDIAKAFSQQNK

SEQ ID NO: 6939 - protein, 407 aa, Fusobacterium nucleatum subsp. nucleatum ATCC 25586
MKILGLKTKIILGMQHVLAMFGATVLVPFLTGLNPSIALICAGVGTLMFHSVTKGIVPVFLGSSFAFIGATALVLREQGIAILKGGVISAGLVYVMMSFIVLKFGVERIKSFFPPVVVGPIIMVIGLRLSPVALSMAGYSNNTFDRDSLIIALIVVISMIFISILKKSFFRLVPILISVAIGYIVAYFMGDVDLSKIHEASWIGLPEGAWDTITTVPKFTFSGVVALAPIALVVFIEHIGDITTNGAVVGKDFFKNPGVHRTLLGDGIATMAAGLLGGPANTTYGENTGVLAVTKVYNPAILRIAACFAIVLGLIGKFGVILQTIPQPVMGGVSIILFGMIAAVGVRTIVEAQLDFTHSRNLMIAALIFVLGIAIGDITIWGTISISGLALAALVGIVLNKILPEDK

SEQ ID NO: 6940 - protein, 578 aa, Rhodobacter sphaeroides 2.4.1
MSALRGLVPFLAPYRKLTFGALGALVLTAIISLILPVTVRRVVDGFMENNAALLDQYFAAALFIAAALAAGTGLRYYLVTRLGERVVADMRRALFDRMMGMSPAFFERIMTGEVLSRLTTDTTLLLSVIGSSISVALRNLLILIGGLVLLLFTSTKLTGLVMLLVPLVVVPIVILGRKLRRLSRENQDWIAQSSGNASEALLSVQTVQAFTHERQSRAFFGDVTEKSFLSAKDRIGTRALMTVIVIFLVFTGIVGVLWVGARDVRAGTMTPGEMVQFLIYAVMVAGSVGALSEIWSELQRAAGATERLNELLTAEDPVQDPATPVALPRPVKGEISFEGVRFRYPARPEVSALDGIDLVVRPGETVALVGPSGAGKTTILQLLLRFYDPQQGAVRIDGVDLRDMTRDDFRRAIALVPQDPVIFATSARENIRFGRPEATDAEVEAAAHAAAAHDFLSLLPQGYDTYVGERGVMLSGGQKQRVALARAILRDAKILLLDEATSALDAESERAVQTAVEALAQNRTTLVVAHRLATVKRADRIVVFDKGRIVATGTHDALVAEGGLYARLARLQFTDGSV

SEQ ID NO: 6941 - protein, 476 aa, Mycobacterium avium subsp. paratuberculosis K-10
MRDDDSANRWSGVREAPTAPSRQLTGAVVIIALVAAISGMLYGYDTGVISWALLQLTQDFNITEGWQQVIAASILLGAVAGALTCSWLSDLRGRRGTLLMLAVVFIVGALWCADAADSVMLSLGRLVLGFAVGGATQTAPMYVAELAPPAYRGRLVLCFQIAIGVGILTATLVGAGGSISWRGPIGLACVPAAIMLWLLLRLPESPRWLVKKDNRDAARAVLEHVRPEGYDVAAELDEATELARVERTAATRGWRGLRDAWVRPALVLGCGIAVFTQLSGIEMIIYYSPTILTDDGVYRSVALQVSVCLGAAYLIAQLVGLAIIDRVGRRRLTLIMVPGAAVSLFALGLLFITSDSGRDVIPYIMICLIAFMLFNGGGLQLMGWLTGSETYPLAVRPAATALQSATLWGTNLVITLTMLSLIKAIGVGPLMWLYALFNVAAWIFVFFRMPDLTGKTLEEIEYQLSEGKFRPSDFGR

SEQ ID NO: 6942 - protein, 306 aa, Rhodobacter sphaeroides 2.4.1
MILCCGEALIDMLPRETTAGEAAFAPYAGGAVFNTAIALGRLGAPAGFFSGLSTDLFGVQLAETLAASQVETDLCARSDRPTTLAFVRLTNGQASYAFYDENTAGRLLAPADLPALPDRVSTLFFGGISLVNEPAAATYEALMAREAPRRVTMLDPNIRPGFIADAAAYRARIGRMIALADILKLSDEDLHWLEGPGQILSLARGLLARGPKLVLVTEGAVGARAVTATEDRFCAATPVQVADTVGAGDTFNAGVLAALHEAGALSRSAVASLSPETLAAALALGTRAAAVTVSRPGANPPWVDEL

SEQ ID NO: 6943 - protein, 805 aa, Medicago truncatula
MATERLTRVHSLKERLDETLTANRNEILALLSRLEAKGKGILQHHQVIAEFEEIPEDSRQKLTDGAFGEVLRSTQEAIVLPPWVALAVRPRPGIWEYLRVNVHALVVENLQPAEFLKFKEELVDGSANGNFVLELDFEPFTASFPRPTLNKSIGNGVQFLNRHLSAKLFHDKESLHPLLEFLRLHSYKGKTLMLNDRIQNPDSLQHVLRKAEEYLSTIDPETPYSEFEHRFQEIGLERGWGDTAERVLESIQLLLDLLEAPDPCTLETFLDRIPMVFNVVILSPHGYFAQDDVLGYPDTGGQVVYILDQVRALESEMLSRIKKQGLDIIPRILIITRLLPDAVGTTCGQRLEKVYGTEHCHILRVPFRDTKGIVRKWISRFEVWPYLETYTEDVAHELAKELQGKPDLIVGNYSDGNIVASLLAHKLGVTQCTIAHALEKTKYPESDIYWKKFEEKYHFSCQFTADLFAMNHTDFIITSTFQEIAGSKDKVGQYESHTAFTLPGLYRVVHGIDVFDPKFNIVSPGADQTIYFPYTETSRRLTSFYPEIEELLYSSVENEEHICVLKDRNKPIIFTMARLDRVKNITGLVEWYGKNAKLRELVNLVVVAGDRRKESKDLEEIAEMKKMYGLIETYKLNGQFRWISSQMNRVRNGELYRVICDTKGAFVQPAVYEAFGLTVVEAMATGLPTFATLNGGPAEIIVHGKSGFHIDPYHGDRAADLLVEFFEKVKVDPSHWDKISQGGLQRIEEKYTWTIYSQRLLTLTGVYGFWKHVSNLDRLESRRYLEMFYALKYRKLAESVPLAVE

SEQ ID NO: 6944 - protein, 219 aa, Chromobacterium violaceum ATCC 12472
MQDIIAGILKFQREAYPRRAELFRRLAGDQSPATLFIACSDSRVVPELLTQREPGDLFVIRNAGNIVPGYGQEPGGVSASVEYAVTALGVADIVVCGHSDCGAMTAVACGKDLSGMPAVAGWLRHADCAKAINNAGEHDNPAAKVDAMARENVIAQLANLRTHPSVALALQQGRLRLHGWMYDIASGDVLALDPEQRRFLPLRDCPQTATMLDGDCRQP

SEQ ID NO: 6945 - protein, 686 aa, Lilium hybrid division I
MELLQIENELPWRQFRKQLAATVRDIQWSYAIFWAFSTKQQGVLAWKDGYYNGEIKTRKTTQAVELEDEEMGLQRSEQLRELYGSLSFGDSNHQMKRPSASLSPEDLTDMEWYYVVCMSFTYRPGEWLPGKTLARNQYIWMSNAPSADTELFSRTLLAKSASVQTVVCFPFMGGALELGTSELVLEDPSLIQHVKTCLRETPTPVYSPTSISSSPVTGNGEDNLFPNLNPELVDTIFLDNHILMTECQTPVESYNPGLPFALPSPAPPEEAGLIQDKFDELCEELKFGSPDHSSNIFCPNQHADNTQIIEGINVASLDQGNQLMDNDLTAFCGSLEGGGCISETFLNTRLVPSSLKGERVQNNAVDYFREGDFTKLVSPDLNGGDSHYTRTLHDTLSNSKQLTSTPYFWSNSYESSFSAWKSDLSFPELLGNTYQKLLKKILMDDVGMNSDRSLKPQEDDRLKNKFPKIDVDDASASHVISERRRREKLNEKFLVLKSLVPSITKVDKASILGDTIEYLKELQRRIEELESCRKSVNHDPKGKRKHLDVIERTSDNYGSNKIGNCKRASAGKRKACAIEEAETEHQWTLMKDGPVHVNVTTTDKEAIVELHCPWRDCLLLKIVEAISNLHLDAHSVQSSITEGILALTLRAKHRRSVVTSTAMIRRALQSVISKCVDQESTSERYN

SEQ ID NO: 6946 - protein, 805 aa, Medicago truncatula
MATERLTRVHSLKERLDETLTANRNEILALLSRLEAKGKGILQHHQVIAEFEEIPEDSRQKLTDGAFGEVLRSTQEAIVLPPWVALAVRPRPGIWEYLRVNVHALVVENLQPAEFLKFKEELVDGSANGNFVLELDFEPFTASFPRPTLNKSIGNGVQFLNRHLSAKLFHDKESLHPLLEFLRLHSYKVKTLMLNDRIQNPDSLQHVLRKAEEYLSTIDPETPYSEFEHRFQEIGLERGWGDTAERVLESIQLLLDLLEAPDPCTLETFLDRIPMVFNVVILSPHGYFAQDDVLGYPDTGGQVVYILDQVRALESEMLSRIKKQGLDIIPRILIITRLLPDAVGTTCGQRLEKVYGTEHCHILRVPFRDTKGIVRKWISRFEVWPYLETYTEDVAHELAKELQGKPDLIVGNYSDGNIVASLLAHKLGVTQCTIAHALEKTKYPESDIYWKKFEEKYHFSCQFTADLFAMNHTDFIITSTFQEIAGSKDKVGQYESHTAFTLPGLYRVVHGIDVFDPKFNIVSPGADQTIYFPYTETSRRLTSFYPEIEELLYSSVENEEHICVLKDRNKPIIFTMARLDRVKNITGLVEWYGKNAKLRELVNLVVVAGDRRKESKDLEEIAEMKKMYGLIETYKLNGQFRWISSQMNRVRNGELYRVICDTKGAFVQPAVYEAFGLTVVEAMATGLPTFATLNGGPAEIIVHGKSGFHIDPYHGDRAADLLVEFFEKVKVDPSHWDKISQGGLQRIEEKYTWTIYSQRLLTLTGVYGFWKHVSNLDRLESRRYLEMFYALKYRKLAESVPLAVE

SEQ ID NO: 6947 - protein, 371 aa, Colletotrichum gloeosporioides f. sp. malvae
MAQNRPSAFNTLRMGGKLGVKPLTRRGCSANASIREKVQDGITGETRDLQYTQCKIVGNGSFGVVFQTKLSPSGEDAAIKRVLQDKRFKNRELQIMRIVRHPNIVQLKAFYYSNGERKDEVYLNLVQEFVPETVVPRVAVFNKMKTTMPILEVKLYIYQLLRALAYIHSQGIWHRDIKPQNLLLDPTSGVLKLCDFGSAQDLKKTNPNVSYILLANSNSISKLIRIPSNLHAADVWSTGCVMAELMLGQPLFPGESGIDQLVEIIKVLGTPTREQIRTMNPNYMEHKFPQIKPHPFAKVFRKADANAIDLIARLLESTPTERQAAVEAMVHPFFDELRDPSTRLPDSRHQSGEIRDLPPLFDFTRHGKLPP

SEQ ID NO: 6948 - protein, 402 aa, Acinetobacter sp. ADP1
MVSSVANPSYKLPVTVLSGFLGAGKTTLLNHILNNREGRRVAVIVNDMSEVNIDAALVQNGGAELSRTDEKLVEMSNGCICCTLREDLLIEVKRLAEENKFDQLVIESTGISEPLPVAETFTFADEAGQSLNEFAQLDTMVTVVDAFNFLQDYSSYDQLNDRGESLGEHDQRSVVDLLIDQIEFCDVIILNKVDLIDDIKKERLMAILNKLNPRARIQISEFGKVDLDSVLNTGLFDFDQAAQAPGWLKELRGEHVPETEEYGITSFVYRARRPFHPQRFFNFINSEWPGVIRSKGFFWLACEPTLACSWSQAGGMARHGMAGTWWAATEPENWPRDDQSLAEIEKHWDEKVGDARQEIVMIGMDMNQDTLIQGFNECLLSDDEMALGPDGWTQMSNPFDWS

SEQ ID NO: 6949 - protein, 680 aa, Lilium hybrid division I
MAAPPCNSLQQLLQTVVQSVDWTYSLFWQLCPREEILVWGGGYYNGAIKTRKTVQSVDVSIEESSLQRSQQLRELYDSLTTAGKAGQPVLRPSAALSPEDLTESEWFYLICVSFSFPPGVGLPGVAFTKRQHVWLSRATEVDRKVFTRAILAKSANIQTVVCIPIMDSGVLELGTTKKVEEDLGLVQHAKSIFNDYLDKHPMPTLSEHSTSNPVAYTDQVLFQSQPFQTTSINLQGSDQEEDDGDDEDDVDGDDNDDDELEAGSDSDTAYNARVLMQSLHPSFTTEAVIPRTEQSELMHIEMSEGIRLGSSEDCSNNLDSELQMFGMGCNSSQSDQHQDDSYQAWHFLHQDLCDGFPQSTGDTLMQDLSQQDAHYSETVSSILHNNSSRWAGSVPISYLSHSWQTAFSKWNSRDQVLQVLSEGTSQRMLKYNMFTVPHLHSRPKDENSLESGVGDGESKFQKGTLQEELSANHVLAERRRREKLNERFIILRSLVPFVTKMDKASILGDTIEYVNQLRRRIQDLEARNRQMGKNQRSKESEVYGPSNSKEHTVQINRSPELPFASSCQTRTSLSDKRKVRVVEGVGRRAKHAEAVESSTNVQVSIIETDALLELSCPYRDGLLLKIMQTLDELRLEVISVQSSSANSTLVAELRAKVKEVQGKKATIVEVKKAIHYIFSQ

SEQ ID NO: 6950 - protein, 520 aa, Trametes versicolor
MSRFHSLFAFVVASLTAVAHAGIGPVADLTITNAAVSPDGFSRQAVVVNGGTPGPLITGNMGDRFQLNVIDNLTNHTMLKSTSIHWHGFFQKGTNWADGPAFINQCPISSGHSFLYDFQVPDQAGTFWYHSHLSTQYCDGLRGPFVVYDPNDPAADLYDVDNDDTVITLVDWYHVAAKLGPAFPLGADATLINGKGRSPSTTTADLSVISVTPGKRYRFRLVSLSCDPNYTFSIDGHNMTIIETDSINTAPLVVDSIQIFAAQRYSFVLEANQAVDNYWIRANPNFGNVGFTGGINSAILRYDGAAAVEPTTTQTTSTAPLNEVNLHPLVATAVPGSPVAGGVDLAINMAFNFNGTNFFINGASFTPPTVPVLLQIISGAQNAQDLLPSGSVYSLPSNADIEISFPATAAAPGAPHPFHLHGHAFAVVRSAGSTVYNYDNPIFRDVVSTGTPAAGDNVTIRFRTDNPGPWFLHCHIDFHLEAGFAVVFAEDIPDVASANPVPQAWSDLCPTYDARDPSDQ

SEQ ID NO: 6951 - protein, 333 aa, Acinetobacter sp. ADP1
MTDLPTTMRHIEISQSGDPDVLHIVETSLPKIKIDEILIEVKAFGINRPDVLQRKGLYPMPKDVTPIPGLEVAGIVTAIGENVSQFKVGDRVCALTNGGGYAEYCAVPETQTLPIPSNLSYIEAAAIPETYFTVWANLFDIGQLSVGETALIHGGASGIGTTALTLCHAMGIKTFCTVGSDDKVDALNKITTAINYKKHNFEEVILEQTQNKGVDVILDIVGGKYFQQNMNTLKRDGRLVILGFMGGRYAKEFDLQQLILKRAKVTGSTMRARTDQEKSEITQSLRQHVWPLLSEGKSLPLIYKSFSFEDISKAHTCMEESEHIGKIVITLTE

SEQ ID NO: 6952 - protein, 101 aa, Zea mays
YNGHQGQHRLRSALRRAVCVLMPRAGSKKKISDLGVWLVELFWSFWAYIWLYVILEVWTPRVITLWEASLTVLQYGLLLLHAYAQDKRCPFVSIPLYDPDS

SEQ ID NO: 6953 - protein, 470 aa, Francisella tularensis subsp. tularensis SCHU S4
MSDIKTQVVVLGSGPGGYSAAFRAADLGLEVVLVERYAEIGGVCLNVGCIPSKAMLHIAKVINEARHLESLGIIEMGGLKINRENLLKYKDGVIGKLTGGLKGMAQMRKVKIVQGYGKFTSDKELAVEAADGKVTKIAFDNCIIAAGSSVIKLPFVPEDDRIIDSTGALEMKEIPETMLVVGGGIIGLEMAQVYSELGTKITVVEFADQLMNGVDKDLVKAYQKVNSRYDVRLKTAVTAMEAKEDGIYVTMEGDHPAKDERFDRVLMAIGRKPNGKLIDAEKAGVKVDERGFIPVDKQLRTNVPHIFAIGDIVGQPMLAHKAVPEGRTAAEVISGLNHSFDPLVIPSVAYTDPEVAWVGETETSAKAKGIKYEKGVFPWAASGRSLSIDRSEGMTKILFDENHKIIGASIVGTHAGELISEAAIAIEMGCDAEDIALTVHPHPTLSESLMMATEVYEGTATDLPPQKKKK

SEQ ID NO: 6954 - protein, 366 aa, Ralstonia eutropha JMP134
MGTVASFDIGYTRYLDPPGATPVSSSPLPPFANDPDALLPLYRAMVLTRQFDLKAIAMQRTGKIGTFASALGQEAVGVGVASAMRPEDILVPSYRDHAAQFVRGVTMTESLLYWGGDERGSGFAAAPHDFGNNVPIGTQVCHAAGVAYAVQLRGEPRVAVCMLGDGGTSKGDFYEGMNMAGAWHAPLVIVVNNNQWAISMPRSRQTAAHTLAQKAIAAGIPGEQIDGNDVVAVRHRVGEAIERARAGEGPSLIEAITYRLGDHTTADDASRYRDESTVKAHWQAEPLLRLREHLVKLGAWDAGREEALVRECSQQVAQAVEAYLALPPPDPAAMFDCLYATMPAALQEQLATARRYAAPHGQTNPN

SEQ ID NO: 6955 - protein, 665 aa, Candida glabrata CBS138
MPNQFKYTTDERRSSVIYSTSVGKGGLYVPQDYIPPEATERVIDEEMERGDSSDEPLTYQSLSVNRNSNAGSNKRRSDEYQSLIEANNARTLQREHNARQSITNADGYGAISNYRKNSINKELLEEERDLLIDNHLLDTSKSRRHSQSVGINAAQDFFLGQGYNENTNSVHPDLFIEGEEEVEEEEEEEEIINTWEDAIESGKEISTSFHREIQVISVNAFPLVFTFILQNSLSLASIFSVSHLGTKELGGVTLGSMTANITCLAAIQGLCTCLDTLCSQAYGARNNHLVGVLVQRCAIITCLAFLPVMYIWFFWSDRILASMIPEKELCSLAASYLKITAIGVPGFIFFECGKRFLQCQGIFHASTIVLVICAPLNAILNYILVWDKNIGIGYLGAPTSVAISYWAMALGLLAYTVLTKHPANPMKCWNGVIKPNQLFRNWKKMFNLALPGIIMVEAEFLGFEILTVFASRIGTAPLGAQSIVATVASLAYQVPFSISVSTSTRVANFIGASLYKSCIITCKVSLLLSFACSSLNMLIIFTFKKQIAGLFSSEEDVVSLVVSTLPILAFMQLFDAFNASTAGCLRGQGRQKIGGYINLFAFYCIGIPMAYCLAFVFNTGVGGLWYGITCALVMMSICQGYAVFHCDWKQIIEAAKVRNSESCRP

SEQ ID NO: 6956 - protein, 874 aa, Kluyveromyces lactis NRRL Y-1140
MTSASRKNSEVKETSPSRDVANGNGSNDNATSTNSTEYFANTNVLTCRLKWVDPDTFITDPKKSQLLTSLNQLVHSNKGLLINPKEMENYQYFSDHERIAHLKENLDVYLFERGNAEVDSWYRDSDLENEKTTWFYDVVIQAQFKPYKDLQATKEGFLSELTKFSGNGNKSSSILECWSISENPHALNHPGNLYVRGIPKNLTKEDLVPIFAKFGPILVLKIILDSNTNESMGFGFVSYALGSQASNCIKELNGNLMNGSPLFVNYHVERKERERIHFDQWKQNEQEESTKFKGVFVGNLPIFTTENKLLTPSIVLEKFKKALPDCEMVSYFFPKTNSQTNVEYSETDEDSKSESPLHLNAESFPVKSKHNSDETNKRNNEKIEDPQLKTIEKHHDNGDEDIVMKNDATTSSDTEVPKSSSSSDDETEATNEETCSSQNEESPLKGYGFFRFATHEMALKCIETFNDSQWYGHQLVVNKAIQKFHQHQHSYHGNSSSSLSSMNNNGNNNHYHNHHHQQQQQQQQQQQQQQQYNNNNHHYSGPHQTHHGHSSPHQPYYQQSFFPPMYSFRLSRRHSDRSISSRQSNAPGFSPPPITPLPLNEPSYNRNNSSNSRSISRQNSITNIQYGSRDQAYDHHSPSSSTQNSIPPPSMSQPVYPVSIPPPPTGIPGQALPPLVTQSIPVLTNSSTNSTGSPRNNSIYGPMNMPLTYSSSNPMFNTPLPIPRSDEQESNLYVKHLPLDWRDEDLYQFFEKFGEIISAKIITVGGSIKEQDDQDLKKDELFGKSKGYGFVCFQNPLDASRAMYHTDGLKLNSDNTLFVSFAQRRSKSIDSIKGPVSNNVNYNKKFLNAMYQQQQQQYHPWMVPVPMHYPPPSH

SEQ ID NO: 6957 - protein, 776 aa, Ralstonia solanacearum
MTTIHTLGYPRIGAQRELKFALESFWKGASTEADLRDTGRALRERHWNAQRDAGLDFVTVGDFAWYDQVLQTAALLGALPTRYGFDPAQLTLAQSFVLARGNADHAAMEMTKWFDTNYHYLVPELTPDLRFGPGTGWLFDEVREAQAAGHRVKVALLGPVTFLHLAKARGGLADKLSLLPQLLPAYAAVLKRLAAEGVEWVQIDEPALVLDLPQAWSDAYGPAYATLAAAGGPRLLLATYFEAASHHAALIRSLPVAGVHLDLVRAPQQLEAFAPWPADKVLSAGVVDGRNIWRTDLEQALARVAPLAQTLGERLWLAPSCSLLHVPVDLAAETRLDDELKGWLAFARQKLDELAVLKRAVIDGRDAAHAALAGSAAAIASRAASRRVHNDSVKKRAAAIRAQDAERAAPYPVRAAAQQARLNLPLLPTTTIGSFPQTAEIRQARAQYKRGELQALTYLERMRAEIADVVQRQEALGLDMLVHGEAERNDMVEYFGELLWGYAFTANGWVQSYGSRCVKPPVIYGDVYRPEPMTVEWSRYAQSLTAKPMKGMLTGPVTMLQWSFVRDDQPREQTALQIALALRDEVRDLEAAGIAAIQIDEPAFREGLPLRAGDVAVYLEWAARVFRVSASGVRNDTQIHTHMCYSEFNDILPAIASMDADVITIETSRSNMELLDAFGEFAYPNEIGPGVYDIHSPRVPRVEEMEALLDKAAQVVPVQRLWVNPDCGLKTRGWPEVEAALRGMVEATRRLRARHAGAVHAGTPATRAEHAESALA

SEQ ID NO: 6958 - protein, 467 aa, Glycine max
FLGRFSKMESVKPSAVTPSKSKLARTFAKVLHVRAVTGIAPVDGLKNVKVDADLNNEANKCKSALNNEEDEELQERKATEALLAKTFASISTVKASYAQLQNAQSPYDPDGIQAADQLIVSEFKTLSELKQCYFKKQFDPLPARAILAAKLKELQSVNRTFEIMGKKLESQARLKESEIIFLREKLEEANVHNRSIEKRLNQSGSLSVLDNLHMSGLSPSHFVTVLRHTVRSIRSFVKLLVNEMRSAGWDIDASVKAIMEQNVVYWKEDHKCFAIESFVCREMFDSFNFPNFSLPNESLPDRNRRQLFFGRFNELKPEKAKDFLAGKPRSPFAKFCRIKYLRLVHPKMEASFFGNLNQRSLLNAGEFPNTNFFTSFAEMAKRVWLLHCLAFSFEPPQASIFQVGKWCRFSDVYMESVNENDEEMPVESETQIAFTVVPGFRIGKTVIQCQVYLSQRQVKNFTSTKQR

SEQ ID NO: 6959 - protein, 354 aa, Vitis aestivalis
MRRGPLNPSNLKLTLPPDEDSLTKFLTQSGTFMDGDLLVNRDGVRIVSKSEAEVPPLIKPSDNQLSLADIDTIKVIGKGAGGTVQLVQHKWTGQFFALKVIQMNIQEAALKHIAQELKINQSSQCPYVVVCYKSFYDNGAFSIILEYMDGGSLLDFLKKVKSIPEPYLAAICNQVLKGLSYLHHERHIIHRDLKPSNLLINHRGEVKITDFGVSAILTSTSGQANTFVGTYNYMSPERISGGKYGSKSDIWSLGLVLLECATGQFPYSPPEQGEGWTSFYELMEAIVDQPPPCASTNQFSAEFCSFISACIQKDPNDRKSAHELMAHPFISMYRDLNVDLATYFTNAGSPLATF

SEQ ID NO: 6960 - protein, 208 aa, Arabidopsis thaliana
MSASRFIKCVTVGDGAVGKTCMLISYTSNTFPTFNKLYDLVTEYQDYVPTVFDNFSANVVVDGNTVNLGLWDTAGQEDYNRLRPLSYRGADVFILAFSLISKASYENVAKKWIPELRHYAPGVPIILVGTKLDLRDDKQFFIDHPGAVPITTNQGEELKKLIGSPIYIECSSKTQQNVKAVFDAAIKVVLQPPKQKKKKKNKNRCVFL

SEQ ID NO: 6961 - protein, 137 aa, Nicotiana tabacum
IWDPFEGFPFSGTVANIPTSTRETAAFSSARIDWKETPESHVFKVDLPGIKKEEVKVEVEEGRVLQISGERSREQEEKNDKWHSMERSSGKFLRRFRLPENIKMEEIKATMENGVLTVTVPKMEEKKPEVKAIDISG

SEQ ID NO: 6962 - protein, 464 aa, Rhodospirillum rubrum
MTVVDRGTAHWQKLDADHHWHPFTNTKALNQKGARVIVRGEGVYLWDSEGNRILDGMAGLWCVNLGYGRTELAEAAAAQFATLPFYNTFFQTTHTPAVELAHLIASVTPGDLNHVFFASSGSEAVDTALRMARAYWVVAGKPSKTWVIGRKNAYHGSTLAGASLSGMSGMWKYGAPLVPDIAHIAQPYWYGEADAAETDPEAFGLARARLLEAKILELGAENVAAFIGEPIQGAGGVIVPPASYWPEIERICRKYDVLLIADEVICGFGRTGSWFGSQTFGITPDIMTMAKGLSSGYLPISAVAVGNRVADELINGGGEFTHGFTYSGHPVSAAVAKRTIEILRDEKIIERVHDDIGPYFQERLRTLEDHPLVGKVDGVGLIAGIALVASKSPKRFFEKGDEVGLICRDHCFAEGLVMRAVGSRMVCAPPLIISRDEVDELVRLARRCFDLTLRDVGPLIETAK

SEQ ID NO: 6963 - protein, 256 aa, Kluyveromyces lactis NRRL Y-1140
MVSVHEYSNSSELASSVGEFIVAEQNKALESHGRFNVAISGGSLINVLRKALVDDPSVSKQIQWAKWHVYFSDERLVPLEDKDSNYGAFKQAVLEELTRKQVIGPVVYTINESLVQEGGSENEKVSNEYESLLPKEPFDLILLGCGPDGHTCSLFPGEAHKYLLEENKRKVLWCHDSPKPPSDRITITLPVLSASKSLAFVAEGSGKKPILDEIFNKQNQELPCTIVNKENDAKTRWFVNSDAVEGLGLHAEKYSA

SEQ ID NO: 6964 - protein, 342 aa, Zea mays
  misc_feature (17)..(17): Xaa can be any naturally occurring amino acid
  unsure (1)..(342): unsure at all Xaa locations
MSMSFLSMVEAELPPGXFRFHPRDDELICDYLAPKLGAKPGFSGCRPPMVDVDLNKVEPWDLPVAASVGPREWYFFSLKDRKYATGQRTNRATVSGYWKATGKDRPVVAARRGALVGMRKTLVFYQGRAPKGRKTEWVMHEYRMEPAAPLLDHQPSSSNSKDEDWVLCRVICKKKLAAGGRAGGGSSRSLVASNGGRETAPATPPPPPLPPRMDTDATLAQLQAAMHATAGALEQVPCFSSFNNNTTASSRAAAAAAAAAAQPCYLPSMATGGSHGTTCYYLDHAMLPPELGGCFDPLHGDKKLLKAVLGQLGGDAVAPGLSLQHEMAAGAVVASSAWMNHF

SEQ ID NO: 6965 - protein, 376 aa, Streptomyces microflavus
MAPTEATRGGPADPAPAPEAHRGGHTEHADPAEHAAQFGAQERILTLVWGYISSEILDLATRLDLPDLMGTEERAAAELAASLDTDPVATLRLLRAFAALGLAEETGAGRFRLTPAGHRLRTDVPDSLHAFVRQGMGVFRQAWSHFDHSIRTGEPAFDQVFGTDFFSYLSERPELSGTFTSSMREATRTMSTALAKEEEYDFSSYGTVVDIGGADGSLLAAVLSAHPGVEGVVFDSPEGARDAAATLDAAGVGERGRVETGDFFTRVPGGGDLYVLKSILHDWSDARSADILRTVRAAMPAHARLLVVEVLLPDTVDSSAHPLGYLSDLYMLVNMGGRERSERDLRSLLSDTGFRTTRVRTPPGLTPFSLIEAAPV

SEQ ID NO: 6966 - protein, 588 aa, Idiomarina loihiensis L2TR
MTVKTLEYDAVVIGAGGAGMRAALQISQEGLSCALMSKVFPTRSHTVSAQGGITVALGNAHEDNWEWHMFDTVKGSDYIGDQDAIEYMCKAGPEAILEMENLGLPFSRFENGKVYQRPFGGQSKNFGGEQAARTAAAADRTGHALLHLLYQQNVKKKTTVFSEWYALDIVKNQDGEVCGVTTMDIESGEVYFVKAKAVVLATGGAGRIYSSTTNAHINTGDGIGMALRAGVPVQDMEMWQFHPTGIAGAGSLVTEGCRGEGGYLLNKDGERFMERYAPNAKDLASRDVVSRAMMTEIREGRGCEGPWGTHLKLKLDHLGKETLESRLPGVCDLSRTFAHVDPVKEPIPVIPTCHYMMGGIPTDVNGQVLTVGDDGQTSHVKGLFACGEIACVSVHGANRLGGNSLLDLVVFGRSTGMHLGETLAANVEAREASSDDIDAALARYNRWENTQKGEDPAQIKKDLQQCMQLNFSVFREGDSMKEGLAELREIRERLKNARLDDTSKEFNTQRVECLELDNLMETAYSTAVAASFRTESRGAHSRADYPDRDDEKWLVHTVYRPEKEDMVTREVNMAPKLREAFPPKARTY

SEQ ID NO: 6967 - protein, 271 aa, Arabidopsis thaliana
MDVIATTTTIVSDLDSRQPEIEAPIRIQPAKPISFSNGKRCHHHHLASEAVAVATYKECLKNHAAGIGGHALDGCGEFMPSPSFNSNDPASLTCAACGCHRNFHRREEDPSSLSAIVPAIEFRPHNRHQLPPPPPPHLAGIRSPDDDDSASPPPISSSYMLLALSGGRGGANTAVPMSRKRFRTKFSQYQKEKMFEFSERVGWRMPKADDVVVKEFCREIGVDKSVFKVWMHNNKISGRSGARRANGGVVVGGVGDSRQSVVPTNGSFSST

SEQ ID NO: 6968 - protein, 426 aa, Idiomarina loihiensis L2TR
MADRKATLQIDGQSIELPVLSPTAGKDVVDVRTLGKHGYFTFDPGFLATGSCESAITYIDGENGVLLHRGYPIGELATKADYLEVCYMLLHGEAPTEKQYHEFKNTITKHTMVHQGIHNFFNGFRRDAHPMAMLCAVTGALSSFYHDDLEIHDENQRLRSAYRLIAKIPTIAAMAYKFSIGQPFVYPRNDLGYAENFLNMMFSVPAEDYKISPAVARAMDRIFTLHADHEQNASTSTVRLAGSSGANPYACIAAGVASLWGPAHGGANEACLRMLAEIGSVENIPKYIEKAKDKDDPFRLMGFGHRVYKNTDPRATVMRESCHEVLKELDRDDPLLDVAMELERIALEDDYFIEKKLFPNVDFYSGIVLKAIGIPTNMFTVIFALSRTVGWVSHWHEMMGEENQKIGRPRQLYTGYTKREFSPIKK

SEQ ID NO: 6969 - protein, 503 aa, Nocardioides sp. JS614
MAGGVDRATAGRASASEASSAREREVERIKGGSFRDGSDRCGELTQRTTRPAPDWLPSGKTGHASRPARTTLGAMSTQHDEHDAAGATGVADQVVAAAERARAASHGLALATRAEKDAALQAMAEALLTREPEVLAANGEDVARAEANGTPPNIVDRLRLTQERVAAMAQGLRDVAALPDPVGEVLRGSTLANGLEMRQVRVPFGVVGMIYEARPNVTADAAGICLKSGNAVLLRGSSSARSSNAAIVAALRDAIAGTGLDPDVVQQVPGDSHDSVKALMRARGHVDVLIPRGGAGLIRSVVEESTVPVIETGVGNCHVYVDRAADLDKALAIVLNAKTHRTSVCNAAESLLVHADLADTFVPRVVAALQEAGVTVHGDERFQAEDGVLPATDEDYGQEYLSLDISAAVVPDLDGAIAHIRRWSSQHTEAIVTEDLAAARRFTAAVDSAAVLVNASTRFTDGGEFGFGAEIGISTQKLHARGPMGLTEMTSTKYVVTGDGHVR

SEQ ID NO: 6970 - protein, 169 aa, Capsicum annuum
GCVPKKILVYGAAYGPELEDARNYGWEVNERVDFNWKKLLHKKTEEIVRLNGIYKRLLSNAGVKLFEGEGRVIGPNEVELIQLDGTKMSYSAKHILISTGSRAHRPGIPGQELAITSDEALSLEELPKRAVILGGGYIAVEFASIWRGMGVTVDLCFRKQLPLRGFDDE

SEQ ID NO: 6971 - protein, 391 aa, Hevea brasiliensis
MEFPETNNNPIITLSFLLCMLSLAYASETCDFPAIFNFGDSNSDTGGKAAAFYPLNPPYGETFFHRSTGRYSDGRLIIDFIAESFNLPYLSPYLSSLGSNFKHGADFATAGSTIKLPTTIIPAHGGFSPFYLDVQYSQFRQFIPRSQFIRETGGIFAELVPEEYYFEKALYTFDIGQNDLTEGFLNLTVEEVNATVPDLVNSFSANVKKIYDLGARTFWIHNTGPIGCLSFILTYFPWAEKDSAGCAKAYNEVAQHFNHKLKEIVAQLRKDLPLATFVHVDIYSVKYSLFSEPEKHGFEFPLITCCGYGGKYNFSVTAPCGDTVTADDGTKIVVGSCACPSVRVNWDGAHYTEAANEYFFDQISTGAFSDPPVPLNMACHKTESLRTLASV

SEQ ID NO: 6972 - protein, 236 aa, Oryza sativa (japonica cultivar-group)
MGRGKIVIRRIDNSTSRQVTFSKRRNGIFKKAKELAILCDAEVGLMIFSSTGRLYEYSSTSMKSVIDRYGKSKDEQQAVANPNSELKVLAKGGSKLETTTAQLARKSSVWLMGEDLSGLNVKELQSLENQLEISLRSVRTKKDHVLIDEIHELNRKGSLVHQENMELYKKISLIRQENAELYKKIYETEGPSEVNRDSPTPYNFAVIEKTNVPVQLGLSTLPQHSDAEQSTAPKLG

SEQ ID NO: 6973 - protein, 475 aa, Oryza sativa; identical to SEQ ID NO: 1305

SEQ ID NO: 6974 - protein, 503 aa, Triticum aestivum
METGGKDGNPLKNYRIGKTLGIGSFGKVKIAEHIKTGHKVAVKILNRRKIKNMEMEEKVKREIKILRLFMHPHIIRLYEVIEAPADIYVVMEYVKSGELFDYIVEKGRLQEEEARRFFQQIISGVQYCHRNMVVHRDLKPENLLLDNNCDVKIADFGLSNVMRDGHFLKTSCGSPNYAAPEVISGKLYAGPEVDVWSCGVILYALLCGTLPFDDENIPNLFKKIKGGIYTLPSHLSGPARDLIPRMLVVDPMKRITIREIREHPWFEAQLPRYLAVPPPDTAQQVKKIDEESLVKVISLGFDKNLLVESIHNRLQNEATVAYYLFLDNKSRTTTGYLGAGYQEAMESSFSPITPSETQSPAHGNRQQPYMESPVGLRPHFPADRKWALGLQSRAHPREVMTEVLKALQELNVYWKKIGHYNMKCRWSPPGFPGQENMNHTNYNFSAEPIETDDLGDKLNLIKFELQLYKTRDEKYLLDLQRASGPHLLFLDLCAAFLAQLRVF

SEQ ID NO: 6975 - protein, 119 aa, Brassica rapa subsp. pekinensis
LMWYFLNVIFNILNKKIYNYFPYPYFVSVIHLFVGVVYCLVSWSVGLPKRAPINSDILKVLIPVAVCHAIGHVTSNVSFAAVAVSFTHTIKALEPFFNASASQFLLGQPIPITLWVSLA

SEQ ID NO: 6976 - protein, 367 aa, Frankia sp. CcI3
MARSRVLRPPAGRQPESGRMIMTDDDMLALVVRGHRDHGLERRPRPEPGPGEALVATDFAAMCGTDLRLLDGTLHDAEYPVIPGHEWSGTVLAAPDRPELVGRAVVGDNFRLCGRCPACLAGRPNLCTDIDEVGFTRPGAFAQLFTIPAANLVALPPQVPGPQACLLEPLGVALHAVERAGAVSGRSVGVIGAGTIGLLVAQLARGAGASRVRVADPLQSRRRIAADLGVDADPGIEGWHPDLPEVVFDATGAAGVFPRGLTATAVGGVYVLVGYSGAEAVTVEPSTVMLRELTVQGVLSGQGQLRTALAKVVAGEVRLGPLTGDPVPLTSYRSVLERDGPAPLRLFFHVGGDRTAGATSQEQGVTA

SEQ ID NO: 6977 - protein, 582 aa, Idiomarina loihiensis L2TR
MDSQLKKKTTFKRLLGYIKPYKAAFIAAILCMIGYSAIDTLFLSQIETLIDDGLTEQDSNILLYGALFVPFIFILRGSLNVASSYFLHWVGFKVVTKMRQQLFDHMMKLPVGFHDQHSTGDLISKITYDTQQVAEASSRAVLVLVKEGAFVAGLLGLMFYQSWQLSLVFLVIGPLVAKVVGVVSRRFRKVSSRIQTAMGNVTTTAEQMINGHKVVIMHQGQKGESTRFSEINNITRNQNMKLVNTRAISTSVIQFIASLSLSMVLVIASFPEMLGELSAGAFTTLLTAMIMLLRPLKQLTNVNSDFQRGIAAATSVFAILDEPIEVDKGSRVVDRAAGDIVFDDVTFSYQKDDEPALEHINFKVDQGKTVALVGRSGSGKSTISNLLTRFYDVEQGSILLDGHNINDYKLKCLRRQFALVSQHVTLFNDTIANNIAYGASKDVSRENIIKAAEQAYVTEFTDSMPKGLDTMVGENGVMLSGGQRQRIAIARALLQDAPILILDEATSALDTESERHIQDALGTLRKNRTAIVIAHRLSTIENADEILVMDNGEIIERGTHQQLLDQEGAYFQLHNLQFSGSA

SEQ ID NO: 6978 - protein, 150 aa, Triticum aestivum
SPGLQGPVTSSLNGSEATRAPPAALTEERKRKRKESNRLSAQRSRARKLLQVDELEAEAAALRARNCAVAAAAQEAARRCAVVQAENELLHARALELGARLESLAELIQYIDAAAAMGASSIPLAGVNGTALPQQPILQTELYCNYPYYC

SEQ ID NO: 6979 - protein, 324 aa, Candida tropicalis
MSTTPTIPTIKLNSGYEMPLVGFGCWKVNNETAADQIYNAIKTGYRLFDGAEDYGNEKEVGEGINRAIKEGLVKREELFITSKLWNNFHDPKNVETALNKTLSDLNLDYVDLFLIHFPIAFKFVPIEEKYPPGFYCGDGDNFHYEDVPLLDTWKALEKLVEAGKIKSIGISNFTGALIYDLIRGATIKPAVLQIEHHPYLQQPKLIEYVQKAGIAITGYSSFGPQSFLELESKRALNTPTLFEHETIKSIADKHGKSPAQVLLRWATQRNIAVIPKSNNPERLAQNLSVVDFDLTKDDLDNIAKLDIGLRFNDPWDWDNIPIFV

SEQ ID NO: 6980 - protein, 411 aa, Zea mays
MNALAATTRNFRRASKLLGLDSKLEQSLLIPFREIKVECTIPKDDGSLATFVGFRVQHDNARGPMKGGIRYHNEVDPDEVNALAQLMTWKTAVAAVPYGGAKGGIGCSPGELSRSELERLTRVFTQKIHDLIGTHTDVPAPDMGTNAQTMAWMLDEYSKFHGHSPAVVTGKPIDLGGSLGRDAATGRGVMYATEALLAEYGKCISGSTFVIQGFGNVGSWAARLIHEKGGKIIAIGDVTGSIRNTAGIDIPALVKHRNEGHAMKDFDGAEVLGSTELLVHDCDVLVPCALGGVLNKDNAPDVKAKFIIEAANHPTDPEADEILAKKGVVVLPDIYANSGGVVVSYFEWVQNIQGFMWAEEKVNDELEKYMSSAFQHMKAMCKSLDCDLRMGAFTLGVNRVARATLLRGWEA

SEQ ID NO: 6981 - protein, 961 aa, Nocardioides sp. JS614
MGDRLQGRRPRRDPPRPRHLRRLRRVRREGPVPRPRGRARPRTPGGARPPVGDHPPGVVHDPRRRHHRVRREPAEEVPGHLPDQLRQRPDRHLPGGAADRPAVDVARRAHLPGRQPAHQAGGVLGVAAQGDPAHRPRRDLPGRGVHPAGDDARPRRDRLPPVLHVLHLAQREVGARGVPPRAVPRDRPPDAAELLREHAGHPARLPAVRRARGVQDPRRDCRDRVAQLGRLRRLRAVRARRGPPRQRGVPRLGEVPDPDPRLGRRRARAPHARAVPDAPQRDPPPAPGAPAAAQRVDPLERRREHPGVQQAAGAPRRPRRCRDRGRQRRPARSSRDHGPPRPGRTRAVADRLVPGARRDHRRRLELGRAQLRAARPVPRAGAHLEREEAPVTQGLTPDPPENNPDWFKSAVFYEVLVRSFRDSNADGTGDFRGLVEQLDYLQWLGVDCLWIPPFFPSPLRDGGYDVADYTGVLPEIGTIEDFRYFLDEAHQRGLKVIIDFVMNHTSDQHPWFQASRSDPQGPYGDFYVWSDTDELYEEARIIFVDTEPSNWTWDPVRQQYFWHRFFSHQPDLNFDNPAVHDAMLDAIRFWLNMGLDGFRLDAVPYLYERPGTNGENLPETHEMLKKVRKVVDDEYPGRILLCEANQWPQDVVEYFGDFAVGGDECHMAFHFPVMPRIFMAVRRESRFPISEILEQTPAIPENCQWGIFLRNHDELTLEMVTDEDRDYMWGEYAKDPRMKANIGIRRRLAPLLDNDTNQMELFNALLFSLPGSPVLYYGDEIGMGDNIWLGDRDGVRTPMQWTSDRNAGFSSANPGKLDLPLIQDPVFGYQSVNVEAQLENTSSLLHWMRRMIHARRNHPAFGLGTFHDLGGSNSTVLSYVREYTTEDGSEDIILCVNNLSRFPQPVELDLRRFEGRRPVELIGGVPFPEIGELPYLLTLAGYGFYWFRLTAPETSEEGLLL

SEQ ID NO: 6982 - protein, 403 aa, Ralstonia solanacearum
MLRRFWLFFAQAVTVVLAVWFVIATLKPEWLQRGKVAVQSGSPIVALKEVAPLGHSGTTSNSYAEAAKVAMPAVVNIFSSKNAPKRNNPQANADPWFRFFFGDRLPEQRQEPTASLGSGVIVSPEGYILTNHHVVDGADEIEVALTDGRKANAKVVGTDPETDLAVLKISLTNLPAITLGRLENVRVGDVVLAIGNPFGVGQTVTMGIVSALGRSHLGINTFENFIQTDAAINPGNSGGALVDAEGNLLGINTAIYSRSGGSLGIGFAIPVSLAKQVMESIISTGSVVRGWIGVEPQDVTPEIAESFGLSRKDGALIAAVVQGGPADRAGLRPGDILINVNGESIQDTTALLNSIAQLKPSTEAKVTVSRKGKPVELTIMVGKRPPPVRRNVPMPSPEDEQPQ

SEQ ID NO: 6983 - protein, 424 aa, Treponema denticola ATCC 35405
MSKVLSIILGGGKGTRLYPLTMHRSKPAVPFGGKHRIIDIPLSNCINSGFRNIYIVTQFNSASLHIHIAKAYTFDTFSNGFVEILAAEQTFDNTGWYEGTADSIRKNLHHFRHQNPSHYLILAGDQLYRMDLKKFLNFHKESESDITVACTPVTREDASGFGIMKVNSDSLITEFMEKPGADKNIDDWKIPEKSLIKPNDPNKQYLASMGIYIFSAKIMEECLDSDHTDFGKEVIPAAINGKYKVSAFPHNGYWSDIGTIKSFYDATLDLTEITPKFDFYDAERPIYTHNRNLPPSKVNYAHLSRSICSEGCVITNSTINHSVIGVRSIIETGSFVEDSICMGADYYETHEEKETRLKEGSPGLGIGNHCRIRSAIIDKNVRIGNNVSIGMDQTPPDGDYGFYHVVGGIYVIVKNSVIPDNTSI

SEQ ID NO: 6984 - protein, 447 aa, Arabidopsis thaliana
MAGSEAVEDKEIKSAVSSCEAYFEKVQSRKNLPKSLQETLNSAFAGIPVSSFPQVPGGRVIEIQAETPVSEAVKILSDSKILSAPVINTDHESSLDWRERYLGIIDYSSIILWVLESAELAAIALSATSATAAGVGAGAVGALGVAALGMTGPVAAAGLAAAAVGAAVAGGVAAERGIGKDAPTAADKLGKDFYEVILQEEPFKSTTVRTILKSFRWAPFLPVSTESSMLSVMLLLSKYRLRNVPVIKTGEPDIKNYVTQSAVVHGLEGCKGRDWFDHISALPISDLGLPFMSPNEVISIESEELILEAFKRMRDNNIGGLPVVEGLNKKIVGNISMRDIRYLLLQPEVFSNFRQLTVKSFATKIATAGEEYGLAIPAITCRPDSTLGSVINSLASRSVHRVYVAAGDENELYGVITLRDVISCFVSEPPNYFENCLGFSVKEMLNR

SEQ ID NO: 6985 - protein, 259 aa, Bacillus cereus ATCC 14579
MKVACIQMDIVFGDVEKNIENAKNKISEAMKERPDVIVLPELWTTGYDLTRLSEIADRDGVETKEKLIEWAKRYDVHIVGGSIAKQTEQGVTNTMYVVNNEGQLVNEYSKVHLFQLMDEHKYLIAGNGTGEFKLDDVECAGTICYDIRFPEWMRVHTAKGAKVLFVVAEWPLVRLAHWRLLLQARAVENQCYVVACNRAGKDPNNVFAGHSLIVDPWGEVVVEANEEESILFGELEFEKIKEVRKGIPVFADRRPELYK

SEQ ID NO: 6986 - protein, 381 aa, Bacillus cereus G9241
MAANLEQLTETLISIRRNLHEHPELSYEEFETTKAIKNWLEEKNITIINSNLETGVIAEISGNHSGPLIAIRADIDALPIQEETNLPYASKIDGRMHACGHDFHTAAIIGAAYLLKEKEASLRGTVRFIFQPAEESSDGACKVIEAGHLHGVQAIFGMHNKPDLPVGTIGIKDGPLMAGVNRFEIEIHGVGTHAAVPDAGVDPIVASSQIVMALQTIVSRNISSSHNAVVSVTNIHSGNTWNVIPEKATLEGTVRTFQTETREKIPALMKRIIQGVSDALGVKTEFRFYAGPPAVHNDTSLTNLSTQVAETMNLNIISPTPSMAGEDFSFYQQEIPGSFVFMGTSGTHEWHHPSFTVDERALPISAEYFALLAEKALKHFS

SEQ ID NO: 6987 - protein, 376 aa, Vitis aestivalis
MGCFPCAGKSNKKGKKNQEKNSKDQIPSTSERLKVNSSVDGRKDASKDGGSDHIAAHTFTFRELAAATKNFRAECLLGEGGFGRVYKGRLESTNKIVAIKQLDRNGLQGNREFLVEVLMLSLLHHPNLVNLIGYCADGDQRLLVYEYMALGSLEDHLHDLPPDKKRLDWNTRMKIAAGAAKGLEYLHDKASPPVIYRDLKCSNILLGEGYHPKLSDFGLAKLGPVGDKTHVSTRVMGTYGYCAPEYAMTGQLTLKSDVYSFGVVLLEIITGRKAIDNSKAAGEHNLVAWARPLFKDRRKFSQMADPMLHGQYPLRGLYQALAVAAMCVQEQPNMRPLIADVVTALTYLASQKYDPETQPVQSSRMGSSTPRSRREL

SEQ ID NO: 6988 - protein, 404 aa, Arabidopsis thaliana
MPSHKETKWSFLVSGKRSFLNNDESDLHFKKMYKLTTDSSEGEDNGSSSDSGTLIPGMNRDDSLSCLIRCSRADYCSIASVNRSLRSLIRSGEIYRLRRLQGTLEHWVYFSCHLNEWEAFDPRSKRWMHLPSMPQNECFRYADKESLAVGTDLLVFGWEVSSYVIYRYSLLTNSWSTAKSMNMPRCLFGSASYGEIAVLAGGCDSSGRILDTAELYNYEDQTWLVLPGMNKRRKMCSGVFMDGKFYVIGGIGVGEENEPKVLTCGEEFDLKTRKWTEIPEMSPPRSNQGNGMSAAAMAPPLVAVVNDQLYAADHAGMAVRRYDKEKRVWNKVGNLPEQAGSMNGWGLAFRACGDRIIVIGGPKAPGEGFIELNSWVPSVTTPEWHLLGKKQSVNFVYNCAVMSC

SEQ ID NO: 6989 - protein, 231 aa, Zea mays
  misc_feature (47)..(47): Xaa can be any naturally occurring amino acid
  unsure (1)..(231): unsure at all Xaa locations
MSSPTCGTREMLSANSTATSIGQVQKVPGFAKLQGENFGYFMQTYSXMLGRTSRRYTADFDLSKYECGSQCDSRCHACIFYDFELRHFAIEVLVRNGCTIRGVSYIPGSVPGKKKKIKLNSQDLIEIAGIKFYFLLPSRSIFATLAARDATMLPPQSPSLLHPNYPGNPSANDCGRSNGENGVKISNDMQGKLVKQKRSFSGELDISYSYGTKKNVDRVGTLDGCGMLSLL

SEQ ID NO: 6990 - protein, 139 aa, Nicotiana tabacum
LNIWDPFEGFPFSGTVANIPTSTRETAAFSSARIDWKETPESHVFKVDLPGIKKEEVKVEVEEGRVLQISGERSREQEEKNDKWHSMERSSGKFLRRFRLPENIKMEEIKATMENGVLTVTVPKMEEKKPEVKAIDISG

SEQ ID NO: 6991 - protein, 249 aa, Vitis aestivalis
MAPKEKVAGVKPSANAKEVHFRGVRKRPWGRYAAEIRDPGKKSRVWLGTFDTAEEAAKAYDSAAREFRGAKAKTNFPLVSENLNNNNQSPSQSSTVESSSREGFSPALMVDSSPLDLNLLHGGGVGVGVGVGVGAAAGYATAMRFPFQHHQFQVSSPSPAAGIVPTGGLPAANHLFYFDAMLRTGRVNQDFQRLRFDRAASDFRAALTGGVQSDSDSSSVVDLNHNDLKPRARVLIDLDLNRPPPPEIA

SEQ ID NO: 6992 - protein, 220 aa, Vitis aestivalis
MAPRDKPTGVTAGATGNKEIRYRGVRKRPWGRYAAEIRDPGKKSRVWLGTFDTAEEAARAYDAAAREFRGAKAKTNFPSPTDLAAAAATTANRSPSQSSTVESSSREALSPGAIAGPPALDLNLSHPAAAGQFSAVRYPAVGVFPIAQPLFFFEPFSRPEKPKTHRDMFDLDRAVADFHPAIAGSVHSDSDSSSVVDFNYHDRSTRLLNLDLNHPPAEVA

SEQ ID NO: 6993 - protein, 980 aa, Arabidopsis thaliana
MLQNQHKTTKNQRNKNIGTKYFLRKKIMGFCFSKFGKSQTHEIPISSSSDSSPPHHYQPLPKPTVSQGQTSNPTSNPQPKPKPAPPPPPSTSSGSQIGPILNRPMIDLSALYDLHKELGRGQFGITYKCTDKSNGREYACKSISKRKLIRRKDIEDVRREVMILQHLTGQPNIVEFRGAYEDKDNLHLVMELCSGGELFDRIIKKGSYSEKEAANIFRQIVNVVHVCHFMGVVHRDLKPENFLLVSNEEDSPIKATDFGLSVFIEEGKVYRDIVGSAYYVAPEVLHRNYGKEIDVWSAGVMLYILLSGVPPFWGETEKTIFEAILEGKLDLETSPWPTISESAKDLIRKMLIRDPKKRITAAEALEHPWMTDTKISDKPINSAVLVRMKQFRAMNKLKKLALKVIAENLSEEEIKGLKQTFKNMDTDESGTITFDELRNGLHRLGSKLTESEIKQLMEAADVDKSGTIDYIEFVTATMHRHRLEKEENLIEAFKYFDKDRSGFITRDELKHSMTEYGMGDDATIDEVINDVDTDNRSQTKILKLTSDDDALNLAAAEFLVNHRQISSASSGIPNLVACSPTEIIIPRVNNAGLRIEEIVDAAKGKIRLDSWISSRINGVSRARVQSSIRLGLVTVNGRVVDKVLTSKFDSSKKFQFCNQVSISLTLFQVSHNVKSGDEVNCTISELQPLKAEAEDIPLDIVYEDKHVLVVNKPAHMVVHPAPGNPTGTLVNGILHHCSLPCVDYSNSEEDDDSDEETFSDDEEMTTSPSSYAASVRPGIVHRLDKGTTGLLVVAKDEHSHAHLAEQFKLHTIERVYVSLTTGVPSPPQGRIEIPIGRDSSNRIRMAAIPGGVRGGRARHAASRYKVIETFAGGGSALVEWRLETGRTHQIRAHAKYMGVPLLGDEVYGGTKSMALSLLQKRVSRSDQEEIIELISRMDRPCLHAIVLGFTHPCTGEIVKFSCPPPSDLAEIVGLLRRSGL

SEQ ID NO: 6994 - protein, 134 aa, Nicotiana tabacum
LDIWDPFEGFPFSGTVANVPTSAFANARIDWKETPEAHVFKVDLPGIKKEEVKVEVEEGRVLQISGERSREQVEKNDKWHRMERSSGKFLRRFRLPENTKMEEIKAAMENGVLTVTVPKMEEKKPDVKAIDISA

SEQ ID NO: 6995 - protein, 1199 aa, Magnaporthe grisea 70-15
MAEHTSLAADEKGEGGHPRPPDPVPVVEKQAPVILSEDQKRILNTQLDCPTCDVSFLALYRFADVWDCLIIGVSVVCAIAAGAASPLLSVFFGQLTNAFQGIATGSIASRDFEAELVRYVLYFVYTGIGEFVAVYVSTVGFIYTGEHITQRIRARYLQAVLRQNVAYFDNLGAGEITTRITADTNLVQDGISHKVSLTLTAVATFVTGFLIAYIRFWKLALICTSTLVAFVTVMGGGTKVIVKYGTRSMQHYAEGNNVVQEVLGTIRTATAFGTQDRLAERYESHLRVVERYGIKMQVAQALMVGALYSITFLTYGLGFWQGARFLGTGEMDAGGILTVLMTIMTGSYAIGNVFPHTQAFTNARAAASKIYSTIDRPSPLDPASKHGQQLERVQGDIELRGVTHVYPSRPDVVVLDDPSGRRYFIRRPIGPGSQPAMAPSANVVGVPDARGEEGLVLSGGQKQRVAIARAVVSDPKILLLDEATSALDAKSEKVVQSALDNASEGRTTVVVAHRLSTIKRAHNIVVLSGGRIAEQGTHEELIALGGEYYRLVESQEFSDDEVDSEASNELKGAKAELEATTPTDKHALAKVSFLGSNTPTGPTGDESNTVYSLGTLVRFVASFNKPELKLILLGVVFVVLAGCTQPTQAVLYAKAIAAITTSANRDQLRRDTDFWALMLLALGLAQLLFYAVQGTCLGVGSEKLTSRARGTAFRVMLRQEIAFFDREDNTTGSLTSFLSAETKHLSGISGIILGSILMTVTTLTASLVVALAVGWKLALVCISVVPFLLACGFWRVSILARFQVHSKRAYEASATYACEATTAIRTVAALTKEEEILAQYDRQLGRQARDSLAWTLKASALYALSQAVTFFCQALAFWYGGTLLASREYSIFQFFVCFSEIMYGTNAAGSIFHHASDMGKAKNAAADFKRLFDRRPDIDVWSEEGEKVSSAAVEGMVEFRDVHFRYPTRPEHAVLSGLSFKVEPGQYVALVGPSGCGKSTTIALLDRFYNVTSGGVYLDGRDISQLNVNSYRNLLALVSQEPTLYQGTVRENILLGSQDRDVSEEALVAACKEANIHDFIQSVPDGYDTQVGSRGSMLSGGQKQRVAIARALIRNPRVLLLDESTSALDSESERVVQAALDAAAKGRTTIAVAHRLSTVQKAHVIFVLDQGRVVESGTHQELMRSKGHYYELVNLQRLG

SEQ ID NO: 6996 - protein, 247 aa, Zinnia elegans
MKRHGSSDSVGLMPMCHTLDETREFHSMLMEGLDDDCGGVDGGECDRGLISEKKRRLTAVQVKALEKNFEMENKLEPERKVKLAKELALQPRQVAIWFQNRRARWKTKQLERDYGVLKSNFDSLKHKYESLKQDNESMVKQIKELKSKLYEEDEPDNIPMPEQSDDKPKSPENMVETAYFPDFKDGSSDSDSSAIMGDAQKAYQPQFVKLEEHNFFGGDESCNFFSDDQAPTLQWYCQDQWNLSEEN

SEQ ID NO: 6997 - protein, 753 aa, Escherichia coli
MSQHNEKNPHQHQSPLHDSSEAKPGMDSLAPEDGSHRPAAEPTPPGAQPTAPGSLKAPDTRNEKLNSLEDVRKGSENYALTTNQGVRIADDQNSLRAGSRGPTLLEDFILREKITHFDHERIPERIVNARGSAAHGYFQPYKSLSDITKADFLSDPNKITPVFVRFSTVQGGAGSADTVRDIRGFATKFYTEEGIFDLVGNNTPIFFIQDAHKFPDFVHAVKPEPHWAIPQGQSAHDTFWDYVSLQPETLHNVMWAMSDRGIPRSYRTMEGFGIHTFRLINAEGKATFVRFHWKPLAGKASLVWDEAQKLTGRDPDFHRRELWEAIEAGDFPEYELGFQLIPEEDEFKFDFDLLDPTKLIPEELVPVQRVGKMVLNRNPDNFFAENEQAAFHPGHIVPGLDFTNDPLLQGRLFSYTDTQISRLGGPNFHEIPINRPTCPYHNFQRDGMHRMGIDTNPANYEPNSINDNWPRETPPGPKRGGFESYQERVEGNKVRERSPSFGEYYSHPRLFWLSQTPFEQRHIVDGFSFELSKVVRPYIRERVVDQLAHIDLTLAQAVAKNLGIELTDDQLNITPPPDVNGLKKDPSLSLYAIPDGDVKGRVVAILLNDEVRSADLLAILKALKAKGVHAKLLYSRMGEVTADDGTVLPIAATFAGAPSLTVDAVIVPCGNIADIADNGDANYYLMEAYKHLKPIALAGDARKFKATIKIADQGEEGIVEADSADGSFMDELLTLMAAHRVWSRIPKIDKIPA

SEQ ID NO: 6998 - protein, 212 aa, Sinorhizobium meliloti
MTGRPRLFGAEYSVYVRIVRLALAEKGTDYELVPVDIFASDGPPQDYLERHPFGRIPAFEYEGFRLYETGAITRYVDDVFDGRRLQPLDPRERARCSQLMSIADNYAYPTLVWGVYVERVSKPASGAAADENAIAAALPKARTCLKAISEIMGTAPWLAGETMSLADLYAAPIFDYFLRAPEGQEMLREHEMLAAWWARMSVRRSMMETRPA

SEQ ID NO: 6999 - protein, 248 aa, Ralstonia eutropha JMP134
MYKLVLIRHGESTWNLENRFTGWVDVDLTDTGAAQARLAGKLLKEAGFAFDVAYTSVLKRAIRTLWHVQDEMDEMWIPVRNEWRLNERHYGALAGLNKAETAAKFGDEQVLVWRRSYDTPPPALEPTDPRASYDDPRYANVPREQIPLTECLKDTVARVLPLWNESIAPDIQSGKRVVIAAHGNSIRALVKYLDQISDDDIVGLNIPNGTPLVYELDASLRPLRHYYLGDQEAIAASLAAVASQGKAR

SEQ ID NO: 7000 - protein, 464 aa, Magnetococcus sp. MC-1
MMATIWDLIVIGAGPGGYPAAIRAAQLGLSVLCIEKSPHPGGTCLNAGCIPTKALLASTHLYTQIRDQADLHGIEITTMQVNLARMQGRKERVVSQLRSGILGLFKKYGVTLLHDEAIVSGPGQITLAASGETLQAKAILLATGGQPRRPASMPVDGQVVITSEQAIALTRVPEHLIVIGSGAVGLELASIWVRLGAQVSVIEAQPEILPGWDATVARTAKRSLRQQGITFLTDHRVETVVRSGSRAAVTCLNSKGETLMLDGDQVLVAVGRQAQLCVAGIQNLELQQDEQGRLWVDAHYATSLAGLYAVGDLIAGPQLAHRATAEGLRVADYLAGRPLSPMGPIPSVVYTDPELAMVGLTEQQAKVAGYAVKCGQFPFMASGRARAQEQTEGLIKLVMDQTTGQLLGAHVVGGAGAEHLQLAMAAMLTQDRGQLLERLVMPHPSFGEALHEAWLVATQKPIHI

SEQ ID NO: 7001 - protein, 284 aa, Zea mays
MAGAEVANGVHDGALDLEEGRGGGVDGAGCESSEQDGAGRRPMFSVPFVQKILAEALGTYFLIFAGCAAVAVNLRTGGTVTFPGICAVWGLAVMVMVYSVGHISGAHLNPAVSLAFATCGRFPWRQVPAYAAAQVTGATAASLTLRLLFGSAREHFFGTVPAGSDAQSLVVEFIISFNLMFVVSGVATDNRAIGELAGLAVGATVLLNVLFAGPISGASMNPARTLGPALVVGRYAGIWVYFAGPICGTVAGAWAYNLIRFTDKPLREITQTSSFLRSVRRSSS

SEQ ID NO: 7002 - protein, 137 aa, Burkholderia fungorum LB400
MAYSDKVLDHYENPRNVGSFAKDDDAVGTGMVGAPACGDVMKLQIRVGADGIIEDAKFKTYGCGSAIASSSLVTEWVKGKTLDQAMSIKNTQIAEELALPPVKIHCSILAEDAIKAAVADYKQRHGEAVVADEKQHA

SEQ ID NO: 7003 - protein, 539 aa, ASPERGILLUS NIDULANS FGSC A4
MADQFKARTLKRKNVKGLALNAAPKSTSTLSNGDSQVPGAAGNGESNRTDTLEIGLEFRLDLRSEDLITLKELGAGNGGTVSKVMHASTKVVMARKIIRVDAKENVRKQILRELQVGHDCNSPNIVTFYGAFQNEARDIVLCMEYMDCGSLDRISKDFGPIRVDVLGKITESILAGLVYLYEAHRIMHRDIKPSNVLVNSRGNIKLCDFGVATETVNSIADTFVGTSTYMAPERIQGGAYTVRSDVWSVGLTVMELAVGRFPFDTTDSAAGDRASAGPMGILDLLQQIVHEPAPKLPRSDAFPPVLHEFVAKCLLKKSEERPTPLELYEKDAFLAAAKRTPVDLQEWAISMMERHNRKSYLAPPAPKSLKETRESPSPAQAPSPVQKHGTSRPSRGTTGEIPLNVARDSSSHQRQHAPQSQSHFSSNPSHYSSNSSHYSSRSSRSSPPISLEHLSLESKQDEHRPTRRPSRTPLGDSSSSLDQSLRPSIGSRSASSHNTNSRMPLQSTALPFRVAPTPGGYPTPNSTSWQRRGDHMGAL

SEQ ID NO: 7004 - protein, 409 aa, Mycobacterium leprae TN [sequence omitted]

SEQ ID NO: 7005 - protein, 561 aa, Geobacter sulfurreducens PCA
MLSVFQLNRNIRSLRRYRQIVRVLVKYGFEHALSLMGLSRFVARGRRLFRKPEPELARLSPAERMRLALEELGPTFVKLGQILSTRPDVIPRSFVLEFARLQDQVPSFPFEDALDQIRRELGRDPEERFSFIDPEPLAAASIAQVHRARLVSGEEVVIKVRRPGVVEAVETDIDAMMGLAVLAERHLPRSDIYDPVGLVKEFARTIRREMDFAREGHTIERFAENFAGDPTLYFPTVHWDCTARGLLTMEFINGIKVSDTAALERAGMDRRLIARRGADAFLKMVLTHGFFHGDPHPGNVLILPDNVICLLDYGMVGRLDAQLKGYLTDILLAIVQRDVDEVISLLLYSGEIADTLDTRALKRDLTGLIDNYYETPLQEIEVGRVLLEFLEVITTYHIKFQPDLMLLAKALVAIEGMGRELDPAFDMVEHLRPFMKQAVRDRFSPRQLIREMNSNLLSYFTLARNLPRDLKELLNRINRNKFKIDLEHRGLDRAMREFDKSVNRLSSSLIIAALIVGSSIVMQTDKGPKFLDFPVFAFMGYTIAGFIGLWWVVAIIRSGRL

SEQ ID NO: 7006 - protein, 310 aa, Sulfolobus tokodaii str. 7
MYIFKFMDEFLIMDYSSIVEEVSKSVVTILTKQLTLDEFLMPSIAEGLGSGFSVGNGFVITSYHVIQNSRNIAVVSKDGFSSEADVIAVNPFNDLALLYTNLNLKALKFSEKVKVGEGVLAIGSPLGLDSVTLGIISSVDRTIQSPLGNPLYVLQTDAAVNPGNSGGPLINTKGEVVGVVTAMIPYAQGIGFAIPSKLVLSFLKNVERNNGKYVRPYLGIRVIKLNKAISTYFNLSSDSGVLVVAVDEDSPAYEAGIRRGDIITEVNGKKIESQLDLVASIDETGLEEIEMKILRGKDKISIKVAPVPLG

SEQ ID NO: 7007 - protein, 488 aa, Magnetospirillum magnetotacticum MS-1
MAGALAVFTLLVPGMASAGAPPGGFADLAERLLPAVVNISTTQTMKPSQGAPELPQFPPGSPLEEFFKEFMERQQGGKSPDAPSRKATSLGSGFIIDAAGYIVTNNHVIADADEISVKLHDDTVFQATLVGRDPKVDLALLKIEPGKKPLVPVPFGNSDEARVGDWVLAIGNPFGFGGTVTAGIVSARARDINAGPYDDFLQTDAAINRGNSGGSMFNMKGEVIGINSAIISPSGGSIGIGFAVPAALAVPVLDDLRKFGKVRRGWLGIRIQSLDTDMAENIGLPDQKGALVAKVDPNGPGVKAGLKDGDVVLKFDGKDITEMRRLPRYVASTPIGKKVDVVIWRDGKRQTITASVGEMPEDPAEQQVKGKPESPKPQANKDGILTIPGAGLTVSSLTAQLRERFGLDEEAKGIVVTEVKPDSPAAEKGMRPGDMIIEADHKPVRSPADLGKLIDEGRRAGAKSLLLRVENPQQLRYIALPLAEGKKK

SEQ ID NO: 7008 - protein, 367 aa, Mycobacterium leprae TN
MSVHRDAIRAARSLVVKVGTNALTTSSGVFDSSRLARLVDAIEARMKAGTDVVIVSSGAIAAGIEPLGLSLRPKDLATKQAAASVGQVALVNSWSAAFARYGRAVGQVLLTAQDISMRVQHTNAQRTLDRLRALHAVAIVNENDTVATNEIRFGDNDRLSAVVAHLVGAEALVLLSDINGLYDSDPRKNTGARFVPEVTGSADLDGVVASRGSSLGTGGMVSKMSSALLAADAGVPVLLAAAADAATALTDASVGTVFAARPDRMSARRFWLRYAADSVGSLTLDEGAVWAVVQQRRSLLAAGITAVSGRFYGGDVVELRGPDATMVARGVVAYDATELAAMMGRSTSELPCELRRPAVHADDLVSI

SEQ ID NO: 7009 - protein, 169 aa, Streptococcus agalactiae A909
MERAIFAGGCFWCMVQPFEELDGIESVLSGYTGGHVENPTYKEVCSKTTGHTEAVEIIFNPEKISYADLVELYWAQTDPTDAFGQFEDRGDNYRPVIFYENEEQRQIAQKSKDKLQASGRFDRPIVTSIEPADTFYPAEDYHQAFYRTNPARYALSSARRHAFLEENWH

SEQ ID NO: 7010 - protein, 339 aa, Arabidopsis thaliana
  misc_feature (302)..(302): Xaa can be any naturally occurring amino acid
  unsure (1)..(339): unsure at all Xaa locations
MSTSENTPFNGVASSTIVRATIVQASTVYNDTPATLEKANKFIVEAASKGSELVVFPEAFIGGYPRGFRFGLGVGVHNEEGRDEFRKYHASAIKVPGPEVEKLAELAGKNNVYLVMGAIEKDGYTLYCTALFFSPQGQFLGKHRKLMPTSLERCIWGQGDGSTIPVYDTPIGKLGAAICWENRMPLYRTALYAKGIELYCAPTADGSKEWQSSMLHIAIEGGCFVLSACQFCLRKDFPDHPDYLFTDWYDDKEPDSIVSQGGSVIISPLGQVLAGPNFESEGLITADLDLGDVARAKLYFDXVGHYSRPDVLHLTVNEHPKKPVTFISKVEKAEDDSNK

SEQ ID NO: 7011 - protein, 459 aa, Triticum aestivum
  misc_feature (186)..(186): Xaa can be any naturally occurring amino acid
  misc_feature (196)..(196): Xaa can be any naturally occurring amino acid
  misc_feature (314)..(314): Xaa can be any naturally occurring amino acid
  misc_feature (342)..(342): Xaa can be any naturally occurring amino acid
  unsure (1)..(459): unsure at all Xaa locations
MPTANVRAAQPGADRRLSTLVRHLLPSSPRTSAATATSADSSLQPFPTMASPSVFAGIAQGPEDPILGVTVAYNKDPSPVKVNLGVGAYRTEEGKPLVLNVVRRAEQMLIQNESRVKEYLPITGLADFNKLSAKLIFGADSPAIQENRVATVQCLSGTGSLRVGGEFLARHYHERTIYIPQPTWGXNHPKVFTLAXGLTARSYRYYDPATRGLDFQGLLEDISSAPSGAIVLLHACAHNPTGVDPTLEQWEQIRQLMRSKALLPFFDSAYQGFASGSLDKDAQSVRMFVADGGELLMAQSYAKNMGLYGERVGXALSIVCGSADIAVKVENQLKLVIKPMYXNLLLHGASYPWLPYFKDMRCSDEWTLELKAMADRIISMREQLFNALKIRETPGDWSHIIKQIGMFTFTGLNSDQVAFMRQEYHIYMTSDGRISMAGLSSRTVPHLADAIHAAVTKLK

SEQ ID NO: 7012 - protein, 433 aa, Yarrowia lipolytica CLIB122
MLRTIARTHAVAATKVVRASTFSATPAASFVRFQSVWAKVPQGPPDAILGITEAFKKDAFEQKINLGVGAYRDDGGKPFVLPSVREAEKEVVNKALDKEYAPITGVPAFTKAAAELAYGADSPAVLEDRIAITQTISGTGALRIGAEFLNKFYSSKKILLPQPSWANHKAVFTAAGLEPATYRYYDPKNIALDFEGLLADLEAAPNGTAVLLHACAHNPTGVDPTPEQWRKIEEVVKAKGHFPFFDMAYQGFATGDVNRDAYPIRYFVEQGHEVALCQSFAKNMGLYGERVGAFSLVCQDTAEKNRVDSQLKIIIRPFYSNPPVHGARIAATILNNPELKKQWLGEVKQMADRMIKMRALLKENLERLGSQQNWDHVTSQIGMFCYTGLSPEQVERLAKEFSVYGTKDGRISIAGITSQNVGRLAQAIYEVTK

SEQ ID NO: 7013 - protein, 911 aa, Zea mays
MAFKGLPRDSRGSLEVFNPDAPVSDRATTSPFLLPPAVASHPSLLAAGDGGDADVGRATQRAAEWGLVLQTDEHTGRPQGVVARPSGSNRTSESGNSIDERAAAAGAGRALPRVSEELRAALSAFQQTFVVSDATRPDHPILYASAGFFNMTGYSSNEVVGRNCRFLQGSGTDPVEISKIRQALAAGSNYCGRILNYKKDGTPFWNLLTVAPIKDEDGRVLKFIGMQVEVSKYTEGNKDTALRPNGLPESLIKYDARQKDHARSSVSELLLALKDPRSLSESRNNTLKRKSQESAGSALVPGKRSSETGSRRNSHSGMRNSLQKISEVPEGGNKTRKSGLRSFMGLIGMGHGNVEKNILKPREDPLLDSDDERPDSFDDDFRKKEMRKGIDLATTLERIEKNFVITDPRLPDNPIIFASDSFLRLTEYCREEILGRNCRFLQGPETDRGTVKKIRDAIDNQTEVTVQLINYTKSGKKFWNLFHLQPMRDQKGDVQYFIGVQLDGTERVREAAAKDGAILVKKTADNIDEAAKELPDANLRPEDLWANHSKPVLPKPHMKDTASWRAIQKVLENGESIDLKHFRPVRPLGSGDTGSVHLVELLGTGEYFAMKAMDKSVMLNRNKVHRATAERQILDMLDHPFLPTLYASFQTKTHICLIVDYCAGGELFMLLDRQPMKVLKEDAVRFYAAEVVTALEYLHCQGIIYRDLKPENILLHRDGHISLTDFDLSCLTSCRPQVFLPHDIDKKKKRRKSRSNPIFFAEPMRASNSFVGTEEYIAPEIITGAGHTSAVDWWALGILLYEMLYGYTPFRGKTRQRTFANILHKDIRFPASIQVSLAARQLIYRLLHRDPANRLGSYEGAMEIKQHPFFRGINWALVRAATPPELEAPLQDTLEATLPPPAADAAHTDMF

SEQ ID NO: 7014 - protein, 468 aa, Pseudomonas syringae pv. syringae B728a
MGLNDQWMQRDLKVLWHPCTQMKDHENLPLIPIKRGEGVWLEDFEGKRYLDAVSSWWVNVFGHANPRINQRIKDQVDQLEHVILAGFSHQPVIELSERLVKLTPDGLTRCFYADNGSSCIEVALKMSFHYWLNRGQPDKKRFVTLTNSYHGETMAAMSVGDVPLFTETYKALLLDTIKVPSPDCYHRPDGMSWEEHSRNMFVAMEQTLAEHHASVAAVIVEPLIQGAGGMRMYHPIYLKLLRDACDRYGVHLIHDEIAVGFGRTGTMFACEQAGIRPDFLCLSKALTGGYLPLAACLTTDDVYDAFYDDYPTLRAFLHSHSYTGNPLACAAALATLDIFEQDNVIENNKALAQRMATATAHLVDHPHVAEVRQTGMAIAIEMVQDKATKTAYPWQERRGMKVFQHALERGALLRPLGSVVYFLPPYVITPEQIDFLAEVASEGIDIATRSSVSVAVRENFHPDFRDPG

SEQ ID NO: 7015 - protein, 449 aa, Ashbya gossypii ATCC 10895
MREIIHLSTGQCGNQIGAAFWETICGEHGLDFNGTYSGTDELQRARLNVYFNEASSGKWVPRSVNVDLEPGTIDTVRNSNIGNLFRPDNYIFGQSSAGNVWAKGHYTEGAELVDSVMDVIRREAEGCDSLQGFQITHSLGGGTGSGMGTLLISKIREEFPDRMMATFSVVPSPKTSDTVVEPYNATLSVHQLVEHSDETFCIDNEALYDICQRTLKLPQPSYSDLNNLVSSVMSGVTTSLRYPGQLNSDLRKLAVNLVPFPRLHFFMVGYAPLTSIGAQSFRALTVPELTQQMFDARNMMAASDPRNGRYLTVAAFFRGKVSVKEVEDEMHKVQTRNSSYFVEWIPNNVQTAVCSVPPQGLDMSATFIGNSTSIQELFKRVGDQFGAMFKRKAFLHWYTSEGMDEMEFSEAESNMNDLVSEYQQYQEATVEDDEELNYGDEQPMVENFE

SEQ ID NO: 7016 - protein, 219 aa, Methanocaldococcus jannaschii
  misc_feature (37)..(37): Xaa can be any naturally occurring amino acid
  misc_feature (112)..(112): Xaa can be any naturally occurring amino acid
  misc_feature (119)..(119): Xaa can be any naturally occurring amino acid
  misc_feature (129)..(129): Xaa can be any naturally occurring amino acid
  misc_feature (169)..(169): Xaa can be any naturally occurring amino acid
  misc_feature (205)..(205): Xaa can be any naturally occurring amino acid
  unsure (1)..(219): unsure at all Xaa locations
MDREALLQAVKEARELAKPRNFTQSFEFIATLKEIDXRKPENRIKTEVVLPHGRGKEAKIAVIGTGDLAKQAEELGLTVIRKEEIEELGKNKRKLRKIAKAHDFFIAQADLXPLIGRYXGVILGPRGKXPKPVPANANIKPLVERLKKTVVINTRDKPYFQVLVGNEKXTDEQIVDNIEAVLNVVAKKYEKGLYHIKDAYVKLTXGPAVKVKKEKAKKK

SEQ ID NO: 7017 - protein, 138 aa, Nicotiana tabacum
DAWDPFEGWPLFRSISDQFRSNFPSSSSDTTSFDWKETPNAHVFKADVPGLRKEEVKVELEDDRILQISGERQRELEDKGNTRHRVERSSGKFVRRFRLPENAKVDQVKANMENGVLTVTVPKENANKPEMKSIDISG

SEQ ID NO: 7018 - protein, 397 aa, Rhodospirillum rubrum
MDTLNATAAVDAEAILGNARRLVIKIGSALLVDQGSGLVRTGWLKALAEDIAQLRAEGREVLIVSSGAIAVGRRSLHLEPGRMRLDEKQAAAAAGQIELAHAYRTVMADHAINVAQLLLTLDDSENRRRYLNARNCLETLLRLGVIPVINENDTVTTQEIRFGDNDRLAARVAQMACADALILLSDIDGLYTADPHRDPEARFIPTVTALTPEIAAMAGAALTPHGTGGMVTKLLAARICMDAGCAMAIAPGKDDHALRLLRQGGRQTWFLPAEEPRTARKAWISGALKAEGTLWVDDGAARALAAGSSLLPPGVRTVEGDFQRGAAVRVVGLDGSPLAKGLIAYPSDEARLLVGHRSGDIEALLGYRGREELIHRDDLVLDSRFRHRDEDGEGHRS

SEQ ID NO: 7019 - protein, 427 aa, Rhodospirillum rubrum
MNDAARLTTDDIPGLMIDIGRRARAAGRILALAPAAARNAALLAGAAALRAEAGAIALENAKDMSAGRAKGLTDALLDRLELTPARIEAMAKGLEDIAALPDPVGTVLAGWQRPNGLRIERVRVPIGVIGVIYESRPNVTADAGALCLKAGNAAILRGGSESFNSSRAIHRCLAAGLRAAGLPEDAIQSVPTPDRAAVGMLLTMTDFIDVIVPRGGKSLIERVSAESKVPLFKHLEGLCHTYIHAKADPQKALSVTVNAKMRRTGVCGSTETILVDRAIAATILPPLLDALAKAGCALRGDEETRAFSERVGPATAEDWDTEYLDAIVSIRVVADLDEALAHIAAHSSDHTDCILTEDAAAAERFLTEVDSAIVMHNASTQFADGGEFGMGAEIGISTGRLHARGPVGVEQLTIFKYKVRGTGQTRP

SEQ ID NO: 7020 - protein, 132 aa, Glycine max
  misc_feature (22)..(22): Xaa can be any naturally occurring amino acid
  misc_feature (25)..(25): Xaa can be any naturally occurring amino acid
  misc_feature (50)..(50): Xaa can be any naturally occurring amino acid
  misc_feature (86)..(86): Xaa can be any naturally occurring amino acid
  misc_feature (120)..(120): Xaa can be any naturally occurring amino acid
  unsure (1)..(132): unsure at all Xaa locations
VECFTAGVFEWGLFNIEYASAXKNXRTELRSICCQICQVDMPMFRRLDGXNIGKFAVTVEYLHLNAEVMSIVDDLSEDDQDCVRLXDVEGCAFHGELWATQYCVVHILWAFGNLSHYKSXRVRDMVADQLDE

SEQ ID NO: 7021 - protein, 753 aa, Escherichia coli
MSQHNEKNPHQHQSPLHDSSEAKPGMDSLAPEDGSHRPAAEPTPPGAQPTAPGSLKAPDTRNEKLNSLEDVRKGSENYALTTNQGVRIADDQNSLRAGSRGPTLLEDFILREKITHFDHERIPERIVAARGSAAHGYFQPYKSLSDITKADFLSDPNKITPVFVRFSTVQGGAGSADTVRDIRGFATKFYTEEGIFDLVGNNTPIFFIQDAHKFPDFVHAVKPEPHWAIPQGQSAHDTFWDYVSLQPETLHNVMWAMSDRGIPRSYRTMEGFGIHTFRLINAEGKATFVRFHWKPLAGKASLVWDEAQKLTGRDPDFHRRELWEAIEAGDFPEYELGFQLIPEEDEFKFDFDLLDPTKLIPEELVPVQRVGKMVLNRNPDNFFAENEQAAFHPGHIVPGLDFTNDPLLQGRLFSYTDTQISRLGGPNFHEIPINRPTCPYHNFQRDGMHRMGIDTNPANYEPNSINDNWPRETPPGPKRGGFESYQERVEGNKVRERSPSFGEYYSHPRLFWLSQTPFEQRHIVDGFSFELSKVVRPYIRERVVDQLAHIDLTLAQAVAKNLGIELTDDQLNITPPPDVNGLKKDPSLSLYAIPDGDVKGRVVAILLNDEVRSADLLAILKALKAKGVHAKLLYSRMGEVTADDGTVLPIAATFAGAPSLTVDAVIVPCGNIADIADNGDANYYLMEAYKHLKPIALAGDARKFKATIKIADQGEEGIVEADSADGSFMDELLTLMAAHRVWSRIPKIDKIPA

SEQ ID NO: 7022 - protein, 360 aa, Zea mays
MVPGYDCAASVLLCAEDNAAILGLDDDGEESSWAAAATPPRDTVAAAAAAATGVAVDGILTEFPLLSDDCVATLVEKEVEHMPAEGYLQKLQRRHGDLDLAAVRKDAIDWIWKVIEHYNFAPLTAVLSVNYLDRFLSTYEFPEGRAWMTQLLAVACLSLASKIEETFVPLPLDLQVAEAKFVFEGRTIKRMELLVLSTLKWRMHAVTACSFVEYFLHKLSDHGAPSLLARSRSSDLVLSTAKGAEFVVFRPSEIAASVALAAIGECRSSVIERAASSCKYLDKERVLRCHEMIQEKITAGSIVLKSAGSSISSVPQSPIGVLDAAACLSQQSDDATVGSPAVCYHSSSTSKRRRITRRLL

SEQ ID NO: 7023 - protein, 250 aa, Glycine max
MTKNYPTVSADYQKAVEKAKKKLRGFIAEKRCAPLMLRLAWHSAGTYDVSSKTGGPFGTIKHPSELAHGANNILDIAVRLLEPLKAEFPILSYADFYQLAGVVAVEVTGGPEVPFHPGREDKPEPPPEGRLPDATKGSDHLRDVFGKAMGLSDRDIVALSGGHTIGAAHKERSGFEGPWTSNPLIFDNSYFKELLSGEKEGLLQLPSDKALLSDPVFRPLVEKYASDEDAFFADYAEAHQKLSELGFADA

SEQ ID NO: 7024 - protein, 820 aa, Tulipa gesneriana
MADRAMTRVHSVRERLTDTLSAHKNELLALFSRFVKQGQGMLQPHQLLTEYEAVIPAADREKLKDGVFEDVLKAAQEAIVIPPWVALAIRPRPGVWEYVRVNVSELAVEELTVPEYLQFKEELVDGSGQSNFTLELDFEPFNASFPRPSLSKSIGNGVQFLNRHLSSKLFHDKESMYPLLNFLKEHHYNGTSMMLNDRIQTLGALQASLRRADEYVLSLPLDTPYSDFGHRFQELGLEKGWGDNAKRVHENLHLLLDLLEAPDPCTLENFLGTIPMVFNVVILSPHGYFAQANVLGYPDTGGQVVYILDQVRAMESEMLLRIKQQGLDITPRILIVTRLLPDAVGTTCGQRLEKVLGTEHTHILRVPFRTEHGILRKWISRFEVWPYLETYAEDVANEVAGELQATPDLIIGNYSDGNLVASLMAHKLGVTQCTIAHALEKTKYPNSDLYWKKFEKQYHFSCQFTADLIAMNHADFIITSTFQEIAGSKDTVGQYESHTGFTLPGLYRVVHGIDVFDPKFNIVSPGADMSIYFPYTEAEKRLTALHPEIEELLYSSAESTEYKFGLKDKTKPIIFSMARLDRVKNMTGLVELYAKNDRLKELVNLVVVCGDHAKASKDLEEQAELKKMYSLIEEYKLDGHIRWISAQMNRVRNGELYRYIADSKGVFVQPAFYEAFGLTVVESMTCGLPTFATCHGGPAEIIVHGVSGYHIDPYHGDKAAELLVDFFEKSKKDQTHWDAISNGGLKRIYEKYTWKIYSERLLTLAGVYGFWKYVSNLDRRETKRYLEMFYALKYRNLAKSVPLAVDGEAAVNGKICTLGC

SEQ ID NO: 7025 - protein, 285 aa, Pseudomonas tolaasii
MTTALQQPSLSSQCMAEFLGTALLIFFGTGCVAALKVAGASFGLWEISIIWGVGVSMAIYLSAGISGAHLNPAVSIALCIFADFEKRKLPFYILAQVAGAFCSAALVYTLYSNLFFDYEQTHHMVRGSQASLELASVFSTYPHALLSTAQAFLVEVVITAILMGVIMALTDDNNGLPRGPLAPLLIGLLIAVIGSAMGPLTGFAMNPARDFGPKLMTFFAGWGEMAFTGGRDIPYFLVPIFAPIVGACLGAAAYRGLIARHLPSAAPAIDEETPDTAVNGNTRIS

SEQ ID NO: 7026 - protein, 805 aa, Tulipa gesneriana
MTERRLTRIHSIKERLGDSLSHHPNELLALFSRFIKQGKGMLERHQLLTEYESVIPEADREKLKDGVFEDTLRASQEAIVIPPWVALAIRPRPGVWEYVRVNVNELAVEECSEYLKFKEDLVDRSSQSNFVLEMDFEPFNANVPRPSLSKSIGNGVQFLNRHLSSKLFHDKESLYPLLNFLREHNYKGTTLMLNDRLQSLSALQTALRKADRYLLSISKDTPYSEFNHSFQVLGLEKGWGDTASRVSENIHLLLDLLEAPDPSTLEKFLGTIPMVFNVVILSPHGYFAQANVLGYPDTGGQVVYILDQVRALETEMLLKIKQQGLDITPRILIVTRLLPDAVGTTCGQRLERVLGTEHTHILRVPFRTDKGILRKWISRFEVWPYLETYAEDVAHELAGEMQATPDLIIGNYSDGNLVASLLAHRLGITQCTIAHALEKTKYPNSDIYLKKFDDQYHFSCQFTADLIAMNQSDFIITSTFQEIAGSKDTVGQYESHTAFTLPGLYRVVHGIDVFDPKFNIVSPGADMSIYYPYFEQEKRLTALHAEIEELLYSSVENEEHKFVLKDRNKPIIFSMARLDRVKNMTGLVELYGKNDRLKELVNLVVVAGDHGKESKDLEEQAELKKMYKLIEEYKLQGHIRWISAQMNRVRNGELYRYIADTKGAFVQPAFYEAFGLTVVESMTCGLPTFATCHGGPAEIIVHGVSGFHIDPYHGDKASEQLVSFFEKCKEDPAHWEKISQGGLQRIYEKYTWKLYSERLMTLAGVYGFWKYVSNLDRRETRRYLEMFYALKYRNLAKSVPLAIDN

SEQ ID NO: 7027 - protein, 395 aa, Alkalilimnicola ehrlichei MLHE-1
MSDREVVVLSAARSAIGTFGGTLAGFEPADLGGLIIKEAVARSGVDPNQINYTTVGNCIPTESRSPYVARVAAVQGGLPHNSTAVTVNRLCGSGMQAIVSTAQSILLGDADFGVGAGTEVMSKGGYLTPSARFGARMGDAKMVDMMVATLTDPFGVGHMGITAENLAEKWNISREEQDQFAAESQRRAQAAIEGGYFKDQIVPVTIKSRKGEKVFDTDEHPRFGVTVEDLAKMRPAFKKEGGTVTAGNASGINDAAAALVLADRAAAEKAGHKPVARMVAYGIAGVPNDIMGEGPIPSSKVALDKAGLSIEDMDVVESNEAFAAQALTVMKGLGLDPAKTNVNGGAIALGHPVGATGSILAVKAIHELHRIQGKYALVTMCIGGGQGITAIFERM

SEQ ID NO: 7028 - protein, 222 aa, Synechocystis sp. PCC 6803
MGFFDLFGKKTAMVAPNEALPGRSATMPVPDKHFVNGNPLKAPFPQGMETALFGLGCFWGAERKFWQIPGVYSTAVGYAAGYTPNPTYQEVCTGMTGHNEVVLVAFDPQQVSYDQLLKVFWESHNPTQGMRQGNDVGTQYRSGIYTYSEAQQQAALASKQAYQQALQQAGYGEITTEILPAPDFYYAEDYHQQYLAKNPNGYCGLGGTNVACPIGTEVSLGA

SEQ ID NO: 7029 - protein, 753 aa, Escherichia coli
MSQHNEKNPHQHQSPLHDSSEAKPGMDSLAPEDGSHRPAAEPTPPGAQPTAPGSLKAPDTRNEKLNSLEDVRKGSENYALTTNQGVRIADDQNSLRAGSRGPTLLEDFILREKITHFDHERIPERIVHARGSAAHGYFQPYKSLSDITKADFLSDPNKITPVFVRFSTVQGGAGSADTVRDIRGFATKFYTEEGIFDLVGANTPIFFIQDAHKFPDFVHAVKPEPHWAIPQGQSAHDTFWDYVSLQPETLHNVMWAMSDRGIPRSYRTMEGFGIHTFRLINAEGKATFVRFHWKPLAGKASLVWDEAQKLTGRDPDFHRRELWEAIEAGDFPEYELGFQLIPEEDEFKFDFDLLDPTKLIPEELVPVQRVGKMVLNRNPDNFFAENEQAAFHPGHIVPGLDFTNDPLLQGRLFSYTDTQISRLGGPNFHEIPINRPTCPYHNFQRDGMHRMGIDTNPANYEPNSINDNWPRETPPGPKRGGFESYQERVEGNKVRERSPSFGEYYSHPRLFWLSQTPFEQRHIVDGFSFELSKVVRPYIRERVVDQLAHIDLTLAQAVAKNLGIELTDDQLNITPPPDVNGLKKDPSLSLYAIPDGDVKGRVVAILLNDEVRSADLLAILKALKAKGVHAKLLYSRMGEVTADDGTVLPIAATFAGAPSLTVDAVIVPCGNIADIADNGDANYYLMEAYKHLKPIALAGDARKFKATIKIADQGEEGIVEADSADGSFMDELLTLMAAHRVWSRIPKIDKIPA

SEQ ID NO: 7030 - protein, 370 aa, Idiomarina loihiensis L2TR
MSFRLIIVIVGLLVSCFSMAQNSEPTKQKNEKVATFAGGCFWCVEEAFEQMPGVREVISGFSGGDEVNPTYEEVSAGKTGHTEAAQIYYNPDVVSYAALLQKLWRISDPTDNDGQFVDRGKQYRPAVFYHNDEQKRIAMESREWLDKNGPFPDPVVIEITPFKSFYKAEEYHQDYYDKNPVRYRIYTYNSGRYDFVEKHWGDTSDVDYQQFTNDNPTGKAEQQSFVKPSDSELKKRLTDIQYAVTQEDQTEPAFDNRYWDNERKGIYVDVVSGEPLFSSADKYESGTGWPSFTKPISPDAVVEKDDSSWFYTRTEIRSRKADSHVGHVFNDGPPPTGLRYCMNSAALRFIPLEKMEEEGYGDYIPAVTDD

SEQ ID NO: 7031 - protein, 467 aa, Magnetospirillum magnetotacticum MS-1
MTTSLKILAAALALVILVPAAQAQTQVVPTSREQVKLTFAPVARQVAPAVVNIYTKRVVRAAASPMFADPFFRRFFGDVPGMSQDRVQRSLGSGVMIGADGTVVTNHHVIKDADEVTVILSDRREFEARIVGSDERTDLAVLKIDGGKESFPTLVLGDSDAIEVGDVVLAVGNPFGVGQTVTQGIISALARTNVGVSDVQSFIQTDAAINPGNSGGALVDLQGRLIGINSAIYSKDGGSNGIGFAIPTALVRQVTTSIAKGGKVVRPWLGASGQAVTADLAQAMKLPRPVGVLVNHISPDSPAQRAGLADGDVIVAVEGREVDDTEGMRFRLATLAIGSEARLTVLRGGVERILTVRLVAPPENPPRDKTEINGRNPFSGTTLVNLNPALAEELGINSSLTGVMILAIKRGSVANRLGLQPGDMLIKINERAIASVADARRSLDAESARWAITIKRNGEVMSLVLGG

SEQ ID NO: 7032 - protein, 671 aa, Idiomarina loihiensis L2TR
MCGIAGVFHHQTERAIEPQTLVNMAAIMHHRGPDGFGYEVQQDYGVGFSHARLSIIDLDEKRGRQPFISADKRLMLTHNGEFYDFKRIRADLTARGARFNSKSDSEIVLHLFERYGLEDTLKELRGEFAFGLFDAKDESLYLVRDRFGIKPLYWTETEHGVVFGSELKVLFAHPDVKREFSAEGLYHQLIQVMVPGSTAFEGINQVQPGYVVKLQRKNGKVVATEHKYWDVDFPPEESYPGADVDEESYIEGVRAKLLEAVQHRMTADVPVGCYLSGGIDSCAILGLASASTQTSVKAFTIGFDSADYDETPIAEEMAAATKADHHIMRLKADDLYDHFVKTLWHTERTIYNTLGVAKYLMSKEVHEAGYKVVMTGEGSDELFAGYPAFRKDMFLHGLDHLPEVERVEWQELLEKNNKLFKGAMLAREEFVSEAFNQKMGFTPSCVQPWLSCSSVALPLMSENKRKQVEGYDPSLAIANTLDKDMLDGRHPLDRAQYVWIKTMLEGQILTWGGDRVDMANSMEARPAFLDHHLAEYAFTVPPHLRIKGNKEKYVLREAMKGLLPETLYKREKFAFMAPPAHTDPEKWKAVEKLAEQFLNAEAVKSAGLLDYDEVVRTFERHQDENVPNEERVQLDAVINHMLGVQVLHHHFVATDVPAQAQQRATELGWTA

SEQ ID NO: 7033 - protein, 753 aa, Escherichia coli
MSQHNEKNPHQHQSPLHDSSEAKPGMDSLAPEDGSHRPAAEPTPPGAQPTAPGSLKAPDTRNEKLNSLEDVRKGSENYALTTNQGVRIADDQNSLRAGSRGPTLLEDFILREKITHFDHERIPERIVHARGSAAHGYFQPYKSLSDITKADFLSDPNKITPVFVRFSTVQGGAGSADTVRDIRGFATKFYTEEGIFDLVGHNTPIFFIQDAHKFPDFVHAVKPEPHWAIPQGQSAHDTFWDYVSLQPETLHNVMWAMSDRGIPRSYRTMEGFGIHTFRLINAEGKATFVRFHWKPLAGKASLVWDEAQKLTGRDPDFHRRELWEAIEAGDFPEYELGFQLIPEEDEFKFDFDLLDPTKLIPEELVPVQRVGKMVLNRNPDNFFAENEQAAFHPGHIVPGLDFTNDPLLQGRLFSYTDTQISRLGGPNFHEIPINRPTCPYHNFQRDGMHRMGIDTNPANYEPNSINDNWPRETPPGPKRGGFESYQERVEGNKVRERSPSFGEYYSHPRLFWLSQTPFEQRHIVDGFSFELSKVVRPYIRERVVDQLAHIDLTLAQAVAKNLGIELTDDQLNITPPPDVNGLKKDPSLSLYAIPDGDVKGRVVAILLNDEVRSADLLAILKALKAKGVHAKLLYSRMGEVTADDGTVLPIAATFAGAPSLTVDAVIVPCGNIADIADNGDANYYLMEAYKHLKPIALAGDARKFKATIKIADQGEEGIVEADSADGSFMDELLTLMAAHRVWSRIPKIDKIPA

SEQ ID NO: 7034 - protein, 136 aa, Mycobacterium leprae TN
MTERTLVLIKPDAVERQLIGEIISRIERKGLTIAALELRQVGEELASQHYAEHESKPFFGSLLEFITSGPVMAAIVEGPRAVAAVRQLTGGTDPVEKAAPGTIRGDLALETQFNLVHGSDSTASAQREIALWFPGI

SEQ ID NO: 7035 - protein, 616 aa, Thermoplasma acidophilum DSM 1728
MIDIEIGGDAPFFRKIKVHLGKIDASTAYVEGTFNCQGEGSIVLEGNSESTDEVDGLVPDKYEFRIALDQYRFLRNSQSRSNMFQVSLWLDAVYHDPDLSQFSCILDDRLMDIRIAVPKQVVSVRILTESEVKVVYSRRSSQATYDIVEFVISGVSGYAFEVDQVRYPDHGYYRSTKRINSEGNSKIMYHIFPDRFHRYGEDRPGLIKWGEKPSRDSFFGGNLEGIRQKIQYIKDLRVDHIYLNPLFKSKSNHRYDVDDYYSIDELLGTDQDLKNLVSDAHASGIKIVLDMVFNHTSTDFPAFRDVIEKGRNSPYYRWYIFHRDEFTVFRGRGKRGSYPSYETFMGYGGMPKLDHRNPEVRRYCINVLKYYVQKFDVDGFRYDVAHSIYSKFFEEVFSEIGTGILHIGEAWCLPTYLVNGSAWQSYTNYFLGGSIIDFLKGSITLGEFYDRVQRMLIVNGIEKQQAMMNVLDSHDTPRILRILNGDRKKVKLAYSILYLFDGIATIYYGDEVGLDGGKDPDDRRCFPWDSMDEDMHSFFMNLGDLREKYSLGSAGVITVFEDEASFVIEKVKAGRSISVHMAKNGRMKFPKDSLIAVRENQKEVKPWDFYIYLRTV

SEQ ID NO: 7036 - protein, 653 aa, Rhodobacter sphaeroides 2.4.1
MAETGDLVSIPALLHRNATAFPRQPAYREKEFGIWQVWSWAEAASEIRAIALGFLALGMQRGDHVAVVGRNRPALYWSMVAAQMCGAVPVPLYQDAVAEEMVYVLDHCGARFVICGDQEQVDKVIEVQDRIHHIEQVVYVDKRGMRKYDHSRMNWLEDVVAEGRAAHRRFDEELDRRIAELDYGSTCVMLYTSGTTGKPKGVVLSNRNIIETSKNSVAFDGLRPGDEVLAYLPMAWVGDFIFSVGQAMWTGFCVNCPESATTMMNDLREIGPTYFFAPPRVFEGQLTNVMIRMEDAGRIKKALFRHYMEVARRVGPAILDGRPVSTADRIAYWIGDKLIYGPLKNTLGFSRVRVGYTAGEAIGPEIFDFYRSLGINLKQLYGQTEASVFITQQPDGQVRSDTVGVPSPGVEVRIAETGEVFYRSPGTFVAYYKNPESTASTKDAEGWVATGDAGFFEEATGHLRIIDRAKDVGKMADGRLFAPKYVENKLKFYPSILEAVVFGNGRERCTAFLNIDLAAVGNWAERNNIAYSSYQELAGHPKVYEMMKGHVEEVNRSVAEDPMLSGCQIHRFLILHKELDADDGEMTRTRKVRRKVIEEKYHDLIAALYDGRTSIHTETEVTYEDGRKGAIRATLRIEDAATHGASAQRMAAE

SEQ ID NO: 7037 - protein, 359 aa, Staphylococcus aureus subsp. aureus MSSA476
MMTIKVGIIGCGGIANGKHMPSLQKVENVEMIAFCDVDISKAASAAEAYGTDNAKVYDDYKALLKDDTIDVIHVCTPNDSHCEITVAGLHAGKHVMCEKPMAKTTAEAQKMIDTAKSTGKKLTIGYQNRFRADSQFLHQAAQRGDLGDIYFGKAHAIRRRAVPTWGVFLDEEAQGGGPLIDIGTHALDLTLWMMDNYEPESVMGSTFHKLNKQHHAANAWGSWNPDEFTVEDSAFGFIKMKNGATIMLESAWAINSLEVDEAKCSLSGTKAGADMKDGLRIHGEDMGTLYTKHVELENKGVDFYEGNEVDEAEEEAKAWIDAVVNDTEPVVKPEQAMVVTKILEAIYQSAKSGKAIYFE

SEQ ID NO: 7038 - protein, 195 aa, Oryza sativa (japonica cultivar-group)
MSASRFIKCVTVGDGAVGKTCMLISYTSNTFPTDYVPTVFDNFSANVVVDGSTVNLGLWDTAEDYNRLRPLSYRGADVFLLAFSLISKASYENVSKKWIPELRHYAPGVPIILVGTKLDLRDDKQFFVDHPGAVPISTAQGEELRKLIGAAAYIECSSKTQQNIKAVFDAAIKVVLQPPKQKKKKKKAQKGCAIL

SEQ ID NO: 7039 - protein, 495 aa, Arabidopsis thaliana
MGVSLLKQQHRITNQADTFSRFMERSPENNLSRNEHIIIDIPRNAAIASSSSSHDRISNVLEPLQHEEERPSTVSPMAAPQPATATASSSSSMRSNPRSVRRRRSPLNSGLWISIELFLTVGQIIAAIVVLSLSKHEHPRAPLFTWIVGYACGCVATLPLLYWRYYHSNQASEQDSGQHRPNLNVAAGPFAFSISRTSEADGRQTNTTSSRGSRYPGFISAARLKVIVEYFKMALDCFFAVWFVVGNVWIFGGHSSAAEAPNLYRLCLVFLTFSCIGYAMPFILCTTICCCLPCIISILGYREDLTQPRGATPESINALPTHKFKLKKSRSNGDDNGSSTSEGGVVAAGTDNERAISGEDAVCCICLAKYANNEELRELPCSHFFHKECVDKWLKINASCPLCKSEVGEKNSDLTSQGILTSLSSGENDNHQQQQQQQRSELRVENDLRDLLYVRENGKLAVWRCSYTKWGLLLIAKKVKKDTAKILFCKCFLPL

SEQ ID NO: 7040 - protein, 346 aa, Staphylococcus aureus subsp. aureus MSSA476
MTKLKVGVIGVGGIAQDRHIPALLKLKDTVSLVAVQDINTVQMIDVAKRFNIPHAVETPSELFKLVDAVVICTPNKFHADLSIEALNHGVHVLCEKPMAMTTEECDRMIEAANKNHKLLTVAYHYRHTDVAITAKKAIESGVVGKPLVARVQAMRRRKVPGWGVFTNKALQGGGSLIDYGCHLLDLSLWLLGKDMVPHEVLGKTYNQLSKQPNQINDWGTFDHTKFDVDDHVTSYMTFANRASMQFECSWSANIKEDKVHVSLSGEDGGINLFPFEIYEPRFGTIFESKANVEHNEDIAGERQARNFVNACLGIEEIVVKPEEARNVNALIEAIYRSDLDNKSIQL

SEQ ID NO: 7041 - protein, 603 aa, Burkholderia fungorum LB400
MSLVEVKVPDIGDFKDVDVIEVNIKPGDVIENEQALMTLESDKASIEVPSDTAGTVREVRVKAGDKVSQGTVIALVETSGEAAPAKDAPKAPAKEAEKAPAQAEAKPQAAEAPAAAPAKAAAPAPQAGSYSGSADIECDMLVLGSGPGGYSAAFRSADLGMKTVLVERYSTLGGVCLNVGCIPSKALLHTALVIDEAEALGAHGITFAKPQIDLDKLRDFKSGVVRKLTGGLAGMAKMRKVEVVTGNGAFVDPYHMEVQTEGGKKVVKFKQAIIAAGSEAVKLPFIPEDPRVVDSTGALELRQIPQRMLVIGGGIIGLEMATVYATLGAKIDVVEMLDGLMAGADRDLVKVWEKYNSKRFANVMLKTKTTAAEAKDDGIHVSFEGEKAPAEAQRYDLVLVAVGRTPNGKKIGADKAGVAVTDRGFIDVDKQMRTNVPHIFAIGDIVGQPMLAHKAVHEGHVAAEAAHGEKAYFDALQIPSVAYTDPEVAWAGKTEDQLKAAGIKYGKAVFPWAASGRAIANGRDEGFTKLLFDEETHRVIGGGIVGLNAGDLISEVCLAVEMGADATDIGKTIHPHPTLGESIGMAAELYEGVCTDLPPQKKK

SEQ ID NO: 7042 - protein, 682 aa, Cryptococcus neoformans var. neoformans B-3501A
MVTGDAKYRQMAEYTIDQDDKTPYTTYFGVKVSDTDNSLRAGARGPTLLEDFHNREKIQHFDHERIPERVVHARGAGAFGEFKLHTPLTGITTAKVLTDTSKVVPAYVRFSTVAGSRGSADTVRDVRGFATRLYTDEGNWDIVGNNIPVFFINAQTAHDNAWDFMSLHKPALHMQQWITSDRAIPRSYRMMQGFGVHTFRLINEEGKSTFVKYHWIPHLGTHSLVWDEALKIAGQDPDFHRRDLWDAIEAGTYAKWDLGVQLIKEEDEHKFDFDLLDATKLIPDELVPVQKIGTLTLNRNPVDYFSEVEQVAFCTQHIVPGMDFTDDPLLAGRNFSYPDTQVSRLGINWKHIPVNRPVCPFMTTMREGQMSMFSKNNRTPYHPNRNENLPLTSPKEGGFKSYPAKVSGIKERVQAPKFNDHSSQATLFWNSMSDVEKKHIIDAYKFELSHCTDNLVIQNVINCINEIDHGLATAVHSGFPHLSLPEAKPNHGKRTEYLSQITGKNQIFTAAGRKIGIFLVPGYVYSQVAPLLAAFKAAGCMVKFVGPTLGPVEASDGQSFTTEFTFEGCRSTYFDALIFAGGPDNAFLSKLKVGRLIHAAREAYMHLKAVGAVGNATQWLVDTCLPGEFSPKVKTESSVVQENGVVFAPINPTLHSAQFAKQFLDGVANHRVWDREVSHIAA

SEQ ID NO: 7043 - protein, 503 aa, Ipomoea batatas
MARKKVFSGILAILSVLLAVSVASAAGEEKEYVLTLDHTNFSETVSKLNFIVVEFYAPWCGHCKKPAPEYEKAASVLSSHDPPVTLAKVDANEDSNRDLASQYEVQGFPTIKILRDGGKTVQDYKGPREADGIVTYLKKQVGPASSEIKSKEDAANIIDEKKVFVVGVFQEFSGEKFENFISLAEKLRSDYDFGHTLDAKLLPSGEPVDKPTLRLLKPFDELFADFQDFQVDAMEKFIGEASTPIITIFDQNPENHPYVNKFFDSPNDKAMLFVNFSSELSAFKSKYNDVAVLYKGKGVSFLLGDLETSGGALQYFGLKEDQAPVIVIQDKDQQKFIKPNVEPDQLATWVKDYKEGKVEPFIRSEPIPEVNNEPVKVVVSDSLENMVFKSGKNVLLEIYAPWCGHCKKLAPILDEVAVSFENDPDVMIAKLDGTANDIPGKKFDVQGYPTVYFISATGNITPYEGDRTKDDIIDFIQKNRDKPLQSDSIKSDSVKEESAKDEL

SEQ ID NO: 7044 - protein, 159 aa, Brassica napus; identical to SEQ ID NO: 1471

SEQ ID NO: 7045 - protein, 379 aa, Arabidopsis thaliana
MMKGISSVSQSINYNPYIEFNRPQLQISTVNPNPAQSRFSRPRSLRVLSLSADPSANRNPKSAVDAHAPPLVVVGSANADIYVEIERLPKEGETISAKTGQTLAGGKGANQAACGAKLMYPTYFVGRLGEDAHGKLIAEALGDDGCGVHLDYVRSVNNEPTGHAVVMLQSDGQNSIIIVGGANMKAWPEIMSDDDLEIVRNAGIVLLQREIPDSINIQVAKAVKKAGVPVILDVGGMDTPIPNELLDSIDILSPNETELSRLTGMPTETFEQISQAVAKCHKLGVKQVLVKLGSKGSALFIQGEKPIQQSIIPAAQVVDTTGAGDTFTAAFAVAMVEGKSHEECLRFAAAAASLCVQVKGAIPSMPDRKSVLKLLKFSI

SEQ ID NO: 7046 - protein, 381 aa, Arabidopsis thaliana
MELLTTVASFFTPTTLFLLLNLMIGTIVVTSRLGSGSRKHYQHHDGFGSGHAPAPLARAPSIIDRVKSINFHLYKFPHPETELFSMTAHHDIIGSDLHVYPDPNPGPLQRAPSLLDRVKSINMSYFKFPHDVTGSDPHSHSHSHSHLDLHPDPAPAPLQRAPSLLDRVKSINMSYFKFQQYNPEENDYAHHTEPTRFESIPTRMGRVDPIDISKFRIPEEDQPTGTGVNSQINPPGLTRAPSILERVKSIKLSSFYRSDPDLDQKQNPDPVLHEEHKHVRSKSESKKPVKKKKKALTKMTKSASEKSGFGFAGSHAEAPETVESVERRRPDTTRVERSTSFGDGEDGVDAKASDFINKFKQQLKLQRLDSILRYKEMLKAH

SEQ ID NO: 7047 - protein, 229 aa, Triticum aestivum
  misc_feature (169)..(169): Xaa can be any naturally occurring amino acid
  misc_feature (177)..(177): Xaa can be any naturally occurring amino acid
  misc_feature (182)..(182): Xaa can be any naturally occurring amino acid
  misc_feature (189)..(189): Xaa can be any naturally occurring amino acid
  misc_feature (198)..(198): Xaa can be any naturally occurring amino acid
  misc_feature (201)..(202): Xaa can be any naturally occurring amino acid
  misc_feature (204)..(204): Xaa can be any naturally occurring amino acid
  misc_feature (207)..(207): Xaa can be any naturally occurring amino acid
  misc_feature (211)..(211): Xaa can be any naturally occurring amino acid
  misc_feature (216)..(217): Xaa can be any naturally occurring amino acid
  misc_feature (222)..(223): Xaa can be any naturally occurring amino acid
  misc_feature (227)..(228): Xaa can be any naturally occurring amino acid
  unsure (1)..(229): unsure at all Xaa locations
MQIFVKTLTGKTITLEVESSDTIDNVKAKIQDKEGIPPDQQRLIFAGKQLEDGRTLADYNIQKESTLHLVLRLRGGMQIFVKTLTGKTITLEVESSDTIDNVKAKIQDKEGIPPDQQRLIFAGNQLEDGRTLADYNIQKESTLHLVLRLRGGMQIFVKTLTGKEHHPGXWSPRDNIXNVKGXIQDKGGXPPDQQRLIXAGXXLXDGXTLGXLNIQXXLPLNXXLRLXXG

SEQ ID NO: 7048 - protein, 484 aa, Proteus mirabilis
  misc_feature (53)..(53): Xaa can be any naturally occurring amino acid
  unsure (1)..(484): unsure at all Xaa locations
MEKKKLTTAAGAPVVDNNNVITAGPRGPMLLQDVWFLEKLAHFDREVIPERRXHAKGSGAFGTFTVTHDITKYTRAKIFSEVGKKTEMFARFSTVAGERGAADAERDIRGFALKFYTEEGNWDMVGNNTPVFYLRDPLKFPDLNHIVKRDPRTNMRNMAYKWDFFSHLPESLHQLTIDMSDRGLPLSYRFVHGFGSHTYSFINKDNERFWVKFHFRCQQGIKNLMDDEAEALVGKDRESSQRDLFEAIKRGDYPRWKLQIQIMPEKEASTVPYNPFDLTKVWPHADYPLMDVGYFELNRNPDNYFSDVEQAAFSPANIVPGISFSPDKMLQGRLFSYGDAHRYRLGVNHHQIPVNAPKCPFHNYHRDGAMRVDGNSGNGITYEPNSGGVFQEQPDFKEPPLSIEGAADHWNHREDEDYFSQPRALYELLSDDEHQRMFARIAGELSQASKETQQRQIDLFTKVHPEYGAGVEKAIKVLEGKDAK

SEQ ID NO: 7049 - protein, 434 aa, Bacillus halodurans C-125
MKKNDETSRNLIGLDQQHFIHPTSSMQQQQQHGPAHIFVRGKGVYLYDHDGKAYLDGMSSLWNVNVGHGRRELGEVAKKQMDTLAFSSCFATFSNKPAIELAAKLARVSPPSLRATFFTSGGSEANDTAFKLARHYWKVKDQPKKRKIIARMKSYHGVAMGATSATGLKPFRDFAPSLAPDFLHVDHMSIEALRALIDREGPETIAAFVCEPIQGAGGVHVAPDSYLCDIRSICDEYELLFIADEVITGFGRTGAYFGCDHANISPDMMCIAKGITSGYAPLGGVMLSKSLHEQLTAHSHGTLLHGYTYSGHPTSCAVALKNIQIIEEENLIDHAATMGEKLLLGFRTIQEQYSEIHDARGRGLMAALAFSHNGKNEPLAPKVVQAADQRGLILRAVTFDQQDVLVCAPPLIINEEELNQLLSILESSVQAVVS

SEQ ID NO: 7050 - protein, 402 aa, Pseudomonas syringae pv. syringae B728a
MADQGSPRRFARIDRLPPYVFNITAELKMAARRRGEDIIDLSMGNPDGATPPHIVDKLITVAQREDTHGYSTSRGIPRLRRAISNWYKKRYEVDIDPESEAIVTIGSKEGLAHLMLATLDQGDTVLVPNPSYPIHIYGAVIAGAQVRSVPLVPGVDFFDELEKAIRGSIPKPKMMILGFPSNPTAQCVELDFFERVVALAKQYDVLVVHDLAYADIVYDGWKAPSIMQVPGAKDIAVEFFTLSKSYNMAGWRIGFMVGNPELVNALARIKSYHDYGTFTPLQVAAIAALEGDQQCVLDIAEQYRQRRNVLVKGLHELGWMVENPKASMYVWAKIPQAYAHLGSLEFAKKLLAEAKVCVSPGIGFGEYGDDHVRFALIENQDRIRQAVRGIRSMFRADDKLKS

SEQ ID NO: 7051 - protein, 230 aa, Ralstonia eutropha JMP134
MHEIERLLKGFERFQQHYFEDEPELFDTLRDGQRPPTLLIGCSDSRVDPALLLGCDPGELFTVRNIGNLVPPCTGNHEGSLHGVSAAIQFAVEQLRVARIIVMGHAGCGGIRALLAQPAGAEHEDAVAGRDFIGPWVRIASSARRHVDDTLAGASSAQRQRACEQAAILVSLGNLETFPFVRRELDRGRLTLHGWYFDLEAGALLAYSHRADSFLPLVCPIGRGNSSAKN

SEQ ID NO: 7052 - protein, 456 aa, Ashbya gossypii ATCC 10895
MGQILSNPVIDKEQGRSGDALTAYGMCAMQGWRMSMEDSHIVDLDISPEGSDDHIAYYCVFDGHGGASVAQFCGEQFSRILQQQKDFGGDAPNFARALVAAFIAADEELLKDPVLANDHSGCTATTLLVSHKQQLLVCANSGDSRTVLSTDKNAKALSFDHKPTLRSEQSRIMAADGFVEMDRVNGNLALSRAIGDFEFKSNPNLAPHEQIVTCVPDVLEHKLDYEKDEFVILACDGIWDCLSSQECVDLIHYGIQQGMGLQDIASRVIDVCCSPTTEGTGIGCDNMSFIVVALLRENETEDQWFERMRAKKYQGLLSFEAQRRKVFSYHYDFINEDDDNLFDISTKRPEERNRGSGSLPPMHATTREDPDEEDGANPADGRQHLYSLEELINAGGIQITQGGNNTSYIHGSALSEVLASLVGATGGIVARPAQRADAEDNVSEEQDGKKLEEIQE

SEQ ID NO: 7053 - protein, 124 aa, Nicotiana tabacum
LGFPGSNSGETSAFANTRVDWKETPEAHVFKADLPGLKKEEVKVEIEDDRVLQISGERNVEKEDKNDTWHRVERSSGKFMRRFRLPENAKMDQVKAAMENGVLTVTVPKEEVKKPDVKSIDISG

SEQ ID NO: 7054 - protein, 710 aa, Candida glabrata CBS138
METDFSENQSETTKCEAAQCCPLYAALVPYPSLPAGSRARARARVLCGSETYIRDMLRYVVGLGGETIHRSGEQEISKNPNTSTHKKMLRTGLRLRQLSTSCVRRHAAPAGLGAGKYNVIDHEYDCLVVGAGGAGLRAAFGLAEAGFKTACISKLFPTRSHTVAAQGGINAALGNMHKDNWKWHMYDTVKGSDWLGDQDAIHYMTREAPKSIIELEHYGMPFSRTEEGRIYQRAFGGQSKEFGKGGQAYRTCAVADRTGHAMLHTLYGQALNHDCHFFIEFFAMDLLTHNGEVVGIIAYNQEDGTIHRFRAHKTVLATGGYGRAYFSCTSAHTCTGDGNAMVSRAGFPLQDLEFVQFHPSGIYGSGCLITEGARGEGGFLLNSEGERFMERYAPTAKDLASRDVVSRAMTMEIREGRGVGKHKDHIFLQLSHLPPAVLKERLPGISETAAIFAGVDVTKQPIPVLPTVHYNMGGIPTKWTGECLTIDENGEDKVIPGLMACGEAACVSVHGANRLGANSLLDLVVFGRAVANTVADTLQPGTPHKPLPADLGKESLASLDAIRNASGDKTTAQIRLNMQKTMQKDVSVFRMQETLDEGVKNITAVDKTFKDVHVTDKSMIWNSDLVETMELRNLLTCATQTAVSAAERKESRGAHAREDYPSRDDENWRKHTLSWQQHTGDPVSIKYRKVIATTLDEAECPPVPPAVRSY

SEQ ID NO: 7055 - protein, 171 aa, Glycine max
SGRRASAAWSPPRSRTRDPEKPRAPKAQAVGWPPVRSFRRNMLAATAERGGAALVKVSMDGAPYLRKVDMGTYKSYQELSKALEKMFSSFTIGNDCSQAQGMTGMNESKLVDLLNGSDYVPTYEDKDGDWMLVGDVPWEMFVASCKRLRIMKGSEAIGLAPRAMEKCKSRS

SEQ ID NO: 7056 - protein, 124 aa, Nicotiana tabacum
LGFPGSNSRETSAFAHTRVDWKETPEAHVFKADLPGLKKEEVKVEIEDDRVLQISGERNVEKEDKNDTWHRVERSSGKFMRRFRLPENAKMDQVKAAMENGVLTVTVPKEEVKKPDVKSIDITG

SEQ ID NO: 7057 - protein, 234 aa, Oryza sativa
MWRCINGRIARRFLSTSSASARGWWDHVRPAPKDPIVRVNEAFLADPFPHKINLGIGTYKGDDGKAFIPQSVREAETKIQRCKLEESNASAVRSKFVQECVRLAYGNDSNVVREGLFAGVPTLSGTGACRLFAEFQRHFYPDSQMYLPDPTWSNHHNIWRQAEIPVKTFHYYHPDTKGLDFAALLNDVKNAPDCSFFLLHPCAHNPTGVDPTEEQWREISYQFQVKNHFPFFDM

SEQ ID NO: 7058 - protein, 475 aa, Streptomyces coelicolor A3(2)
MTSAQVDTDKAPEEGYERGLNSRQVQMIAIGGAIGVGLFLGAGANIAKAGPSIILMYALAGVIIFFIMRALGELLLYRPVSGSFAEYSREFLGPFFGYFTGWTYWLMWVVTGMAELTAAAIYIHYWFPDIPQWVSALVFLVLLFVANLISVKLFGEIEFWFSMVKVTAIIGMIVIGVGVLTLGFSQAGDTAAVSNLWEFDGFFPKGIGSSLMTLQGVMFAYLAVELVGVTAGESENPEKTLPKAINTLPWRIALFYVGALTVILAVVKWTEFAEGVSPFVEAFAVIGIPAGAGIVNFVVLTAALSSCNSGMYSTGRMLRTLADNGEAPRIFNKLSSTKTPAIGIAVSVVFMAIGVVLNYLVPEKAFGYVTSVATAAGIWTWLMILISHVRYRRKVVAGRLPASSFPAPGGSVCSYIAIAFLLFVTCLIAYDADARVCLYVMAGWAAALGIGWAVLKSRNPQITERPGEPEFEKIG

SEQ ID NO: 7059 - protein, 124 aa, Nicotiana tabacum
LGFPGSNSGETSAFANTRVDWKETPEAHVFKADLPGLKKEEVKVEIEDDRVLQISGDRNVEKEDKNDTWHRVERSSGKFMRRFRLPENAKMDQVKAAMENGVLTVTVPKEEVKKPDVKSIEITG

SEQ ID NO: 7060 - protein, 257 aa, Arabidopsis thaliana
MRKRERENPCSICGHYHKYEEGEVCGVCGHCMPVSSDTVAPQQVHVSAFPSEILPEFLYLGSYDNASRSELLKTQGISRVLNTVPMCQNLYRNSFTYHGLDNEKVLQFDDAIKFLDQCEKDKARVLVHCMSGKSRSPAVVVAYLMKRKGWRLAESHQWVKQRRPSTDISPEFYQQLQEFEQGIFGSEMMSAMNINDAPTFGFGFPKIDNQAQAPVFNNAPTSSIFSSPASSIPPQEFTFGATPPKPTTGGDIAMDGS

SEQ ID NO: 7061 - protein, 427 aa, Pseudomonas fluorescens
MNLFNLRRKPPSLDDLAMDTSLPARSDNFSSECLMPSVERPKQIFVRGQGSWLWDSDDRAYLDFSQGGGANSLGHSPSALVKAISEQAQSLINPGFGLHNRGMLNLAERLCASTGSDQAYLLNSGSEACEAAIKLARKWGQQHRGGASRIIVASKGCHGRSFGTISASDSSNLINRFEPQLPGFSPVPFNDLPALHAAVDAQTVAIMLEPIQSEAGVIPATEHYLKGVERLCRELGILLILDEVQTGVGRCGTLLAEQSYGVRADIVVLGKGLGGGVPLAALLARGKACCFEIGEMSGTHHGNALMSAAGLVVLDSVQDKGFLDHMRETAQHLGEGLSRLAHRYGHGELRGQGLLWGLDLSDDSADAVVKAALYEGLLLNAPQPDCLRFTPALTVSKANIDEMLLRLARAFSRVRTAQLQCRKGIAV

SEQ ID NO: 7062 - protein, 231 aa, Triticum aestivum
  misc_feature (171)..(171): Xaa can be any naturally occurring amino acid
  misc_feature (180)..(180): Xaa can be any naturally occurring amino acid
  misc_feature (202)..(202): Xaa can be any naturally occurring amino acid
  misc_feature (213)..(213): Xaa can be any naturally occurring amino acid
  unsure (1)..(231): unsure at all Xaa locations
MMMMGGRAGAGGVGAGGGRCPFTATQWQELEHQALIYKYMASGVPIPSDLLLPLRRSFLLDSALATSPSLAFPPQAALGWGCFGMGFGRKAEDPEPGRCRRTDGKKWRCSKEAYPDSKYCEKHMHRGKNRSREPVEMSLATPPTSSSSSASSSSSNVHSAVNAATDTTSSXGTNFGTPPXTYDTTPYQPLYGGPYSSVGRQXEAIALHHAVQXKPFPLHLDITHQDPAGAY

SEQ ID NO: 7063 - protein, 569 aa, Magnetococcus sp. MC-1
MARRAKIVATLGPACSSVEQITRLIEAGLDVARLNMSHGDHKAHLELIHNVREASRIAKREVALLCDLQGPKIRVGHLDEPLRLEKGQQWAIIPEGSHPPKLKCDGIIPCTYAGLAKDAVPGCRILFDDGYLQARAIGTEEGALLVNIEHGGLLKSHKGINMPDASISAPSLTTKDQQDLFFGVKHDVDYVALSFVRSAKCVQNVKFMLHRRKIYKPIIAKIERPEAIRNIDEIIKVVDGIMIARGDMAVEIGNHRVPSVQRQIIQKCRAKGKPVITATQMLESMIQNPSPTRAEASDVANAIWDGTDAVMLSAETSVGVDPINTVLTMGRIVEEAERNPRGPRLDAESHSISSASMMAAARVAEQVSARWIIALTVTGSSALSLARFRPEVPVLGAARTQGGVRRMNLYWGITPRLFNYSIEEREDIEPEVIQWMREQSMLQVGEKIVVVKGGGLLSNHSTSSSIRVDLVRDTRNIDEGVSQITQESVAGKGIITLDAARCVACGNCVNICPYGIWVAAASNTRSVSFNRDQVDNCSLDQECVRVCSSHAITITDAKDMHEWVEKEEL

SEQ ID NO: 7064 - protein, 496 aa, Mentha spicata
MELQISSAIIILVATFVASLLIKQWRKSESRQNLPPGPPKLPLVGHLHLLWGKLPQHAMADMAKKYGPVTHVQLGEVFSVVLSSREATKEAMKLLDPACADRFESIGTRIMWYDNDDIIFSPYSDHWRQMRKICVSELLSARNVRSFGFIRQDEMSRLLRHLQSSAGETVDMTERIATLTCSIICRAAFGAIINDHEELVELVKDSLSMASGFELADLFPSSKLLNLLCWNKSKLWRMRRRVDTILEAIVDEHKLKKSGEFGGEDIIDVLFRMQKDSQIKVPITTNAIKAFIFDTFSAGTETSSTTTLWVMAELMRNPAVMAKAQAEVRAALKGKTSVDVDDVQELKYMKSVVKETMRMHPPIPLIPRSCREECEVNGYKIPNKARIMINVWSMGRNPLYWEKPETFWPERFDQVSRDFMGSDFEFIPFGAGRRICPGLNFGLANVEVPLAQLLYHFDWKLAEGMKPSDMDMSEAEGLTGIRKNNLLLVPTLYKSP

SEQ ID NO: 7065 - protein, 441 aa, Geobacter sulfurreducens PCA
MALKETLKQKIEEHRPRTTRLVKEFGKVIIDQVTIDQCIGGARDIRCLVTDISYLDPQEGIRFRGKTIPETFEALPKAAGSDYPTVESFWYFLLTGEVPTQAQVDEVVAEWKVRQEVPQYVFDAIRALPRDSHPMVMLSVGILALQKDSKFAGFYNSGKFNKMTAWEYVYEDAYDLVARIPVIAAFIYNLKYKGDKQLPIDPSADCGANFARMIGQCKEYEDVARMYFILHSDHESGNVSAHTTHLVHSALSDPYYAYSAGLNGLAGPLHGLANQEVLDWTIKFQEKYCKDVEPTKELVTKALWDTLNAGQVVPGYGHAVLRKTDPRYTSQREFCLKTPGLKDDPLFKLVAMIFETAPGVLMEHGKAKNPWPNVDAQSGVIQWYYGLREWDFYTVLFGVGRALGCMANITWDRGLGYAIERPKSVTTPMLEKWAEEGGRKF

SEQ ID NO: 7066 - protein, 191 aa, Momordica charantia
FDSFWFVQQWPPAVCSFQKSGSCPGSGLRTFTIHGLWPQGSGTSLTNCPQGSPFDITKISHLQSQLNTLWPNVLRANNQQFWSHEWTKHGTCSESTFNQAAYFKLAVDMRNNYDIIGALRPHAAGPNGRTKSRQAIKGFLKAKFGKFPGLRCRTDPQTKVSYLVQVVACFAQDGSTLIDCTRDTCGANFIF

SEQ ID NO: 7067 - protein, 475 aa, Geobacter sulfurreducens PCA
MAKRYKVLVGGEWTGDDRPGIEVVNPYDDSVIGVVPEATNEDVDHAIRAAQAGFAEMSALPAYRRSDILDRTSELIKRDREEIAEIIAREAGKSWKFALAEADRSAETFRFASLEARNAHGEIVPMDASPVSAGRFGFYLRTPIGVIGAIAPFNFPLNLVAHKVAPAIAAGNAIVLKPATKTPLSSIKLAELMVEAGLPAGALNLVIGSGRTVGNRLVEDDRLAMVTFTGSPPVGVQIKERSGLKRVTLELGSNSPTIIEDDGDVDAAVARCVVGSFANSGQVCISVQRIFVHQRRYREFVDKFVAATQKLKVGDPMDRDCDIGPMISREELQRAVEWLGEATSLGARLETGGTVAGNCLTPAILSGVTPDMKVVCSEVFAPIVSVIPYETFDQALDMADDSIYGLQAGVYTSDINKAFKAIRRLDVGGVIINDIPTFRVDHMPYGGNKQSGLGREGIRYAMEEMTNIKFVCLNL

SEQ ID NO: 7068 - protein, 197 aa, Arabidopsis thaliana
MGLISSSSPVEEFIMGFISSSSPVEESHYHTHKIFLFSNYILLGAASSCIFLTLSLRANPFHLRISPCAAASCERNRWYAAHMVATVLTAIFQGSVSVLIFTNTSKFLGSLKSYVRDESKFLGSLKSYVREEDAAVILKLGGGLCIVIFCLDWIVLVCAFFLKYYAYVDGGDGVAMKRTGKVQSEENPKDWPWPFQV

SEQ ID NO: 7069 - protein, 137 aa, Geobacter sulfurreducens PCA
MERTFAIIKPDAVERNIIGKILEKVETAGFRIVGMKKILLSKCEAEGFYYVHKERPFFNDLCSFMSRSPVVVMVLERENAINTWREVMGATNPANAEAGTIRKDFGLSIEENSVHGSDSPESAAYEIPYFFSQLELL

SEQ ID NO: 7070 - protein, 423 aa, Saccharophagus degradans 2-40
MSQAFENAQQYIPGGVNSPVRAFKAVGGEPVFIKRAKGAYLYDINDKRYVDYVLSWGPMILGHADDDVLAAVTEKLQYGLSFGAPTEIETELAKKICNIMPGMDKVRFVSSGTEATMSAIRLARGYTGRDKIIKFEGCYHGHSDSLLIKAGSGALTFGVPSSPGVPACLAEHTVTLTYNNIEQVKQAFAEIGDQIACVIVEPVAGNMNCIPPIAGFLETLREECTKAGSLLILDEVMTGFRLGITGAQGYYGVQPDITTLGKVMGGGMPVGAFGGSKEVMDYIAPTGPVYQAGTLSGNPVAMAAGLATVQKLENPDFYAPLFAKTKTLCEGIQTLAKEAGIPLTGNYVGTMWGLFFTEEEKVTNYQQVMACDIPRFNKFFHGLLEEGVYIAPASYEAGFLSAAHTDADIDFTLQAAKNVFARI

SEQ ID NO: 7071 - protein, 515 aa, Glycine max
MDRSTGRGGGGSVDMFLRNYKLGKTLGIGSFGKVKIAEHVRTGHKVAIKILNRHKIKNMEMEEKVRREIKILRLFMHHHIIRLYEVVETPTDIYVVMEYVKSGELFDYIVEKGRLQEDEARHFFQQIISGVEYCHRNMVVHRDLKPENLLLDSKFNIKIADFGLSNIMRDGHFLKTSCGSPNYAAPEVISGKLYAGPEVDVWSCGVILYALLCGTLPFDDENIPNLFKKIKGGIYTLPSHLSPGARDLIPRMLVVDPMKRMTIPEIRQHPWFQVHLPRYLAVPPPDTLQQAKKIDEEILQEVVNMGFDRNQLVESLSNRIQNEGTVTYYLLLDNRFRVSSGYLGAEFQETMDSGFNRMHSGEVASPVVGHHSTGYMDYQGVGMRQQFPVERKWALGLQSRAQPREIMTEVLKALQELNVCLEEDWTLYHECRWVAGTAGHHEGMINNSLHSNHYFGNDSGIIENEAVSKSNVVKFEVQLYKTREEKYLLDLQRVQGPQFLFLDLCAAFLSQLRVL

SEQ ID NO: 7072 - protein, 83 aa, Cucumis sativus
ERVVHARGASAKGFLRVTHDITNLSCADFLRAPGVQTPVIVRFSTVIHERGSPETLRDPRGFAVKFYTREVRILVVYAFIGCT

SEQ ID NO: 7073 - protein, 272 aa, Yarrowia lipolytica CLIB122
MSLLPPPHTSDTMKQITRQTKNLHLYVSRGCPFAHRALIMRDLHKLDNISVDVVDPVLGDKGWVFSPSKEGCTKDTIYGLDTLRQVYEKVDPGYSGSITVPLLIDTHSNKLVSNESAQIAEMMDGEFDKRVKKSTDFVHKNITLAVYKVGFSKDQTAYNGAIKELFSALKKVEKDLRDSKYLAGDSLTAADVFLYTSIVRFDPVYVQRFKCNVGMIRHNFPWIHLWLRHLYWQVPAFRDTTDFSHIKQLYYDKGPESIIPAGPVPDIEKLEE

SEQ ID NO: 7074 - protein, 762 aa, Zea mays
MAILSALATEVLIPVAAVIGIAFAVVQWVVVSRVKLSPAASGGSGGKAGYADSLIEEEEGLNDHNVVVKCAEIQNAISEGATSFLFTEYQYVGIFMSIFAVVIFLFLGSVEGFSTKSQPCTYSKDKYCKPALFTALFSTVSFLLGAITSLVSGFLGMKIATYANARTTLEARKGVGKAFITAFRSGAVMGFLLASSGLVVLYITINVFKLYYGDDWEGLFESITGYGLGGSSMALFGRVGGGIYTKAADVGADLVGKVERNIPEDDPRNPAVIADNVGDNVGDIAGMGSDLFGSYAESSCAALVVASISSFGIDHDFTGMCYPLLVSSVGIIVCLITTLFATDFFEVKAVKEIEPALKKQLIISTVLMTFGIALISWLALPAKFTIYNFGTQKEVSNWGLFFCVSIGLWAGLIIGFVTEYYTSNAYSPVQDVADSCRTGAATNVIFGLALGYKSVIIPIFAIAVSIYVSFSIAAMYGIAVAALGMLSTIATGLAIDAYGPISDNAGGIAEMAGMSHRIRERTDALDAAGNTTAAIGKGFAIGSAALVSLALFGAFVSRAGVKVVDVLSPKVFIGLIVGAMLPYWFSAMTMKSVGSAALKMVEEVRRQFNTIPGLMEGTAKPDYATCVKISTDASIKEMIPPGALVMLTPLIVGTLFGVETLSGVLAGALVSGVQIAISASNTGGAWDNAKKYIEAGASEHARTLGPKGSDCHKAAVIGDTIGDPLKDTSGPSLNILIKLMAVESLVFAPFFATQGGLLFKYL

SEQ ID NO: 7075 - protein, 212 aa, Salmonella enterica subsp. enterica serovar Typhi Ty2
MSLFDKKHLVTQADALPGRNTPMPIATLHAVNEHSMTNVPAGMEIAYFAMGCFWGVERLFWQLPGVYSTAAGYAGGYTPNPTYREVCSGQTGHAEAVRIVYDPAVIRYEQLLQTFWENHDPTQGMQQGNDHGTQYRSAIYPLTPEQNAAAHASRERFQSAMAAAGDHRPITTEIAHATPFYYAEDEHQQYLHKNPYGYCGIGGIGVCLPPDA

SEQ ID NO: 7076 - protein, 205 aa, Vibrio vulnificus CMCP6
MKLYETEMTPSCRRVALFLAEIGASVERVQLNVREGDNLTPEFLQKSVNGKVPMLELDDGTTLCESVAICRYFDEIHPNEMALFGRDALEKAQVEMWHRVVEFQGLYAAFQAFRNITAIYQDRETCVEAWGVESKKRVEAFLPVLEKRLSESPYVATEHFTIVDITAFIFVTFAVKGLELAVFEQFSHIEKWYEQVSNRAAFQPL

SEQ ID NO: 7077 - protein, 410 aa, Oryza sativa
MAMAARARCSRQPNSHRLLAVVVLAAILLLPVASAAAAVVAAVAEGDGVENRSAARQWATGKDEGELVSGEESRGGGSVVEDEFAGGFGSLDSMLQWAIGNSDPDKLKEQAEGVQKLSADELLKRRMEIKELMEKLKMPSDADLMKIAIADLNNSSISLEDRQRALQELLILVEPIDNANDLDKLGGLVAVIQDLNNANEEIRTTSAWVLGKASQNNALVQNQILGYGALARLVKMGYATSAEEATKALYAISALVRDNINGQEAFHSENGSAMLQHILASNSVDVRLQKKAVFLVTDLADFQLNSGNSGLPFLSDRIFLKSLVDMLSRFDLDLQEKVLLAIKSLLKLSSTEATDFESSDLSSVLYRLGVQLEELPSEEQKEYAGEVDDLRREVQILFQDKLKEGTKTAL

SEQ ID NO: 7078 - protein, 137 aa, Helicobacter pylori 26695
MKQRTLSIIKPDALKKKVVGKIIDRFESNGLEVVAMKRLHLSVKDAENFYAIHRERPFFKDLIEFMVSGPVVVMVLEGKDAVAKNRDLMGATDPKLAQKGTIRADFAESIDANAVHGSDSLENAHNEIAFFFAARDL

SEQ ID NO: 7079 - protein, 642 aa, Neisseria gonorrhoeae FA 1090
MSKNQNHEEYQDDARPLTIEEQRARLRQLIIMGKERGYITYSEINDALPDDMSDADQIDNIVSMISGLGIQVTEHAPDAEDILLSDNAAVTDDDAVEEAEAALSSADSEFGRTTDPVRMYMREMGQVDLLTREDEIIIAKKIENALKNMVQAISACPGSIAEILELIEKICKDEIRVDEVVEAIIDPNEVLLNELGLGHLETTAPEKPSNDNSDENEDDEESEEDADEISAANLAELKQKVIGHFAQIEKDYKKMIGCLEKHHSRHKDYLAYRDAIANKLLEVRFATRQIDSLSSSLRGKVENIRKLEREIRDICLDRVHMERDYFIQNFLPEITNLQWIEEEIAKGRVWSNALDRFRHAILEKQTELADMEKETRISIEELKEINKNMVSSEKETAAAKQEMIQANLRLVISIAKKYTNRGLQFLDLIQEGNIGLMKAVDKFEYRRGYKFSTYATWWIRQAITRSIADQARTIRIPVHMIETINKMNRISRQHLQETGEEPDSAKLAELMQMPEDKIRKIMKIAKEPISMETPIGDDDDSHLGDFIEDANNVAPADAAMYTSLHEVTKEILESLTPREAKVLRMRFGIDMNTDHTLEEVGRQFDVTRERIRQIEAKALRKLRHPTRSDRLRSFLDSEDSKL

SEQ ID NO: 7080 - protein, 328 aa, Saccharophagus degradans 2-40
MPTYQIYGLGAALVDTEIEVTDLDLKDLRIDKGVMTLVDEARQAQLIRTLSKHVAASKRASGGSAANSIIAASYFGAKTFYSCRVANDENGKFYLNDLAEAGVSYYEKNGEPSGTTGKCLVFITPDAERTMNTFLGISETLSVDDIDEQALAESEWAYIEGYLVTSATGRPAAIKLRELAEAKGVKTALSLSDPAIVNFFKDGLVEMIGDGVDMLFCNEAEALQYTGCDTVETAAEALKQCAKAFAITQGAKGALLFDGEQFITVAAHKVTPVDTNGAGDMFAGAFLYGLTNNMSFQQAGDLASKAASVVVSQFGPRLRPEQHKELLG

SEQ ID NO: 7081 - protein, 132 aa, Glycine max
  misc_feature (32)..(32): Xaa can be any naturally occurring amino acid
  misc_feature (41)..(41): Xaa can be any naturally occurring amino acid
  misc_feature (77)..(77): Xaa can be any naturally occurring amino acid
  misc_feature (86)..(86): Xaa can be any naturally occurring amino acid
  misc_feature (107)..(107): Xaa can be any naturally occurring amino acid
  unsure (1)..(132): unsure at all Xaa locations
YGCEKTTEGEGRIDMCLLRRASDDEEHSYMTXRILFMLKEXLSVGADYMRIDGIKAYAATYVTANMMLYARDMYLHXTPYATDAFXYTLIFERFFAQNSPMLTDTGXARVACSTYKAGEWDAACSTPLIPVA

SEQ ID NO: 7082 - protein, 102 aa, Nicotiana tabacum
PNSYVFVVDMPGLKSGDINVQVEDDNVLLISGERKREEEKEGAKYIRMERRVGKFMRKFTLLENANTDAISAVCQDGVLTVTVQKLPPPEPKKPKTIEVKIA

SEQ ID NO: 7083 - protein, 460 aa, Oryza sativa
MPSANVRGAQPSADRRLSTLVRHLLPSSARTATTTSTSSSAADADSSLQAFPTMASSSVFAGLAQAPEDPILGVTVAYNKDPSPVKVNLGVGAYRTEEGKPLVLNVVRRAEQMLINNPSRVKEYLPITGLADFNKLSAKLIFGADSPAIQENRVATVQCLSGTGSLRVGGEFLARHYHERTIYIPQPTWGNHPKVFTLAGLTVRSYRYYDPATRGLDFQGLLEDLGSAPSGAIVLLHACAHNPTGVDPTLDQWEQIRQLMRSKALLPFFDSAYQGFASGSLDQDAQSVRMFVADGGELLMAQSYAKNMGLYGERVGALSIVCGSADVAVRVESQLKLVIRPMYSNPPIHGASIVATILKDSAMFNEWTVELKGMADRIISMRQQLFDALKTRETPGDWSHIIKQIGMFTFTGLNSDQVAFMRQEYHIYMTSDGRISMAGLSGRTIPHLADAIHAAVTKLK

SEQ ID NO: 7084 - protein, 427 aa, Bacillus cereus ATCC 10987
MKTFLSALQWALFILAGSLIVPISVATSYGLDGAEAIAFVQRTLFVLGFAGLLQAIFGHKLPIQEGPAGLWWGIFSLYASLGVVLFGSNNETLKVLQYAFLLSGIICIILSVFGLIDKLVRYFTPTVIGTYLFLLVAQLSGSFLKGMFGLDGKHTEVQPNVFILSLIVILLSFFIMKLPIIGQYSVLFSIVCGWILFACFGLSNPITPVTDIIRFPSLFVFGMPRVEWNMVITVIFVTLLLLTNMLASIRVVQKVVSKYEENAASDRFKQAGIITGINQLLGGLFSAIGPVAISGSAGFIATTNIYKRLPFILGSSFIIVVSIFPKITSFFAAIPVAVGYAAIYPVFASMIGLAFREYETVQDKERLFKVAGLSIFTGIGVMFVPAGAYSTLPPFLASFLSNGLVLGAVMAILLEILFSRSTAKQVS

SEQ ID NO: 7085 - protein, 395 aa, Francisella tularensis subsp. tularensis SCHU S4
MSENVYIVAAKRSAVTKGKKGGFAKKRPDELLADVLRRTVAEANINPNDIEDIVVGCAMPEAEQGLNVARISSLLAGLPNSVPAFTINRYCSSGLQSIAIAANEIAQGNIDVAIGAGVESMSMIPFGGNKMSFSKEIFAKDENVAIAYGMGITAEMVAKDWNVSRQDQDAFALESHQKAIHAIESGYFKDEILPIDVDHNKPDEATGEIINHKQTITEDEGARKDTSLEALAKLKPAFANGGSVTAGNSSQVSDGAAAVILVSEKYLKEHNLKPLGKFLGFAVAGVDPRIMGIGPIKAIPKVLRQTGLNIDDIDWIELNEAFAAQSLAVINDLKLDKNKVNPCGGAIALGHPLGATGTILTVKALHGLQRTSKKYAMITMCIGTGMGAAGIIEAC

SEQ ID NO: 7086 - protein, 341 aa, Trifolium repens
QTISYMAERVVGHGSFGVVFQAKCLETGETVAIKKVLQDKRYKNRELQTMRLLDHPNVVSLKHCFFSTTEKDELYLNLVLEYVPETVHRVIKHYNKLNQRMPMIYVKLYTYQIFRALSYIHRCIGVCHRDIKPQNLLVNPHTHQVKLCDFGSAKVLVKGEPNISYICSRYYRAPELIFGATEYTTAIDVWSVGCVLAELLLGQPLFPGESGVDQLVEIIKVLGTPTREEIKCMNPNYTEFKFPQIKAHPWHKIFHKRMPPEAVDLVSRLLQYSPNLRCQALDALTHPFFDELRDPNARLPTGRFLPPLFNFKPHELKGIPVETLVKLVPEHARKQCPFLGL

SEQ ID NO: 7087 - protein, 271 aa, Bacillus halodurans C-125
MKVALYQMDILPGDPRGNERKVKEWIEDVMQQEDVPDLLVLPEMWTTAYTLDQLEHLAEGEERYTELFLKELAREHNVNIVAGSIAKKEKGKLYNRALVFDRRGHTVYQYDKIHLVPMLSEPDYLTGGDAAASVFELEGTKMGLVICYDLRFPELMRSLALEGAEIVFIVAEWPEARAVHWEVLQRARAIENQSYVISCNRVGAYAGVTFAGRSMVIDPWGDVLIQGSRDQEQTLTTKLNPDKVSEVREAVPIFQSRVPTKYKPLHKEDVT

SEQ ID NO: 7088 - protein, 319 aa, Burkholderia vietnamiensis G4
MMAEIVIVGELLAEFVALERGQGFDAPGLFAGPFPSGAPAIFADQAARLGARVAYAGCVGRDAFGDAIVARLERDGVDITRIRRVERPTGTAFVAYRDDGSRSFVFNLATSAAACIDAGDVDAAMFDGCRYFHVMGSSLTSEAAIAAVQRGVIEAARAGAKVSFDPNVRPEMLSFPPLRAALDAMLAACHLFLPSDADLPFFCGPQPAERAIAGLLATHPLLERVVLKRGAAGSAAFDRTSRVDAPAWPVDELDPTGAGDCFGGTLVASLVAGMPTDAALRRANAAGAIAVTRRGPMEGNSDAAEIERFLTERGVACPA

SEQ ID NO: 7089 - protein, 395 aa, Glycine max
MPEAPGDSTKDYVLEEKNKKILDFIEDVTNNADEVQKKVLSEILSRNANVEYLRRHGVNGQTVDPDTFKRLLPVITYEDIQPDINRIANGDKSPILTSKPVTEFLTSSGTSGGERKLMPTIEEELGRRCMLYSLLMPIMNQFVPDLEKGKGMYLMFIKCESKTPGGIVARPVLTSYYKSPYFRDRSYDPYTNYTSPNETVLCLDSYQSMYSQLLCGLCQHKEVLRVGAIFASGFIRAIRFLEKHWALLCNDIKTGTINNSITDSSVREAVMRILKADPKLADFIHNECSKGSWQGIITRLWPNTKYVDVIVTGTMAQYIPTLDYYSNGLPLVCTMYASSECYFGVNLNPLCKPSHVSYTLIPTMCYYEFLPVNRSNELAASRPFTTSLNQAQTAE

SEQ ID NO: 7090 - protein, 466 aa, Rhodospirillum rubrum
MSDFDVVVIGGGPGGYVCAIRAAQLGLRVACVEKRPTLGGTCLNVGCIPSKALLQSSHLFDEANHGFAAHGITVGTLGLDMKTMMARKDEVVEANTKGIVFLFKKNKVTHVVGSARIAGAGQVVVSGEGGEQTLTTRAIVIATGSEVTPLPGVTIDEERIVSSTGALALAKVPKSLVVIGAGVIGLELGSVWRRLGAEVTVVEYLDHILPPMDGEVRKQSQRILEKQGLRFKLGRKVTAAERKGEGVSLTVEPAKGGEAETLEAETVLVAVGRRPFTDGLGLEEVGVEKTDRGFVKVDGDFQTAIEGIFAIGDVIGGMMLAHKAEDEGMALAEMLAGESAHVNYGAIPSVVYTWPEIAGVGKTEEMLKKDGVAYKVGKFPFTANARAKANGDTDGFVKILSNAETGRVLGCHIIGAQAGDLIMEVVLGMEFGASSEDIARTCHAHPQLGEAVKEAALAVNKRTIHM

SEQ ID NO: 7091 - protein, 236 aa, Oryza sativa (japonica cultivar-group)
MAALAAASTAFAAKPRLARAPSSPAARFSVSCSASGNNGGAGEMAQSLAASAKTFSAALALSSVLLSSAATSPSPAAADIAGLTPCKESKAFAKREKQSIKKLQSSLKKYAPDSAPALAINATIEKTKRRFENYGKFGLLCGADGLPHLIVSGDQRHWGEFITPGLLFLYIAGWIGWVGRSYLIAISGEKKPAMREIIIDVELAVKLLPRGFIWPVAAYRELITGNLVVDDADIGY

SEQ ID NO: 7092 - protein, 500 aa, Mentha x piperita
MELQISSAIIILVVTYTISLLIIKQWRKPKPQENLPPGPPKLPLIGHLHLLWGKLPQHALASVAKQYGPVAHVQLGEVFSVVLSSREATKEAMKLVDPACADRFESIGTKIMWYDNDDIIFSPYSVHWRQMRKICVSELLSARNVRSFGFIRQDEVSRLLGHLRSSAAAGEAVDLTERIATLTCSIICRAAFGSVIRDHEELVELVKDALSMASGFELADMFPSSKLLNLLCWNKSKLWRMRRRVDAILEAIVEEHKLKKSGEFGGEDIIDVLFRMQKDSQIKVPITTNAIKAFIFDTFSAGTETSSTTTLWVMAELMRNPEVMAKAQAEVRAALKGKTDWDVDDVQELKYMKSVVKETMRMHPPIPLIPRSCREECEVNGYTIPNKARIMINVWSMGRNPLYWEKPETFWPERFDQVSRDFMGNDFEFIPFGAGRRICPGLNFGLANVEVPLAQLLYHFDWKLAEGMNPSDMDMSEAEGLTGIRKNNLLLVPTPYDPSS

SEQ ID NO: 7093 - protein, 449 aa, Sordaria macrospora
MREIISLNVGQAGCQIANSCWELYCLEHGIQPDGYLTEERKAADPDHGFSTFFSETGNGKYVPRTIYADLEPNVIDEVRTGAYRGLFHPEHMISGKEDASNNYARGHYTVGKELIDQVLDKVRRVADNCSGLQGFLVFHSFGGGTGSGFGALLMERLSVDYGKKSKLEFCVYPAPQTATSVVEPYHNFLTTNTTLEQADCSFMVDNEAIYDICRRNLGLERPNYENLNRLIAQVVSSITASLRFDGSLNVDLNEFQTNLVPYPRIHFPLVAYAPVISAAKAAHEANSVQEMTMSCFEPNNQMVKCDPRHGKYMATCLLYGGDVVPNDAHAAVASLKTKRTIQFVDWCPTGFKLGICYQPPHQVPNGDLAKVNRAVCMLSNTTAIAEAWSALSSKFDLMYSKRAFVHWYVGEGMEEGEFSEAREVLAALEADYEEVAADSMEGEEVEAEY

SEQ ID NO: 7094 - protein, 106 aa, Nicotiana tabacum
PNCYIFIVDMPGTKANEIKVQVEDDNVLVVSGERKRDKEKKDEKESVKYLRMERRVGKFMRKFVLPENANIDSITAVCQDGVLKVTVEKLPPPERKKPKTIDVKLA

SEQ ID NO: 7095 - protein, 568 aa, Arabidopsis thaliana
MEAKIVKVSDSSYKDGLGKKRKHPGNYTPYDSGRSYAKLQWVLSPNSSTQKLEKRRNLDGENKVIVSENHVEKSLVRYFSYYKKTGVPKRVMFHENGEWIDLPDHILCDIRNDLEAKRATIEFNWCGRHFLLDFLHMYRLDLETGVKTQLAWIDIAGKCFFPETFDTLERDGCHHIRGEDPEQHDQREIKLHIEIDVNSGELPRLNLNVVTDESGDNMDDFQAVQRSSNGPNDEASEDSCSRELDDAVEKWDKTETDRFSGVKPAEEELDKDAVKQMFALGAATLGHVESLDVYQFSSEIAKARLSLFQKQADITKKHRGDANIRYAWVPAKKEVLSAVMMHGLGVGGAFIKKSMYGVGVHAANCPYFSARYCDIDDNGVRHMVLCRVIMGNMEPLRGDNTQYFTGGEKYDNGVDDVESPKHYLIWNMNMNTHIYPEFVVSFKLSIPNAEGNILPTTQSRHESSGLTLEGPKGSPSNEPGRVSNGGSGSEKNSSSSRRPRSPIMPFPLLFKAISSKIARKDMDLIIAGYQELREKKVSRKEFYKTLSMIVGDDDLLISTITGLQRSLG

SEQ ID NO: 7096 - protein, 498 aa, Mentha x piperita
MELLQLWSALIILVVTYTISLLINQWRKPKPQGKFPPGPPKLPLIGHLHLLWGKLPQHALASVAKEYGPVAHVQLGEVFSVVLSSREATKEAMKLVDPACANRFESIGTRIMWYDNEDIIFSPYSEHWRQMRKICVSELLSSRNVRSFGFIRQDEVSRLLRHLRSSAGAAVDMTERIETLTCSIICRAAFGSVIRDNAELVGLVKDALSMASGFELADMFPSSKLLNLLCWNKSKLWRMRRRVDTILEAIVDEHKFKKSGEFGGEDIIDVLFRMQKDTQIKVPITTNSIKAFIFDTFSAGTETSSTTTLWVLAELMRNPAVMAKAQAEVRAALKEKTNWDVDDVQELKYMKSVVKETMRMHPPIPLIPRSCREECVVNGYTIPNKARIMINVWSMGRNPLYWEKPDTFWPERFDQVSKDFMGNDFEFVPFGAGRRICPGLNFGLANVEVPLAQLLYHFDWKLAEGMKPSDMDMSEAEGLTGILKNNLLLVPTPYDPSS

SEQ ID NO: 7097 - protein, 500 aa, Streptococcus pyogenes SSI-1
MNKRVKIVATLGPAVEIRGGKKYGEDGYWAGQLDVEESAKKIAELIEAGANVFRFNFSHGDHKEQGDRMATVRLAEEIARQKVGFLLDTKGPEMRTELFADDAKEFSYVTGEKIRVATTQGIQSTRDVIALNVAGSLDIYDEVEVGHTILIDDGKLGLKVIDKDIATRQFIVEVENDGIIAKQKGVNIPNTKIPFPALAERDNADIRFGLEQGLNFIAISFVRTAKDVEEVREICRETGNDHVQLFAKIENQQGIDNLDEIIEAADGIMIARGDMGIEVPFEMVPVFQKMIITKVNAAGKAVITATNMLETMTEKPRATRSEVSDVFNAVIDGTDATMLSGESANGKYPVESVRTMATIDRNAQTLLNEYGRLDSSAFPRTNKTDVIASAVKDATHSMDIKLVVTITETGNTARAISKFRPDADILAVTFDEKVQRALMINWAVIPVLAEKPASTDDMFEVAERVAVEAGLVQSGDNIVIVAGVPVGTGGTNTMRVRTVK

SEQ ID NO: 7098 - protein, 403 aa, Zea mays
LSLLRSHIGLLVSKMYDTAKTIVLNLVYLLDEYGFVPNGARSYYTNRSQPPLLSSMVLEIYRATGDVEFVRTVFHSLLKEHSFWMSEIHNVAIADNHGRVHNLSRYQARWNKPRPESATIDEELASKLNSMAAKEKLYCEIASTAESGWDFSSRWMRNSTDMTTLATTYIIPVDLNTFLFKMELDIGALAKVVGDNATSEFFLNASKARHIAIDSILWNSEMEQWLDYWLPGDADCQEVHEWKPNSQNRNIFASNFVPLWLNAYHSEFVRFADEAKSNRVMASLKASGLLHAAGIATSLTNTSQQWDFPNGWAPLQHLIAEGLLHSGSEAKKLAEDIATRWVRTNYAAYKATGAMHEKYDVEACGESGGGGEYKPQTGFGWSNGVVLSFLEEFGWPEGKEIAC

SEQ ID NO: 7099 - protein, 394 aa, Staphylococcus aureus subsp. aureus MSSA476
MQEAYIVAYGRSAAAKAKQGALFHERPDDVAAKVLQGVLKRIDGKFNKNMIEDVIVGTAFPEGLQGQNIARTIALLTGLSDTVPGQTVNRYCSSGLQTIAIAANQIMAGQGDILVAGGVELMSAVPMGGNEPTNNPTLQYDDIGASYPMGLTAENVASQFDVSREDQDAYAVRSHQRAYEAQRDGRFNDEIIPIQVNSVEYTNAGPKVHTNIFDQDEFIRPDTTMEALAKLRTVFKADGTVTAGTSAPLSDGAGFVVLMSGDKVKELGVTPIARFVGYKAVGVDPKIMGIGPAYAIPEVLSLSNLSVEDIDLIELNEAFASQTIASIKEVGLDISRTNVNGGAIALGHPLGATGAMLTARLLNEMGRRPDSRYGMVTMCIGVGMGAAAIFEYVR

SEQ ID NO: 7100 - protein, 366 aa, ASPERGILLUS NIDULANS FGSC A4
MANRDINDFGGFDDRQLPAIRSPDYIESNEESHIAHMATYTSSVPVGDYAYTMHNSMLAYDTANEGNSVSVSLGSESAFAYDVSTYPSSTTALNYDLNQFASLHSHAPGSDNASTYSSAQRHYWTQPHTSGGMVSSTQTLLSHPAQPSRAAEPSAAQKIPPGQLQDINPFPQASVSATSHRPIQPKSLAGKGARSEASRSSTPYPNVYSRSGYDMMGILAEVVSRDNPRIDLGPVDLSCAFVLCDLTMEDSPIVYVSHAFERLTGYNEKEIVGRNCRFLQSPDAKVEKGEPRKFVDSHTVSRLRSAVDRRSEIQVSIINYRKGGQPFLNLVTMIPVRWNAKDYYVGFQVDLVERPEAVTRRNSGIF

SEQ ID NO: 7101 - protein, 481 aa, Arabidopsis thaliana
  misc_feature (452)..(452): Xaa can be any naturally occurring amino acid
  unsure (1)..(481): unsure at all Xaa locations
MEAKIVKVSDSSYKDGLGKKRKHPGNYTPYDSGRSYAKLQWVLSPNSSTQKLEKRRNLDGENKVIVSENHVEKSLVRYFSYYKKTGVPKRVMFHENGEWIDLPDHILCDIRNDLEAKRATIEFNWCGRHFLLDFLHMYRLDLETGVKTQLAWIDIAGKCFFPETFDTLERDGCHHIRGEDPEQHDQREIKLHIEIDVNSGELPRLNLNVVTDESGDNMDDFQAVQRSSNGPNDEASEDSCSRELDDAVEKWDKTETDRFSGVKPAEEELDKDAVKQMFALGAATLGHVESLDVYQFSSEIAKARLSLFQKQADITKKHRGDANIRYAWVPAKKEVLSAVMMHGLGVGGAFIKKSMYGVGVHAANCPYFSARYCDIDDNGVRHMVLCRVIMGNMEPLRGDNTQYFTGGEEYDNGVDDVESPKHYLIWNMNMNTHIYPEFVVSFKLSIPNAEGXLPFEPGRVSNGGSGSEKNSSSSRRPRSPI

SEQ ID NO: 7102 - protein, 327 aa, Listeria monocytogenes EGD-e
MGIAVLGGAGYIGSHAVDELITRGYEVVVIDNLRTGHRESIHKKAKFYEGDIRDKAFLSSVFEKEKVDGVIHFAASSLVGESMEVPLDYLNNNVYGTQIVLEVMEEFDVKHIVFSSSAATYGEPERVPITEDMPTNPESTYGETKLIMEKMMKWCDKAYGMKFVALRYFNVAGAKADGSIGEDHKPESHLVPIILQVALGQREKLAIYGDDYNTPDGTCIRDYVQVEDLIDAHIRALEYLKNGGESNIFNLGSSNGFSVKEMLEAARTVTGKEIPAEVVPRRAGDPGTLIASSDKAREILGWEPTYTDVKDIIATAWKWHVSHPNGY

SEQ ID NO: 7103 - protein, 836 aa, ASPERGILLUS NIDULANS FGSC A4
MANRDINDFGGFDDRQLPAIRSPDYIESNEESHIAHMATYTSSVPVGDYAYTMHNSMLAYDTANEGNSVSVSLGSESAFAYDVSTYPSSTTALNYDLNQFASLHSHAPGSDNASTYSSAQRHYWTQPHTSGGMVSSTQTLLSHPAQPSRAAEPSAAQKIPPGQLQDINPFPQASVSATSHRPIQPKSLAGKGARSEASRSSTPYPNVYSRSGYDMMGILAEVVSRDNPRIDLGPVDLSCAFVLCDLTMEDSPIVYVSHAFERLTGYNEKEIVGRNCRFLQSPDAKVEKGEPRKFVDSHTVSRLRSAVDRRSEIQVSIINYRKGGQPFLNLVTMIPVRWNAKDYYVGFQVDLVERPEAVTRRNSDGTYMIDYHRSQLPAYVVPAADMYRDGHVPTAMLSPRQVSVILNDFVKGQSVAVNLFHHMLVENTDDLIFVLSFEGEFLYLSPSCQTVLEYKPNDLCGKTLSAICHPSDIGPVTRDMRTCTTGDPISILYRIRRKESGYTWFENHGGWHITQRGRQFMVLVGRLIPMYSPIQLANVESGGLAENDIWAKLSLSGIILFMSSKSRAVLGQPSDDLIGKRLQDFLVTDNFHSEPAVQQALETSRHNQQATFTHRIRHRKGHIISAQITLYPGDIVYGASKPAFLIAHLRFPRELQLQASTTEDQSNSQSQSQTSSDTGPGDYKTPQNQQQTAESHQKPHPNFPQPPTSSATLAVPSSASPNSAEPPTELGMHLFEELNPTRGSNWHFELRELEKQNRHLTDEAQRLLARRRKRKRKQSAAAMEKSCAMCGTRTTPEWRRGPSGNRDLCNSCGLRWAKQVRSAAAVHSQAKSGGEG

SEQ ID NO: 7104 - protein, 731 aa, Streptococcus agalactiae A909
MSVYVSGIGIISSLGKNYSEHKQHLFDLKEGISKHLYKNHDSILESYTGSITSDPEVPEQYKDETRNFKFAFTAFEEALASSGVNLKAYHNIAVCLGTSLGGKSAGQNALYQFEEGERQVDASLLEKASVYHIADELMAYHDIVGASYVISTACSASNNAVILGTQLLQDGDCDLAICGGCDELSDISLAGFTSLGAINTEMACQPYSSGKGINLGEGAGFVVLVKDQSLAKYGKIIGGLITSDGYHITAPKPTGEGAAQIAKQLVTQAGIDYSEIDYINGHGTGTQANDKMEKNMYGKFFPTTTLISSTKGQTGHTLGAAGIIELINCLAAIEEQTVPATKNEIGIEGFPENFVYHQKREYPIRNALNFSFAFGGNNSGVLLSSLDSPLETLPARENLKMAILSSVASISKNESLSITYEKVASNFNDFEALRFKGARPPKTVNPAQFRKMDDFSKMVAVTTAQALIESNINLKKQDTSKVGIVFTTLSGPVEVVEGIEKQITTEGYAHVSASRFPFTVMNAAAGMLSIIFKITGPLSVISTNSGALDGIQYAKEMMRNDNLDYVILVSANQWTDMSFMWWQQLNYDSQMFVGSDYCSAQVLSRQALDNSPIILGSKQLKYSHKTFTDVMTIFDAALQNLLSDLGLTIKDIKGFVWNERKKAVSSDYDFLANLSEYYNMPNLASGQFGFSSNGAGEELDYTVNESIEKGYYLVLSYSIFGGISFAIIEKR

SEQ ID NO: 7105 - protein, 396 aa, Oryza sativa
MSWWWAGAIGAVKKRQEENAAATEPSFQSVALVVGSTGIVGTSLLDILPLQDTPGGPWKVYAVSRRPLPPWSPPASPAVTHLHLDLADSAAVAEVLTPLTDITHVFYVAWSAHPTEAQNREVNSAMLRNILSVVVPNCPALVHVCLQTGRKHYIGPFEVIGKIAAPDPPFTEDMLRLDCPNFYYDLEDVLFNEVSRRDGAVSWSVHRPTVVFGFSPRSAMNVVGSLCVYAAICRKEGAVLRWPGSRVAWEGFSDASDADLIAEHEIWAAVEPFAKNEAFNCSNGDLYKWKLLWPMLADQFGVEWSGYEGEESSFKLADAMSGKEAVWAEIVKENDLMDTELEEITNWWFVDAVFGVRSEHLDSMNKSKEHGFLGFRNTVNSFNTWIEKMKVFKIVP

SEQ ID NO: 7106 - protein, 407 aa, Myxococcus xanthus
MPGGRRPGATASETTWGPRAYTQKHPRSRELPETASMPTASTSSSLARRLMPLALAALAVLSACTEARGAAPAAPGPTIQDTRRYEKPSDADLRRTLSPLAYEVTQKGATEPAFRNPLWNHHEEGLYVDVVSGEPLFSSRDKFDSGTGWPSFTRPVDSARIVEKRDSTQGMERVEVRSKAAGSHLGHLFGDGPAPAKTRYCINSAALRFVAVNDLAKEGYGAWLPLFGRPAPAAATKRQDTSPFTETALLAGGCFWGMEDLLRKIPGVVQTEVGYTGGSSAFRNPTYHDVSSDKTGHAEAVRVVFDPTRLTYETLLEQWFFRMHDPTTLNRQGNDVGTQYRSAIFYLSDAQKRVAEEVKARVDASRKWPRPVVTQIVSAGAFTPAEDYHQDYLVKNPGGYTCHYMRD

SEQ ID NO: 7107 - protein, 759 aa, Paracoccidioides brasiliensis
MASKATEGLRKIQGMVESMHPGNKKVADLARDTVDVHAPAPFTTDHGTKVSNTDNWLRAASENQTGPSLLEDQIAREKIHRFDHERIPERVVHARGTGAFGHFKLVESAEDATSAGVLTDTSRTTPVFVRFSTVQGSKGSFDTVRDVRGFATKFYTQEGNWDLVGNNIPVFFIQDAIKFDISKQSIPFSFLSRCYLSSVHAVKPERQRSPQGNCHNNFWDFVSCILKATHMFMWAMSDRAIPRILPVCRGFGVNTFVLVNRQGKRHFVKFHWMPELGVHSLVPDESFKLGGQDPDYHRKDLMEAIDNKVYPKWKFGIQVIPEEKEHEFEFDILDATKIWPEDLVPVRYIGEMELNRNVDEFFPQTEQVAFCTSHIVPGIEFSDDPLLQGRNFSYFDTQISRLGVNWEELPINRPVCPVMNHNRDGAMRHKITQGTVNYWPNRFEACPPTNPEDGGFVTYPQKITRTLSYMVSNKFANTSPAQLFYNSLSYEQLHIQNAFCFELDHCYDPVVTTDSSSDLLKSPYRSHELSQSKSALQHQTGLDVPTKGQKTINLSQEYINERQPFCTHNPRGENTILIGDGTTQSPSPLSNRGNSHECSAHHNGTKRQPIFADHEDRETGAGVIPDHNYIGQRSTLLTPRSYPVARISRSCASLGAFRHWIAEQFGHCKAIGATGEAVDLIAQVLNSLPGLNVALASSSDVVEWYGVVTSSKLHEPHTLTEGFKLFPEAKDFLGKFLYQVSQHRNYQRDMVGLTDQVAF

SEQ ID NO: 7108 - protein, 354 aa, Arabidopsis thaliana
MNRGSLCPNPICLPPLEQSISKFLTQSGTFKDGDLRVNKDGIQTVSLSEPGAPPPIEPLDNQLSLADLEVIKVIGKGSSGNVQLVKHKLTQQFFALKVIQLNTEESTCRAISQELRINLSSQCPYLVSCYQSFYHNGLVSIILEFMDGGSLADLLKKVGKVPENMLSAICKRVLRGLCYIHHERRIIHRDLKPSNLLINHRGEVKITDFGVSKILTSTSSLANSFVGTYPYMSPERISGSLYSNKSDIWSLGLVLLECATGKFPYTPPEHKKGWSSVYELVDAIVENPPPCAPSNLFSPEFCSFISQCVQKDPRDRKSAKELLEHKFVKMFEDSDTNLSAYFTDAGSLIPPLAN

SEQ ID NO: 7109 - protein, 321 aa, Eucalyptus gunnii
MGMAMGIKEKASSNPHNHKLRKGLWSPEEDEKLMRYMLTNGQGCWSDIARNAGLQRCGKSCRLRWINYLRPDLKRGAFSPQEEELIVHLHNILGNRWSQIAARLPGRTDNEIKNFWNSTLKKRLKMNSATSSSNESDLSNPQDIAAGIMPSFHAQYDVLATCMDSSPAPFPPMDNISAPNQFDPFPTLNNRCDTWEGVGFFTFPSGIAPVSMGDDSSYLNLEHAKVGLLGSEFSVPPLASSTTTTEENNYRSIGCGMDGKGENSFSNNNDSCFSNTTTASFKAEDDMSGFGNNLQAANLRIGEWDLEGLMDDLPSFPFLDF

SEQ ID NO: 7110 - protein, 125 aa, Pichia pastoris
MRSQFKDEHPFEKRKAEAMRIRYKFADRIPVICEKVEKSDIPEVDKRKYLVPCDLTVGQFVYVIRKRIKIPSEKAIFIFIDDILPPTAALMSKVYEEHKDEDGFLYVLYSGENTFGDIPGVEEIE

SEQ ID NO: 7111 - protein, 280 aa, Streptococcus agalactiae A909
MTDTMILNDNHKIPTLGLGTWMIDNDRVAQVVKDAIELGYRHINTAQAYNNEKGVGVGIKESGITRESLFVTTKIAAEHKDYESATKSIDQSLEALGLDCIDLMIIHSPQPWKEWRETDKHFDQGNLEAWRALEDAQKSGKVKSIGVSNFLEKDLKNGHVKPAVNQILAHIGNTPFDLIDYCQSKGIQVEAYSPIAHGQALKSDGIQKMAEKYGVSVAQLCIQYLLQLNLIVLPKASSKEHLQSNLDFDFVISDEDMSILKSLMFDDYGEFSNFPVFSEK

SEQ ID NO: 7112 - protein, 343 aa, Arabidopsis thaliana
MTKAGSSSHLIEQSTITLILLSFEHLKNFSGEICLYIYSSTKKMLKVPEHQVAGHIASDGKLGPLVDDQGRFFKPLQGDSRGEHEAKFYESFTSNMKVPDHIHRYFPVYHGTQLVEASDGSGKLPHLVLDDVVSGYANPSVMDVKIGSRTWYPDVSEEYFKKCIKKDRQTTTVSLGFRVSGFKIFDHQESSFWRAEKKLVLGYNADGARLALRKFVSSNSPADSNLTPNCAFASEVYGGCNGILAQLLELKDWFETQTLYHFNSCSILMIYENESILMQGGDDAPAPRAQVKLVDFAHVLDGNGVIDHNFLGGLCSFIKFIKDILQSVEKHDETDTSLLENGR

SEQ ID NO: 7113 - protein, 385 aa, Thermoplasma acidophilum DSM 1728
MPETEEISKGLEDVNIKWTRLTTIDGNKGILRYGGYSVEDIIASGAQDEEIQYLFLYGNLPTEQELRKYKETVQKGYKIPDFVINAIRQLPRESDAVAMQMAAVAAMAASETKFKWNKDTDRDVAAEMIGRMSAITVNVYRHIMNMPAELPKPSDSYAESFLNAAFGRKATKEEIDAMNTALILYTDHEVPASTTAGLVAVSTLSDMYSGITAALAALKGPLHGGAAEAAIAQFDEIKDPAMVEKWFNDNIINGKKRLMGFGHRVYKTYDPRAKIFKGIAEKLSSKKPEVHKVYEIATKLEDFGIKAFGSKGIYPNTDYFSGIVYMSIGFPLRNNIYTALFALSRVTGWQAHFIEYVEEQQRLIRPRAVYVGPAERKYVPIAERK

SEQ ID NO: 7114 - protein, 255 aa, Eucalyptus gunnii
  misc_feature (214)..(214): Xaa can be any naturally occurring amino acid
  unsure (1)..(255): unsure at all Xaa locations
MGRSPCCEKAHTNKGAWTKEEDDKLIAYIRAHGEGCWRSLPKAAGLLRCGKSCRLRWINYLRPDLKRGNFTEEEDEIIIKLHSLLGNKWSLIAGRLPGRTDNEIKNYWNTHIRRKLLNRGIDPATHRLINEPAQDHHDEPTISFAANSKEIKEMKNNAELNFMCNLEESADVASSARERCPDLNLELGISPPSHQLHQPEPLLRFTGRKSDLCXECNLGLKNSQNCRCSVGVIESETSVGYDFLGLKASVLDYRS

SEQ ID NO: 7115 - protein, 366 aa, Cryptococcus neoformans var. neoformans B-3501A
MLIFSIETYHSPRSAFISCNSKRISAKCAVSIGHERSLNQIVFNSEGDLLFSASKDSVVNAWYTSNGERLGTYGGIKGGDGHNGSVWTVAVDSQTRFLLTGGADNAMKLWEVKTGECLYTWEFLTAVKRVAWNEDDDMFLSITEQRSGQPSVIRIFSINREDPRSQSTTPITEMRLSGSRATVAIWAPLSDYIITGHESGKIAKYDVKTGEEVQAVEDEHSALISDIQLSPDGTYFITASKDKTARLWDIETLEVMKVYTTETPVNSAVITPDRPYIILGGGQDAMNVTTTSQRAGKFESRFFHKLFEEEVGRVKGHFGPINTLSVHPQGRAYASGAEDGFVRVHWFEESYFRSRPFGDLEPEPEV

SEQ ID NO: 7116 - protein, 759 aa, Streptomyces coelicolor A3(2)
MSEANPLKRVARKVTEGLHGEAGGPPDGIPGRPGPESPSAAEPTEPREPLPPKPDQTGPDTVSPTGQPTGADQARVAQSGSYLTNAQGTRLYDTDHSLKAGPRGPVLLQDHHLREKVMHFDHERIPERVVHARGAGAHGVFQSYGTAASVTKAGFLAADVETPVFTRFSTVVGSRGSSDTVRDTRGFATKFYTSEGVFDLVGNNIPVFFIQDAIKFPDVVHAAKPHPDREIPQAQSAHDTFWDFVSLHTEATNHTIFFMGDRGIPRSFRMMEGFGVHTFRLVNAEGATTLVKFHWKPKLGVHSLVWDEAQLINGVDPDFHRRDLADAIEAGAYPQWELGIQTFPDNPEQTFEGIDLLDPTNFVPEELAPVQPVGLLTLNRNPSNFFAETEQVAFHVGHLVPGIDVTDDPLLAGRLFSYLDTQITRLGGPNFPQLPINRPQAPVNDMLRDGMHQSAVHRGVAPYRPNSLDGGCPFTAGADTSAFVEAPVRVPEGRKVREASESFADHFSQPRRFWLSMSPVEREHIIGAYTFELGKCYEQAIRERTLQVLANIDPELCAGVAEGLGLPAPEPTVPLAEVEPSPALSQVGGVWPLDGRVVGIVTGGADLEGVGAVREAVLNAGMVPLVVAPTGGTLGSGDAALTVQRSYVTARSVEFDAVLIAGTPDMGGDAYTPRDYKAGPAPAGPGTVDPRVSLLLSEAFRHGKAIGVWAGGTPALEASGVPADAPGVIVADSGTAALERVTELMGSHRVWERFTTPRG

SEQ ID NO: 7117 - protein, 267 aa, Bacillus subtilis
MFKLDLQPTEKLFIPFITAGDPVPEVSIELAKSLQKAGATALELGVAYSDPLADGPVIQRASKRALDQGMNIVKAIELGGEMKKNGVNIPIILFTYYNPVLQLNKEYFFALLQENHIDGLLVPDLPLEESNSLQEECKSHEVTYISLVAPTSESRLKTIIEQAEGFVYCVSSLGVTGVRNEFNSSVYPFIRTVKNLSTVPVAVGFGISNREQVIKMNEISDGVVVGSALVRKIEELKDRLISAETRNQALQEFEDYAMAFSGLYSLK

SEQ ID NO: 7118 - protein, 348 aa, Oryza sativa
ARFYAAEIVDILEYLHSLGLIHRDVKPENLLLTSDGHIKIADFGSVKPTKDTPIKVLPNSTNERACTFVGTAAYVPPEVLNSAPPTFGNDLWALGCTLYQLLSGSSPFKDASEWLIFQRIIARDLKIPEYFSDDARDLIDKLLDVDPSKRPGAGPDGYVSLKKHPFFRGIDWKNIRSTRAPKLAMEANANEDEDSQDSSWLSHMGSAPVNQHVSPVGNDGASSSSEVRSHISRLASIDSFDSRWQDFLEPGESVVLISKLKKINKLTNKKVQLILTDKPQLICVDPGKMVTKGNIMWSDDPSELNVQVSNSSHFRICTPKKVSSFEDAKQRAWQWKKAIEDLQRCQKN

SEQ ID NO: 7119 - protein, 172 aa, Treponema denticola ATCC 35405
MENYYSILNISNNADEDQIKQAYRALAMKYHPDKNPDSKTAEEKFKRISEAYSVLSDPQKRRDYDLSMSSPFSSSGRTYTHDQNTNPFGDDIFSSNWWKNWRNIRSENAKKREKISRSEAFRILIRGIILTIVGLLLFKSIIFLGIFGFLLALSIVTEGVLRIRKGYMAIFD

SEQ ID NO: 7120 - protein, 229 aa, Francisella tularensis subsp. tularensis SCHU S4
MSDNPKVLVADDDKKIAQFIKTKFEENGIDTTVAFDGKEALFLINTNNYDVIVIDWMMPYLDGISLLKILRKQNINTPVIILSALDSTENKIEGLKSGSDDYLTKPFSIDELIIRVNILYKRTKQITEAQTHKLSCGDIVLDELAHEVRRNRELILLQQREYKVLHLLLKHKNEVVSKTMILKEVWDYDFDPQTNVVEVHISRLRNKLTEGGLSDPIKTIRGFGYVIQE

SEQ ID NO: 7121 - protein, 214 aa, Zea mays
  misc_feature (155)..(155): Xaa can be any naturally occurring amino acid
  misc_feature (172)..(172): Xaa can be any naturally occurring amino acid
  misc_feature (186)..(186): Xaa can be any naturally occurring amino acid
  misc_feature (195)..(195): Xaa can be any naturally occurring amino acid
  misc_feature (201)..(201): Xaa can be any naturally occurring amino acid
  misc_feature (208)..(208): Xaa can be any naturally occurring amino acid
  unsure (1)..(214): unsure at all Xaa locations
MMTNMLNKLHGQPDSYDRKSRYRFGKTLGAGTYGIVREADCPEGKVAVKIILKKNVRGNEQMVYDELEMLQRMKHPHIVKFHDWFESRDKYYIVTQLATGGELFDRICEKGKFTEKDAAETIRQVLDAVNYLHQNNVVHRDLKPENLLYLTRDEXSSLVLADFGIAKMLDSXTEVLTTMAGSFGYXAAPEVMLKXGHGKPXDMWSMGXITYTLL

SEQ ID NO: 7122 - protein, 186 aa, Triticum aestivum
FAIGQSANAKPNTTPKSGAALLLLLLILGPSVRPRQEGAGSEAHAIDRDGSADRAAGGSRAVGWSRPGEEAMGRLFLMHLEGNAYSCKFCRTHLGLAADIISKNFHSKHGKAYLFNRVVNVTSGTNEDRMMMTGLHTVSDIFCVGWGSIVGWKYVRSCDGYFAISCALPCRPSSKLYGAPALGGCT

SEQ ID NO: 7123 - protein, 445 aa, Coprinopsis cinerea
MREIVHLQTGQCGNQIGAKFWEVVSDEHGIERDGLYKGNNDLQLERISVYYNEIGASKYVPRAVLVDLEPGTMDSVRSGPLGSLFRPDNFVFGQSGAGNNWAKGHYTEGAELVDSVLDVVRKEAEGCDCLQGFQITHSLGGGTGAGMGTLLISKIREEYPDRMMCTYSVVPSPKVSDTVVEPYNATLSVHQLVENSDETFCIDNEALYDICFRTLKLSTPTYGDLNHLVSIVMSGITTCLRFPGQLNSDLRKLAVNMVPFPRLHFFMTGFAPLTARGSAQYRAVTVPELTQQMFDAKNMMAASDPRHGRYLTVAAVFRGKVSMKEVEEQMQNVQNKNSAYFVEWIPNNVLTAQCDIPPRGLKMAVTFLGNSTAIQELFKRVSDQFTAMFKRKAFLHWYTQEGMDEMEFTEAESNMQDLVAEYQQYQDATVEEEGEYEDEVLEDEQ

SEQ ID NO: 7124 - protein, 594 aa, Rhodospirillum rubrum
MASYEIVDHEYDALVVGAGGAGLRATFGLVEQGLKTACITKVFPTRSHTVAAQGGIGAALGNMAEDNWKWHMYDTVKGADWLGDQDAIEYMCREAIPAVYELEHYGVPFSRTEDGRIYQRPFGGHMRNFGEAPVQRACAAADRTGHAILQTLYQQSLRFNAEFFVEYFALDLIIEDGVCRGVIAWCMEDGTIHRFKSHTTVLATGGYGRAYFSCTSAHTCTGDGNGMVARAGLPLQDMEFVQFHPTGIYGAGCLITEGARGEGGYLTNSEGERFMERYAPTAKDLASRDVVSRAMTVEIREGRGVGPKKDHINLHLEHLGPEVLHSRLPGITETAKVFSGVDATRDPIPVLPTVHYNMGGIPTNYHGEVLNPTKADPEAIFPGLMAVGECACVSVHGANRLGTNSLLDIVVFGRAAALRAAEVVKPGIAHKPLKADAADLALSRLDRLRSAKGAKLTAEIRDDLQQAMQRDAAVFRTTKSLAEGVARVDQVAASLADIKLVDTSMIFNTDLAEALELENLMACAQTTIHGAAARQESRGAHAHEDFPDRDDKTWMKHTLAWLDPKGKVTLDYRPVHTFTLTDEIDYIEPKARVY

SEQ ID NO: 7125 - protein, 318 aa, Escherichia coli CFT073
MAHFMDIPNMQNAGSLVVLGSINADHILNLQSFPTPGETVTGNHYQVAFGGKGANQAVAAGRSGANIAFIACTGDDSIGESVRQQLATDNIDISPVSVIKGESTGVALIFVNGEGENVIGIHAGANAALSPALVEAQRERIANASALLMQLESPLESVMAAAKIAHQNKTIVALNPAPARELPDELLALVDIITPNETEAEKLTGIRVENDEDAAKAAQVLHEKGIRTVLITLGSRGVWASVNGEGQRVPGFRVQAVDTIAAGDTFNGALITALLEEKPLPEAIRFAHAAAAIAVTRKGAQPSVPWREEIDAFLDRQR

SEQ ID NO: 7126 - protein, 227 aa, ASPERGILLUS NIDULANS FGSC A4
MFDYDGTLTPIVKDPQSAIPSDRVLRTLKTLAADPRNAVWIISGRDQAFLDEWMGHIPELGLSAEHGCFIRMPRSDNWQNLAETTDMGWQKEVMEIYQHFTERTQGSFIERKKVALTWHYRRADPEYGAFQARECRKQLEEHVSKTWDVEVMAGKANLEVRPRFVNKGFIATRLVQAYEDGKVPEFILCSGDDFTDEGMLFPFLATPKLRHELLLTYLRYVPCLEEI

SEQ ID NO: 7127 - protein, 95 aa, Rhodobacter sphaeroides 2.4.1
MAFKPLHDRVLVRRVQSDEKTKGGLIIPDTAKEKPAEGEVVSCGEGARKDSGELIAMSVKAGDRVLFGKWSGTEVTIDGAELLIMKESDILGILS

SEQ ID NO: 7128 - protein, 547 aa, Rhodobacter sphaeroides 2.4.1
MAAKDVKFDTDARDRMLRGVNILADAVKVTLGPKGRNVVIDKSFGAPRITKDGVSVAKEIELSDKFENMGAQMVKEVASRTNDEAGDGTTTATVLAQAIIKEGLKAVAAGMNPMDLKRGIDLATSKVVEAIKAAARPVNDSHEVAQVGTISANGEAQIGRFIADAMQKVGNEGVITVEENKGLETEVEVVEGMQFDRGYLSPYFVTNADKMTAELDDVYILLHEKKLSSLQPMVPLLEAVIQSQKPLLIIAEDVEGEALATLVVNKLRGGLKIAAVKAPGFGDRRKAMLQDIAILTGGQVISEDLGMKLENVTIDMLGRAKKISINKDNTTIVDGNGDKAEIDARVAQIRNQIEETSSDYDREKLQERVAKLAGGVAVIRVGGMTEVEVKERKDRVDDALNATRAAVQEGIVVGGGVALIQGGKALDGLTGENPDQNAGITIVRRALEAPLRQIAQNAGVDGSVVAGKVRESNEKSFGFNAQTEEYGDMFKFGVIDPAKVVRTALEDAASVASLLITTEAMIADKPEPKSPAGGPGMGGMGGMDGMM

SEQ ID NO: 7129 - protein, 328 aa, Rhodobacter sphaeroides 2.4.1
MPGERLTVVVTRRLPDVVEARMKELFRVELRDPDTQMSREDLIEAMGRADVLVPCLTDDIDANMLAQAGPRLKLIANYGAGVDHIDVASARQRGILVSNTPDVVTEDTADMALALILAVTRRIPEGLTEMQSGDWPGWSPMAHLGGRLRGRRLGILGMGRIGQAVARRAHAFGMQIHYHNRKRLRPEIEAEVGATFWESLDQMVTRMDIISVNCPHTPSTFHLLNARRLKLLKPTAVIVNTSRGEVIDENALTRGLRAGEIAGAGLDVFEHGHEINPRLRELPNVVLLPHMGSATLEGRIEMGEKVILNIKTFADGHRPPDQVLPSML

SEQ ID NO: 7130 - protein, 351 aa, Staphylococcus aureus subsp. aureus MSSA476
MKALVKTREGHGNLELLDKEVATPLDDKVKIKVHYAGICGTDIHTYEGHYKVNFPVTLGHEFSGEIVEVGADVKDFKVGDRVTSETTFYVCNECEYCKSKDYNLCNHRKGIGTQVDGAFTNYVIAREESLHHIPDEVSYQSAAMTEPLACAHHGVSKIQVNSGDVAVVMGPGPIGLLVAQVLKSKGATVVVTGLDNDKVRLDKAEALHMDYVVNLQQTDLKTYINGITDGYGADVVVECSGAVPAARQGLDILRKKGFYSQIGIFKDAEIPFDMEKVIQKEITVVGSRSQKPADWEPSLQLMADGLVNAEALVTKIYDISKWDEAYQHLKSGEGIKALLKPLDLDENEGEN

SEQ ID NO: 7131 - protein, 852 aa, Dechloromonas aromatica RCB
MKSKLLAKQLQEIFGGEGAPQFLMLLEQARAAQQHALADGTEKLLGTVDSTYRAYAGLNLSGWHTKLSGDALTDWNIGSGTIDSGRQWKEMLGYADGDLDNSIAQWQRMVHPDDLRLLQTRIEAHIQNQDSHFQAECRFKARDGQWRWFLLRGAVAARNAEGKPARVLVLQRDISDVKAAESALISAKEVAESANKARGAFLANMSHEIRTPMNGIIGMTELALDTQLDAEQRHYLKTVKSSAEALLTIVNDILDFSKIEAGKMEFESLVFSMQDTVLEAVRVLAVSAHKKGLELVADVRPEVPARIVGDPTRLRQVIINLIGNAIKFTERGEVALKVEVDQSTERSVYLRFSIRDTGIGVPADKQQAIFEAFSQADVSTTRRFGGTGLGLAISARLVQLMDGKIWLESTPGQGSVFSFTGRFGVQEATSVRPFEARFGGRRVLVIEDNATVGQYLVELLEQLGVQVSLVADGAAAVAAMERSRAMDFPYDYVLADANMDAPAGFALAEAWGRSGRVEKLIVMLTTENQRHDLSRLREIGVSAHLVKPIGGADLIDALALADGPGNQELSEFALSEINFDGVAKEDSSGLNILLVEDNPVNQELATRLLERQSHRVSLANNGAEAVDLFDSGHFDVILMDMQMPVMGGIEATEAIRSREMRRSWVVSHELKPVYIIAMTANVMATDRDRCLEAGMNDYVAKPLRSEELYAALERARGGLATDDFIVNDAPLVDASSQLDLGAALGDIGEPELFATMAGMLLAEWDAHLGRVRTAIDATDAHEARMHAHTLKSLLAMFHAERARRRAMEIEQATMTVENVDWANCRRLYAALMEEMALIKPSLIRYVETRVIP

SEQ ID NO: 7132 - protein, 272 aa, Rhodobacter sphaeroides 2.4.1
MTATLEFHDGSRIPQLGFGLWQVPEDRTAEVVREALELGYRLADGAAIYGNEEGLGHGLRTSGLPRDKVFVTTKVWNDAQGFESALRAVEESLKRLGLDRLDLCLIHWPAPKRNLYVETWRALIRLRDEGRITSIGVSNFDLDQIDRLTAETGVTPVLNQIELHPMLQQAELRAGHAERGIVTQSWSPLGRGMAFETPAIREIAERTGRSPAQVVLRWHIELGCAVIPRSTRRAGLAENLALFDFELTEADHAAISALDAGTRTGPDPQSFG

SEQ ID NO: 7133 - protein, 586 aa, Lotus corniculatus var. japonicus
MCGILAVLGCSDFTQAKRVRVLELSRRLKHRGPDWSGLHQHGDCYLAHQRLAIVDPASGDQPLFNEDKSIIVTVNGEIYNHEELRKQLPNHQFRTGSDCDVIAHLYEEHGENFMDMLDGIFSFVLLDTRDNTFIVARDAIGVTSLYIGWGLDGSVWISSEMKGLNDDCEHFEVFPPGHLYSSRERAFRRWYNPTWFSESIPSAPYDPLAVRHAFEKAVIKRLMTDVPFGVLLSGGLDSSLVASITSRYLATTKAAEQWGSKLHSFCVGLEGSPDLKAAKEVADYLGTVHHEFTFTVQDGIDAIEEVIYHVETYDVTTIRASTPMFLMSRKIKSLGVKWVISGEGSDEIFGGYLYFHKAPNKEEFHTETCRKIKALHQYDCLRANKSTFAWGLEARVPFLDKEFINVAMNIDPEYKMIKRDEGRIEKYILRRAFDDEEKPYLPKHILYRQKEQFSDGVGYSWIDGLKDHAAKHVTDKMILNAGNIFRHNTPLTKEAYYYRMIFERFFPQNSARLTVPGGPTVACSTAKAVEWDAAWSNNLDPSGRAALGVHLSAYDDKQNNLINNKPVEFEKLIPMEAPSLGVAIHS

SEQ ID NO: 7134 - protein, 399 aa, Bacillus cereus E33L
MSKVKEISKRKLLGIAGLGWLFDAMDVGMLSFVMVALQKDWGLSTQEMGWIGSINSIGMAVGALIFGILSDKIGRKSVFIITLLLFSIGSGLTALTTTLAMFLVLRFLIGMGLGGELPVASTLVSESVEAHERGKIVVLLESFWAGGWLIAALISYFVIPKYGWEVAMILSAIPALYALYLRWNLPDSPRFQKVEKRPSVIENIKSVWSGEYRKATIMLWILWFSVVFSYYGMFLWLPSVMVLKGFSLIKSFQYVLIMTLAQLPGYFTAAWFIERLGRKFVLVTYLIGTACSAYLFGVAESLTVLIVAGMLLSFFNLGAWGALYAYTPEQYPTVIRGTGAGMAAAFGRIGGILGPLLVGYLVALQASLSLIFTIFCGSILIGVFAVIILGQETKQRELA

SEQ ID NO: 7135 - protein, 586 aa, Lotus corniculatus var. japonicus
MCGILAVLGCSDDSQAKRVRVLELSRRLKHRGPDWSGLHQHGDNFLAHQRLAIVDPASGDQPLFNEDQSIIVTVNGEIFNHEELRKQLPNHKFRTGCDCDVIAHLYEEHGENFVDMLDGIFSFVLLDTRDNSFLVARDAIGVTSLYIGYGLDGSVWIASELKGLNDDCEHFELFPPGHLYSSKEKEFRRWYNPPWFSEAIPSAPYDPLALRQAFEKAIIKRLMTDVPFGVLLSGGLDSSLVASVTARYLADTKAAKQWGSKLHSFCVGLEGAPDLKAAREVADYIGTVHHEFQYTIQDGIDAIEDVIYHVETYDVTTIRAGTPMFLMSRKIKSLGVKMVLSGEGSDEIFAGYLYFHKAPNKEELHQETCSKIKALHKYDCLRANKSTYAWGLEARVPFLDKKFIDVAMGIDPENKMIKRDEGRIEKWVLRKAFDDEENPYLPKHILYRQKEQFSDGVGYGWIDGLKDHAAKHVTDKMMLNASNIYPFNTPNTKEAYYYRMIFERFFPQNSARLSVPGGASIACSTEKAIEWDAAWSNNLDPSGRAALGVHDSAYDDQLNKSVSKGVEPEKIIPKMEVSPLGVAILS

SEQ ID NO: 7136 - protein, 265 aa, Streptomyces parvulus
MSLELTDRVMMVTGAGSGIGRAAARLLVGHGARVVLVGRTESALTETTAGLPSSHHLVVPCDVGDDKQVADCVARAVSRFGRLDGAFNNAGTFGSFGPLHQDTADNFDRVIATNLRGVWSCMRGQIEAMLTAGGGAIVNCASVAGHIGHAQSPLYSATKHAVIGLSKSVALQYAGDGIRVNVVSPGSTDTPMLRSLYADPSALAQRARRAPLGRLGKCEEVANAVVWLLSPLAAYVTGQTLGVDGGVTAGSAIPRTNATPEGQHR

SEQ ID NO: 7137 - protein, 327 aa, Glycine max
NEVNFFVCDENVESRFKMPEKSIPKDAAFQIINDELMLDGAPRLNLASFVTTWMEPECDKLIMASLNKNYVDMDEYPVTTELQNRCVNIIANLFHAPISEEETAVGVGTVGSSEAIMLAGLAFKRKWQTKRKAEGKPYDKPNIVTGANVQVCWEKFARYFEVELKEVKLKEGYYVMDPAKAVEMVDENTICVAAILGSTMTGEFEDVKLLNELLTEKNKETGWDTPIHVDAASGGFIAPFLYPDLEWDFRLPLVKSINVSGHKYGLVYPGVGWVVWRSKDDLPDELVFHINYLGSDQPTFTLNFSKGSSQIIAQYYQLIRLGFEGYK

SEQ ID NO: 7138 - protein, 249 aa, Fragaria x ananassa
MGRGRVELKRIENKINRQVTFAKRRNGLLKKAYELSILCDAEVALIIFSNRGKLYEFCSSSSMLKTLERYQKCSYGAMEVQKPAKELEESSYREYLKLKTRCESLQQTQRNLLGEDLGPLNTKELEQLERQLESSLKHVRSTKTQHMIDLLSDLQSKEHMLIEANRDLKTKLDEIDSRTQLRQTWEHGHDHQTMLYGTQHAQTQGLMFQPLDCNPTLQIGYNAVVSQEMPAATPAHAQPVNGFIPGWML

SEQ ID NO: 7139 - protein, 583 aa, Staphylococcus aureus subsp. aureus COL
MMSRLNSVVIKLWLTIILIVTTVLILLSIALITFMQYYFTQETENAIREDARRISSLVEQSHNKEEAIKYSQTLIENPGGLMIINNKHRQSTASLSNIKKQMLNEVVNNDHFDDVFDKGKSVTRNVTIKEKGSSQTYILLGYPTKAQKNSHSKYSGVFIYKDLKSIEDTNNAITIITIITAVIFLTITTVFAFFLSSRITKPLRRLRDQATRVSEGDYSYKPSVTTKDEIGQLSQAFNQMSTEIEEHVDALSTSKNIRDSLINSMVEGVLGINESRQIILSNKMANDIMDNIDEDAKAFLLRQIEDTFKSKQTEMRDLEMNARFFVVTTSYIDKIEQGGKSGVVVTVRDMTNEHNLDQMKKDFIANVSHELRTPISLLQGYTESIVDGIVTEPDEIKESLAIVLDESKRLNRLVNELLNVARMDAEGLSVNKEVQPIAALLDKMKIKYRQQADDLGLNMTFNYCKKRVWSYDMDRMDQVLTNLIDNASRYTKPGDEIAITCDENESEDILYIKDTGTGIAPEHLQQVFDRFYKVDAARTRGKQGTGLGLFICKMIIEEHGGSIDVKSELGKGTTFIIKLPKPE

SEQ ID NO: 7140 - protein, 247 aa, Yarrowia lipolytica CLIB122
MPKLILLRHGQSDWNEKNLFTGWVDVKLSELGHTEAKRAGTLLKESGLKPQILYTSELSRAIQTANIALDEADRLWIPTKRSWRLNERHYGALQGKDKAATLAEYGPEQFQLWRRSFDVPPPPIADDDKWSQYNDERYQDIPKDILPKTESLKLVIDRLLPYYNSDIVPDLKAGKTVLIAAHGNSLRALVKHLDGISDDDIAALNIPTGIPLVYDLDDNLKPTKAAEYLDPEAAAAGAAAVANQGKK

SEQ ID NO: 7141 - protein, 331 aa, Glycine max
MASSTNALPPTGNGLIVSFGEMLIDFVPTVSGVSLAEAPGFLKAPGGAPANVAIAVARLGGKAAFVGKLGDDEFGHMLAGILKENDVRSDGINFDQGARTALAFVTLRADGEREFMFYRNPSADMLLTPEDLNLELIRSAKVFHYGSISLIVEPCRSAHLKAMEVAREAGCLLSYDPNLRLPLWPSAEEARQQILSIWDKADVIKVSDVELEFLTGSDKIDDASALSLWHPNLKLLLVTLGEHGSRYYTKNFHGSVEAFHVSTVDTTGAGDSFVGALLSKIVDDQSVLEDEARLREVLKFANACGAITTTKKGAIPALPTEADALNLIKEA

SEQ ID NO: 7142 - protein, 590 aa, Pseudomonas syringae pv. tagetis
MCGLAGELRFDHQPADLAAVERITHELAPRGPDAWGFHSQGPVALGHRRLKIMDLSDGSAQPMIDSHLGLSMAFNGAIYNFPELRAELESLGYQFHSGGDTEVLLKGYHAWGADMLPKLNGMFAFAIWERDSKQLFIARDRLGVKPLYLSKTDKRLRFASSLPALLKGGDISGMLDPVALNHYLNFHAVVPAPRTLLAGVEKLPPASWMRIDASGKVEQKVWWTLPYGPHDDEKNLTLEDWRDRVLDSTREAVAIRQRAAVDVGVLLSGGVDSSMLVGLLREVGVEDLSTFSIGFQDAGGERGDEFQYSDLIAKHYGTRHHQLRIQESEIIEQLPAAFRAMSEPMVSHDCIAFYLLSREVSKHCKVVQSGQGADELFAGYHWYPQVDGASDPVAAYRDAFVDRSYAEYAETVQPKWRTPNDAAGDFVRDHFAQPGASAAVDKALRLDSTVMLVDDPVKRVDNMTMAWGLEARTPFLDYRLVELSARIPGKFKLPDGGKQVLKEAARLVIPSEVIDRKKGYFPVPGLKHLQGDTLNWVRELLTDSSQDRGLFNPAMVDKLLTNPEGQLTPLRGSKLWQLAALNLWLSEQGL

SEQ ID NO: 7143 - protein, 370 aa, Helicobacter hepaticus ATCC 51449
MKKIKYRLKAEWEEQIAILMAFPHKNSDWAIHIEVARECFVRIIEQILYFESVILCVDINDDEGMALLHTHFKKHITFAQNETFKSYNQQYGLHIVRVPTNDTWARDFGGISVEAEGGIALFDFVFNGWGLKYPANYDNQITQNIVCEAFKNTHLSPLVKRIFSSYRPIKTDMILEGGSIESNGAGVLLTNTQCLLEKNRNSHLSQDEIESKLKEYFGLDSVLWLTQGYLAGDDTDSHIDTLARFISEDTIAYITCDDKQDEHFESLKSMEAELRALKQSNGEPYKLIPLPFTQAIYDEQGQRLPASYANFLFVNGGLLVPTYGDKNDKKALEILSLALPTRRVVGVDCRSLILWHGSLHCVSMQVYDTL

SEQ ID NO: 7144 - protein, 326 aa, Helicobacter pylori 26695
MAKHDLVGSVLWDAYSKEVQRRMDNPTHLGVITEEQAKAKNAKLIVADYGAEACGDAVRLYWLVDESTDRIVDAKFKSFGCGTAIASSDMMVELCLNKRVQDAVKITNLDVERGLRDDPDTPAVPGQKMHCSVMAYDVIKKAAGMYLGKNAEDFEEEIIVCECARVSLGTIKEVIKLNDLKSVEEITNYTKAGAFCKSCVRPGGHEKRDYYLVDILKEVREEMEAEKLKATANKSQSGELAFREMTMVQKIKAVDKVIDENIRPMLMMDGGDLEILDIKESDDYIDVYIRYMGACDGCMSATTGTLFAIENALQELLDRSIRVLPI

SEQ ID NO: 7145 - protein, 213 aa, Escherichia coli W3110
MKDIDTLISNNALWSKMLVEEDPGFFEKLAQAQKPRFLWIGCSDSRVPAERLTGLEPGELFVHRNVANLVIHTDLNCLSVVQYAVDVLEVEHIIICGHYGCGGVQAAVENPELGLINNWLLHIRDIWFKHSSLLGEMPQERRLDTLCELNVMEQVYNLGHSTIMQSAWKRGQKVTIHGWATAFTTACCVIWMLPPPTAKPLSNVTVTGFPTSS

SEQ ID NO: 7146 - protein, 146 aa, Brassica napus
MAQLPPKIPTMTTTTPHWPDFSSQKLPSIAATAAATSGQQNPSWMDEFLDFSTTRRGTHRRSISDSIAFLETPSSGVGSHHFDRFDDEQFMSMFNDDVHQSHNNQHNNNVGPTRSSSNTSRPSSDDDNTDPLSGDHNRMDTTPIPS

SEQ ID NO: 7147 - protein, 466 aa, Colwellia psychrerythraea 34H
MEKSFDYDVIIIGTGPGGEGAAMNLAKRQKKVAIIERYHQVGGGCTHWGTIPSKALRQSVSRLIEYNSNPLFNQNEQVKQLTFQDILSHASAVIQKQVSLRSGFYNRNRVEHIQGQASFIDAHTISISHPDGSVEKISAKQIMIATGSRPYRPDDIDFDHPRVYDSDSILSLKHAPQHVIIYGAGVIGSEYASIFRGLGVKVDLINTRERLLSFLDTEMSDSLSYHLWNSGVVIRHGEEIERVESSEDAVIVHLKSGKKMRADCLLFANGRTGNTADLNLAAAGLKADGRGQLKVNDCYQTEVDNIFAVGDVIGYPSLASAAFDQGRIAASAMVDSSSKAKLIVDIPTGIYTIPEISSVGKTEQELTEAKIPYEVGRAQFKHLARAQISNNLVGSLKILFHRETKEILGIHCFGENAAEIIHIGQAIMQQTNGGNTIEYFVETTFNYPTMAEAFRVAALNGLNRLF

SEQ ID NO: 7148 - protein, 130 aa, Triticum aestivum
MKVSIAKFHSLPLCFFLLLAFNTKPLLAAEPEPVVDKQGNPLEPGVGYYVWPLWADEGGLTLGQTRNKTCPLYVIRDPSFIGTPVSFLAPGLDHVPTLTDLTIDFPVVTVCNQPTVWRLNKVGSGFWFVS

SEQ ID NO: 7149 - protein, 348 aa, Oryza sativa
  misc_feature (289)..(289): Xaa can be any naturally occurring amino acid
  misc_feature (298)..(298): Xaa can be any naturally occurring amino acid
  misc_feature (301)..(301): Xaa can be any naturally occurring amino acid
  misc_feature (307)..(307): Xaa can be any naturally occurring amino acid
  misc_feature (311)..(311): Xaa can be any naturally occurring amino acid
  misc_feature (314)..(314): Xaa can be any naturally occurring amino acid
  misc_feature (320)..(320): Xaa can be any naturally occurring amino acid
  misc_feature (323)..(325): Xaa can be any naturally occurring amino acid
  misc_feature (330)..(331): Xaa can be any naturally occurring amino acid
  misc_feature (333)..(333): Xaa can be any naturally occurring amino acid
  misc_feature (337)..(339): Xaa can be any naturally occurring amino acid
  misc_feature (341)..(341): Xaa can be any naturally occurring amino acid
  misc_feature (343)..(343): Xaa can be any naturally occurring amino acid
  misc_feature (346)..(346): Xaa can be any naturally occurring amino acid
  unsure (1)..(348): unsure at all Xaa locations
THNYTSILWINIHGRGLNARRIRGGGAQSVADGAQHEAVLVALGAPLDVGGGGGGAGGDPSCRIRHEADQQRLIFAGKQLEDGRTLADYNIQKESTLHLVLRLRGGMQIFVKTLTGKTITLEVESSDTIDNVKAKIQDKEGIPPDQQRLIFAGKQLEDGRTLADYNIQKESTLHLVLRLRGGMQIFVKTLTGKTITLEVESSDTIDNVKAKIQDKEGIPPDQQRLIFCWASSWRMGRTLCWTYNIPEGVPPFHLVASGFRGGMQIFVKTLTGKTITLEVESSDTIDNVXAKIQDKEGXPPXQQRLIXPGSXSRXAHLREXKSXXXYLPWXXSXGGCXXXKXDXKHXWS

SEQ ID NO: 7150 - protein, 333 aa, Oryza sativa
  misc_feature (269)..(269): Xaa can be any naturally occurring amino acid
  unsure (1)..(333): unsure at all Xaa locations
MAQLPPKIPAMATAWPEFGGGHHHHAAHGHHHQRSPSMGAFLAAPLPPFPLPPPAPANGGAQQQQQQQQHQPSWVDEFLDFSATKRGAHRRSVSDSVAFLDPVSDDNAGVGAHDFDRLDDDQLMSMFSDDLQPPPPQQQPAAPAASASSPSDHNSMNDEKQDKGETDEAQSECDGATPGQPASPATVDPKRVKRILANRQSAQRSRVRKLQYISELERSVTSLQTEVSALSPRVAFLDHQRSLLTLGNSHLKQRIAALAQDKIFKDAHXGGTEEGDREAAANLPPAKPQERGIPTGGRGPGPRPRQCRPDRQRGGRRGRAMPALVIGRDPDAL

SEQ ID NO: 7151 - protein, 468 aa, Pseudomonas aeruginosa UCBPP-PA14
MNARLHATSPLGDADLVRADQAHYMHGYHVFDDHRVNGSLNIAAGDGAYIYDTAGNRYLDAVGGMWCTNIGLGREEMARTVAEQTRLLAYSNPFCDMANPRAIELCRKLAELAPGDLDHVFLTTGGSTAVDTAIRLMHYYQNCRGKRAKKHVITRINAYHGSTFLGMSLGGKSADRPAEFDFLDERIHHLACPYYYRAPEGVGEAEFLDGLVEEFERKILELGADRVGAFISEPVFGSGGVIVPPAGYHRRMWKLCQRYDVLYISDEVVTSFGRLGHFFASQAVFGVQPDIILTAKGLTSGYQPLGACIFSRRIWEVIAEPDKGRCFSHGFTYSGHPVACAAALKNIEIIEREGLLAHADEVGRYFEERLQSLRDLPIVGDVRGMRFMACVEFVADKASKALFPESLNIGEWVHLRAQKRGLLVRPIVHLNVMSPPLILTREQVDTVVRVLRESIEETVEDLVRAGHR

SEQ ID NO: 7152 - protein, 377 aa, Pneumocystis carinii
MSFELERIDIEKDREFSEIMHGKDAAKERGLLSSFRKDKEAQKIALDSYFGFWGDKCTSEKNDIHQQERFKFYATLTRHYYNLVTDFYEYGWSTSFHFCRFAKDESFSQAIARHEHYIALHAGIREGETVLDVGCGVGGPACQISVFTGANIVGLNNNDYQIQRAKYYSEKKGLSDKLKFIKGDFMQMPFPENSFDKIYSIEATIHAPSLEGVYSEIYRVLKPGGLYASYEWVMLNKYDENDPEHQQIVYGIEIGDSIPKISKIGEAEAALIKVGFEIIHSEELSTKNSPLPWYYYLDGDLRKVRSFRDFISIARMTTIGKWLISSFIGLMEFIGLLPKGSKKVNDILLVAADSLVKAGKKEIFTPMQLWVCRKPLV

SEQ ID NO: 7153 - protein, 396 aa, Escherichia coli
MFENITAAPADPILGLADLFRADERPGKINLGIGVYKDETGKTPVLTSVKKAEQYLLENETTKNYLGIDGIPEFGRCTQELLFGKGSALINDKRARTAQTPGGTGALRVAADFLAKNTSVKRVWVSNPSWPNHKSVFNSAGLEVREYAYYDAENHTLDFDALINSLNEAQAGDVVLFHGCCHNPTGIDPTLEQWQTLAQLSVEKGWLPLFDFAFQGFARGLEEDAEGLRAFAAMHKELIVASSYSKNFGLYNERVGACTLVAADSETVDRAFSQMKAAIRANYSNPPAHGASVVATILSNDALRAIWEQELTDMRQRIQRMRQLFVNTLQEKGANRDFSFIIKQNGMFSFSGLTKEQVLRLREEFGVYAVASGRVNVAGMTPDNMAPLCEAIVAVL

SEQ ID NO: 7154 - protein, 185 aa, Pasteuria penetrans
FVMVEGAGILVLETLEHAEQRGVGRIYAELVGYGTTSDAYHSTQPAPHGEGAVRCMQRALESAGLQNEDVDYINAHGTSTELNDLVETQAIRRLFGRHADRLKVSANKSMVGHLLGAAGGVEAVATVLTLHEQVIPPTINYRVPDPECDLDYVPNQAIGTKVDVALSNSFGFGGHNATLVLRRFR

SEQ ID NO: 7155 - protein, 631 aa, Magnetospirillum magnetotacticum MS-1
MCGIAGIVADRPVSPGAVEAMTGRLVHRGPDDQGIWRSDDGCAVLGHRRLSILDTSAAGHQPMERDGLVTVFNGEIYNFVEVRAELVGLGEVFHTNSDTEVLLAAYDRWGPECFARFNGMFALAILDRRRKVLVCARDRFGEKPFLFAARPGLFAFASEYKALLAMAEIGRDFDPVPLLRFAHRPATGLDDERATLFPAILQLLPGERLELDLSTLDTRIDRYWTLARDPALGALGMGEAAERFRDLLTDSIRLRLRSDVAVGSCLSGGLDSGSIIMLARRLLGDDAPYHVFTGRFPGTRADEWDYARHTSQAAGAIVHQVEPSAAGLLADLPDFLWANELPVGSASQYAQYCVFRLAKEQGVTVLLDGQGADEILGGYEQYFARYLAGLPGPERGAEEAAIRARYPGALDSPRQALSKALPPRLRHWLAQISGKGSDLLFGLSPDLAEQVAKANAPPVVPQGWSPLAAELMRDSFSTHLPVLLRYGDRNSMAHSREVRLPFCDHRIAEFALSLDPKLLMGEAQTKRLLREAVKGILPEQVRTRWNKQGFLPPQDIWFAQGLIDEAERVIEDPSFARAGYWNVSWWRCAIRRFRAGETHLGWVLWRPLMLESWRRHFLERITAQPGVEALP

SEQ ID NO: 7156 - protein, 149 aa, Bidens pilosa
MADQLTDDQISEFKEAFSLFDKDGDGCITTKELGTVMRSLGQNPTEAELQDMINEVDADGNGTIDFPEFLNLMARKMKDTDSEEELKEAFRVFDKDQNGFISARELRHVMTNLGEKLTDEEVDEMIREADVDGDGQINYEEFVKVMMAK

SEQ ID NO: 7157 - protein, 399 aa, Bacillus cereus ATCC 10987
MGKVKEISKRKLLSIAGLGWLFDAMDVGMLSFVMVALQKDWGLSTQEMGWIGSINSIGMAVGALVFGILSDKIGRKSVFIITLLLFSIGSGLTALTTTLAMFLVLRFLIGMGLGGELPVASTLVSESVEAHERGKIVVLLESFWAGGWLIAALISYFVIPKYGWEVAMILSAVPALYALYLRWNLPDSPRFQKVEKRPSVIENIKSVWSGEYRKATIMLWILWFSVVFSYYGMFLWLPSVMVLKGFSLIKSFQYVLIMTLAQLPGYFTAAWFIERLGRKFVLVTYLIGTACSAYLFGVAESLTVLIVAGMLLSFFNLGAWGALYAYTPEQYPTVIRGTGAGMAAAFGRIGGILGPLLVGYLVASQASLSLIFTIFCGSILIGVFAVIILGQETKQRELV

SEQ ID NO: 7158 - protein, 330 aa, Escherichia coli K12
MSQNTLKVHDLNEDAEFDENGVEVFDEKALVEQEPSDNDLAEEELLSQGATQRVLDATQLYLGEIGYSPLLTAEEEVYFARRALRGDVASRRRMIESNLRLVVKIARRYGNRGLALLDLIEEGNLGLIRAVEKFDPERGFRFSTYATWWIRQTIERAIMNQTRTIRLPIHIVKELNVYLRTARELSHKLDHEPSAEEIAEQLDKPVDDVSRMLRLNERITSVDTPLGGDSEKALLDILADEKENGPEDTTQDDDMKQSIVKWLFELNAKQREVLARRFGLLGYEAATLEDVGREIGLTRERVRQIQVEGLRRLREILQTQGLNIEALFRE

SEQ ID NO: 7159 - protein, 416 aa, Alkalilimnicola ehrlichei MLHE-1
MEEIREISYALDTFYFLVSGALVMWMAAGFTMLEAGLVRSKNTTEILTKNISLYAIACIMYMVVGYNIMYGDGLSSVIPSISFILGASDNSAAAVAAGEASYYSDVSDFFFQVVFVATAMSIISGAVAERMKLWSFLLFAVVLTGFVYPIQGYWSWGEGFLDQLGYADYAGSGIVHMFGASAALAAVLVLGPRKGKYGPNGEVRPIPGANMPLATLGVFILWLGWFGFNGGSELKVSDVDSANAVALVFANTNLAAAGGVVAALVTARLMFGKADLTMALNGAIAGLVSITAGPDAPSLLLATFIGAVGGVLVVLSIVGLDKLKIDDPVGAISAHGTAGIWGVMAVLLWMDDASFFAQIAGILTIFAWTFGVSLVLWLILKAVMGIRVTEEEEQQGLDITECGIEAYPDFVQQSKT

SEQ ID NO: 7160 - protein, 347 aa, Staphylococcus aureus subsp. aureus MSSA476
MKALKLYGVEDLRYEDNEKPVIESANDVIVKVRATGICGSDTSRYKKMGPYIKGMPFGHEFSGVVDAIGSDVTHVNVGDKVTGCPAIPCYQCEYCLKGEYARCEKLFVIGSYEPGSFAEYVKLPAQNVLKVPDNVDYIEAAMVEPSAVVAHGFYKSNIQPGMTVAVMGCGSIGLLAIQWARIFGAAHIIAIDIDAHKLDIATSLGAHQTINSKEENLEKFIENHYANQIDLAIESSGAKVTIGQILTLPKKGGEVVLLGIPYDDIEIDRVHFEKILRNELTVCGSWNCLSSNFPGKEWTATLHYMKTKDINVKPIISHFLPLEKGPETFDKLVNKKERFDKVMFTIY

SEQ ID NO: 7161 - protein, 517 aa, Oryza sativa (japonica cultivar-group)
MTGAVSKLAAPRPAAAAPLPPASVRSAFLASAPSPRRFSVSIAAGRARSPIISIVIALLFECSIARLGEVWLRCVASRRIRGQNDAVCAGGMDACAAVRLISGSSGSAMASAKEGNGAPTKRTTLHDLYDLQGQSPWYDNLCRPVTDLLPLIGSGVRGVTSNPSVRYTTYFFCSLAPCSESAILIADCVPMAMQIFQKAISTSNAYDDQFKQLILAGKDAESAYWELVIKDIQDACKLFEPIYDQTDGADGYVSVEVSPRLANDTQGTVEAAKWLHKVVDRPNVYIKIPATAECVPSIKEVIANGISVNVTLIFSIARYEAVIDAYIDGLEASGLSDLSRVTSVASFFVSRVDTLIDKMLEKIGTPEALALRGKAAVAQAKLANQLYQKKFSGPRWEALVKKGAKKQRLLWASTSVKNPAYPDTLYVDPLIGPDTVSTMPDQALLAFIDHGTVSRTIDANVSDAEGVYSALEKLGIDWDEVGKQLELEGVDSFKKAFDSLLGSLEEKGNSLKKTVSL

SEQ ID NO: 7162 - protein, 361 aa, Oryza sativa (japonica cultivar-group)
MDMDSVECLSLPDSSMDVDDVDGGGSVHHHHHHHHALPPHLPAGVAVGVGPGGRAFPKANVAGVGGGGAAGAPAAGGAVAGGGGPGGGPPATSVHELLECPVCTNSMFPPIHQCQNGHTLCSTCKARVHNRCPTCRQELGDIRCLALEKVAESLELPCKYCSLGCPEIFPYYSKIKHEAQCSFRPYNCPYAGSECAVAGDIPFLVAHLRDDHKVDMHSGCTFNHRYVKSNPREVENATWMLTVFHCFGQYFCLHFEAFQLGMAPVYMAFLRFMGDENEARNYTYSLEVGGNGRKMVWEGTPRSIRDSHRKVRDSHDGLIIQRNMALFFSGGDRKELKLRVTGRIWKEQTNPDGACIPNLCS

SEQ ID NO: 7163 - protein, 451 aa, Prochlorococcus marinus str. MIT 9313
MSDATSHEIDHFMKGLMKRNPGEPEFHQAVHEVVETLIPFILSNRVYKDAQILERMTEPDRVVIFRVCWEDDSGNIRTNRAWRVQFNNSIGPYKGGIRFHPNVTLSVLKFLGFEQTFKNSLTGLPMGGGKGGSNFNPKGKSDREIMRFCQSLMIELHRHIGEDTDVPAGDIGVGSREISYMFGQYKRLENRFSGILTGKGLSFGGSLVRTEATGYGCAYFCENMLNHIEDSLVDKICSISGSGNVALYAVEKAIELGAKVVTLSDSDGFVHVPNGINLEMLAFIKELKTVRRGRIHEFANHYKGVDFYAGKRPWNVPCDIAFPCATQNEINRADSQELINNGVKAVVEGANMPTNLDGIHEFRHAKVILAPAKAANAGGVAVSGLEQSQNALRLSWSREEVDQRLKSIMLEIHSKCVQHSHKYEDYTDYITGANIAGFTKVADAMLAYGIV

SEQ ID NO: 7164 - protein, 275 aa, Magnetococcus sp. MC-1
MSEAQGVLAAVIQTNSGNDRVHNLMRAEQLLEEAATAGAKLLVLPENFSFFGADEKEKLAHQEDPQHGPSLRMVQAFAQRHGAWVVAGSIPTDVGESQRVANSSFVVNDQGQVVARYDKIHLFDVTLNGGEGYRESDMIRAGSQPVVVDSPFGRIGLSICYDLRFPELYRALTDAGAEIFTVPAAFTLTTGQVHWELLLRARAVENFCHLLAPNQWGRHPGNRKTYGSSMIVEPWGSVVARVADGEGYALAPLDPARVARCRSQIPCLQHRVLSF

SEQ ID NO: 7165 - protein, 591 aa, Listeria monocytogenes EGD-e
MKKLWLKIGLSFFILFFVVMVIVGIFSGELMKSTYLNMKENQLEDDAKILLQTTNMENLDLDKDAATIQKSLDPLGEDIDARITVIDSKGDVVADTKKDPEKLDNHMNRPEVTDILKKGESVGISIRESDSLGYSMLYVAVPVKHQSKTDGVLRISISLESVDAAVAKLWGNLALIFGIALVIIAAISVFIARKITRPVREIIEVSTDLANHKYDSRIHGKISGELQDLSISVNTLAESLETQMFEIKQNEQRLNAIVQNLVSGVMLINVDKQVIMTNRTMYQILGETEITGKPFYEVIKSFALSQLIEATFETKTIQQKEIILYFPREMILDASVSPILGENGEITGIILLLHDITQIRHLENVRSEFVTNVSHELKTPVTALKGFAETLLDGAMYDEMLLKKFLTIIKEESDRLHRLIMDILALSRIEQNPVPENVELVEVDEVIEQSARTIFEMATEKNIQVIIPEKTIPSVTIETDRDKLQQILINLLSNAINYTPVDGKVEVKLIEQEAEVIIEVTDNGIGIPAKDIDRVFERFYRVDKARSRHSGGTGLGLSIVKHLVENCGGRIEVESQEEVGSTFRVTLPKKA

SEQ ID NO: 7166 - protein, 238 aa, Crocosphaera watsonii WH 8501
MSVNLATMLREGTKKSHTMAENVGFVKCFLKGVVEKNSYRTLVANLYFVYSAMEEEMERLSHHELVSKIYFPELNRKQCLEKDLSFYYGANWRDEVAPSEAAQAYIARIHEVAETQPELLAAHSYTRYLGDLSGGQILKKIAQRAMNLGENGTTFYEFEDIPDEKAFKDKYRKSLNEMPIDQATAEKIVDEANAAFGMNMKMFMELEGNLVKAIGIMLFNTLTRRRSTGSTELATAEN

SEQ ID NO: 7167 - protein, 466 aa, Burkholderia fungorum LB400
MPQHFNAVVIGTGQGGSPLAVRLGQSGRKTAVIERAAFGGTCVNVGCTPTKSYVASARAAHVARHCAELGVQVSGAISVDLAAVKARKDRIIGQSRDGVEKWLRGAQNVSVFNGHARFTGAHTLAISGPDGTVLEEISADEIFINTGTRAVVPPLEGIGRIRYYTNSNLLELTELPDHLVIVGGSYIALEFAQIFRRFGSRVTVLVRGERVLTREDADFAESVRKVLAREGVEFRFGVQPSRVEPHPHHPDEVCIGFEQNIPALEASHLLFATGREPNTDDLGLAAAGITTDRHGTIPVDGQLRTNVPGVWAIGDVNGRGAFTHTSYDDFQIVAANLLDGGARSVDTRIMAYAVFVDPPLARVGASEAEVRKAGRPALIATMPMSRVGRARERGETDGFMKVMVDRESRQILGAAIHGIEGDEAIHTFIDIMAAGAPYPTLQYAMHIHPTISELVPTLLDGLKPMQ

SEQ ID NO: 7168 - protein, 141 aa, Brassica napus
MSASRFIKCVTVGDGAVGKTCLLISYTSNTYPTDYVPTVFDNFSANVIVDGNTINLGLWDTAGQEDYNRLRPLSYRGADVFLLAFSLVSKASYENVAKKWVPELRHYAPGVPIILVGTKLDLRDDKQYFVEHPGALPISTA

SEQ ID NO: 7169 - protein, 575 aa, Glycine max
MYRFATSLASKARIARSSTQQIGSRVSWNRNYAAKDIKFGVEARALMLKGVEELADAVKVTMGPKGRNVVIEQSFGAPKVTKDGVTVAKSIEFKDKVKNIGASLVKQVANATNDVAGDGTTCATILTKAIFTEGCKSVAAGMNAMDLRRGINMAVDTVVTNLKSRARMISTSEEIAQVGTISANGEREIGELIAKAMEKVGKEGVITISDGKTLYNELEVVEGMKLDRGYISPYFITNDKNQKCELEDPLILIHEKKISSINAIVKVLELALKRQRSLLIIAEDVESDALATLILNKLRAGIKVCAIKAPGFGENRKANLQDLAVLTGGALITEELGLKLEKVDLDMLGTCKKITVSKDDTVILDGAGDKKALEERCEQIRSAIENSTSDYDKEKLQERLAKLSGGVAVLKIGGASEAEVGEKKDRVTDALNATKAAVEEGIVSGGGVALLYASKELDKLQTANFDQKIGVQIIQNALKTPVLTIASNAGVEGAVVVGKLLEQENHDLGYDAAKGEYVDMVKAGIIDPLKVIRTALVDAASVSSLMTTTEAVVSELPNDDKDTPAMAGGMGGMGY

SEQ ID NO: 7170 - protein, 645 aa, Debaryomyces hansenii CBS767
MILEKLFKVVQKMSGENYDISSINLAKLFNKSTSNQYDKEAIIDQTYAKTQLDENRIDAEAKVIKDRGVYRVEASKELMDNSKNGKLMKAVLGISIVMCAWAVDLDSSVTYSLAPWATSHYQKHSEGLGALTTANGIIAAISKPVYAQICNTLSRPTTYVISVVLYTVGYIIVAASNTFSAYIVGLALGAAGTSGIRFINSLIAADLTVLKWRSLATAILSAPYIINTWYAGYIVQDLGTSNWRWGYGMFTIIMPVVVCPATYILIFSQQKAHKLIPEDDRALYEQLFSFRKNWKTFIWRLIIEADVLGLLLLGFGFALLLLPFSLQSGAKGGWNNPSMIAMMVIGGVLVIVFFLWEILLAPFPITPRRVLNRTVICCIVIDFFYQFAGMLPLQYLSSYVWIVQNWSNRDWTYYNNTLTVALCVFGLVAGVLYRVTHRYKVFQIFGVLLETVSQGFMINGTEARTDTLLLVWHSICSGAAGGFNVVASATALLAAVPHRDLAVAMSILSLWSLIGQSIGGAVSTAIWGLKMESEFRKYLPSSVSDEQVTGYFHSITAIREDFDWGSDERDGAIKAYKVICYYFFAIAAALQVIRFVAVMLQTNYYLGDTQNAVEFSDETQISNEVERKNVEKSNQKWYVAIYDIW

SEQ ID NO: 7171 - protein, 550 aa, Salmonella enterica subsp. enterica serovar Typhi Ty2
MTIPLWWQNGVIYQIYPKSFQDTTGSGTGDLRGVTQRLDYLQRLGVDAIWLTPFYISPQVDNGYDVANYTAIDPTYGTLDDFDELVAQAKARGIRIILDMVFNHTSTQHAWFREALNKESPYRQFYIWRDGTPDVCPNNWQSKFGGSAWRWHSQSEQYYLHLFAPEQADLNWENPAVRAELKKVCEFWADRGVDGLRLDVVNLIAKDQDFPDDPTGDGRRFYTDGPRTHTFLREMNRDVFTPRNLMTVGEMSSTTLENCQQYAALSGDELSMTFNFHHLKVDYPNGEKWTLAKPDYVALKALFRQWQQGMHNVAWNALFWCNHDQPRIVSRFGDEGEYRVPAAKMLAMALHGMQGTPYIYQGEEIGMTNPHFTRITDYRDVESHNMFAALRAAGRDPDELLAILASKSRDNSRTPMQWDNGKNAGFTQGEPWISLCDNYTEVNVAAALRDENSVFYTYQKLIALRKTQPVMIWGDYQDLLPGSPSVWCYRRQWQGQTLLVVANLSDQCQEWHPPHIKGQWQALLHNYGEVASQPAAMTLRPFEAIWWLQR

SEQ ID NO: 7172 - protein, 359 aa, Helicobacter pylori 26695
MKVLSYLKNFYLFLAIGAIMQASENMGSQHQKTDERVIYLAGGCFWGLEAYMERIYGVIDASSGYANGKTSSTNYEKLHESDHAESVKVIYDPKKISLDKLLRYYFKVVDPVSVNKQGNDVGRQYRTGIYYVNSADKEVIDHALKALQKEVKGKIAIEVEPLKNYVRAEEYHQDYLKKHPSGYCHIDLKKADEVIVDDDKYTKPSDEVLKKKLTKLQYEVTQNKHTEKPFENEYYNKEEEGIYVDITTGEPLFSSADKYDSGCGWPSFSKPINKDVVKYEDDESLNRKRIEVLSRIGKAHLGHVFNDGPKELGGLRYCINSAALRFIPLKDMEKEGYGEFIPYIKKGELKKYINDKKSH

SEQ ID NO: 7173 - protein, 454 aa, Streptomyces parvulus
MEKTDVDRLRTLDREHMWYPWTPMTEWMARDQLVVERAEGCWLIDADGKRYLDGRSSMGMNLHGHGRSEIVEALVAQARKAGETTLYRVSHPAAVELAARLASMAPAGLQRVFFAESGSTAVETALKAAYAYWVAKGEPQRSTFVSMEGGYHGETLGTVSLRGTNGEQVDMIRKTYEPLLFPSLSFHQPHCYRCPVGQSSDSDCGLECTDSLENLLTREKGRIAAVIVEPRVQALAGVITAPEGHLAKVAEITRRHGVLLIVDEVLTGWARTGPTFSCEAEGVTPDLMTVGKALTGGYLPLSATLATEEIFGAFRESVFLSGSTYSGYALGAAVALASLDLFEKEDVPARAKALADVLTTALEPFRALTHVGDVRQLGLIAGVELVADRETRAPYPPQERVVDRICTLARDNGVLVNAVPGDVITMLPSPSMSPDDLRFLTGTLYTAVREVTEE

SEQ ID NO: 7174 - protein, 398 aa, Ustilago maydis 521
MIEDIVDTLSVPLLGACASHVSRPTLMPSLASRSGPPAASSSDPKTSSSSTEKVAKSVGSASPLRSSPNRPYALSDFEVVETLGTGTFGRVLLVRLKDRDVADRSAYFALKVLAKTDVIKLKQVSHINSERCILTKVDHPFLVNMIASFQDSKNCYMLMEYVVGGEIFSYLRRAGHFSADVARFYISTIVLAIEYLHSNKVVYRDLKPENLLIDSNGYTKITDFGFAKEVEDRTWTLCGTPEYLAPEIIQCSGHGSAVDWWSLGILLFEMLAGYPPFYDPNPILIYEKILAGNLVFPEEIDPLSRDLISSLLTADRSRRLGNLRGGANDVKNHPWFHGVDWKALQEGRILPPIVPYLGRPGDTSNFSKYEPARPSAMPGLYGADSGHHDLYADLFPDF

SEQ ID NO: 7175 - protein, 330 aa, Streptomyces parvulus
MKGLMRAAVIRAWGGPERLTLDRVERPSPPPGWIAVRVEACALNHLDIHVRNGLPGVRLELPHVSGGDVVGVVEQATDEAGERLLGSRVLLDPMIGRGILGEHYWGGLAEYVVAPAHNALPVPDQDADPARYAALPISYGTAQRMLFSRARLRPGESVLLFGATGGVGVACAQLALRAGARIIACSGSPAKLARLRRLGVIDTIDTGTEDVRRRVRELTDGGADLVVDYQGKDTWPVSLRSARAGGRIVTCGATTGYEATTDLRYVWSRQLDILGSNAWHRDDLHTLVDLVATDALEPVVHADFPLSRAPEAVAELEERRAFGKVVIRTA

SEQ ID NO: 7176 - protein, 424 aa, Fusarium proliferatum
IRQNGTMEMDGVNGVTQCPIAPEDTFTYEFRALQYGSSWYHSHYSLQYADGLAGPITIFGPSSAHYDEAKDPILITDWNHRSAFQEWERELTGVPTRPEMNSILMNGIGNFAGSFPRERYNITVTKGKKYLLRIINTSVDTTFVFGIDNHYFEVMSSDFVPIHPYTVDHILVGIGQRYHVVLHAKPRNDTKFPASDNGNYWIRTVAADGCKGFEDGNEPDERQGILRYQPVSTEVPQTWRDNWTKDCTDEKYENLKPILPWSIPTVKLDERDRSKDLELGIEKVKDRPHAGDRFSWWAFGERPLWLDFSNPTITLLEERKEWPDDYVIVPAENRDGWVYLVITAPSLDRIGTNKTFRSLAHPLHLHGHDFALLAQGTNSSQINDPNNPVTLKFDNPPRRDVALIPAGGYLIVAFKADNPGSWLF

SEQ ID NO: 7177 - protein, 504 aa, Cytophaga hutchinsonii
MENKVVAPAENGLMKKIVSHAKEYGFVFPSSEIYDGLQAVYDYGQMGVELKNNIKIVWYKAMTQLNDNIVGIDASIFMHPLTWKASGHIDGFSDPMIDNKDSKKRYRADVLVEERAAQMEAAGKKDEADALVKKLARLLEADDLKGVQDLITNEKITCPVSGTSNWTEVRQFNLMFSTQVGSVAEDSSTIYLRPETAQGIFVNFLNVQKSGRMKIPFGIAQIGKAFRNEIVARQFTFRMREFEQMEMQFFIRPGTEMEWYNKWKESRLNWHKAIGLPAEKLKFHDHEKLAHYANAAVDIEFEFPFGFKEMEGIHSRTDFDLANHQELSKKKQQYFDNDIDPVTGKAFGNYVPFVVETSVGADRCFLAVLCNAYTEETTVEQTEEGEKVKERVYLKLHPTLAPIKAAILPITKKDGLPEKAMEIYNELKYDIKVTYEDKDSIGKRYTRNDLIGTPFCIAVDHQTLEDNTVTIRHRDTTLQERVPISELRLKIRKETSWRTILEKV

SEQ ID NO: 7178 - protein, 614 aa, Debaryomyces hansenii CBS767
FWATCLTIQSVSSRKCSILKACDIPVFGHWNHYNYHDKLIDTEKHIMSQQNKIHSLEKDSDINVMQKSINSDLSEKLGDSHMNILPTKKIVICLSVLAMALMISFIDQTGVTVATSVIGKDLDSETTINWAGTASLLANCICQVLFGRLSDIFGRKNVLMSGLLILAIADIGCGVSQTGVQFYVCRALAGIGNGCSSSLPQIILSDIVTLRDRGRYQGILGMSIGLGNSIGPFLMAGFIHGATWRCFYYMLCPLNLLVIVVIYVFIKNPVKKLEIILTRKEKFMKIDYIGIFFATACLTLLLIPISGGGSTYPWNSPIIIAMFIVGGGLFFVFLLVEWKFAKLPMIPLRIFKLPMVSLIFLSTFFFGMAYFSFLYYQPYYFEIVKDKDIVHTSLFVLPLVLCQAVMSAVSGQIITYTGHYIYVIITGYALWLLGNCLLLLWNENVNDGVNVVSLLIIGCGVGFTFQPSMVAVQAQAKKADRAVVISTRNVIRSFGGAVGIAVGSTTVSNSFLNNIKQLEKDNTTKIPSSYLRYLETNIYSRFDTSSLTTKQTSAVRLMYVNALKNYFYLLIPFIAICLITSFFIKDRGLQCIDEIEPPTRKNSDTESSVSRNRA

SEQ ID NO: 7179 - protein, 437 aa, Fusarium proliferatum
VSIHWHGIRQNGTMEMDGVNGVTQCPIAPEDTFTYEFRALQYGSSWYHSHYSLQYADGLAGPITIFGPSSAHYDEAKDPILITDWNHRSAFQEWERELTGVPTRPEMNSILMNGIGNFAGSFPRERYNITVTKGKKYLLRIINTSVDTTFVFGIDNHYFEVMSSDFVPIHPYTVDHILVGIGQRYHVVLHAKPRNDTKFPASDNGNYWIRTVAADGCKGFEDGNEPDERQGILRYQPVSTEVPQTWRDNWTKDCTDEKYENLKPILPWSIPTVKLDERDRSKDLELGIEKVKDRPHAGDRFSWWAFGERPLWLDFSNPTITLLEERKEWPDDYVIVPAENRDGWVYLVITAPSLDRIGTNKTFRSLAHPLHLHGHDFALLAQGTNSSQINDPNNPVTLKFDNPPRRDVALIPAGGYLIVAFKADNPGSWLFHCHIAS

SEQ ID NO: 7180 - protein, 432 aa, Schizophyllum commune
MSGAATNTRPSLANAAPRLGSISLPRRESQVVPDAPITPPLSPGHSELSIDDVEMVDRVLPSPGPAHHQLHQPTQHDMQVDEERPQPPLRLLEDEKVHLQKVGIKLTDFEVRGTLGTGTFARVLIVRHRGRESNNYFAMKVLRKSEIVRLRQVEHVNAERYILSRIQHPFIVDLFATFQDSLNVYMLMSYVPGGELFTHLRRAQRFTPDVTRFYLATIILALRYLHSFNIIYRDLKPENLLLDSRGYLRLTDFGFAKIVDDRTWTLCGTPEYLAPEIIQSDGHGKAADWWAVGVLCYEMLVGYPPFFDESPYGIYEKILDGHIHWPRSMDPLSRSLIRAFLNPDRTKRLGNMIGGPQDVLEHPWFRGVDWDALERREIMAPIIPHTSSGDDTRHFLRLPLPPAEDMPGLFHEEQPPALEQRFDPTAYQFLEF

SEQ ID NO: 7181 - protein, 214 aa, Neurospora crassa
MANDEYDIPLPVVLIGDSGVGKSNLLSRFTRNEFNLDSKSTIGVEFATRSIQVDSKTIKAQIWDTAGQERYRAITSAYYRGAVGALLVYDISKGVTFENVNRWLKELRDHADQNIVIMLVGNKSDLRHLRAVPTEDAKKFAEENHLSFIETSALDATNVELAFQNILTEIYKIVSTKNFDNGPSGSNEGHQNLSGQSISLSQTANDPQAKSGCC

SEQ ID NO: 7182 - protein, 427 aa, Schizophyllum commune
MSVIKRMTERFHIGSSKGYQYPDVDVGGSPYSTAPTPSLVSANTTLFDHRGSLSTQRTSFSELSGHRQGLGAIPEQEDMEARLNRLHLFSRNKGIYRLQDFLIQRTLGTGSFGRVLLVRSKHNLRFYAIKVLNKEKVLRMKQVEHTNNERNMLHRVNHNFIINLWGAFQDGNNLYMVMDFVPGGELFNLLRRSIRFPEPVAKFYAAEVSLALRYLHSNNIIYRDLKPENILLNADGHIKVADFGFAKIVDTVAYTLCGTPDYLAPEIIWGGRYNKSVDWYALGVLCYEMLSGLPPFHTPDGNPQTLYAKIREGPTSLPWNSPNFTLYSIDLIRRLMEGEPSKRYGNMRHGAGDVFAHPWFAEVDWEKLEDREVSPPYIPNIGGAGDASAFDIYHEDGMEELFRPPPLDTLADQFPDFDYTYDDSVAP

SEQ ID NO: 7183 - protein, 549 aa, Staphylococcus aureus subsp. aureus COL
MNKQWWKEAVAYQVYPRSFNDSNHDGIGDLPGMIDKLDYLKDFGIDVIWLSPMFKSPNDDNGYDISDYQEIMDEFGTMEDFDRLLKGVHDRGMKLILDLVVNHTSDEHPWFIESKSSKDNPKRDWYIWQDPKPDGSEPNNWESIFNGSTWEYDANTEQYYFHLFSKKQPDLNWGNPEVRDAVFEMMNWWFDKGIDGFRVDAITHIKKTFEAGDLPVPEGKTYAPAFDVDMNQPGIQTWLQEMKDRSLSKYDIMTVGEANGVSPDDADDWVGEENGKFNMIFQFEHLGLWNSGDSHFDVNSYKSVLNRWQKQLENKGWNALFIENHDQPRRVSTWGDDDKYWYESATSHAAVYFLQQGTPFIYQGQEIGMTNYPFESIETFNDVAVKNDYQIVKAQGGDVDALLAKYKDENRDNSRTPMQWDDTLNGGFTNGEPWFPVNPNYKTINVAQQLEDEHSVLQFYKDLIQLRKSNDVYVYGQFDLVDAENSQVFAYTRTLNEKQVLIVGNLTNHEAELTVPFDLSHGEVKLFNYDAKVNLKQLRPYEACVIELN

SEQ ID NO: 7184 - protein, 360 aa, Candida albicans SC5314
MLRNKSQKELLHLSRQLIQPLLPNFHKGQAGKIVVIGGNEDYTGAPFFASHSAALVGADLSHVICEKAAGPVIKSYSPDLMIHPYLMDLDNPHLNLNNSELEKLKNLPIDEIIKTNDNAVLNKLIDELILPKVTSLLNRIDIVVVGPGFGRDPLMLKSLIRIIEEVKVLNLPIILDADSLYLVSLSPKIIANYPKAIITPNVVEFQRIAKALSIDADLSESNKDKLIDQTIEVSRKLGDIIVFRKGEHDLIVKSSKFLINEITGSNKRVGGQGDTLTGAIATLVNWSNNYILRLWDNQVDLDQEDANLLACFAASSVVRNASSKAFNKYGRSMQTSNVHEYLHESFTELFGDSIFRTSNI

SEQ ID NO: 7185 - protein, 603 aa, Ashbya gossypii ATCC 10895
MSERGEDLYPLALLMDELKHDDIANRVEAMKKLDTIALALGPQRTRDELVPFLTEVAQDDEDEVFAFLAEQLGKFVPYVGGSKYATLLLPALEILASTEETLVRDKAVSSLNNIAQELSQEQLFREFIPLIENLATNEWFSSKVSACGLFKAVLVRVEDDKFRKELLALFLQLTQDDTPMVRRAAGRNLPTLIDLLTQNIDLSTSGDWDYISNMFQRLVSDNQDSVKFLAVDVLISILKFFNKKKDSTHTKGLLHSAIQLVSDEAWRVRYMSADRFEDLASQFISDPAYIDELISPFLALCEDNESDVRKAIAKQIPGFAKLLPNSAVILKKLLPVVQTLCMDENETVRASLASEITGLAPLLSKQEAIDNLIPILLNMLKDEFPDVRLNIIAKLKVVNEAIGIDFLTENLLPAITELAKDDNWRVRMAIIEYIPLLAEQLGVDFFDQQLADLCLSWLWDAVYSIRHAAVINLKKLTEIFGSAWSRDQIISCLLKSDSQVLENFVYRITLLSALTELVPVVSSAVITEKILPFINHLSTDGVPNIRFNAAKSYAVIVEALGKNYADLSNEVILPNLEKLCQDNDVDVRYFAGQSLEKCKSILG

SEQ ID NO: 7186 - protein, 959 aa, Oryza sativa (japonica cultivar-group)
MERHQSIDAQLRLLAPGKVSEDDKLVEYDALLVDRFLDILQDLHGPHLREFVQECYELSAEYENDRDEARLDELGRKLTSLPPGDSIVVSSSFSHMLNLANLAEEVQIAHRRRIKLKRGDFADEASAPTESDIEETLKRLVTQLGKSREEVFDALKNQTVDLVFTAHPTQSVRRSLLQKHGRIRNCLRQLYAKDITADDKQELDEALQREIQAAFRTDEIRRTPPTPQDEMRAGMSYFHETIWKGVPKFLRRIDTALKNIGINERLPYNAPLIQFSSWMGGDRDGNPRVTPEVTRDVCLLARMMAANLYFSQIEDLMFELSMWRCSDELRIRADDLHCSSRKAAKHYIEFWKQIPPNEPYRVILGGVRDKLYYTRERTRHLLTTGVSEIPEEATFTNVEEFLEPLELCYRSLCACGDKPIADGSLLDFLRQVSTFGLALVKLDIRQESDRHTDVLDAITTYLGIGSYAEWSEEKRQDWLLSELRGKRPLFGPDLPQTEEIADVLGTFHVLAELPADCFGAYIISMATAPSDVLAVELLQRECHIKQPLRVVPLFEKLADLEAAPAAVARLFSIDWYMNRINGKQEVMIGYSDSGKDAGRLSAAWQMYKAQEELVKVAKHYGVKLTMFHGRGGTVGRGGGPSHLAILSQPPDTIHGSLRVTVQGEVIEHSFGEEHLCFRTLQRFTAATLEHGMHPPISPKPEWRALMDEMAVVATKEYRSIVFKEPRFVEYFRSATPETEYGRMNIGSRPSKRKPSGGIESLRAIPWIFAWTQTRFHLPVWLGFGGAFKHIMQKDIRNIHTLKEMYNEWPFFRVTLDLLEMVFAKGDPGIAALYDKLLVAGDLQSFGEQLRNNFEETKQLLLQVAGHKDILEGDPYLKQRLRLRESYITTLNVCQAYTLKRIRDPSFEVMSQPALSKEFVDSNQPAELVQLNAASEYAPGLEDTLILTMKGIAAGMQNTG

SEQ ID NO: 7187 - protein, 628 aa, Alkalilimnicola ehrlichei MLHE-1
MSDWSIGLARQVWSVQHWSGGYFDISDEGRVVARPDRDPARAPLDLAGIAAEARHQGLGLPVLVRFLDILHDRVDSLCQAFRQAMVEDGYRGGYRAVYPIKVNQQRRVVEEIIRHGNGRVGLEAGSKPELMAVLALTPPGGTVVCNGYKDREYVRLALRGRQLGLQVHLVIEKASELELVLEEAAALGVTPSLGMRVRLATIGAGKWQNTGGEKSKFGLTAAQALAVVDRLRAAGCLDWLRLLHFHLGSQIPNIRDIRRGMREAARYYAELRALGAPVETVDVGGGLGVDYEGSRSRSFCSMNYTVAEYAHNVVHALWQVCEDEGLPHPDIITESGRAMTAHHAVLITDVIDGDRVPGGADLLAPADAAPRVLHELWTVWTGLDRRHPLEAYHDAAHGLAEAQELYAHGVLNLTDRARAERIWQAVCHALLQRLDPRRRPHRELLDELNEKLADKLFCNFSLFQSMPDVWAIDQIFPVLPLQRLDEPPASRAVLQDLTCDSDGCIRGYVDRDGVESTLPLPPWRPGEPYLLGIFLVGAYQEILGDMHNLFGDTHSVNVRLTGEGYALSGAAHGDTITDVLRYVDFDAEVLRGIYRERVVAAAGLDATARAQCLADLEAGLRGYTYLDT

SEQ ID NO: 7188 - protein, 114 aa, Triticum aestivum
MGKKRKATETSLDEVDRTVYASFRTAANSLSQLYTQSMNHQKLSFQAGERHGLEKLYQWIWRQQEGGSRVTPVDIINYIQNELECCTEEPPISPRAPPPQPTMHVTNSGLIASS

SEQ ID NO: 7189 - protein, 553 aa, Alkalilimnicola ehrlichei MLHE-1
MIRLGRLPRLIYINWVLLRHGLDEVILATHLFRPLRFLGWFMPWRWLRRRHIPRGQRIRGALEDLGPIFVKFGQILSTRRDLLPPDISEELARLQDRVPPFPGSEARAIVERAYGHSLDEYFEHFDEVPLASASIAQVHLGRLRDGRDVVVKVVRPGIPRVIRRDLDLMYTVAGLAERYWSEGKRLHPMDVVREFEKNLYDELDLMREAANASQLRRNFEGSALLYVPEVDWPLTRRDVMVMERIQGIHISDVETLRARGVDMQALAERGVEIFFTQVFRDSFFHADMHPGNIFVDPDRPDDPRYLAVDFGIMGTLNPTDHRYLAENFLAFFNRDYRRVAELHVESGWVPPDTRVDEFEAAIRTVCEPIFERPLHEISFGALLLRLFQTGRRFNMEVQPQLVLLQKTLLNIEGLGRDLYPELDLWKTAKPHLQRWMDEQVGPRSVLAKFRRQLPRLGEELPDLPMRVIKTLNEVEALRSEVEAQNRQLSQLRREIRLGSARSFATISGAALIISAFVLLGLDGYAPAMLGDAPFMTWVLGGAGGLLLLAAWPR

SEQ ID NO: 7190 - protein, 517 aa, Magnaporthe grisea 70-15
MVHLTSIPSHEEADDKIVSGVKKVHLQLANDEDKFTTSVYGSRFAIDDLPKHEMAENEMPKEVAYRMIKDELSLDGNPMLNLASFVTTYMEEEAEKLMADSFSKNFIDYEEYPQSADIQNRCVAMIGRLFNAPVGASEGVGAVGTSCVGSSEAIMLAVLAMKKRWKNKRLAEGKSVDKPNLIMSSAVQVCWEKATRYFEVEEKLVYCSPDRYVIDPKETVDLVDENTIGICVILGTTYTGEYEDVRAVNDLLNERGLETPIHVDAASGGFVAPFVVPDLEWDFRCDRVVSINVSGHKYGLVYPGVGWVVWRSAEFLPQELVFNINYLGADQASFTLNFSKGASQVIGQYYQLIRLGKHGYRAIMSNLTRTADYLSDSLEALGFGIMSKKSGEGLPLVAFRLTPDEDRIYDEFAIAHQLRVRGWVVPAYTMAPHTENLKMLRVVVREDFTRNRCDALIADVKLSLELLNQMDKKELERHQDVIHKHGTHSGKASHNHPRFRKEKHSLQGKHGKTHAVC

SEQ ID NO: 7191 - protein, 387 aa, Synechocystis sp. PCC 6803
MWAALTLWFLLTTITAHDRGEALLGLANFVPYFIVFLAFSQVICQFKQLNTLAWLLTANTVVLVIIGFGQVYGGWATPNWLVAIGTNLVAGGRPEGRMSSLLMYANLFSAWLLMVFPLSLGLLIQSVRRWHFTAPSNRFNLPPLVWALLVACILEAIALVLTGSRSAWGIGLLIGIAYAIYLSWYWLVALAGGATAMVLWASFGPFGKEPLRQIVPKYFWGRLSDELYPDRYRTALRSTQWQFSWDMFLDQPIFGQGLRNFTPLYQAAMNVWIGHPHNLVLMMLGETGLIGTALMLGAVGFILAQGMVLLIHLSRGGGFRRRSQHLLLLSYGIAFAALCLYNLFDVTIFDMRNNVLGWIFLAAIAGVSQRYGTKLAQGDPAKLQVPG

SEQ ID NO: 7192 - protein, 201 aa, Escherichia coli K12
MALHDENVVWHSHPVTVQQRELHHGHRGVVLWFTGLSGSGKSTVAGALEEALHKLGVSTYLLDGDNVRHGLCSDLGFSDADRKENIRRVGEVANLMVEAGLVVLTAFISPHRAERQMVRERVGEGRFIEVFVDTPLAICEARDPKGLYKKARAGELRNFTGIDSVYEAPESAEIHLNGEQLVTNLVQQLLDLLRQNDIIRS

SEQ ID NO: 7193 - protein, 475 aa, Arabidopsis thaliana
MGGGFRVLHLVRPFLAFLPEVQSADRKIPFREKVIYTVISLFIFLVCSQLPLYGIHSTTGADPFYWMRVILASNRGTVMELGITPIVTSGLVMQLLAGSKIIEVDNNVREDRALLNGAQKLLWILSAIGEAVAYVLSGMYGPVGQLGVGNAILIILQLFFAGIIVICLDELLQKGYGLGSGISLFIATNICESIIWKAFSPTTINTGRGAEFEGAVIALFHMLITKSNKVAALRQAFYRQNLPNVTNLLATVLIFLIVIYFQGFRVVLPVRSKSARGQQGSYPIKLFYTSNMPIILQSALVSNLYFISQLLYRKFSGNFFVNLLGQWKESEYSGQSIPVSGLAYLITAPASFADMAAHPFHALFYIVFMLTACALFSKTWIEVSGSSARDVAKQLKEQQMVMPGHRESNLQKELNRYIPTAAAFGGVCIGALTVLADFMGAIGSGTGILLAVTIIYQYFETFEKEKASELGFFGF

SEQ ID NO: 7194 - protein, 258 aa, Triticum aestivum
MSTAVVKWCYATVVPRARSSTIVASLGTPAPSNSSSFRPKLIRNTPVQAAPVAPALMDAAVERLKTGFEKFKTEVYDEKPDFFEPLKAGQAPKYMVFACADSRVCPSVTLGLEPGEAFTIRNIANMVPSYCKNKYAGVGSGIEYAVCALKVEVIVVIGHSRCGGIKALLSLKDGAYDSFHFDEDWVRIGFPVNKKVQTECASMPYDDQCTALEKEVVNVVLQNLLIYPFVKEGVSNGTLRLVGAHYNFVSGKFETWEQ

SEQ ID NO: 7195 - protein, 228 aa, Sulfolobus tokodaii str. 7
MKAVILAGGYGKRLRPLTDDKPKPLVEVAGKPIIEWQIHWLKSFGITSFFVLAGYKKEALIEWISKNQQRLNVSIATLTEEEPLGTGGAIRRLKDFISDDFIVINGDILTNIDINKMVLKDCIVAIALVPLRSPYGIVSIDDNGKIIRFVEKPLLKEYWINAGVYKMKPEVFEYLPEKGDIEKITFPSLAEKGLLKGVTYENVYWRSIDTIKDYEEASVEIPEVFKKL

SEQ ID NO: 7196 - protein, 332 aa, Magnetospirillum magnetotacticum MS-1
MTVRVGINGFGRIGRMVFRAVAKEFPEIEIVGINDLLEPDYLAYMLKYDSVHGRFAGDISVEGSNLIVNGKKVRLTAVKDPAELKWDEVKADIVIESTGLFLDAVNAEKHIKAGAKKVLMSAPSKDDTPMFVYGVNHEKYAGEKIVSAASCTTNCLAPVAKVLNDNWGIKRGLMTTVHAATATQKTVDGPSQKDWRGGRGILENIIPSSTGAAKAVGKVLPELNKKLTGMAFRVPTSDVSVVDLTVELNKDASYEDICKAMKAASEGALKGVLGYTEDKVVATDFVGCNMPSIFDADAGIALDSTFVKVVTWYDNEYGYTCNMLRFLRHIAK

SEQ ID NO: 7197 - protein, 52 aa, Nicotiana attenuata
MVAEARTCESQSRRFRGLCFSKSNCGSVCHTEGFNGGHCRGFRRRCFCTRHC

SEQ ID NO: 7198 - protein, 187 aa, Oryza sativa (japonica cultivar-group)
MADGPGSPGGGGGSHESGSPRGGGGGGGGGGGGGGVREQDRFLPIANISRIMKKAIPANGKIAKDAKETVQECVSEFISFITSEASDKCQREKRKTINGDDLLWAMATLGFEDYIEPLKVYLQKYREVRTDGDSKLTAKAGDGSVKKDVLGSHGGSSSSAQGMGQQAAYNQGMGYMQPQYHNGDVSN

SEQ ID NO: 7199 - protein, 556 aa, Streptomyces parvulus
MTGNTTSAAFLRRTQNALAMQRKICAQPEETAERVFSDILSVSRDTGFGREHGLAGVRTRQEWRRAVPIRTYDELAPYVERQFSGERRVLTTDDPRAFLRTSGSTGRAKLVPTTDHWRRVYRGPALYAQWGLYFEQIGTHRLTGDEVLDLSWEPGPIRHRLRGFPVYSITERPVSDDPDDWNPPWRHARWFTRDAGAATMADLLYGKLLRLAAHDLRLIVSVNPSKIVLLAETLKENAERLIQDLHDGHGTDRAARPDFLRRLTAAFDRTGGRPLLTDLWPGLRLLVCWNSASAALYGPWLSRLATGVAALPFSTTGTEGIVTLPVDDHLSAGPLAVDQGHFEFVPWQDLDDGSPLPEDTPTLGYDELELGADYRLVMSQANGLYRYDVGDVYRVVGAVGATPRLEFLGRAGFQSSFTGEKLTESDVHTAVMRVLGSERTDHPHFSGIPVWDTPPHYLVAIEWADAHGTLNVQDTARRIDATLQEVNVEYADKRRSGRLRPLQILPLVPGAFGQIAERRFRQGTAGAQIKHHWLQKDSAFLDTLRDLDLVRARPGT

SEQ ID NO: 7200 - protein, 162 aa, Dechloromonas aromatica RCB
MGSMKEIFNSLFLKELLKGMSVTGKYFFARKITVQYPEEKTPQSFRFRGLHALRRYPNGEERCIACKLCEAICPALAITIEAEPRDDGSRRTTRYDIDLTKCIFCGFCEEACPVDAVVETRIFEYHGEKRGDLYYTKQMLLANGDRYEDQIAKDRELDASYR

SEQ ID NO: 7201 - protein, 502 aa, Arabidopsis thaliana
  misc_feature (324)..(324): Xaa can be any naturally occurring amino acid
  misc_feature (346)..(346): Xaa can be any naturally occurring amino acid
  unsure (1)..(502): unsure at all Xaa locations
MSCSATDLAVLLGPNATAAANYICGQLGDVNNKFIDTAFAIDNTYLLFSAYLVFSMQLGFAMLCAGSVRAKNTMNIMLTNVLDAAAGGLFYYLFGYAFAFGSPSNGFIGKHYFGLKDIPTASADYSNFLYQWAFAIAAAGITSGSIAERTQFVAYLIYSSFLTGFVYPVVSHWFWSVDGWASPFRTDGDLLFSTGAIDFAGSGVVHMVGGIAGLWGALIEGPRLGRFDNGGRAIALRGHSASLVVLGTFLLWFGWYGFNPGSFNKILVTYETGTYNGQWSAVGRTAVTTTLAGCTAALTTLFGKRLLSGHWNVTDVCNGLLGGXFAAITGGCSVVEPWAAIICGVXAALVLLGCNKLAEKLKYDDPLEAAQLHGGCGAWGLIFTALFAQEKYLNQIYGNKPGRPHGLFMGGGGKLLGAQLIQIIVITGWVSATMGTLFFILKKMKLLRISSEDEMAGMDMTRHGGFAYMYFDDDESHKAIQLRRVEPRSPSPSGANTTPTPV

SEQ ID NO: 7202 - protein, 476 aa, Thermoplasma acidophilum DSM 1728
MSFDDVIELAKRRGFFWPSYMIYGGSSGFYDYGPLGTLLKDNIIAAWKREYAREGAIFLDTPVISPADVFRASGHLEKFSDIAVKCSKCGTPYKFESLIKSLGINEIAKTVDEAAAILEKYDVKCPKCGEKLKNPYDFNLMFRVGSNDLYLRPETAQGIFINFKNLYNYARNSMPIIVCQVGKGFRNEISPRQALIRMREFSQAEVEVFYIENDDFPIPDSSVELNMLRNTGDLLKMKVSDALRSGIIGNRVMAYFLNKTYEILLKLGFQPDHIRAREHDPGERAHYSSETWDFEYLLDGDWTEIVGVSDRGTYDLGRHQQFSGENFQIDGRTPKVVEPSYGLDRILLTIMDSSYYRRENGYKVLRLDPHISPIHMAIFPLQKRDDLDKIAKDLFEKMKNIDPFIFYDDSGNIGRRYARQDEIGTPFCVTVDYQTKDDETVTIRERDSTSQVRVKISDLLERTRSFPDSLSALFSN

SEQ ID NO: 7203 - protein, 516 aa, Cryptococcus neoformans var. neoformans B-3501A
MFQKVSDKFHRKQQSTTLPGKTQQVPNPTSPVLAKANSQAQQAYSLPQDHSPMEGIQRDSPPIQQPMATEKAPIVGSSASTSLPTLSVQDGTLPLTPGAQGMQTGTIDGHRQLQSPVSRSSSAGEDKMREKARDAQEQAAQAQANLHHATQQARVAAINAAATQAALETAAQLPATARVPVSGGGVEQGQARRKTAGRYALSDFLIERTLGTGSFGRVHLVRSRHNGRFYAVKVLNKEKVIKMKQVEHTNSEREMLVRVRHPFLVNLWGTFQDVNNLYMVMDFVAGGELFSLLRKSQRFPNSVAKFYAAEVALALDYLHSLDIIYRDLKPENLLLGADGHVKVTDFGFAKYVPDITWTLCGTPDYLAPEVVQSKGYNKSVDWYALGVLIFEMLAGYPPFFTEDGNPMKLYEKIIAGKVRYPTYFDALAKELLKNLLIGDLTKRYGNLRAGSSDIFAHGWFAEVDWDKLYRREIPAPYVPKIDGEGDASQFDRYQEADVSAYGKVGNGPYDHFFTEF

SEQ ID NO: 7204 - protein, 451 aa, Thermoplasma acidophilum DSM 1728
MEEYDVITIGAGGAAYPAAFRLKRSGFSVLMIDKKGVMSGNCLAEGCVPSKAVIETVHNLAKMRHFGDYSIDYSKIVDHKDSVQNIRYEQHDQELKEAGLKIIKGTARIIDDNTVEVSSDTGTSRYRSSSAIIIASGSETFVPKIPGAELAWTSADLYSLKPKVKKLPKSIAIIGGGYIGMETASFMSILGVKVTVIEMLDRVMSTMDEAMVDKLLPLLPKMDIRTASPVQSIERNGSMYHVNFGKEGEKESIEVEAVLMAVGRVPVFPEGIDDLGIEHDRHGIKVNMAMQTNIKNIYATGDVNGITPLFHAAKRQSLVAANNIMANNVPIDYFDPLSVPFTVYTIPQMAYVGILPSQARKMGIEYLETDYQIEKDALAQINNEMFGEIRIFTDKRMKVIGGYVIGNDAGNVINEIALAVSKGLSLRDLAEMAHQHPMTFEGIDSAARKLY

SEQ ID NO: 7205 - protein, 343 aa, Glycine max
MGVPEKDPLSQLSLPPGFRFYPTDEELLVQYLCRKVAGHHFSLPIIAEIDLYKFDPWVLPSKAIFGEKEWYFFSPRDRKYPNGSRPNRVAGSGYWKATGTDKIITTEGRKVGIKKALVFYVGKAPKGTKTNWIMHEYRLLDSSRKNTGTKLDDWVLCRIYKKNSSAQKTAQNGVVPSNEHTQYSNGSSSSSSSQLEDVLESLPSIDERCFAMPRVNTLQQQQHHEEKVNVQNLGAGGLMDWTNPSVLNSVADFASGNNQVVQDQTQGMVNYNCNDLYVPTLCHLDSSVPLKMEEEVQSGVRNQRVGNNNSWFLQNDFTQGFQNSVDTCGFKYPVQPVGFGFRN

SEQ ID NO: 7206 - protein, 454 aa, Triticum aestivum
  misc_feature (168)..(168): Xaa can be any naturally occurring amino acid
  unsure (1)..(454): unsure at all Xaa locations
MSEGPPPAADGAVRRRRRRWAAAAGALLVALLAVALSYRGFPSISSLSRGGGCGCPGARKYTGMVEDCCCDYETVDAINEEVLNPILQDLVALPFFRYFKVKLWCDCPFWPDDGMCRLRDCSVCECPDNEFPEPFKKPYSGLSPENMICQEGKPEATVDRTLDTKVFXWVETDNPWTSDDETDNAEMTYVNLQLNPERYTGYTGDSARRIWDAIYKENCPKYPSEDMCQEKKALYKLISGLHSSISVHIAYDYLLDESANLWGHNLSLLHDRVLKYPERVENLYFTYLFVLRAVTKAADYLEQAEYNTGNPEEDLKTQSLVRQLLYNHKLRSACPLPFDEAKLWQGENGPELKQEIQKQFRNISAIMDCVGCEKCRLWGKLQVLGLGTALKILFSVDGENNLNQQFQLQRNEVIALVNLLNRLSESVKFVHETGSSSQEIIKQQSFSTLQKGAS

SEQ ID NO: 7207 - protein, 595 aa, Debaryomyces hansenii CBS767
MQEHVNFDGANKNLENLENQLSASLNTANISQVEGNTKSRVVRETDVQNNIGDDELDLAERLGDAHLNILPTKKMIVCLATMSLGLFISFVDQTGITIALPHIAKDLNAETTINWAGTSSLLANCVCQVLVGRFADIFGRKTVLLYSFFLLAVADLACGLAKTGVQFFIFRACCGIANGGIQLLTNIIISDIVVLKKRAKYYGILSSSIGLANCTGPLILAGFIKGSSWRTFYYIMPAICFLVAVIIYFVVNKNRKDKQEVLSRREKFKKIDYLGFIFSSAGLILLLIPISGGGSTYKWNSGLIIAMFIVGGLCLVGFLLIEWKIPRLPMIPLGLFKSGLLSLVLSTNFLYGMTYYSFTYYIPYYFQIVRGYDSIMASVLLIPLVLMQAINSIISGQIISYTGHYKHVILFGYGSWVLSCGLLLLWSETINIGVVIVVLLIMGIGLGFTFQPCMVAAQAQARKSERAVVIGARNVIRSFGGAIGIAMGSLIVSNTLLKEINQALVHKEKYANIPTDYLNYLKLHIYTRIEVTGLNEKQVKVIKSMYMKSLMNYFYLGIPLIGICFISSFFLKDRGVQCIDEQPEPKDKEKDITSK

SEQ ID NO: 7208 - protein, 467 aa, Pseudomonas aeruginosa UCBPP-PA14
MMESYDVIVIGAGPGGYNAAIRAGQLGLKVACVEGRETLGGTCLNVGCMPSKALLHASELYAAASGGEFARLGIRVSPELDLAQMMKQKDESVAALTRGVEFLFRKHKVQWIKGWARLQGEGRVGVALADGGHAQLEARDIVIATGSEPAPLPGVPVDNQRILDSTGALELAEVPRHLVVIGAGVIGLELGSVWRRLGAQVTVLEYLERICPGLDGETARTLQRALTRQGMRFRLGTRVVAARSGEQGVELDLQPAAGGATESLQADYVLVAIGRRPYTEGLGLETVGLASDRRGMLENQGQRSAAPGVWVIGDVTSGPMLAHKAEEEAIVCIERIAGHAAEMNAEVIPSVIYTQPEVASVGLGEEQLQAARREYKVGRFPFSANSRAKINHESEGFIKILSDARSDQVLGVHMIGPGVSEMIGEACVAMEFSASAEDLALTCHPHPTRSEALRQAAMDVHGRAMQN

SEQ ID NO: 7209 - protein, 637 aa, Magnetospirillum magnetotacticum MS-1
MCGLAGLFLPRHAALAEADIAAMLRVMRHRGPDGTGIHLSDDRRFQAGFTRLAIIDLATGDQPLVRNGGETVLLGNGEVYNYRELRAELAAKGHTFLTQGDMEAALESFMAKGRDFVHDLNGMYALAILERDDHRLTLVLDRLGIKPLYWARLGNGGILFASEIKALFASGLLRPLVDEVSVAAYLAHGYVPAPATLYKGVSKLPPGSIMSVDASGEVQIERYWRAAAATDLPGDEAGIRAHLVSILDDAVGLQLRSDVPVGAMLSGGLDSGLLVALAARRLDRPLKTYTVRFLGARVDETPLAAQVAERYGTDHTVFELETGSAAQLLPRLVWHADEPLADASLLPNHLINEVIGKETRVVLNGTGGDELFGGYGRYFQLPVEARWLRLPRPLRKAAEAMIGLGNPFLAWQLARAEKFGRDRGGYLHDHCALFPPPMAKLLGCTLPWPIPAQAAFADEYAGPLDSAALYAELNTYLPEDLLTLLDRTTMAHSVEGRVPLLDHRMVEAALAVPPHIRNPGGRQKALERAIAAEYLPDSLLSAPKQGFASPVPAWFESGGLAPLARRLLTSRRALERGWWSREGVERLLAQPGRHAFRLYSLLVLELTVRIHVEGAFAEAPAFGLAEMAEGEDAPCAA

SEQ ID NO: 7210 - protein, 367 aa, Oryza sativa (japonica cultivar-group)
MVKKKEAGDAEADERRRLRSLAFSNGLLQRGEPAAPRSALAPSTAVSRLQGRDIVRRGGQRKSRFLFSFPGLLAPAAAASGGRVGELADLGTKNPLLYLDFPQGRMKLLGTHVYPKNKYLTLQMSRSTKGVVCEDVFESLIVFSEAWWIGTKEENPQELKLDFPKEFQNDGAVADSDFKGGAGASCDEAVTINKPPKETTTGSLSPKIESDIDSSEDSDLKDEDNTQSTSQAPSVRQSARTAGKALKYTEISSGDDSSDNDDEIDVPEDMDEKVKSPAVKNESQSEDIKPADSSAQPISAKKEPLVQATLSSMFKKAEEKKRCTRSPKGSPATKGPAAKKQRASPEEKHPTGKKSGKCSSKSVVRSI

SEQ ID NO: 7211 - protein, 196 aa, Arabidopsis thaliana
MDQSGSNTNMDIEKESTTFDYSKRSQWLRAAVLGANDGLVSTASLMMGVGAVKHDVKAMILSGFAGMVAGACSMAIGEFVSVYSQYDIEVAQMERDSVEIEKEKLPSPMQAAAASALAFSAGAIVPLLAAAFVKEYKMRIISVVVAVTVALMVFGWLGAALGKAPAVRSSARVLFGGWLAMAVTFGLTKLIGLYGL

SEQ ID NO: 7212 - protein, 94 aa, Enterococcus faecium
VLKPLGDRVIIEVAKEEEKTVGGFVLASAAKEKPQTGPVVAVGEGRLLENGEKVPAAVKAGDQVMFEKYAGTEVKYEGKEYLIVAGKDIMAIVE

SEQ ID NO: 7213 - protein, 636 aa, Pseudomonas aeruginosa UCBPP-PA14
MAARRTRKDDGSNWTVADSRGVYGIRHWGAGYFAINDGGNVEVRPQGADSTPIDLYELVGQLREAGLSLPLLVRFPDILQDRVRKLTGAFDANIERLEYQSRYTALYPIKVNQQEAVVENIIATENVSIGLEAGSKPELMAVLALAPKGGTIVCNGYKDREFIKLALMGQKLGHNVFIVIEKESEVQLVIEEAANVGVQPQVGLRVRLSSLASSKWADTGGEKAKFGLSAAQLLSVVERFRQAGLDQGVRLLHFHMGSQIANLADYQHGFKEAIRYYGELRALGLPVDHIDVGGGLGVDYDGTHSRNASSINYDIDDYAGVVVGMLKEFCDAQGLPHPHIFSESGRALTAHHAVLITQVTDVERHNDDVPKIVDLDEQPEIVRWLAELLGPTDAEMVTETYWRATHYIGDAAAQYADGKISLAQKALAEQCYFAICRRLHNQLKARQRSHRQVLDELNDKLADKYICNFSVFQSLPDTWAIGQVLPILPLHRLGEEPDRRAVLQDLTCDSDGKITQYVDEQSIETSLPVHEVKEGEDYLIGVFLVGAYQEILGDMHNLFGDTDSVNVYQRADGGIYHAGIETHDTIEDMLRYVHLSPEELMTLYRDKVAGAKLTARERNQYLDALRLGLTRSAYLS

SEQ ID NO: 7214 - protein, 524 aa, Enterococcus faecium
MAKELKFAEDARAAMLRGVDKLADTVKVTLGPKGRNVVLEKSYGSPLITNDGVTIAKEIELEDHFENMGAKLVSEVASKTNDIAGDGTTTATVLTQAIVREGLKNVTAGANPLGIRRGIELATKAAVEELHNISTVVDSKETIAQVAAVSSGSDKVGHLIADAMEKVGNDGVITIEESKGIETELDVVEGMQFDRGYLSQYMVTDNDKMEAVLENPYILITDKKISNIQDILPLLEQILQQSRPLLIIADDVDGEALPTLVLNKIRGTFNVVAVKAPGFGDRRKAMLEDIAILTGGTVITDDLGLELKDATIENLGNASKVVVDKDNTTIVEGSGEKEAIEARVQLIKNQIAETTSDFDREKLQERLAKLAGGVAVVKVGAATETELKELKLRIEDALNATRAAVEEGMVSGGGTALVNVISKVSAVEAEGDVATGIKIVVRALEEPIRQIAENAGYEGSVIVDKLKNVELGTGFNAATGEWVNMVEAGIVDPTKVTRSALQNAASVSALLLTTEAVVADKPEP

SEQ ID NO: 7215 - protein, 324 aa, Zea mays
MSSQTGGGKESDAGPGQHRQMQSLARQGSLYNLTLDEVQNHLGEPLLSMNFDELLKSVFPDGVDSDGAVTGKPDRTSSLQRQGSILMPPQLSKKTVDEVWKGIQGGPETSTVVDGLQRRERHPTLGEMTLEDFLVKAGVVTEGLVKDSADFPSNMDTAGSSVVVAAASSLNPGAQWLQQYQQQVLGSQQLSLAGSYMASQLRPQPLSIATGATLDSIYSDDQITSPSFGALSDPQTPGRKRGALGEVVDKVVERRQKRMIKNRESAARSRARKQAYTNELENKVFRLEEENKRLKKQQELDEILSSAPPPEPKYQLRRTGSAAF

SEQ ID NO: 7216 - protein, 1209 aa, Synechocystis sp. PCC 6803
MINSGTLITKIEELQSTLAKMDIALGTVDEAIVWTDGTGQIQWCNTAFDHLMGKLHILILGKNLVELLPLHRNSQPLEVSHHPFTIIVATQQKFTDHYEFNQNGKWLHLEIMTSPLMNAQGAVLVIRDISDRHLQEQTLQQLNENLEKRVLERTQAVSLINNKLEQELRERKKTEIALKATTSRLEALIQNLQAGVLVENENGKIVLVNQVFCDLFGIDVPPEKLIGFDCRQSAQFAKILFEDPEAFIIGIDNILQNRQIVTNEELRLKDGRTFARDYVPIEVGNHHDGRLWLYRNITPQKQAEVSLRKQYQRTLLLKEITEEIRQSLDPVKIFQVAVSRLGQTLQVSRCIVHLYSDMPQPHLTCVAEYLIPGMTSMLDLNLLIADNPHLLRALNQDDAVQVDNLKMVPTAVPLQDFYNQLQVYSLLIIRTSYQDKTNGLLILHQCDRSRSWNTEEVELVKAVADQVGIALAQAKLLEQEREIRQQLIEQNKALMTATKAAEDANRAKSDFLATMSHEIRTPMNAVIGMTGLLLDTHLNTQQQQFTETIRSSGEALLSLINDILDFSKIESGQFKLEIHPFEIQQCVEECLDLVAPQAFAKKLDLVYQIEPQVPMAILGDLTRVRQVLVNILANAVKFTTSGSIQVRVSATVANQQQNKYTIQFSIKDTGIGISPDQQSALFKSFSQVNTSIARKYGGTGLGLAICKRLTEMMGGQIWVESYGEIAGNPPVDWAKTSKNNPLESTGATFYFTITAQSTTIVRRPNDLSCQLSLAGKRLLIVDDNQLSCEGLKQLVTAWGLQAQATTSGWEAFSWLRQGECFDLAIIDLQMEEVDGLQLAEALRTLPTGESLPLVILTPSPTSLAELSARTDISIAACLSSPIKKSLVYEVLCEVFKADETDNSLFNGDWRSGITEAVKRTCSPQEREARIKTLSPLRILLVEDNNINQRVALLMLEKLGYRPDIAGNGLEALQVLHQASYDVILMDVEMPEMDGLSATKAIRQDFPADEQPWIIAVTAYAMQGDRETCLAAGMNDYITKPIRENDLLDALQRIDFSVLSLTKNKPAPLSEPVVNVGLVNPVPEVLKADQLEENLVLDLSILTGIREMAGPDGATFLQVIIGDYLHTTPSLLEKLKTAIAAQEIDTVRATAHSLGSSSANLGAVEFAKQCKQLENLARSGMLSGVDGQYIQLEKEYEKVSQALALQLNPN

SEQ ID NO: 7217 - protein, 321 aa, Bacillus cereus ATCC 10987
MAVNEKVELATFAGGCFWCMVSPFEEMEGIIKVVSGYTGGHKENPTYKEVCSETTGHYEAVQITFDANKMPYEELLNIYWRQIDPTDVGGQFHDRGQSYETVIFYHNEEQHKKAEASKEGLARSGRFSKPIATKILPAATFYPAEEYHQGYHKKNEFRYELYRKGSGRDAFIKQHWPKDNAHLKEKLNEMQFYVTQENGTEPPFRNEYWNHKEEGLYVDIVSGEPLFTSLDKFDSGCGWPSFTKPVMSASVKEKMDVSHNMTRTEVRSKEGDSHLGHVFPDGPGPNGLRYCINSAALRFIPKEELEKEGYGDFLILFGNKK

SEQ ID NO: 7218 - protein, 418 aa, Colwellia psychrerythraea 34H
MTDFNIATMAQKAKQASRVAAQLNSSEKNALLNDIATAIENNSDAIIQENSKDIAAGREKGLSQAMLDRLVLTDKGIKDMSSAIREIVALTDPVGDVDKLSLRPNGIQVGKMRIPLGVIAMIYEARPNVTAEAAALCIKSGNAVILRGGSEAIHSNLAIAHCLHQVLTTHNVDEHIVCVIPDTSRSVIEQLLQQSDTIDLVIPRGGEGLIRYVSENSRIPVIQHYKGVCHLYIDKYADLDKAVNILVNGKTQKPSACNAFETVLVHSDISAKFLPLAAKALNDAAQVKVHACKNSIGFFPNAELATNEDYQAEYLAQEIAVKVVSSFDTAIGHINEFTSDHTEVIISQDISRSQKFIRQINSSVVMVNASSRFSDGNQLGLGSEIGISTSKLHAYGPMGLEALTTEKFVVFGDGQIRQ

SEQ ID NO: 7219 - protein, 304 aa, Staphylococcus aureus subsp. aureus MSSA476
MTNKVVILGSTNVDQFLTVERYAQPGETLHVEEAQKAFGGGKGANQAIATARMQADTTFITKIGTDGVADFILEDFKAAHIDTSYIIKSTEAKTGQAFITVNAEGQNTIYVYGGANMTMTPEDVINAKDAIINADFVVAQLEVPIPAIISAFEIAKAHGVTTVLNPAPAKALPNELLSLIDIIVPNETEAELLSGIKVTNEQSMKDNANYFLSLGIKTVLITLGKQGTYFATKNQSQHIEAYKVNAIDTTAAGDTFIGAFVSRLNKSQDNLADAIDFGNKASSLTVQKHGAQASIPLLEEVNQV

SEQ ID NO: 7220 - protein, 663 aa, Synechocystis sp. PCC 6803; identical to SEQ ID NO: 1334

SEQ ID NO: 7221 - protein, 396 aa, Cucumis sativus
MALKFHPLTSQSPKLPSFRMPQLASLRSPKFVMASTLRSTSREVETLKKPFMPPREVHLQVTHSMPPQKMEIFKSLEDWAEENLLVHLKPVERCWQPQDFLPDSAFEGFHEQVVELRERAKELPDEYFVVLVGDMITEEALPTYQTMLNTLDGVRDETGASPTPWAIWTRAWTAEENRHGDLLNKYLYLSGRVDMRQVEKTIQYLIGSGMDPRTENNPYLGFIYTSFQERATFISHGNTARLAKEHGDIKLAQICGTITADEKRHETAYTKIVEKLFEIDPEGTVIAFEDMMRKKVSMPAHLMYDGRDDNLFHHFSAVAQRLGVYTAKDYADILEFLVGRWKVESLTGLSGEGQKAQDYVCALPARIRKLEERAQGRAKEGPTIPFSWIFDRQVKL

SEQ ID NO: 7222 - protein, 284 aa, Zea mays
MEDERNTQQHQGGEQAQDQENEVKDRGLLDSLLGRNKHDDQEKKNQQQQQAEEELATGMEKVTVAEPDHKEEGHEAAEKKDSLLAKLHRTSSSSSSSSDDEEEEVIDENGEIVKRKKKKKGLKEKVKEKLAAHKAHDEGDHHQTPAPPVVVDTHAHHQEGEHFPAPAPPPHVETHHPVVVHKIEDDDTKIQTPPQAPEEEKKGLLDKIKEKLPGGHKKPEDAAAAAAAPAVHAPPPAPHAEVDVSSPDGKKGLLGKIMDKIPGYHKSSGEEDRKDAAGEHKTSS

SEQ ID NO: 7223 - protein, 330 aa, Staphylococcus aureus subsp. aureus COL
MIDYKSLGLSEEDLKVIYKWMDLGRKIDERLWLLNRAGKIPFVVSGQGQEATQIGMAYALEEGDITAPYYRDLAFVTYMGISAYDTFLSAFGKKDDVNSGGKQMPSHFSSRAKNILSQSSPVATQIPHAVGAALALKMDGKKKIATATVGEGSSNQGDFHEGLNFAGVHKLPFVCVIINNKYAISVPDSLQYAAEKLSDRALGYGIHGEQVDGNDPLAMYKAMKEARDRAISGQGSTLIEAVTSRMTAHSSDDDDQYRTKEERETLKKADCNEKFKKELLSAGIIDDAWLAEIEAEHKDIINKATKAAEDAPYPSVEEAYAFVYEEGSLN

SEQ ID NO: 7224 - protein, 181 aa, Oryza officinalis
FGSVYRGILSDGGVSRDVAVKRVAETSRQGWKEFVAEVRIISRLRHRNLVPLIGWCHDGGDELLLVYELMANGSLDAHIYSPENVLPWPVRYGVVLGVGAALLYLHQEAEQRVVHRDIKPSNVMLDASFNARLGDFGLARLIEDGRRSHTTDIAGTMGYIDAECILAGKASVESDVYSYGI

SEQ ID NO: 7225 - protein, 210 aa, Arabidopsis thaliana
  misc_feature (29)..(29): Xaa can be any naturally occurring amino acid
  misc_feature (42)..(42): Xaa can be any naturally occurring amino acid
  misc_feature (46)..(46): Xaa can be any naturally occurring amino acid
  misc_feature (59)..(59): Xaa can be any naturally occurring amino acid
  misc_feature (85)..(85): Xaa can be any naturally occurring amino acid
  misc_feature (93)..(93): Xaa can be any naturally occurring amino acid
  misc_feature (98)..(98): Xaa can be any naturally occurring amino acid
  misc_feature (126)..(126): Xaa can be any naturally occurring amino acid
  misc_feature (130)..(130): Xaa can be any naturally occurring amino acid
  misc_feature (137)..(139): Xaa can be any naturally occurring amino acid
  misc_feature (153)..(153): Xaa can be any naturally occurring amino acid
  unsure (1)..(210): unsure at all Xaa locations
GGFGGTAANDESVCTMFGSRYVRTTLPKXEIGENSIPKDAAXQIIXDELMLDGNPWLRXASFVTTWVEPECDKLIMGSICRNYVXMDEYPVTXGLQNXCVDIIARLCNAPLGESETAVGGGTVGCXGAVXVAGLAFXXXWGALRPAGGGPFGXPRLVAGAGGGSRGGVGAFLFVWGGGGWGGGVRGGCGRGGGGGGGGAGGGGGVVGGRG

SEQ ID NO: 7226 - protein, 296 aa, Saccharophagus degradans 2-40
MLELSPANQTDYSLGFGGDTLNTAIYFARLGGEVDFVTALGDDHLSENMIRAWDKENVGTSLVKRTPGALPGLYMIQTDDEGERSFHYWRKNAPARTLIEDWPEVLTNLNAFPAIYLSGITLSLYSPQSRTALFNFLDEYRAQNGQVIFDINYRPASWPDKTEALATFDEMLKRTDTALPSFDDEKLLHGEHSKTECLERYLTAGAKEVVIKDGVNGCLLHTNNQSVLLPVPAKVTPVDTTAAGDSFNGAYLAARLNGASAERAVAQGQACAALVIQHRGAIVPINAFRASDIKNN

SEQ ID NO: 7227 - protein, 684 aa, Schizophyllum commune
MSSPPRSSKRPVPDLSPAPSPSPAPAGPNASKGKIHVKLIQARGLNVPSPNSRPYVVVTYDQSEFVSRDPTDETDKEVRGVPTRNANGATTPVNPPPTSSSSALAALGKVSAAIDKATNGTKSNNTSPVSSLGSGKSDKSLFGRLSAHNPVWKHEVAFDVTSSKSQLTFNVYDRTQLNQGFLGMVQITPTLVHDHTVDQWYKLHANENEQVSGEIRVQITYEQYKNKRTLTPRDFEFLKLIGRGTFGKVLQVRKKDTKRIYAMKILSKREIVQKKEVAHTIGERKILQTSLECPFLVGLKFSFQTETDLYLVTDFKSGGELFWHLQRETRFTEERARFYIAELVLALEHLHKYNIVYRDLKPENILLDATGHVALCDFGLSKADLRPDELTTTFCGTTEYLAPEILLDEHGYSKIVDFWSLGVLLFEMCCGWSPFYAEDTQQMYKNICFGKIRFPRGVIGDEGKSFVKGLLTRNPKNRLGATRDAEELKEHPFFKSIDWHLLALKQVTPPFKPVIESDESTANFDTEFTNADISEIIGDEGESEIDEDDPSEAWVSQSLSESGGHMPLGPLGQEKTDPKSPTLSRNPSRGGGIEIKAKKQRKGATQGSPLTSSVQEKFKGFTYSGEGSVLNGSAMAGRRGAESGTEEDGPEPTTEDEIDDTGKSAGRYAKSRRRKGLEFTGLDD

SEQ ID NO: 7228 - protein, 302 aa, Sorghum bicolor
MASAAVPAATGGLKEDIAGLYDESSGVWERICGEHLHHGFYEPAGDATAVRPDVRRAQIRTIDEALAFAAVPDDLEKRPKTIVDVGCGIGGSSRYLARKYGAQCTGITLSPVQAERGNALTAAQGLSDQVSLQVADALEQPFPDGMFDLVWSMESGEHMPDKRKFVSELARVAAPGGTIIIVTCCHRNLNPSETSLKPDEQRLLKRISDAYCLADWFLPSDYVSIAKSLSLEDIRTADWSENVVPFWPAVIKLSLSWKGLTSALTCGWKTINGAMGILLLIQGYRKGLIKFTVITCRKPGPP

SEQ ID NO: 7229 - protein, 499 aa, Schizophyllum commune
MGAQQSRRSGHGSRPCSTMKHDSSRSSSEASDSKGSRSLKTVSVASASAFAAIAAVTPSSSSSAEDISRLSERTRVEKREVQKPPPPRPKSYLEMPQTTVPCQYRTGKTLGSGTYAIVKEAIHIHTGKYYACKVINKKLMQGREHMVRNEIAVLKRISSGHKNIVTLHDYFETTHNLYLCFDLCTGGELFDRICAKGNYYEADAANLVRTILQAVKYIHDCGIVHRDLKPENLLFRTQAEDADIMIADFGLSRVMEEEKLNMLTEICGTPGYMAPEIFKKTGHSKPVDIWAMGVITYFLLAGYTPFDRDSQQLEMEAIIAGDYKFEPEEYWENVSSTAKDFVTQCLTIDPTNRPTAAEALQHKWLSDPTAHFVTDKEGPVDLLPHVKKAFNAKQLWKKAAFSIKALNRMTMLASSGLDKDAAELSENLKKYKEESAREIMEESTITHSHNMETESTTDLTLKEKEVRDAVKASDDISAHDHEDISSKLASVSLDEGQKK

SEQ ID NO: 7230 - protein, 345 aa, Psychrobacter arcticus 273-4
MNDMKLLLPTSTAGSLPKPSWLAEPEKIWSPWALEGEQLIEAKQDALRVSLHEQLHAGIDIVSDGEQTRQHFVTTFIEHLDGVDFEKRETVRIRNRYDASVPSVVGAVSRQKPVFVDDAKFLRQQTDQPIKWALPGPMTMIDTLYDGHYKSREKLAWEFAKILNQEARELEAAGVDIIQFDEPAFNVFFDDVNDWGIATLERAIEGLKCETAVHICYGYGIKANNDWKKTLGSEWRQYEQAFPKLQQSNIDIVSLECQNSHVPMDLIELIRGKKVMIGAIDVATNTIETPEEVANTLRKALQFVDADKLYPSTNCGMAPLSRQVAQGKLKALSAGAKIVRQELTA

SEQ ID NO: 7231 - protein, 551 aa, Schizophyllum commune
MSWKSLTRSKKSIPDMRSDTPTPANPNGGSGNDSPYRTGLLAIRVLWAEDVNLPDGKAVPPAVESALSSQAAKVASAVDPLSVSQQQQRLAKTKGHGYKDSVQRTQCWWLPYLVMEYEVNQVLITALGGDLEKPVFMYQANFDVSRNSELSLQCYLRTEEPTRGGDGIADDMGNDIFLGGLKFVPDFDNMGNEDQWYEFDAGKGKIKIGVSYKPNFGHHLSIDDFELITVIGKGSFGKVMQVRKRDTGRIYALKTIRKQHIVTRNEITHTLAERMVLTQVHSPFIVPLKFSFQSEQKLYLVLAFVNGGELFHHLQREQRFNEERARFYSAELLLALEHLHELDVVYRDLKPENILLDYTGHIALCDFGLCKLNMKGDEKTNTFCGTPEYLAPEILNGHGYSKTIDWWTLGVLLYEMMSGLPPFYDENTDTMYQKILNDPLVFGPEISAPAQSILSGLLNRDPTKRLGVNGAEEIKKHPFFESIDWTQLKEKKIHPPFKPSVASPVDVSCFDTVFTAEQPIDSVVENSNLSETVQAQFSGFSYNSSHIVSPA

SEQ ID NO: 7232 - protein, 362 aa, Burkholderia vietnamiensis G4
MKQSSSSPPREPGRGWWRWAVIGGAAAGVVVAFGYVGGWLAPARLTPHRLVDALQTAGGGVHPGFRRNHAKGVCVTGYFEGSGAASAYSVAPFFKPVRTPVVGRFALPGGNPYAPDSSVPIRSLALKLTAPDGEQWRTGMNAMPVFPVATPKAFYEQLLATAPDPATGKPDPAKVKAFFAAHPETAAFRAWVKGAKPSASYVTESYYGLNAFYFVDAAGQRHAVRWRVVPEQTAGAADVATAADPNVLQQDVTRRIAGGAQKWKMLVTLAEPGDPVDDATKTWPAQRTTIDAGTLVLDRVEPQDSGPCRDVNYDPTVLPRGIQVSGDPLLAARSAAYADSYLRRTSEEAGVAGAARLTAEGR

SEQ ID NO: 7233 - protein, 593 aa, Glycine max
  misc_feature (156)..(156): Xaa can be any naturally occurring amino acid
  unsure (1)..(593): unsure at all Xaa locations
MASSSTFTAMSACKLSSSAAISSFPSRRRSNAVVLSRRSRAARVSAMAKELHFNKDGTAIKKLQSGVNKLADLVGVTLGPKGRNVVLESKYGSPKIVNDGVTVAKEVELEDPVENIGAKLVRQAAAKTNDLAGDGTTTSVVLAQGLIAEGVKVVAXAGANPVLITRGIEKTAKALVSELKQMSKEVEDSELADVAAVSAGNNYEVGNMIAEALSRVGRKGVVTLEEGKSADNSLYVVEGMQFDRGYISPYFVTDSEKMAVEYENCKLLLVDKKITNARDLINILEDAIRSGYPILIIAEDIEQEALATLVVNKLRGSLKIAALKAPGFGERKSQYLDDIAILTGGTVIREEVGLTLDKAGKEVLGYASKVVLTKDTTTIVGDGSTQEAVNKRVAQIRNLIEAAEQEYEKEKLNERIAKLSGGVAVIQVGAQTETELKEKKLRVEDALNATKAAVEEGIVVGGGCTLLRLASKVDAIKDSLDNDEEKVGADIVKRALSYPLKLIAKNAGVNGSVVSEKVLSSDNPRYGYNAATGKYEDLMSAGIIDPTKVVRCCLEHAASVAKTFLMSDCVVVEIKEPEAIPAGNPMDNSGYGL

SEQ ID NO: 7234 - protein, 432 aa, Bacillus cereus ATCC 10987
MDVTTDVQSTTEETKEKRYKTLFGSALGYAAEGLDMLLLSFVLVYILKEFHLSPVEGGNLTLATTIGMLIGSYLFGFIADLFGRIRTMAFTILLFSLATALIYFATDYWQLLILRFLVGMGVGGEFGIGMAIVTETWSKEMRAKATSVVALGWQFGVLVASLLPAFIVPHFGWRAVFLFGLIPALLAVYVRKSLSEPKIWEQKQRYKKELLQKEVEGSLTTTEAEQLKQMKKFPLRKLFANKKVTVTTIGLIIMSFIQNFGYYGIFTWMPTILANKYNYTLAKASGWMFISTIGMLIGIAIFGILADKIGRRQTFTIYYVGGTIYCLIYFFLFTNPTLLLWGSALLGFFANGMMGGFGAILAENYPAEARSTAENFIFGTGRGLAGFGPVIIGLLAAGGNLMGALSLIFIIYPIGLITMLLCVPETKDKVLE

SEQ ID NO: 7235 - protein, 337 aa, Pleospora herbarum
FNEASNNKFVPRAVLVDLEPGTMDAVRAGPFGQLFRPDNFVFGQSGAGNNWAKGHYTEGAELVDQVLDVVRREAEGCDCLQGFQITHSLGGGTGAGMGTLLISKIREEFPDRMMATYSVVPSPKVSDTVVEPYNATLSIHQLVENSDETFCIDNEALYDICMRTLKLNNPSYGDLNHLVSAVMSGVTTCLRFPGQLNSDLRKLAVNMVPFPRLHFFMVGFAPLTSRGAHSFRAVTVPELTQQMFDPKNMMAASDFRNGRYLTCSAYFRGKVSMKEVEDQMRNVQNKNSSYFVEWIPNNVQTALCSIPPRGLKMSSTFVGNSTSIQELFKRVGDQFTA

SEQ ID NO: 7236 - protein, 226 aa, Oryza sativa
MDSEHWISRLAAAKRFYAAQLGHADRAGMEEVDMDEEVRPEFACPYCYEDHDVVSLCAHLEEEHPFEPHAAPCPICSDKIAKDMLNHITVQHGYLFKNRRRLRRFVIPGSQALSLLSRDLREAHLQVLLGGGGHRSNNSSNTTNISADPFLSSFGLSFPTSDTEETSKPPISIPDDASVIKETPAQPWDSSIDSSLTREEREQKRKQASVRATFVQDLLLTTLFGD

SEQ ID NO: 7237 - protein, 249 aa, Polaromonas sp. JS666
MNQPTVLVTGALTGIGRATAIAFAKQGANVVVSGRREEAGQSLAAELRTLGAKAEFIKADVANEAEVRSLVEKAVSLFGQLDIAINNAGTEGALGPITEQSTENVHATFSTNVLGTLLSMKHEIRAMQAQGHGSIVNLSSIAGKVGMAGASVYVASKHAVEGLTKSAALEGAAFGVRVNAVAPGPVQTDMLDRFVGRDESVKAGFMAGVPAKRAATVDEIAETIIFVASSKAPYLTGQSIAVDGGFTIQ

SEQ ID NO: 7238 - protein, 250 aa, Triticum aestivum
  misc_feature (51)..(51): Xaa can be any naturally occurring amino acid
  unsure (1)..(250): unsure at all Xaa locations
MATLKVPSNVPALADDCDNLRKAFQGWGTNEALIISILGHRDASQRRAIRXAQLFAVRQAYHDRFKRSLEEDVASHVTGDFRKLLVPLVSSHRYEGPEVNTRLAHSEAKLLHEKIEHKAYGDDEVIRILTTRSKAQLLATFNNYNDTFGHPITKDLKADPKDEFLKTLRAVIRCFTCPDRYFEKVARLAIAGNGTDENSLTRVITTRAEVDLKLIKEAYQKRNSVPLEKAVAGDTSGDYESMLLALLGKE

SEQ ID NO: 7239 - protein, 288 aa, Polaromonas sp. JS666
MLNPALLNLPSTSYHFTEVEGLNVFYRSAGDPCAPTIVLLHGFPSSSHMFRDLIPLLADRFHVIAPDYIGFGYSDAPSAQEFEYSFRHLTEIVQSLLGKFGIEAYYLYMQDYGGPIGLRLATAHPERVLGLVFQNANVYMEGVSQAAADVFMPLWLRGDETGARQMLLAQTTRFQYTQGARNSASLNPDAWTHDQALLDRPGSADRQMALFKDYQTNVALYEEWQAYFRQRQPKSLVAWGKGDPFFGVPGAEAFKRDLTNLEVHYFDAGHFALEEDCPAIAALIKRYF

SEQ ID NO: 7240 - protein, 357 aa, Pinus sylvestris
MSSVLTDLLNLDLSDVTEKVIAEYIWIGGSGMDMRSKARSLSGPVSSVKELPKWNYDGSSTGQAQGHDSEVILYPQAIFRDPFRRGKHILVICDAYSPNGTAIPSNKRAAAAKIFNEKAVSDEETWYGLEQEYTLLQKDVKWPLGWPIGGYPGPQGPYYCGVGADKAWGRDIVDAHYKACLYSGINISGINGEVMPGQWEFQVGPSVGISAADELWCARFIMERITEKAGVVLSFDPKPIEGDWNGAGCHTNYSTKSMRKEGGFEVIKKAIEKLKLRHKEHISAYGEGNERRLTGRHETADMNTFSWGVANRGASVRVGRDTEKEGKGYFEDRRPASNMDPYIVTSMIAETTILWKP

SEQ ID NO: 7241 - protein, 226 aa, Glycine max
MDLYGSFSTPSDCLHIDDFLDFSNITTTTTDTHHHFPPPQNSPSISHDPNFFLNFPSVPSDEAVELEWLSQFVNDEATSFHNIPPPASIGSHTTPFLSNNNRNDNNNEYPKSSSSSPVLAGKSRARREGSVTGDGVRRCSHCATDKTPQWRTGPLGPKTLCNACGVRFKSGRLVPEYRPAASPTFVMTQHSNSHRKVMELRRQKELLRHQQQEQCYRHTHHDFKVC

SEQ ID NO: 7242 - protein, 459 aa, Ralstonia eutropha JMP134
MAQGFDAIIIGTGQAGPALAARLSGAGMKLAIIERARFGGTCVNTGCIPTKTLIASAYAAQLARRAAEYGVTIGGPVAVDMKRVKARKDEISGRSSNGVEQWMRGLANITVYQGHARFENAHSVQVNGELLEATQIFVNVGGRALVPPMPGLDQVPYLTNAGMMDVDFLPEHLIVIGGSYIGLEFGQMYRRFGARVTVVEKGPRLIQREDEDVSQAVREILEAEGIDIRLNANCLSARRDGDHLAVGLDCASGAPEVHGTHLLMAVGRVPNTDDLGLDKAGVETDARGYIKVDEQLRTNVPGIWALGDCNGRGAFTHTSYNDHEIVAANLLDNDPRKVSDRIAAYAMFIDPPLGRAGMTETEARQSGRKILVGTRPMSRVGRAVERGESLGFMKVVVDADTRVILGAAILGLTGDEVIHSILDVMYAGAPYTVISRAMHIHPTVSELVPTLLQELRVPG

SEQ ID NO: 7243 - protein, 327 aa, Carboxydothermus hydrogenoformans Z-2901
MILVTGGAGYIGSHIVRQLCLKNEKVLVVDNLSKGHKKAVDTRAKLIVGDFGDENLLLEIFKKYDIKAVIHMAAQSLVGESMSQPEKYFEENISKTLSLLKVMLKANVKKMVFSSTAAVYGEPEKWPITEDFPQKPTNVYGYSKLVIEQCLEWYRQIHGFNYVSLRYFNAAGADPSGDIGEDHNPETHLIPLIFKVILGEQEELTVFGTDYPTPDGTCIRDYIHVNDLAEAHILALNKLNKDESGVYNLGNQKGFSVKEIIKVAEEVTGVKVKVRYGQRRPGDPAVLVASSEKIQKELNFTPKFGDIKTIVQTAWEWHKNNPRGYDR

SEQ ID NO: 7244 - protein, 154 aa, Brassica juncea
EAGRLPPNVAAGMEELYWNYKNAVLSSGAPGADKTVISNMSVAFDRMLLGVEDPYTFNPYHKAVRQPFDYYHFVHMYISPLIDFKNSYVGNVSIFSELEDKLRQGHNVVLISNHQSEAYPAVISLLLEAHCPYIGENIKCVAGDRVITDPLCKP

SEQ ID NO: 7245 - protein, 231 aa, Acetobacter aceti
  misc_feature (208)..(208): Xaa can be any naturally occurring amino acid
  unsure (1)..(231): unsure at all Xaa locations
MSRLHPLAERHAVEKLGWLRAAVLGANDGTLSTGSLIVAVASSHATRGSILIAGLSALVAGALSMAAGEYVSVSSQADSEHADIAREKQELATDWEGEVAELAGIYQKRGLDGDLSHEVAVALMKHDALGAHARDELGLSEATAARPIQAAFASATAFSSGALLPVLAAVLTPVAWVSWGVSLTSVVVLAVLGVVGALAGGAAPLRPXLRVTFWGIVAMIVTGGIGRLFGV

SEQ ID NO: 7246 - protein, 411 aa, Aster tripolium
TILLGEWWNANPIDVENAAASCGSAPAESDAYTINGWPGVLFNTAFQFKYYIQARCWPGNTYLLRIINAALNEQFFFKIANHSLTVVGVDAAYTNPYVTDVILLGPGQTTDVLLTADQAPGLYYMAARPYVSAIGVTPNTNTTTAILAYQNATQSTTPPILPVLPALNDTPTAFTFSSNLTGLVTSPFWSPVPQSVDENMFVTMGLGLSACGANQTCGGIFAQRMSSSMNNLSFVLPTTMSLLEAHFRNISGVYTTDFPDQPPVVFDYTNVNNSFDLNLIMTPKSTSVKSVMFNATVQMVLQNTALIGVENHPMHLHGFNFYVLAQGFGNYNATLDSANFNLVNPQERNTLGVPAGGWAVIRFRANNFCVWYFHCHLDVHLTWGFATAILVENGGTPESTLPPPPADFPQC

SEQ ID NO: 7247 - protein, 279 aa, Bacillus anthracis str. 'Ames Ancestor'
MKNLQSKAVLNNGVEMPWFGLGVFKVEEGPELVEAVKSAIKAGYRSIDTAAIYGNEKAVGEGIRAGIEATGISREDLFITSKVWNADQGYEETIAAYEESLKKLELDYLDLYLVHWPVEGKYKDTWRALETLYKEKRVRAIGVSNFQVHHLQDVMKDAEIKPMINQVEYHPRLTQKEVQAFCKEQGIQMEAWSPLMQGQLLDNETLQEIAEKHGKTTAQVILRWDLQNGVITIPKSTKEHRIIANADVFNFELTKEDMEKIDALNQNHRVGPDPDNFDF

SEQ ID NO: 7248 - protein, 188 aa, Aster tripolium
MAGPGVGGHGPHGAIAMMNANGKKGPGAGFELPGQFKGKAGKNETKNGKDGKKGGGGENGKKGKGVYQFVDKYGANFSVISTDEDQIAANLVKNGPLAIGINAAWMQTYIGKVSCPYVCSKKPLDHGVLLVGYGSAGYAPSRLKEKPYWIIKNSWGPDWGEDGYYKICSGHNLCGMDTMVSAVVSTSA

SEQ ID NO: 7249 - protein, 218 aa, Arabidopsis thaliana
  misc_feature (43)..(43): Xaa can be any naturally occurring amino acid
  misc_feature (64)..(64): Xaa can be any naturally occurring amino acid
  misc_feature (85)..(85): Xaa can be any naturally occurring amino acid
  misc_feature (155)..(155): Xaa can be any naturally occurring amino acid
  misc_feature (161)..(161): Xaa can be any naturally occurring amino acid
  misc_feature (167)..(167): Xaa can be any naturally occurring amino acid
  misc_feature (173)..(173): Xaa can be any naturally occurring amino acid
  misc_feature (176)..(176): Xaa can be any naturally occurring amino acid
  misc_feature (179)..(179): Xaa can be any naturally occurring amino acid
  misc_feature (181)..(181): Xaa can be any naturally occurring amino acid
  misc_feature (184)..(184): Xaa can be any naturally occurring amino acid
  misc_feature (186)..(186): Xaa can be any naturally occurring amino acid
  misc_feature (188)..(188): Xaa can be any naturally occurring amino acid
  misc_feature (194)..(194): Xaa can be any naturally occurring amino acid
  misc_feature (201)..(201): Xaa can be any naturally occurring amino acid
  misc_feature (203)..(203): Xaa can be any naturally occurring amino acid
  unsure (1)..(218): unsure at all Xaa locations
RTRGELVAMKYIERGPKIDENVAREIINHRSLRHPNIIRFKGXEVVLTPTHLAIAMEYAAGGEXLFERICSAGRFSEDEARYFFXQQLISGVSYCHAMQICHRDLKLENTLLDGSPAPRLKICDFGYSKSSLLHSRPKSTVGTPAYIAPEVLSRXEYDGKXMADVWXCGVTLXYVXLVXAXPFXEXRXPQELQXTIQKIMXAXQPGLGRLKNSPKFQP

SEQ ID NO: 7250 - protein, 387 aa, Photobacterium profundum SS9
MNNVVIVDCIRTPMGRSKAGAFRNVRAEDLSAHLMKGLISRNPQLDPNSIEDIYWGCVQQTLEQGFNVARNASLLAGIPHTVAATTVNRLCGSSMQALHDATRAIMVGDAETCIIGGVEHMGHVPMNHGVDFHPGMSKSVAKAAGMMGLTAEMLGRMHGISRQMQDEFAARSHQRAHAATIEGRFKNEILPIEGHDENGILKLYDYDEVIRPETTVEGLSNLRPAFDPVNGTVTAGSSSALSDGASAMLVMSEHRAKELGLTIRARVKSMAVAGCDPSIMGYGPVPATQKALKRAGLSIDDIGMVELNEAFAAQSLPCAKDLGLLDKIDEKVNLNGGAIALGHPLGCSGSRISTTLINQMEHHDVQFGLATMCIGLGQGIATVFERV

SEQ ID NO: 7251 - protein, 439 aa, Aster tripolium
MKILLGVGINGGLFGSCVSSRSKVDSSTSGISSHFEIKSTNNVSKDQPTTSNSEHNLPTLTPEDELKVASRLRKFGFNDLKMATRNFRPESLLGEGGFGCVFKGWIEENGTAPVKPGTGLTVAVKTLNHDGLQGHKEWLAEVNFLGDLGNPNLVKLIGYCIEDDQRLLVYEFLPRGSLENHLFRRSLPLPWSIRMKIALGAAKGLAFLHEEAKRPVIYRDFKTSNILLDAEYNAKLSDFGLAKDGPEGDKTHISTRVMGTYGYAAPEYVMTGHLSSKSDVYSFGVVLLEMLTGRRSMDKKRPNGEHNLVEWARPHLGERRRFYRLIDPRLEGHFSIKGAQKAAQLASRCLSRDPKARPLMSEVVDCLKPLPALKDMAGPSYYLQTVQPERAGSSPDPNRTRVGSFSRNGSQHPRTLSIPNASPRHNQFLQDSPNPNGKQ

SEQ ID NO: 7252 - protein, 389 aa, Azoarcus sp. EbN1
MKALCWHGKKDVRYDTVPDPRIEDPRDAIVKVTSCAICGSDLHLYDGFMMGMESGDILGHEFMGEVVEVGAADHRLKVGDRVVVPFTICCGECEQCRRGNFSVCERSNRNKALADKTFGHSTAGLFGYTHLTGGYAGGQAEYVRVPYADVAPVKITSGLSDDQVLFLGDILPTGWQAAVQCDIQPTDTVAIWGAGPVGQFAIRSAVLLGAKQVIAIDRVPERLGMAQAGGATTINCEDESVIERLNELTGGKGPEKCIDAVGMEAHATQSLDSLYDRAKQAIMLETDRPHVLREMIYVCRPAGTLSVPGVYGGLIDKLPFGALMNKGLTLRTGQTHVNRWTADLLRRIEEGQIDPTFVVTHVAALEDGPEMYKTFRDKKDGCIKVVLKP

SEQ ID NO: 7253 - protein, 453 aa, Burkholderia sp. 383
MFGDIRRIVGLAWPVLVGQLAIIAFGVIDTAMVGRYSAVDLAALGLGSSIYISIYIGLTGILSALQPITGQLYGARRYAEIGEEVRQALWLASLLAVPGFLLLHFPEPLLRVAHTPAALHDRTVDYLRILSYGLPASLVFRIYNALTNAAGKPRLAMILQIGALLLKFPLNVWFIFGGFGVPALGGPGCGLASALINWALAVIGYTLLAKLDVFAPLAIFSRFCWPVWERQKAILKLGVPMGLSYLIEVTSYTCMALFIAQFGTTTLAGHQIAGNIGAVLYMTPLSIGVAASTLVARTLGAGRPEEARLLGRHSVIFACGIAATYGLLVFVLRPLIIGGYTPNPAVAAAAMPLVAIVACYHVFDALQVTSAFVLRAYKVAVVPTVIYAVALWGVGLSGGYALGFDVGGIAPAWLTGARGFWFANTISLMLAGAGLVLYLRRVSRAHAAVSTSA

SEQ ID NO: 7254 - protein, 77 aa, Aster tripolium
MSCCNGKCGCGSSCSCGSSCKGCGMYPDIETSNTINVIVDGVAPKKMYDDGSEGSFIAEGGQACKCGANCKCDPCNC

SEQ ID NO: 7255 - protein, 178 aa, Triticum aestivum
  misc_feature (100)..(100): Xaa can be any naturally occurring amino acid
  misc_feature (106)..(106): Xaa can be any naturally occurring amino acid
  misc_feature (116)..(116): Xaa can be any naturally occurring amino acid
  unsure (1)..(178): unsure at all Xaa locations
MAPAVMASSATTVAPFQGLKSTAGLPISRRSGSAGLSSVSNGGRIRCMQVWPIEGIKKFETLSYLPPLSTEALLKQVDYLIRSKWVPCLEFSKVGFVFRXEHNSSXPGYYDGRYWXTMWKLPMFGCTDATQVLNEVEEVKKEYPDAYVRVIGFDNMRQVQCVSFIAFRPPGCEESGKA

SEQ ID NO: 7256 - protein, 327 aa, Burkholderia sp. 383
MTASTQLSRDKLLDAYRLMRTIREFEERLHVEFATGEIPGFVHLYAGEEASAVGTILHLGLDDYVATTHRGHGHCIAKGVDVHGMMAEIYGKKTGVCHGKGGSMHIADLAMGMLGANGIVGAGGPLVCGAALAAKHKKTGGVGVCFFGDGASNQGVIFESMNLASVWRLPAIFVAENNGYAEATSSSWSVATDNIADRANGFGMPGVIVDGFDFFAVHEALGEAVERARNGGGPTLVEVKFTRYFGHFEGDAQTYRAPGEVQKLRDEKDCLKHFETRVVRAEALTTADLRAVDAQVKALIDDAVAQAKAAPVPDAADLLTDVYVSYP

SEQ ID NO: 7257 - protein, 1220 aa, Ustilago maydis 521
MSSSAETSPPRAGSYILISSSTAALDAPAPAADESARVFGSRPRLFFFLPLLAALDVATTLTLGILVLNQLAKHDEPAAHILGGPLSHDPVMTSSLPGRTDPRLDDAAWERRKIVLLVIVFSIARAFSYGIVGFSIRIRQLGVTVAAISILSTLFYVSVANLLFQARPKPGIVDKRSNSWSGVLASDAWRWPDAFRHFEPTMPILVGVQMAFTLFEWILYIAIVGVKIPPGGNPVEAKRWARDLADDPQYRRGADMHSLYLSDDGHDQDITEEVRQPLEHLDAQDGGELQEVRTQLSSPISNLSCRGKSDGSDQPLLGASSSTPRGYGSTLADPKTPQGPGSVRSVRSPVALQQHGMSRSSSALSGLYSRSPGTAELGPADRYEEVLADDDDDEDEQDGEGDEDAEGSDPDDIIDITPNRAVARKEARLRLARAALPARRASGGTLSTLNLFGGGGGSTNGSSGDAVSTRTGGGGTGGAGIFSDEAGSPLGRNAREGDVSRPALLSVATSDEASRGESLAADPSIQSSNSMTLPSSSSTRTASTRASSFKDRKFKLPKWIKRGNSRSSCERQACPPTTKSRMSAQLSRADFVLHLARASLSPPIDRECEITNRESRFVISTGLARIQNPYKLTSSTVTALFKALRSAARSVKITPLALFSSVRVLRASRALGPSTTTTFTRAISVGVATIDKLRSSTTSACARLPIATASVAANRLQQTSTHLSSFSHFSTSSAVKMPPVPKPTSTHYDMVVIGGGSGAMGVSRRAAAYGKKVCVIEEDGRLGGTCVNVGCVPKKLMWHAADMAEHLKEAPEYGFGDVVNKPKVPEFAWKYFAEKRDAYVRRLNGIYDRNLDKDGVEYLSGHGKLTGKNEVEVTMRGQDGSFNAGTYKITGDRIVIATGGRPVIPSDDKIPGASLGIDSDGFFELKEQPKRVAVVGAGYIAVELAGVFNTLGSQTHLLIRHDTFLRPFDPIISETLQDYMSRTGLNVHKQTNITKVEGSKGGPLTIHTDKGDSIEVDCLLWAIGRRPNTDNLGLETVGVQLDKGGNIVVDKYQETNVRNVFAIGDIQGKALLTPVAIAAGRKLSNRLYSNHASLKDDHMDYDNIPTVIFSHPTSGTVGLSEAQAVQKFGRENVSIHTSKFTSMYYGMLDHKAPSAFKMVVAPGDKVVGLHIVGLGADEMLQGFAVAIKMGATVKDFQDTCAIHPTSAEEVVTMIPTTKHA

SEQ ID NO: 7258 - protein, 615 aa, Magnetospirillum magnetotacticum MS-1
MCGIAGFVGDGDRDILAAMAGAIAHRGPDGEGLWIDPERAVHLAHRRLAVIDLEGGAQPMWSGDGRIGVVFNGEIYNHRALRRDLESLGHVFASDHSDTEVLIHGWRQWGRDLPGRLNGMFAFAIHDRERGSLFLARDRFGEKPLYVVERPGLFAFASEISALLRHPGVPAEADALAIRKFFAYCLFPAPHTPFKAIAKLPAGHWLELSLSGLTTERGCYWRFAIEPEETGRSETELAEELRALLDASVRDRLESDVPLGIFLSGGIDSSAMLALAARHRPAASLDGFSIGFTEASFDESAFARRMAAEVGCRHHVETCDLDAARRDLPDLLARLDEPSGDPSILPTSLLCRFARRSVTVALSGDGGDELFGGYDPLTALAASRRYRALVPGAVHPAIEALAGLLPPSDANMSLDFKIQRWLRGVGREPSMWLPGWMGALSPSEIDQVFGSRLAPEELYSEAIERWEACASPDPIDRALDYFTAFYLQDGILTKSDRASMQVALEVRAPFLDNDVADFARRLPSRFKVAGGQRKVLLKKAVRGLVPDALIDRPKKGFGIPLARWLRDMDPPTAGTPLLDDAWLRQRWERHRTKRQDCRHGLWCWLALERRFSTVN

SEQ ID NO: 7259 - protein, 484 aa, Hordeum vulgare subsp. vulgare
GKTLGIGSFGKVKIAEHIITGHKVAIKILNRRKIKSMEMEEKVKREIKILRLFMHPHIIRLYEVIDTPADIYVVMEYVKSGELFDYIVEKGRLQEEEARRFFQQIISGVEYCHRNMVVHRDLKPENLLLDSKCNVKIADFGLSNVMRDGHFLKTSCGRPNYAAPEVISGKLYAGPEVDVWSCGVILYALLCGTLPFDDENIPNLFKKIKGGIYTLPSHLSPLARDLIPRMLVVDPMKRITIREIREHSWFKARLPRYLAVPPPDTAQQVKKLDDETLNDVIKMGFDKNQLTESLQKRLQNEATVAYYLLLDNKLRTTSGYLGAEYQESMDSSFSQISPETPSSASEARQYGSPGFGLRQHFAAERKWALGLQSRAHPREIITEVLKALQELNVCWKKIGHYNMKCRWSPGFFENMMHNNNGFGVESAIIEADGLGDKSTHIVKFEIQLYKTRGDKYLLDLQRVSGPQLLFLDLCSAFLTQLRVL

SEQ ID NO: 7260 - protein, 155 aa, Aeropyrum pernix K1
MDYRFQRRLAAEILGVGESRIWISPDPELREEIEGAVTKADVRALIKRGVIKVLPEKGNAGHASKVRHLQRRKGRRRGMGRRKGVATARLDPKERWMHRIRKIRRYLRYLRDKQVIDRKTYRRLYMLAKGGTFRDLASLKRYMADRGLVPEEKIR

SEQ ID NO: 7261 - protein, 556 aa, Psychrobacter arcticus 273-4
MSQQYTIADYLFDRIAEAGASEVFGVPGDFNLTFLDNIIASDKLRWVGNTNELNAGYAADGYARERGFAAMVTTFGVGELSAINATAGSFAEYAPVLHIVGAPSTALQDSKRRIHHSLGDGVFNHFIKMVEPVTVARAQITPENAASEIDRVIRLILKKHRPGYLMLSPDVARQPIYPPTTKLVDSQEDITSQAALADFKQALIAFLPNKTTTLMADLMVHRLGLQNQLKALIADTDIPYTTLSWGKTLLDENSDRWAGTYAGVASRPVVKDAVENCECLIKIGVQYTDTTTAGFSQDIDENVVVDLHYERASIAGKNFAPIALKDALKTLHEVMTSDINIVPKQFYKEVKPHEQHGKDNEAIRQDDLWHIIADHLDHNNLVFAEQGTAYFGISDVRLPEGVTCYGQPMWGSIGYTLPASLGAAIASPSKRSVLLIGDGSALLTIQEIAVMIQERINPVIVLINNDGYTVERAIHGENQRYNDIPKCDWQAMPKAFGATEENSLMLKVATAGELKASLEKAAATTDKLVMLEVIAAKHDIPPLLADISAALKPKAD

SEQ ID NO: 7262 - protein, 429 aa, Lycopersicon esculentum
MENGTKGKLTVSSSLQIEQPLPPSKLWKIIVVASIAAGVQFGWALQLSLLTPYVQLLGIPHRFASFIWLCGPISGMIVQPVVGYYSDNCSSRFGRRRPFIAAGAALVTIAVFLIGFAADLGHASGDPLGKGSKPRAIAVFVVGFWILDVANNMLQGPCRALLADLSGGKSGKMRTANAFFSFFKAVGNILGYAAGSYSRLFKVFPFSKTKACDMYRANLKSCFFIAIFLLLSLTTLALTLVRENELPEKEELEIDEKLSGAGKSKVPFFGEIFGALKDLPRPMWILLLVTCLNWIAWFPFFLYDTDWMAKEVFGGQVGDAKLYDLGVRAGALGLLLQSVVLGFMSLGVEFLGKKIGGAKRLWGILNFVLAICLAMTILVTKMAEKSRGHDAAGTLMGPTPGVKIGALLLFAALGIPLAVTFSIPFALAS

SEQ ID NO: 7263 - protein, 338 aa, Bacillus cereus ATCC 10987
MAILVTGGAGYIGSHTCVELLNSGYEIIVVDNLSNSSVESINRVKEITGKQFKFYKEDVLNQEALDAIFEENAIEAVIHFAGFKAVGESVAIPLTYYHNNITSTLVLCEVMQKHNVKKMIFSSSATVYGIPETSPITEEFPLSATNPYGQTKLMIEQIMRDVAFADREWSIALLRYFNPFGAHESGRIGEDPNGIPNNLMPYVTQVAVGKLKELSVFGNDYPTKDGTGIRDYIHVVDLAKGHVKALEKVLNTTGVDAYNLGTGTGYSVLEMVEAFERVSGKKVPYKITERRPGDVAICFADASKAKRELGWEAKRGLEEMCADSWRWQSNNKNGYLEV

SEQ ID NO: 7264 - protein, 247 aa, Rubrobacter xylanophilus DSM 9941
MESYIAEFIGTMVLILFGDGVVAAVLLRASKAENSGWIVITFGWGMAVAMAVYAVGWVSGAHINPAVTVALAVVGQFDWAQVPGYIIAQFLGAFVGAVLVWLAYLNHWEGTADPVLKRGVFCTIPQIRNTPANFVTEVIGTAALLFGILAILGSGAQIQGGQSELFTAGLFPLLVGLLVFAIGLSLGGPTGYAINPARDLGPRVAHAVLPIPGKGDSDWSYSWIPVVAPLVGGIIGAVLYTVLGFGD

SEQ ID NO: 7265 - protein, 308 aa, Zea mays
MDFDEHDDGDEEMTPMPVSSSYDAPMQPGLGLGGGGGETPKHGDSAGAGSFRTPPAGGFGGGGAGAGAGAGGGGATRYRECLKNHAVGIGGHAVDGCGEFMAAGEEGSIDALRCAACGCHRNFHRKESDNSPAGGGGVAPPDPAAALSPAAITAYGAAVAAHHHQFSPYYRTPAGYFLHQQLAAAAGHMQRPLALPSTSHSLGREEGDDVSGLIGPMVVAPMMGMSLGPGGGPSGGSSGGSGSGKKRFRTKFTQEQKDRMLAFAERLGWRIQKHDEAAVQQFCEEVCVKRHVLKVWMHNNKHTLGKKP

SEQ ID NO: 7266 - protein, 434 aa, Sulfolobus solfataricus P2
MSWNNFLFLKYLIKAMEELLTSNLFVQQVKKLYKVGELLGLDIDTLEALSQPERVIQVKIQIRGSDGKLRTFVGWRSQHNSALGPYKGGVRYSPNVTQEEVIALSMIMTWKNSLLLLPYGGGKGGIRVDPKKLTLKELEDLSRKYIQLIHNYLGSNVDIPAPDINTNPQTMAWFLDEYIKITGEVDFAVFTGKPYELGGIGVRLYSTGLGVATIAREAANKFIGGIEGSRVIIQGFGNVGSFTAKFLSEMGAKIIGVSDIGGGVINENGIDVNKALEVVQRTGSVVNYPEGKKVTNEELLISDCDILIPAAVENVINKFNAPKVKAKLIVEGANGPLTADADDVIKQSGIVVIPDILANAGGVVGSYVEWANNKSGGIISDEEAKKLIIDRMTNAFNTLYDFHKRKFADQDLRTVAMALAVDRVVKAMKARGLL

SEQ ID NO: 7267 - protein, 137 aa, Oryza sativa (japonica cultivar-group)
MATPAPVVTHGDHHHDTAVPVEKIEGDHAKTEATLPRAPEEEKKGFLDKIKEKLPGGHKKPEDATAVPPPAASPAAPATTPAPAHPPPATEEVSSPDGKEKKGILGKIMEKLPGYHKGSGEEDKTAAAATGEHKSSA

SEQ ID NO: 7268 - protein, 175 aa, Triticum aestivum
MAPTVMASSATSVAPFQGLKSTAALPVSRRSNGASLGSVSNGGRIRCMQVWPIEGIKKFETLSYLPPLSTEALLKQVDYLIRSKWVPCLEFSKVGFIFREHNTSPGYYDGRYWTMWKLPMFGCTDATQVINEVEEVKKEYPDAYVRIIGFDNMRQVQCVSFIAFKPPGCEESGKA

SEQ ID NO: 7269 - protein, 382 aa, Thermoplasma acidophilum DSM 1728
MRKEIRDETLEVSRRIYEYAELGSQEYRSSRLIADHLSRHGFNVEMPYGGMETAFRATCYRGGPSVGVLAEYDALPNGHSCGHNLIAAWAFGTAVTLCEDFGISVTVFGTPSEEGIGPYAGSKAILVEKNLIRDVDFVIGMHPDDRWAVGSVSLADLTIEAEFSGKSSHLLGPDYGINALTPAIETYIALNNLRSSISDLKRPIIGMIIREGGKASNVIPDRSVMEIDLRSSKRRYLEDLAARAKDIIGNISRMHGCDFRIRDVTPVYEEYISNETIDNTLEEELRSHGIDPVNVHRTNEAAMGSTDEANISHIIPTGHIDVKIVQPSIPAHTDEFRMAADPDKAADPLMTAIEATASAAAKITRDRNLMKKMKNEFKEAIR

SEQ ID NO: 7270 - protein, 332 aa, Bacillus cereus ATCC 14579
MLKTTESKGNEITKEQARWMYEKMLEIRKFEDKVHELFAQGVLPGFVHLYAGEEAVAVGVCAHLTDSDSITSTHRGHGHCIAKGCDLNGMMAELFGKATGLCKGKGGSMHIADLDKGMLGANGIVGGGFPLACGSALTAKYKGTKDVSVCFFGDGANNEGTFHEGVNLAAIWKLPVIFIAENNGYGEATTFEYASSCDSIADRAKAYNIPGVQVDGKDLLAVYKAAAEAVERARNGDGPTIIECMTYRNYGHFEGEAQTYKTSEEKEEHLNEKDAIVNFRKHLIHEALLTESELVDMEKPVDEAVQRSIEFSENSPYPDDEELLKDVYVSYK

SEQ ID NO: 7271 - protein, 420 aa, Debaryomyces hansenii CBS767
MSKYFSSIKELPPDPLFGLKARYTADDRSDKVDLGIGAYRDNNGKPWILPAVRKAEVKLVNSEEYNHEYLSISGYQPFLTESAKVILGNNSAAIKESRVTSQQSLSGTGALHLAGAFLKEFFTTESKKAPTVYLSNPTWANHNQIFTSLGLQVEKYPYWDNDTKSLNLKGFLSTIQEAPKNSIFVLHACAHNPTGLDATKEQWEEILEALAKNEHLALYDSAYQGFASGNLDNDGFAVRLAVDSKKLKTPIVICQSFAKNCGMYGERVGAIHVIPAENDKSLNNAIKSQLNKLTRSEISNPPAYGAKVVATILTDSELRQQWEDDLVTMSSRINKMRTRLRDLLTNQYSTPGNWDHIVSQSGMFSFTGLTPDMVSRLEKNHGIYLVSSGRASVAGLNDGNVEQVAKAIDEVVRFYSKSKL

SEQ ID NO: 7272 - protein, 153 aa, Zea mays
  misc_feature (33)..(33): Xaa can be any naturally occurring amino acid
  misc_feature (108)..(108): Xaa can be any naturally occurring amino acid
  misc_feature (131)..(131): Xaa can be any naturally occurring amino acid
  misc_feature (140)..(140): Xaa can be any naturally occurring amino acid
  unsure (1)..(153): unsure at all Xaa locations
MGASVTVENLNPKGLKCEYAVRGESGIHAHRLXQQLQTQPGALPFEEILYCDIGNPQSLGQQPVTFFRGGLALCEYPCLLGKEETKSLCSAEAISRAKQILATIAGRXTGAYRHRQGIKGLRDAIAAGICXREGFPANAXDIFITDGARAGGH

SEQ ID NO: 7273 - protein, 333 aa, Saccharophagus degradans 2-40
MAVQEIEISRFEEEESIIATGITFDVESAKEPESPTRKRATATRASAESEDAYQKNLDATQLYLNEIGFSPLLSAEEEVFFARKALKGCEASRKRMIESNLRLVVKIARRYVNRGLALLDLIEEGNLGLIRAVEKFDPERGFRFSTYATWWIRQTIERAIMNQTRTIRLPIHVVKELNVYLRAARELSQKLDHEPSPEEIATLLEKPLEDVERMLALNERVTSMDVPIGPSSEKTVVDTVADQDVSDPVELLQESDLSQSLDGWLDELSEKQREVVARRFGLRGHETSTLEEVGKEIGLTRERVRQIQVEALRRLRDILEKQGLDAASLFGAM

SEQ ID NO: 7274 - protein, 494 aa, Photobacterium profundum SS9
MANYFNTLNLRQQLDQLGRCRFMDRNEFATEADYLKGKKVVIVGCGAQGLNQGLNMRDSGLDVSYALRQAAIDEQRQSYKNAKENGFDVGSYEQLIPIADLVVNLTPDKQHSNVVETVMPLMKEGAALGYSHGFNIVEEGMQIRKDITVVMVAPKCPGTEVREEYKRGFGVPTLIAVHPENDPKGDGQEIAKAWAAATGGHRAGVLESSFVAEVKSDLMGEQTILCGMLQAGSIVCYEKMIADGIDAGYAGKLLQYGWETITEALKFGGITHMMDRLSNPAKVKAFELSEELKDLMRPLYNKHMDNIITGHFSSTMMADWANDDVNLLGWREETGETAFENYPVTDVEIPEQEYFDNGILMVAMVRAGVELAFEAMTASGIVEESAYYESLHELPLIANTVARKRLYEMNVVISDTAEYGNYLFANVATPLLREKFMTDVDTDVIGRGLGEVSNQVSNETLIVVNETLRSHPVELVGQELRGYMTDMKRIAVGD

SEQ ID NO: 7275 - protein, 412 aa, Oryza sativa (japonica cultivar-group)
MNALAATSRNFRQAARLLGLDSKLEKSLLIPFREIKVECTIPKDDGTLASFIGFRVQHDNARGPMKGGIRYHPEVDPDEVNALAQLMTWKTAVAAIPYGGAKGGIGCAPGELSTSELERLTRVFTQKIHDLIGAHTDVPAPDMGTNSQTMAWILDEYSKFHGHSPAVVTGKPIVSLGGSLGRDAATGRGVMYATEALLAEHGKSISGSTFVIQGFGNVGSWAARIIHEKGGKVIALGDVTGSIRNKNGLDIPALMKHRNEGGALKDFHDAEVMDSSELLVHECDVLIPCALGGVLNRENAPDVKAKFIIEAANHPTDPEADEILAKKGVTILPDIYANSGGVIVSYFEWVQNIQGFMWDEEKVNMELHKYMNNSFQHIKAMCKSHDCNLRMGAFTLGVNRVARATLLRGWEA

SEQ ID NO: 7276 - protein, 902 aa, Zea mays
  misc_feature (170)..(170): Xaa can be any naturally occurring amino acid
  unsure (1)..(902): unsure at all Xaa locations
MGALQVMLLRLVLLAASAATTAVTVTAAPPPSEVAVGALFTYDSTIGRAARLAIELAVDDVNADRTVLAGTRLNLLAQDTNCSGFLGAVEALQLMERNVVAVIGPQSSGIGHVISHVVNELHVPLLSFAATDPTLSASEYPYFIRTTISDYFQMNAVASIVDYYQWKEVXAIFVDDDYGRGGVSALGDALAAKRARISYKAAIPPNSNTDVINDVLFKANMMESRVMVVHVNPDTGTRIFSVANKLQMMATGYVWIVTDWLAAVLDSSTSRDRKEMSHIQGLIVLRQHTPESVAKNKFISKWNNAARNRSITSGLNSYGFYAYDSVWAIARGVDQFLNNGQQINFSTDPVLHDTNGSSLHLSTLKIFDGGEQMLQQLLLTNFTGLTGRVQFNSDRNLVHPAYDILNIGGSGSRLIGYWSNYSGLSVAAPEILYQKPPDTSSIAQRLHNVVWPGDSTTTPKGWVFPNNGQPLRVGVPIKPSFKELVAAGKGPDNVTGYCIDIFNAAIRLLPYPVPCQFIAIGDGRKNPNYDDIISMVAANSLDAAVGDFAIVRNRTKIAEFTQPYIESGLVIVAPVKQATSSAWAFLKPFTLEMWFSFSTMFFSHTCFPYVKGNILTANSLQDRTLYTASLTSILTVQQLATGITGIDSLISSGLPIGYQAGKFTRNYLIEELNIPESRLVPLNTIQEYADALKRGPKDGGVVAIVDEMPYVEIFLSYHCNFRIVGQEFTKEGWGFAFKRDFPLAADLSTAILQLSESGQLQRIHDEWFTRPSCSSDDSEVGATRLGLGSFWGLFLVCALICLLALLVFFIRICWQYNKYSNSEAAGEPSAAAAAAAAVDAAAAAADAVERQRRPSRLGSFKDIIQFVDKKEEEIKKTMKRRVSEKDNNQAAGSSEAHSVASA

SEQ ID NO: 7277 - protein, 120 aa, Aeropyrum pernix K1
MEGVPEVPKFKQVKNLKIPGVEPPEKVCSDPNCPWHGTLRVRGVLLEGVVAKARARRMVVVQHVYLYYDKKYNRYERRSKKIHAHLPDCISVKEGDVVVIGETMPISKTVKFTVLGVKRR

SEQ ID NO: 7278 - protein, 450 aa, Hordeum vulgare subsp. vulgare
MREIISIHIGQAGIQVGNACWELYCLEHGINQDGTMPSDTTVGVAHDAFNTFFSETGAGKHVPRAIFVDLEPTVIDEVRTGAYRQLFHPEQLISGKEDAANNFARGHYTVGKEIVDLCLDRVRKLADNCTGLQGFLVFNAVGGGTGSGLGSLLLERLSVDYGKKSKLGFTIYPSPQVSTAVVEPYNSVLSTHSLLEHTDVAVLLDNEAIYDICRRSLDIERPTYTNLNRLISQIISSLTTSLRFDGAINVDVTEFQTNLVPYPRIHFMLSSYAPVISAEKAYHEQLSVPEITNAVFEPSSMMAKCDPRHGKYMACCLMYRGDVVPKDVNAAVATIKTKRTVQFVDWCPTGFKCGINYQPPSVVPGGDLAKVQRAVCMISNNTAVAEVFSRIDHKFDLMYAKRAFVHWYVGEGMEEGEFSEAREDLAALEKDYEEVGAEGADDEGDEGDDY

SEQ ID NO: 7279 - protein, 417 aa, Pseudomonas aeruginosa UCBPP-PA14
MLFDGYDMVIYGSVVPRLMQEWQLSPVQAGTLGSCALFGMLFGGTLLAPLADRFGRRRLVIATTLLASLAAFLTGHARDPLELGAGRFFTGLALGALVPSAINLISEFAPAGRRSTLVTVMSAFYSVGAVLSALLAIAMIPAWGWQSVFYVAVLPVLAVPLMLRWLPESAAFLELKGRRAELDALLRKVDPDYRPGAERANAVAAEAPSGRVAQLFEGRQAVGTLLLWVAFAMCMLMSYGLNTWLPKLMAGGGYALGSSLAFLVTLNVGATLGALFGGWLADRLGAGRTLVLFFALAAASLAALGLGPGPWLLNGLLVVAGATTIGTLAVIHAYAAQFYPAWVRSTGVGWAAGVGRLGAIAGPMLGGSLLALELPFQQNFLAFAAPGVIGALAIACIHLRPRVPAEASVDATAKKPL

SEQ ID NO: 7280 - protein, 190 aa, Dunaliella salina
MAALIAKTCPAVATPISRGSTKVQASLKPAVTRPAPKAQAPAVRTNQMMVWRPVNNKQFETFSYLPPLTADQIARQVDYIVGNGWIPCLEFSEESYAYVANTNTARFGPVSNNYYDNRYWTMWKLPMFGCTDPAQVLMEIQKCSRAFPEAYQRLVAFDNKKQVQVISFLVQRPKNSTDYCPIDQRSVGGY

SEQ ID NO: 7281 - protein, 175 aa, Triticum aestivum
MAPTVMASSATSVAPFQGLKSTAGLPVSRRSNSAGLGSVSNGGRISCMQVWPIEGIKKFETLSYLPPLTVEDLLKQIEYLLRSKWVPCLEFSKVGFVYRENHRSPGYYDGRYWTMWKLPMFGCTDATQVLKELEEAKKAYPDAFVRIIGFDNVRQVQLISFIAYKPPGCEESGGN

SEQ ID NO: 7282 - protein, 918 aa, Escherichia coli K12
MTNYSLRARMMILILAPTVLIGLLLSIFFVVHRYNDLQRQLEDAGASIIEPLAVSTEYGMSLQNRESIGQLISVLHRRHSDIVRAISVYDENNRLFVTSNFHLDPSSMQLGSNVPFPRQLTVTRDGDIMILRTPIISESYSPDESPSSDAKNSQNMLGYIALELDLKSVRLQQYKEIFISSVMMLFCIGIALIFGWRLMRDVTGPIRNMVNTVDRIRRGQLDSRVEGFMLGELDMLKNGINSMAMSLAAYHEEMQHNIDQATSDLRETLEQMEIQNVELDLAKKRAQEAARIKSEFLANMSHELRTPLNGVIGFTRLTLKTELTPTQRDHLNTIERSANNLLAIINDVLDFSKLEAGKLILESIPFPLRSTLDEVVTLLAHSSHDKGLELTLNIKSDVPDNVIGDPLRLQQIITNLVGNAIKFTENGNIDILVEKRALSNTKVQIEVQIRDTGIGIPERDQSRLFQAFRQADASISRRHGGTGLGLVITQKLVNEMGGDISFHSQPNRGSTFWFHINLDLNPNIIIEGPSTQCLAGKRLAYVEPNSAAAQCTLDILSETPLEVVYSPTFSALPPAHYDMMLLGIAVTFREPLTMQHERLAKAVSMTDFLMLALPCHAQVNAEKLKQDGIGACLLKPLTPTRLLPALTEFCHHKQNTLLPVTDESKLAMTVMAVDDNPANLKLIGALLEDMVQHVELCDSGHQAVERAKQMPFDLILMDIQMPDMDGIRACELIHQLPHQQQTPVIAVTAHAMAGQKEKLLGAGMSDYLAKPIEEERLHNLLLRYKPGSGISSRVVTPEVNEIVVNPNATLDWQLALRQAAGKTDLARDMLQMLLDFLPEVRNKVEEQLVGENPEGLVDLIHKLHGSCGYSGVPRMKNLCQLIEQQLRSGTKEEDLEPELLELLDEMDNVAREASKILG

SEQ ID NO: 7283 - protein, 390 aa, Arabidopsis thaliana
MAYPGSPILMKLLVFIFLSTFVVTNVSSETKCREFKSIISFGDSIADTGNLLGLSDPKDLPHMAFPPYGENFFHHPTGRFSNGRLIIDFIAEFLGLPLVPPFYGSHNANFEKGVNFAVGGATALERSFLEDRGIHFPYTNVSLGVQLNSFKESLPSICGSPSDCRDMIENALILMGEIGGNDYNYAFFVDKGIEEIKELMPLVITTISSAITELIGMGGRTFLVPGEFPVGCSVLYLTSHQTSNMEEYDPLTGCLKWLNKFGENHGEQLRAELNRLQKLYPHVNIIYADYYNALFHLYQEPAKFGFMNRPLSACCGAGGPYNYTVGRKCGTDIVESCDDPSKYVAWDGVHMTEAAYRLMAEGILNGPYAIPPFDWSCRSSGVKNSGSSDT

SEQ ID NO: 7284 - protein, 298 aa, Methanothermobacter thermautotrophicus str. Delta H
MRFDAVGLGALNMDQLHMVERIAGPDEETFVRGLVESCGGSAANTMIGLSRLGLRTAHIGKVADDREGGLLRSNLSSEGVTDFTVVADTGRSGRVMGFVDPDGNRALYVDPGVNDTLRVDEVADEALNTELLHLTSFAGDGINVQVEVIEALDESVTVSLDPGHIYASRGVSELSDILERTDILLTNQRELELMTGSADPEEAASLLGIGVVVVKMGARGVRAWDGESVMVDALSTECVDTTGAGDAFNAGFIYAWLEGFGLEVSCRFGNYIASRCIGGYGATESLPGTGPGCPQEVR

SEQ ID NO: 7285 - protein, 90 aa, Bacteroides vulgatus
MNIKPLADRVLILPAPAEEKTIGGIIIPDTAKEKPLQGEVVAIGNGTKDEEMVLHVGDQVLYGKYSGTELEHDGKKYLIMRQSDVLAVLG

SEQ ID NO: 7286 - protein, 545 aa, Bacteroides vulgatus
MAKDIKFNIDARDELKKGVDELANAVKVTLGPKGRNVIIEKKFGAPHITKDGVTVAKEVELADAFQNTGAQLVKSVASKTGDDAGDGTTTATVLAQSIVGVGLKNVTAGANPMDLKRGIDKAVAKVVESIKSQAEMVGDNYDKIEQVAAVSANNDPTIGKLIADAMRKVSKDGVITIEEAKGTDTTIGVVEGMQFDRGYLSAYFVTDTEKMECVMEHPYILIYDKKISNLKDFLPILEPAVQSGRPLLVIAEDVDSEALTTLVVNRLRSQLKICAVKAPGFGDRRKAMLEDIAVLTGGIVISEEKGLKLEQATLEMLGTCDKVTVSKDNTTIVNGAGAKENIQERINQIKAEIKNTTSDYDKEKLQERLAKLSGGVAVLYVGAASEVEMKEKKDRVDDALCATRAAIEEGIVPGGGVAYIRASEALEGLKGDNEDETTGIEIIKRAIEEPLRQIVANAGKEGAVVVQKVREGKGDFGYNARTDVYENLHAAGVVDPAKVTRVALENAASIAGMFLTTECVIVEKKEDKPEMPMGAPGMGGMGGMM

SEQ ID NO: 7287 - protein, 332 aa, Sulfolobus solfataricus P2
MDKTVLDASLEPLKGKTIAVIGYGNQGRVQANIMRENGLNVIIGNVKDRYYDLAIKEGFEVYDIGEAVKKADVAFLLIPDEIMKEIYEKKIAPILEGKKEFVLDFASGYNVAFGLIRPPKNVDTVMVAPRMVGEGIMDLHKQGKGYPVLLGVKQDASGKAWDYAKAIAKGIGAIPGGIAVISSFEEEALLDLMSEHTWVPILFGAIKACFDVAVKEYGVSPEAALLEFYASGELVEIARLIAEEGIFNQMVHHSTTSQYGTLTRMFKYYDLVKEIVKDEAKYIWDGSFAKEWTLEQQAGYPVFYRLWELAVQSEMAKAEKELYKILRRKVSD

SEQ ID NO: 7288 - protein, 716 aa, Oryza sativa (japonica cultivar-group)
MASVDPSRSFVRDVKRVIIKVGTAVVSRQDGRLALGRVGALCEQVKELNSLGYEVILVTSGAVGVGRQRLRYRKLVNSSFADLQKPQMELDGKACAAVGQSGLMALYDMLFNQLDVSSSQLLVTDSDFENPKFREQLTETVESLLDLKVIPIFNENDAISTRKAPYEDSSGIFWDNDSLAGLLALELKADLLILLSDVDGLYSGPPSEPSSKIIHTYIKEKHQQEITFGDKSRVGRGGMTAKVKAAVLASNSGTPVVITSGFENRSILKVLHGEKIGTLFHKNANLWESSKDVSTREMAVAARDCSRHLQNLSSEERKKILLDVADALEANEDLIRSENEADVAAAQVAGYEKPLVARLTIKPGKIASLAKSIRTLANMEDPINQILKKTEVADDLVLEKTSCPLGVLLIVFESRPDALVQIASLAIRSGNGLLLKGGKEAIRSNTILHKVITDAIPRNVGEKLIGLVTTRDEIADLLKLDDVIDLVIPRGSNKLVSQIKASTKIPVLGHADGICHVYIDKSADMDMAKHIVMDAKIDYPAACNAMETLLVHKDLMKSPGLDDILVALKTEGVNIYGGPIAHKALGFPKAVSFHHEYSSMACTVEFVDDVQSAIDHIHRYGSAHTDCIVTTDDKVAETFLRRVDSAAVFHNASTRFSDGARFGLGAEVGISTGRIHARGPVGVEGLLTTRWILRGRGQVVNGDKDVVYTHKSLPLQ

SEQ ID NO: 7289 - protein, 227 aa, Haemophilus influenzae 86-028NP
MELVFIRHGFSEWNAKNLFTGWRDVNLTERGVEEAKAAGKKLLDKGYEFDIAFTSVLTRAIKTCNIVLEESHQLWIPQVKNWRLNERHYGALQGLDKKATAEQYGDEQVHIWRRSYDISPPDLDPQDPNSAHNDRRYANIPSDVVPNAENLKLTLERALPFWEDQIAPAMLSGKRVLVVAHGNSLRALAKHIIGISDAEIMDFEIPTGQPLVLKLDDKLNYVEHYYL

SEQ ID NO: 7290 - protein, 605 aa, Prochlorococcus marinus str. MIT 9313
MVVSAMFQVPLMAQIDLTRRTKIVATIGPATESAERIRELVEVGATTFRLNFSHGDHDEHAKRISTIRQVSDELGMHIGILQDLQGPKIRLGRFDKGPITLANGDSFALTSKQVQCNQSVATVTYDKLADEVTTGSRILLDDGRVEMKVLKIDQSEQTLHCIVTVGGVLSNNKGVNFPDVQLSVRALTEKDRQDLAFGLQQGVDWVALSFVRNPSDMKEIRKLIRDHGHSTPVIAKIEKFEAIDQIDSILPLCDGVMVARGDLGVEMPAEEVPLLQKDLIRKANSLGIPIITATQMLDSMASSPRPTRAEVSDVANAILDGTDAVMLSNETAVGDYPVEAVQTMATIARRIERDYPQRPIETYLASTISNAISSAVSSIASHLNAAAIVPLTESGATAHNVSKFRPAAPILAVTNKLAVARKLQLAWGVTPLLVPTQKSTTATFSDAIAVAQELGLLKEGDLTIQTAGTLAGVSGSTDLVKVGIVSAVLGQGIGIGNGTVSGKVRFAFSPNDSTKIEPGEILVIHETSDDYLDAIRKSAGVITEQEGEEYHAEMISKRLGIPFIIGIAHATRNLLEGEVVTMQLSNGKVHRGTGGKLPMKLDSMD

SEQ ID NO: 7291 - protein, 336 aa, Vibrio fischeri ES114
MKVLVTGGMGYIGSHTCIQMIEAGIEPIILDNLGNSKVAVLDCIEALTHVRPVFYQGDIRDEAFLDSIFAEHSISSVIHFAGLKAVGESVAKPLEYYDNNVNGSLVLARSMRKANVKSIVFSSSATVYGDPAIVPITESSPTGATTNPYGRSKYMVEECFSDLFDAENDWSITLLRYFNPVGAHPSGTMGEDPQGIPNNLMPFIAQVAVGRRESLSVFGNDYPTPDGTGVRDYIHVMDLADGHIAALKAVGEKSGLHIYNLGTGKGSSVLEMVEAFSQASGKSVPYTLCPRRAGDIAECWASTEKAEKELGWKATRNVMEMSADTWRWQSNNPEGY

SEQ ID NO: 7292 - protein, 485 aa, Thermoplasma acidophilum DSM 1728
MENGVRYSDLIERLDMSRVTRFYWLLTILATIGGFLFGYDTSNIGSALPLLERIYPGISGFVEGYLVAGASLGAAVGAIIAAGLTDRYGRKYLLIADAAIYAAGALLSAFTVDLVMLLLSRTLIGIAVGADSGIATAYIAEYAPKARRGSLGILQQWMITIGILAAYLIGMATLFFAPGLAYAVGWRIMLGVAAIPAIIGLAFRFMMPESPRWLLVNGKYKEASASLKRLGLNMSEEDLKSVKLSQPHKITPGVKRALLIVGLFFVFQQITGINIPFYYGPVVLENLHIVGKSTSLVYSIYYSIAASAILAIINVAATYIGFRYIDSVGRRKLALMGYAGMTFFGILGGILLYLKLDIGLFIAFAGFIIFFAFGVGGTGWMIQGEYFPTSMRGLYASLGAFIDWIANFAIIELFPVMDSAITIKNVEFVFGVLSLIALILFYYIMPETKGLSVEQIDTLFENNSLGQMKHASISMKKESVPADPK

SEQ ID NO: 7293 - protein, 813 aa, Arabidopsis thaliana
  misc_feature (222)..(222): Xaa can be any naturally occurring amino acid
  misc_feature (238)..(238): Xaa can be any naturally occurring amino acid
  misc_feature (394)..(394): Xaa can be any naturally occurring amino acid
  unsure (1)..(813): unsure at all Xaa locations
MANAERVITRVHSQRERLDATLVAQKNEVFALLSRVEAKGKGILQHHQIIAPTRPPTRPRTRGLKGGAFFEFLRSAQEAIVLPPFVALAVRPRPGVWEYVRVNLHDLVVEELQASEYLQFKEELVDGIKNGNFTLELDFEPFNAAFPRPTLNKYIGDGVEFLNRHLSAKLFHDKESLHPLLKFLRLHSHEGKTLMLNNRIQNLNTLQHNLRKAEEYLMELKXPETLYSEFEHKFQEIXLERGWGDTAERVLNMIRLLLDLLEAPDPCTLENFLGRIPMVFNVVILSPHGYFAQDNVLGYPDTGGQVVYILDQVRALETEMLQRIKQQGLNITPRILIITRLLPDAAGTTCGQRLEKVYGSQYCDILRVPFRTEKGIVRKWISRFEVWPYLETFXEDVAAEISKELQGKPDLIIGNYSDGNLVASLLAHKLGVTQCTIAHALEKTKYPDSDIYWKKLDEKYHFSCQFTADLIAMNHTDFIITSTFQEIAGSKDTVGQYESHRSFTLPGLYRVVHGIDVFDPKFNIVSPGADMSIYFAYTEEKRRLTAFHLEIEELLYSDVENEEHLCVLKDKKKPIIFTMARLDRVKNLSGLVEWYGKNTRLRELVNLVVVGGDRRKESQDNEEKAEMKKMYELIEEYKLNGQFRWISSQMNRVRNGELYRYICDTKGAFVQPALYEAFGLTVVEAMTCGLPTFATCNGGPAEIIVHGKSGFHIDPYHGDKAAESLADFFTKCKHDPSHWDQISLGGLERIQEKYTWQIYSQRLLTLTGVYGFWKHVSNLDRLESRRYLEMFYALKYRPLVYTLSSYHTLLDPS

SEQ ID NO: 7294 - protein, 465 aa, Comamonas sp. DJ-12
MTSTPINQNTNPTVANVQTVLNENPFSRYQWVIFGLCFLIVLLDGFDTAAIGFIAPSLLGEWGLDKSHLGPVLSAALFGLAFGALGAGPLADRFGRKTVLIIAAVVMGVASIVSGTVHDLNGLTIWRFITGLGLGAAMPNAITLMNEYCPDSKRSFITNCMFCGFPVGSALGGFIAAWMIPHFGWRSLLIVGGVVPLILAAIMIVMLPESVRFMVLKNYSADRVRKIMVRIAASTRNATRFVLDDNAQRAAQVQQGPQGLRLVFSQKYLVGTLALWVTYFMGLVIVYGLVNWMPVLFKDAGVPPSQAAVIAALFQLGGVGAIFFGLLMDRWNANLIIAVGYFLTSIAVAMIGQVLGGGVGMLVASVFIAGLVINAAQSSMQALAAEYYPTECRASGVSWMLGIGRFGGIAGSFLVAELSRRHLELPQVFMVVAIPGVIAALALLIKNRYAGGAPRKSMAGLGGAH

SEQ ID NO: 7295 - protein, 543 aa, Saccharophagus degradans 2-40
MTRFIFVTGGVVSSLGKGIASASLAAVLEARGLKVTILKLDPYINVDPGTMSPFQHGEVFVTDDGAETDLDLGHYERFIRTRMTKRNNFTTGRVYETVLRKERRGDYLGGTVQVIPHITDEIKRRILAGGDGVDIALVEIGGTVGDIESQPFLEAVRQLKVELGNQRALLMHLTLVPYIATAGETKTKPTQHSVKELRSIGLQPDILLCRSEKEIDVDSRRKISLFTNVEERAVVPLPDAKSIYLIPRLLQSYNLDQIVLDKFGLEAAETDLAEWDEVVRREQNPEHAVTIAMVGKYMDLLDAYKSLNEALLHAGLHTLTKVKINYINAEDVETQGVSILEDADAILVPGGFGERGLEGKLMAVRYARENKVPYLGICLGMQTAVIEFARNVLKLDGANSTEFDRKSPFPVIGLITEWINEEGKVETRDESSDLGGTMRLGAQECHLEENSRIREIYGKANIIERHRHRFEVNNRFLDQLRQGGLRIGGWSSDDTLVEVVEVPDHPWFVACQFHPEFTSTPRDGHPLFTSYIQAAVEQNERAK

SEQ ID NO: 7296 - protein, 287 aa, Triticum aestivum
MTTVAIGILAMACLVAVARGGNFFQDSEMTWGDGRGKVVDGGRGLDLTLDKTSGSGFQSKTEYLFGKIDMQIKLVPGNSAGTVTTFYLSSQGTAHDEIDFEFLGNVTGEPYTLHTNVFAKGQGQREQQFRLWFDPTKAFHTYSIIWNPQHVIFAVDGTAIRDFKNHEARGVSFPKSQPMRLYASLWNADDWATQGGRVKTDWSKAPFVASFRNFNADACVMSGGAQRCPAGTMEASAAGGSGSWWNQELSGMGYRRMRWVQRKFMIYNYCTDPKRVAQGVPAECKLR

SEQ ID NO: 7297 - protein, 599 aa, Wolbachia endosymbiont of Drosophila melanogaster
MDKSAYEIIEHEYDVVVVGAGGAGLRATLGMAATNFSVACISKIFPTRSHTVAAQGGISAALGNIGEDDWRWHAYDTIKGSDWLGDQDAIEYMCKNAAKAVIELENFGVPFSRTEDGKIYQRSFGGMTTHFGKGKSAQRTCAAADKTGHAILHTLYQQCLKFNAEFFVEYFVIDLIMDSETCCGVLAWSLCDGTLHRFRAHRVVLATGGYGRVYFSATSAHTCTGDGNGMVVRAGLPLEDMEFVQFHPTGIYGSGCLMTEGCRGEGGYLVNSQGEKFMERYAPKAKDLASRDVVSRAITIEIREGRGVGPKKDHMYLTIAHLDPEVIKLRLPGISETARTFAGVDVTKDPIPVIPTVHYNMGGIPTNYYGEVITLKQGKEEVVDGLFAIGEAACVSVHGANRLGSNSLLDLVVFGRAAALRAKEKLKSGTPHKKLHSDCTDWIVDRFNKMRFASGGLKVAKIRGEMQNTMQKYASVFRVAEVLEEGKKAIKKVAKMMPDISLEDRSMMWNSDLVEALELANMIPQAVITMECAANREESRGAHAREDFPERDDKNWMKHTIAWLEEKKGQINVKIDYKKVAEKTLSGEIDFIAPEKRVY

SEQ ID NO: 7298 - protein, 427 aa, Pseudomonas syringae pv. tomato str. DC3000
MSRSETLFANAQKHIPGGVNSPVRAFKSVGGTPLFFKHAAGAYVTDEDDKRYVDYVGSWGPMILGHSHPDVLDAVRNQLEHGLSYGAPTAMETEMADLVCELVPSMEMVRMVSSGTEATMSAIRLARGFTGRDSIIKFEGCYHGHSDSLLVKAGSGALTLGVPSSPGVPAAFAKHTLTVPFNDLNAVRDLLAEVGQEVACIIVEPVAGNMNCVPPAPGYLQGLRALCDEHGVVLIFDEVMTGFRVALGGAQAYYDVKPDLSTFGKIIGGGMPVGCFGGKREIMSHIAPLGPVYQAGTLSGNPLAMAAGLTTLRLISRPGFHDELSDYTRRLLEGLQQRADAAGIAFVTTQAGGMFGLYFSDASEIVTFEDVMTSDAERFKRFFHLMLEGGVYLAPSAFEAGFTSIAHGDAELKLTLDAAEKAFAALK

SEQ ID NO: 7299 - protein, 412 aa, Burkholderia sp. 383
MKPIQKSNKLLNVCYDIRGPVLEHAKRLEEEGHRIIKLNIGNLAPFGFDAPDEIIQDMIRNLPTSSGYSDSKGVFSARKAVMHYTQEKGVVGVGLDDIYIGNGASELIVMATQALLNDGDEVLLPAPDYPLWTAAVSLSGGTPVHYICDEQNAWMPDPDDIRRKITPNTKAIVVINPNNPTGALYSDELLLELLAIAREHGLIVFADEVYDKIVYDGLEHTALGSLSEDVITVTFNSLSKSYRSCGYRAGWMAVSGLGGDNRRRAKDYLEGLGILSSMRLCANVPGQFAIQTALGGYQSINELIVPSGRLYKQRELAYDMLTSIPGVTCVKPQAALYMFPRLDPKLYPIQNDQQFILDLLLEERVLLVQGTGFNWTTPDHFRVVFLPNLDDLTDSINRIARFLDGYRKRHSA

SEQ ID NO: 7300 - protein, 427 aa, Azoarcus sp. EbN1
MTSRNETLFQRAQKSIPGGVNSPVRAFRSVGGTPRFISRAEGARVWDADGKAYVDYVGSWGPAIAGHAHPAIVEAVREAALAGLSFGAPSEAEVDIAELICELMPSIEMVRLVSSGTEATMSAIRLARGFTGRDAIVKFEGCYHGHADSLLVKAGSGLLTFGNPSSGGVPADFAKHTIVLDYNDLQQVEDAFRARGGEIAAVIVEAIAGNMNLVKPLPGFLEGLRRLCTEYGVVLIFDEVMTGFRVGPQGVQGLYGIMPDLTTLGKVIGGGMPVGAFGGRRDIMEKIAPLGSVYQAGTLSGSPVAVAAGLASLKLLREPGFYENLGARTTQLVTGLAAAANDAGVTFSADSVGGMFGVYFSAAVPKSFADVMASDRDAFNRFFHAMLDAGHYFAPSAFEAGFVSAAHTAADIDETIAAAREVFARLG

SEQ ID NO: 7301 - protein, 282 aa, Lycopersicon esculentum
MTGGKEIIDKIKEKVGLSSSDTGRGKSKMSKNITHGYHMVEGKSHHTMEDYVFAQFKQVDENELGLFAIFDGHLSHEIPEYLRSHLFNNILNEPNFWAEPESAIRKAYRITDTTILDKAADLGKGGSTAVTAILINGQKLVVANVGDSRAVIYKNGVAKQLSIDHEPGREREIIEGKGGFVSNFPGDVPRVDGQLAVARAFGDKSLKMHLSSEPDVVVELIDDDTEFLILASDGVWKVLSNQEAADCIKDIKDARSAAKHLNEHALARGSTDDISCVVVRFQ

SEQ ID NO: 7302 - protein, 571 aa, Striga hermonthica
MCGILAVLGVSENSQAKRSRIIELSRRLRHRGPDWSGLHNHQNCYLAHQRLAIIDPTSGDQPLYNEEKTVFVTVNGEIYNHKELREKLKSHVFRTGSDCEVIAHLYEEYGEEFVNMLDGMFSFVLLDTRDNSFIAARDAIGITPLYIGWGLDGSTWFASEMKALSDDCERFMTFLPGHIYSSKSGGLRRWYNPPWYAEQIPSAPYEPLVLRAAFEKAVIKRLMADVPFGVLLSGGLDSSLVASVASRYLADSPAAQWGTQLHTFCIGLKGSPDLRAAREVADYLGTRHHEFHFTVQEGIDALEEVIYHIETYDVTTIRASTPMFLMSRKIKSLGVKMVLSGEGSDEIFGGYLYFHKAPNKEEFHEETCRKIKALHLYDCLRANKATSAWGLEARVPFLDKEFIDVAMGIDPEWKMIRPDLGRIEKWILRNAFDDEEKPYLPKHILYRQKEQFSDGVGYSWIDGLKDHANQQVTDAMLANANFVYPENTPTTKEAYYYRTVFERFFPKNAARSTVPGGPSVACSTAKAVEWDASWSKNLDPSGRAALGVHVAAYDEAKMAGEGPTANGSPKE

SEQ ID NO: 7303 - protein, 304 aa, Triticum aestivum
  misc_feature (57)..(57): Xaa can be any naturally occurring amino acid
  misc_feature (75)..(75): Xaa can be any naturally occurring amino acid
  misc_feature (105)..(105): Xaa can be any naturally occurring amino acid
  misc_feature (150)..(150): Xaa can be any naturally occurring amino acid
  misc_feature (241)..(241): Xaa can be any naturally occurring amino acid
  misc_feature (286)..(286): Xaa can be any naturally occurring amino acid
  unsure (1)..(304): unsure at all Xaa locations
MFNHFRWGFSNKIVEPRVSSVSYLFSVLLALGCWAARKRLGPFGGARAFFNKPLQAXPRRAGVALYQPFPAHPKXRPEFRDTFFLGFPGKPACSPPALSPGGVPXPHLSWATSLKGLAAPSVTEIKIGAAPGPPRAPEPKFAKCLAKDPXSTGVLFGFRVSGVMVSDPSGAVWRPDRSELKGTDIPGVRRMLRRYVSSAGGDGGGEDCALAAAVYGGEGGVLAQLRELKAWFEVQTLSHFXRRSAELTPTRGAPGGAPRSSWWTAHVVESEGVIDHNFLGGLCSLXIKFIDDIVSSDKAPPVQS

SEQ ID NO: 7304 - protein, 413 aa, Arabidopsis thaliana
MGSGRYLDDPLTFTRNPPSSSSPITESSFLAESISRSGSFESGSLRGGDGDCFSDVDFALDKLAGTVQFYERHVFLCYKKPSVWPARIEASEFDRLPRLLSSVILARKSSMKKETLLTICEGHDGSETSNGDVLIFPDMIRYRRLTHFDVDTFVEEVLVKGVEWLPGNPESLSGSYVFVCCHGSRDRRCGVCGPSLVSRFREEIDSCALRGEVSVSPCSHIGGHKYTGDVIIYGLNINQRVTGHWYGCVTLEDVPLLLEQHINKGEIVDRLWRGEMGLPEEDQKKSQEQRLQLNSEKISNREVTQESVNNSICCQSRAVPELNGSGCQQNGNSSYCLEEIHTEKNTSERVTSVKNASLRIGSSENGSSGGFKVCAVMSMWLETWEREDTYAALAVACAAASVAIAYNCYKQLK

SEQ ID NO: 7305 - protein, 681 aa, Glycine max
MLLKLLPLLVFLLIPVSSQPNQLFYAGFKGLGSNNMTLDGVAEIEPNGVLKLTNDSSKVMGHAFYPTPFRFKNSSGGKAFSFSSSFALAIVPEFPKLGGHGLAFTIAPSKDLKAHPSQYLGILDSSNIGNFSNHLFAVEFDTAKDFEFGDIDDNHVGIDINSLSSIASASAGYYSGDEDSTKQNLTLQSGVPILAWVDYDAAQSVVHVTISASSTKPKRPLLSYHVDLSPIFKDSMYVGFSASTGMLASSHYILGWSFKINGPALPLDLSSLPQLPGPKKKHTSLIIGVSVSVVFLALCAVLFGIYMYRRYKNADVIEAWELEIGPHRYSYQELKKATKGFKDKELLGQGGFGSVYKGTLPNSNTQVAVKRISHDSNQGLREFVSEIASIGRLRHRNLVQLLGWCRRRGDLLLVYDFMENGSLDKYLFDGPKTILSWEQRFKVIKDVASALLYLHEGYEQVVIHRDVKASNVLLDGELNGRLGDFGLARLYEHGTNPSTTRVVGTLGYLAPEVPRTGKATPSSDVFAFGALLLEVACGLRPLEPKAMPEDMVLVDCVWNKFKQGSILDLVDPKLNGVFNEREMLMVLKLGLLCSNSSPTARPSMRQVVRFLEGEVGVPDELKKPGEGGYQEGFDEFLHSLESSSFDQMSTGSYGRTRDMDSSFPSLTDTSLFSPHGKGQTM

SEQ ID NO: 7306 - protein, 422 aa, Candida tropicalis
MVWVIGLMKQVFISIVFGLTVEGLAISKLNDRGAAPGLMGNFFDKRSTPGVLSLELYVNRNHDDSNFTIGPHFVVNEYSKRDDYISVELYNEQVTYSANFTVGSNSQKQNVIVDTGSSDLWVVDSSANCQEKSGYSSDYCFSGGTYDPSSSSTIQELGKSFNIRYGDGSSSSGTWVKDTVGINGAIILNQQFGDVNSTSVSQGILGIGLDTNESTDTIYENFPINLKEQGFINTNAYSLYLNAPSATSGTIIFGGIDHAKYTGSLTTLPLTSNREFTIQTNSATVGTSTIDINTGLLLDSGTTLTYLPQSVVDSIANAIGGDITYNRPIGAYIWSCNRNGKVTYNFPQGLNIDIPYSDLAVPLYYSNGAVAGFCALGILYGENFNILGDNFLRHAYVVYNLDALTISLAPVVYTSDSNVTIV

SEQ ID NO: 7307 - protein, 592 aa, Prochlorococcus marinus subsp. marinus str. CCMP1375
MQSIGKYVVTGAEIQLDELSSLLKKIYTDKSVEEFDYMWSQLIQILEANSDNCFEGKQIHSCPWDSTTAVLITYADGVYSSNRSTLKTLGKLIENHLGEIAPIIHLLPFLCSTSDGGFAVSSYEKIDSRFGSWDDLKNLSDKHILMADLVLNHVSASHPWVQQFKNGTNPGKNYILSPSIKNNWENVIRPRNTSLFTNIATIEGNKDVWTTFGPDQIDVNWREPKLLLEFINLIVRYLNHGIKWIRLDAIGFIWKEPSTTCLHMEQVHNLVKVLRIILEKLKRSGVLITETNVPEKENISYLKSGSEAHLAYNFPLPPLLLESLINNKADLINNWLCSWPDLPVNTGFLNFTASHDGIGLRALEGLMDSRRIHNLLISCEKRGGLVSHRRMPNGEDKPYELNISWWSAMADTGVNTNYLQFERFILSQFFVMALKGVPAFYLQAIMASENDLVSFGQSGERRDLNRQRFDENTLENSLLDPKSFASKNLKALRNAMTVRSSLKAFHPEQAMHCLSGNRSDFVIIRRGMNDCCVWAVHNMTNKKLSFSLSDNLKTEIKNSYYWNDALNNQDYKHDYMELSPYSVHWLIKKNEN

SEQ ID NO: 7308 - protein, 164 aa, Legionella pneumophila str. Lens
MGSLRKHQPGKTTDLLMSPFLRLQQEVNHAMSDFYNLFAPQRSANLEQFEHISLTPSLDIVEDKDNFKIEVEMPGMGEEDIKVSFCENRLTIEGEKTTSKKDENKNYISREISYGRYERTISLPLSADVDKATASFKKGMLWITIPKKTEARENVKTIKIEKAK

SEQ ID NO: 7309 - protein, 1015 aa, Neurospora crassa
MTQGQQQQQQQHRIVIPRPEASRTESSLPGHLRPSVINVPVTPGISREAYEEQLTDMLSGSTGPGYFERRIDEHDIARSPGTVGLEETGSVDRQLAVGADAGKDFMRRLSTAVTDSGAAAVGNQDSLSDIRHKFPNLSLSGNIISATFTIPHLLKYTKGSGENGTTGSWDLKPRRGQSALFDSFSYLSSDDAPWNHTVVAWTGEIEEVKSAQHAGKAPATTVGQPSLNPLSRPVPIDGSVTPPAHPTADGLWIPKEDMHLLEHDLSHNRKIKTVPVWLADDIEGHDDGIRLKDQARWRRYAEHSLYTLFHYKQNEPADGRAERIQWADYYRMNQKFANKILENYKPGDIVIVHDYNLMLLPSMLRQRAPHMYIAFFLHSPFPSSEFLRCLPRRKEVLEGVLGSNLVGFQSYSYSRHFASCCTRVLGFPSDTTGVEAYGTRVEVGVFPIGIDAIKVAAAAWKPSATAKFEGLKKMYAGKKLIVGRDKLDSVRGVPQKLMAFERFLELYPEWREKVVLIQVTSPTNIEEEKEDSENKISSRVNELVMKINGMYGSLGDTPVQHYPQYISQDEYFALLRAADIGLITSVRDGMNTTSMEYIICQRDNAGPLILSEFSGTAGSLKDAIHINPWDLTDVAKQINNALTMSQERRQSIEKSLLEHVTNKNVQFWITGLLRRLISVLANRKDIIATPLLDRATMLRKYRAANKRLFMFDYDGTLTPIVREPSAAIPSERVINSLKALAADPRNAVWIISGRDQEFLQQHLGHITELGFSAEHGSFMRHPGSTEWENLAEKFDMGWQAEVLEVFQKYTDKTPGSFIERKRCALTWHYRLADPEQGLHMARDCQKELETTVGRKWDVEVMAGKANLEVRPTFINKGEIAKRLVTEYNAELKALAAKSSGSPDKVASEKLEFVLCMGDDFTDEDMFRSLNVLSGPGEDAEIKPENCFTVTVGASTKVTLARWHLLEPEDVIECVALLAGVGGAGAGGAGGVLSMGEVNLGALSTVEDHIPDGQTQ

SEQ ID NO: 7310 - protein, 238 aa, Azotobacter vinelandii
LNEIGFSPLLTPAEEVHFARLAQRGDPAGRKRMIESNLRLVVKIARRYVNRGLSLLDLIEEGNLGLIRAVEKFDPERGFRFSTYATWWIRQTIERAIMNQTRTIRLPIHVVKELNVYLRAARELTQKLDHEPSAEEIANLLEKPVAEVKRMLGLNERVTSVDVSLGPDSDKTLLDVLTDDRPFDPCDLLQDDDLSQSIDQWLFDLTEKQREVVVRRFGLRGHESCTLEEVGQEIGLTR

SEQ ID NO: 7311 - protein, 386 aa, Arabidopsis thaliana
MSPDGELVPVDSSAVVTAKRKTSQLSRSWISIDATGQKTVLDVDKHVIMHRVQIHARDLRILDPNLFYPSAILGRERAIVLNLEHIKAIITAEEVLIRDSSDENVIPVLEEFQRRLPVGNEAHGVHGDGDLGEEDESPFEFRALEVALEAICSFLAARTTELEKFAYPALDELTLKISSRNLERVRKLKSAMTRLTARVQKVRDELEQLLDDDGDMADLYLTRKLVGASSSVSVSDEPIWYPTSPTIGSMISRASRVSLVTVRGDDETDVEELEMLLEAYFMQIDSTLNKLTELREYIDDTEDYINIQLDNHRNQLIQLELMLSAGTVCVSVYSMIAGIFGMNIPNTWNHDHGYIFKWVVSLTGTFCIVLFVIILSYARFRGLIGS

SEQ ID NO: 7312 - protein, 133 aa, Ralstonia metallidurans CH34
MSYSNKVLDHYENPRNVGSFDKNDDAVGTGMVGAPACGDVMKLQIKVNEAGVIEDAKFKTYGCGSAIASSSLVTEWVKGKTVDQALEIKNTQIAEELALPPVKIHCSILAEDAIKAAVDDYKKKHPGAEQKAA

SEQ ID NO: 7313 - protein, 379 aa, Zea mays
MRVLCSAAVVMITTRTPTLSTAASLLLTHRHRILAARTLSVSVSAAAGSSSIPVKMTARSALDEVTDTGAFDRSPSTFRSSVSRDGRFPAVAGRYHLYVSYACPWASRCLAFLKLKGLDHAIGVTAVKPIFERTKESDEHLGWVFPAAADEEPGAEPDPLNGARSVRELYEIASSNYAGKPTVPVLWDKQLKTVVNNESSEIIRMLNAEFNGIARNPGLDLYPAHLRASIDEANELVYDAINNGVYKCGFAKKQGPYDEAVTRLYEALDRCEEILGKRRYICGDQLTEADIRLFVTLIRFDEVYAVHFKCNKKLLREYPNLFNYTKDIYQIPGISSTVNMEHIRKHYYGSHPSINPYGIIPAGPNIDYNAPHDRERFSA

SEQ ID NO: 7314 - protein, 402 aa, Colwellia psychrerythraea 34H
MTGSVSTKGFYTHLTAQIEQVKEDGLYKAERIITTAQQPQIAVNTGEEVVNFCANNYLGLANHPELIAAAKTGLDEHGFGMASVRFICGTQDIHKTLEQGISKFLGMEDTILYSSCFDANAGLFETLLGPDDAIISDALNHASIIDGVRLCKAKRFRYANNDMAALEQSLIEADAAGARFKLIATDGVFSMDGVIANLKGVCDLADKYDAMVMVDDSHAVGFVGEQGRGSHEYCEVMGRVDIITGTLGKAMGGASGGFTSAKKEVVEWLRQRSRPYLFSNSLAPAIVNASLKVLELLAQGDALRKTLKDNAAYFRNSMEAAGFTCAGADHAIVPVMLGDAKVASAMADRLLAEGIYVIGFSFPVVPKGQARIRTQISAAHTKAQLDHAIAAFIRIGKEMAVI

SEQ ID NO: 7315 - protein, 319 aa, Rubrobacter xylanophilus DSM 9941
MGMLVDGKWVAEDRLSDERGRFVRRESRFRRWVTSDGSGGFAPEPGRYHLYISWACPWAHRTAIVRRLKGLEGAISLSSVLPRMGEDGWEFAPSGEFSDPLYGARYLREIYLKADPRYTGRVTTPVLWDRREATIVNNESREIMRMLDTEFERLATTGASFYPEELREEVDRALDELYEPVNNGVYRAGFAATQEAYDEAVTGLFDALDRYEELLGRRRYLLGGRVTEADWAFFTTLVRFDPVYHYHFKCNLRRISDYPNLWGYLRDLYQRPGVAETVRLDHIKEHYYTSHASINPSRIVPKGPVLDLSAPHGRERLGG

SEQ ID NO: 7316 - protein, 334 aa, Oryza sativa
STLGGMGDRLRKDFGSMNMDELLRSIWTAEESQAMASASAAAAAAEGGLHKQGSLTLPRTLSVKTVDEVWRDLQREASPGAAAADGGGGGGEHHQPRRQPTLGEMTLEEFLVRAGVVRENTAAAAAMVAAAAAPPVAPRSIPAVNNSSIFFGNYGGVNDAAAAAAGAMGFSPVGIGDPTMGNRLMSGVAGIGGGAITVAPVDTSVGQMDSAGKGDGDLSSPMAPVPYPFEGVIRGRRSGGNVEKVVERRQRRMIKNRESAARSRARKQAYTMELEAEVQKLKEQNMELQKKQEEIMEMQKNFFPEMQKNQVLEAVNNPYGQKKRCLRRTLTGPW

SEQ ID NO: 7317 - protein, 338 aa, Acinetobacter sp. ADP1
MQIFYDKDCDLSIIQGKKVAIIGYGSQGHAHALNLKDSGVDVTVGLRANSASWKKAENAGLKVAEVPEAVKQADLVMILTPDEFQSQLYRDVIEPNIKEGATLAFAHGFSVLYNQVVPRQDLDVIMVAPKAPGHTVRSEFQRGSGVPDLIAIHQDASGNARNVALSYASGVGGGRTGIIETSFREETETDLFGEQAVLCGGAVELVKMGFETLVEAGYSPEMAYFECLHELKLIVDLMFEGGIADMNYSVSNNAEYGEYVTGVEVINEQSREAMRNALKRIQSGEYAKMFIQEGALNYPSMTARRRQNAAHGIEVTGSKLRAMMPWIQANKIVDKEKN

SEQ ID NO: 7318 - protein, 466 aa, Oryza sativa
MSNRSKFWRLAALVPEVQCPDQPISPRQKFKYTAIVLFIFVTASQVLLYGIQHQPRTIEPDPLHWLHLILASSRSTLLSHGIVAILVPEVLVKIWVYLKIITLDTSAPETGVLMNRAQRLLGILVAILGAVNFYVRSKHFTVNTVLIMLQILCSDIIVIYLDDVLRKGYGLLSGISLFTATNICVNILWKAFSPMSVMYPEQSPEFEGAVIAWVHLLMTRTDKLSAMSKAFYRQNLPNIINFLATCLFVPLAIFFQGFYIVLPVRTRRNFQAYCHIKLSHFLYGPVVLHRLLLPLPYVASKVLYKKYSGNTLVNLLGKWDGLNHFGQSIPVGGIVYYLRTPPILADLHRDPFHAFIYVAFVLISCVFISMGLMVCASSKGVFNGFVVLNMQEERRLRLAQPDSIHANEIRRHVMRAACVGGFCAGVLIIFADLIGVFCSGTGIMLAVTASYPYVDGRASEVGSFGF

SEQ ID NO: 7319 - protein, 381 aa, Bacillus cereus ATCC 10987
MKRARKKKHKGIVISSIAGTIVGASLFAFGAPLFSNDTDAFPQAEASGSNMAEAQGIKQISFVDAVDRASEAVVGVINIQRDNFSEADSEAGTGSGVIYKKTDGQAYIVTNNHVVAGANRIEVSLSDGKKVPGKVLGTDVVTDLAVLEIDAKHVKKVIEIGDSNTVRRGEPVIAIGNPLGLQFSGTVTQGIISANERIVPVDLDQDGHYDWQVEVLQTDAAINPGNSGGALVNAAGQLIGINSMKIAAKEVEGIGLAIPVTRAVPIMNELEKYGKVRRPYVGIELRSLNEIPNYYWSKTLHLPGNVTEGVCILDVKSPSPGTDAGLREHDVIVAVDGKPVRDIIGFRTALYDKKINDKMTLTFYRGTKRATTTVKLGIQKY

SEQ ID NO: 7320 - protein, 469 aa, Methanothermobacter thermautotrophicus str. Delta H
MTAMCAIAGFRGDDAPVKVQEMLDVLRHRGPDATGIYHDSRIVIRTATGEDVKEAPQSAEIAVGHNLLSIVGGPQPVSGDGVLVFNGEIYNQEELNWTGSDSELILDLIEGHGGDLEDALRFTVNKIDGDYAFAYTDGENLASRQDPVGVKPLYHSGEAFASEKKALWRIGLRNVETLPPGHAMINGVKVKLRGLPRAEPSDAEPEELRENLKSALRESVERRVRGLDEAALVFSGGVDSTLLAVLLDEHIDVRLYTVGLPGSSDPQFASRAAADLGMELEVLEVTEDTIREALPHVLGAIEEYNLMKIGVAMPLYLASEAASADGYRVMFSGQGADELFAGYHRYRRLLAEGRLEDALRHDLENIHHVNLERDDAVTMANSVELRVPFLDLQLIGVALTIPADLKIRGPEDELRKRILREAALEMGVPEYIAMRPKKAAQYGSGIDKVLRRKVLPGFDHETFLRRLMF

SEQ ID NO: 7321 - protein, 420 aa, Oryza sativa
MAQDASDAVLPASRIMADRHLSLPRKIMPEDAAVRAGESRPRPRYPERSVHLLSFAMAGLIPPFSGLFHEVLDFYEIHALHLAPNVVMTLAIFAHLCEMFIGVRPTMRLFQSFFVPQLLQGPSPVSGEGRRWAPLKDKLWFSFQAKAQKLASRWWDEGRLSLPVTAADPSLGLGNNDTTGAGDDDMASKEPSGDHDHEMNGTSAGGGEPKDGAVVTGRNRRPRGRPPGSKNKPKPPIFVTRDSPNALRSHVMEVAGGADVAESIAHFARRRQRGVCVLSGAGTVTDVALRQPAAPSAVVALRGRFEILSLTGTFLPGPAPPGSTGLTVYLAGGQGQVVGGSVVGTLTAAGPVMVIASTFANATYERLPLDQEEEEAAAGGMMAPPPLMAGAADPLLFGGGMHDAGLAAWHHARPPPPPPY

SEQ ID NO: 7322 - protein, 413 aa, Nitrosomonas europaea ATCC 19718
MSKRKVAITGLGIISPVGNTVSEAWENVIAGKSGITRITRFDASDFSSKIAGEVNGFDITEYLSAKEARRMDIFIQYGMAAAIQAIRDAGISDVSGFNADRIGVNIGSGIGGLPMIENTDAAYHAGGPRKISPFFIPSTIINMVAGNLSIMFGYKGPNLAIVTACTTATHCIGSSARMIEYGDADIMVCGGTESCVTPLAVGGFASARALSSNNDDPAAASRPWDLKRDGFVLGEGAGILVLEEMEHARKRGAKIYAELAGFGMSADAHHMTAPCEDGEGAARCMTNALSDAQMHADELHYINAHGTSTPLGDIAETIAVKRCFGEHAKDLAVSSTKSMTGHLLGAAGGVEAIFSALAVYHQIAPPTINLDDPDPACDLDYVPNNAREMKIDAALSNSFGFGGTNGTLVFRKI

SEQ ID NO: 7323 - protein, 426 aa, Medicago sativa subsp. falcata
MCDEHGIDPSGSYVGKSHLQLERVNVYYNEASGGRYVPRAVLMDLEPGTMDSLRSGPFGKIFRPDNFVFGQNGAGNNWAKGHYTEGAELIDSVLDVVRKEAENCDCLQGFQICHSLGGGTGSGMGTLLISKIREEYPDRMMLTFSVFPSPKVSDTVVEPYNATLSVHQLVENADECMVLDNEALYDICFRTLKLTNPSFGDLNHLISTTMSGVTCCLRFPGQLNSDLRKLAVNLIPFPRLHFFMVGFAPLTSRGSQQYSSLTIPELTQQMWDARNMMCAADPRHGRYLTASAIFRGKMSTKEVDEQMINVQNKNSSYFVEWIPNNVKSTVCDIPPTGLKMASTFIGNSTSIQEMFRRVSEQFTAMFRRKAFLHWYTGEGMDEMEFTEAESNMNDLVSEYQQYQDATAEEDEYEDEEEDYQQEHDEM

SEQ ID NO: 7324 - protein, 312 aa, Oryza sativa (japonica cultivar-group)
MARCFVLNTGAKIPSVGLGTWQAEPGVVGNAVYAAVKAGYRHIDCAQAYFNEKEIGVALKKVFDEGIVKREDIFITSKLWCTNHAPEDVPVALDSTLQDLQTDYVDLYLIHWPVRMKKGAGFGGQNVLPTDIPATWAAMEKLHDSGKARAIGVSNFSSKKLEDLLAVARVPPAVDQVECHPVWQQTKLRKFCTSKGIHLSAYSPLGSPGTASVKAVGNVLAHPVVVSTAEKLGKTPAQVALRWGIQMGHSVLPKSTHEERIKENIDVYDWSIPEDLFIKLSEIEQMKLIRGEFWTHPEGVYKSIEELWDGEI

SEQ ID NO: 7325 - protein, 393 aa, Sulfolobus solfataricus P2
MDLVEKLKNDVKEIEDWIIQIRRKIHENPELSYKEYSTSKLVAETLRKLGIEVEEGVGLPTAVVGKIRGNKPGKTVALRADMDALPVEETSDVEFKSKVKGVMHACGHDTHVAMLLGGAYLLVKNKDLISGEIRLIFQPAEEDGGLGGAKPMIEAGVMNGVDYVFGIHISSSYPSGVFATRKGPIMATPDAFKIVVHGKGGHGSAPHETIDPIFISLQIANAIYGITARQIDPVQPFVISITTIHSGTKDNIIPDDAEMQGTIRSLDENVRSKAKDYMRRIVSSICGIYGATCEVKFMEDVYPITVNNPEVTDEVMKILSSISTVVETEPVLGAEDFSRFLQKAPGMYFFLGTRNEKKGCIYPNHSSKFCVDEDVLKLGALAHALLAIKFSNK

SEQ ID NO: 7326 - protein, 566 aa, Bacteroides thetaiotaomicron
MKRNLLFIILLLLLPGLHQVFATSTIKKVAPTFWWAGMKNPELQILLYGDRISSADVSLSADNITLQEVVKQENPNYLVLYLDLSKAAPQNFDIILKQGKKQIKIPYELKQRRPNASAVEGFDSSDVLYLIMPDRFANGNPSNDIIPGMLEGNVDRNEPFARHGGDLKGIENHLDYIADLGVTSIWLNPIQENDMKEGSYHGYAITDYYQVDRRFGSNEEFRKLTQEANAKGLKVVMDMIFNHCGSDNYLFKDMPSKDWFNFEGNYVQTSFKTATQMDPYASDYEKKIAIDGWFTLTMPDFNQRNRHVATYLIQSSIWWIEYAGINGIRQDTHPYADFDMMARWSKAVNEEYPKFNIVGETWLGNNVLISYWQKDSRLAYPKNSNLPTVMDFPLMEEMNKAFDEETTEWNGGLFRLYEYLSQDIVYSHPMSLLTFLDNHDTSRFYRSEADTKNLDRYKQALTFLLTTRGIPQIYYGTEILMAADKANGDGLLRCDFPGGWPNDTKNCFDAANRTPQQNEAFSFIKNCSNGEKETKSLPKVSSNISHRIKVSTFTNPNTVINQSLFS

SEQ ID NO: 7327 - protein, 327 aa, Brucella melitensis 16M
MGLLVDGKWHDVWYDTGSTQGRFERSKAQFRNWVTQDGSAGPTGEGGFKAEPGRYHLYVSYACPWAHRTLIFRALKKLEKIISVSVVDFLMAEEGWTFYGTTGSTGDALYGAKRLYEIYTRADPAYSGRVTVPVLWDKQRETIVSNESAEIIRMLNHAFNEFGDATRDFYPAALRNQIDTLNDFIYPNINNGVYCAGFATTQEAYEEAFQQVFAALDALEQKLSQQRYLAGSSLTEADWRLFTTLVRFDPVYVGHFKCNLRRLADYPNLWNYTRDLYQTPGVAETVNMEHIKGHYYRSHKTINPTGIVPAGPEIEYTAAHDRGRFTG

SEQ ID NO: 7328 - protein, 440 aa, Polaromonas sp. JS666
MISAEQNDFITRVGPGTPAGKLLRRYWQPVALADDLTGPRPVRPVQLMGQHFVLFRDESGKLGMLDRDCPHRGADLAFGRLENGGLRCSFHGWLFDAKGSCLETPAEPASSKLCSRVKQGAYPVIERAGTVFAYIGEGEPPAFPEFDCFVAPDSHTFAFKGLFECNWLQALEVGIDPAHASYLHRFFEDEDTSESYGKQFRGASADSDMPITKVLREYDRPEISVDPTDYGMRLTALRKLSETSTHVRVTNLVFPQAFVIPMSAEMTISQWHVPVDDTHCYWYAIFTSFTGPVDKQQMRDQRLKLYELPDYTSRKNKRNNYGYSIDEQLTETYTGMGDDINVHDQWAIESQGPIQDRTREHLGSTDKGIVAYRRMLVKAIDSTLAGESAPMIIDAAQAGALTGPPSIDGIAKAGSADGYWQSADRERRLKSDWASARLTA

SEQ ID NO: 7329 - protein, 107 aa, Hordeum vulgare subsp. vulgare
MAEAAQGGGLRGRGVLLGGVQDAPAGRENDLETIELARFAVAEHNAKANALLEFERLVKVRQQVVAGCMHYFTIEVKEGGAKKLYEAKVWEKAWENFKQLQEFKPAA

SEQ ID NO: 7330 - protein, 532 aa, Listeria monocytogenes EGD-e
MTKYIFVTGGVVSSIGKGITAASLGRLLKNRGLSVTIQKFDPYINVDPGTMSPYQHGEVYVTDDGAETDLDLGHYERFIDINLNKYSNVTTGKVYSEVIKKERRGDYLGGTVQVIPHITNELKDRVFRAARMTNSDIIITEIGGTVGDIESLPFLEAIRQIKGDVGAENVLYIHTTLIPYIKAAGEMKTKPTQHSVKELRSLGIQPNIIVVRTEQPVSQEMKDKIALFCDIKASEVIESRDEETLYNVPLSLQKQKMDDIVLEHLQLEAPQAEMTDWKNLVHRVKNLSKKVRIGLVGKYVSLQDAYLSVAEALRHAGYDHDAEIEIDWIDSEKVTKENVAEIMKDVDGILVPGGFGDRAIEGKIAAIEYARVNKVPYFGICLGMQLATVEFARNVLGLEGAHSAEIEPETNHNIIDLLPEQKNIENMGGTLRLGLYPARIKQGTKAEAAYGTTLVEERHRHRYEFNNEYREQMEEAGMIVSATSPDGRLVEVVELIDHPWFVACQYHPEFISRPNRPQSLFKDFVGAALKNK

SEQ ID NO: 7331 - protein, 629 aa, Oryza sativa (japonica cultivar-group)
MPEAVAAAVSPAAAAATAMCAEHREKLEHIERVTRNAGQEQRRVLEEILAQNAQAEYLRRLGVPGDAPGADEAFRRLAPLVTYEDILPDVLRIANGDTSPILSGKPVSEFLTSSGTSGGERKLMPTIEEEMERRSGLYSLLMPVMSRQVPGLDKGKAMYLYFVKSEWRTPGGLPARPVLTSFYRSRYFLERPHDPYTVYTSPDEAVLCEDAYQSMYAQLICGLVHRADVLRVGAVFASGFLRAIRFLEKHWPSLCRDIRAGELDGGVTDPAVRGAVGRVLRGADPALADAIEAECARPSWQGIIRRVWPSTKYIDVIVTGAMAQYIPTLEFYGGGLPLACTMYASSECYFGLNLNPMCKPSEVAYTLIPTMCYFEFLPVNSGANDVAAPEPDHRGLVDLVDVKLGHEYELVVTTYSGLYRYRVGDVLRVAGFKNAAPMFAFVRRKNVALSIDSDKTDEAELHAAVTEAVQHLAPFGASLVEYTSYADTATTIPGHYVLFWELRSPAGGTPVPASVFEDCCLAVEEGLNSVYRQCRAADRSIGPLEIRVVADGTFDKLMDYALSRGASINQYKAPRCVRPGPVVELLDGRVQATYFSPKCPKWCAGGNKQWISSGAAAKKTTTTCDSLAV

SEQ ID NO: 7332 - protein, 864 aa, Vibrio fischeri ES114
MNNNMSLKKKSILALACYVCFLITVIGSITYCVVEPPIRENLENNLNLRTQLLAREIEDPLNHSLSILHALVGVAASGYSIDVLEDMTYSVFKESDDIIISGGIWPEPNTLEPSKQLASIFYSRDERGKITSVNDYNIPSNTPYQQESWYTSVSHENSSHNISWSEVYIDPFTKQKMITASQPYFENNQFVGVATIDISLKGLIGVIESQAEKHQLGISVYDGNTTIAEYKFAVDESMYVVELFMDDLRWELKVVNSVLTVADETFAQVVNIELGIVPILLACVILAYYFINRSLINPIVLISQQVNERESSEKIDINYGYKDEIADLIYSFNQETEYLEIEKSKAEALAKAKSSFLANMSHEIRTPLNGIIGMSDILTETDLTPVQSEYVETIDTSSQTLLLLINDILDLSKIESGNLVIVPQESNVEEVAYDTLTVILSKATEKGLALQVDIANDLPELVMLDEHRLRQVLMNLMSNAVKFTQDGAVILSINYQQKENGRGLLFFSVKDTGIGISKDKCEQIFEPFTQEDSSITRQFGGTGLGLAICRQLVEMLGGELKVDSEKGFGSKFHFILDVEVIEPTHKGLEEYAQSSCVIVSNHMLYATQLEMECKKLGINSRIVQKFVPQDDLISQSDVVIYCQKSSSEALNHVRLMNEYKHRPAIIICKKHQDEKVDFERTIEGVITYPLLGKRFYKVMKQAFIASQSHQGIVSEVKTSGDSEYGEMIDLPHKRKDNLDIIKTVLVVEDNAINQKVASLLLKKAGFCVEIANNGQEALDMVMSKTSPYSLVLMDCMMPIMDGFAATEAIRKWEENQEQKRLPIIALTASVFIEDIDKCYQSGMDDYVAKPFRKELILEKLEAYT

SEQ ID NO: 7333 - protein, 128 aa, Azoarcus sp. EbN1
MDLTGIRVMVIDDSNTIRRSAEIFLTHSGCEVLLAEDGFDALAKIADHRPHVIFVDIMMPRLDGYQTCALIKKNPRLSATPVIMLSSKDGLFDRARGRMVGSDEYLTKPFTKDSLLKAAAAHASRTTD

SEQ ID NO: 7334 - protein, 339 aa, Escherichia coli
MVIFVTGGAGYIGSHTILELLNNGHDVVSIDNFVNSSIESLKRVEQITNKKIISYQGDIRDKNLLDEIFSRHHIDAVIHFASLKSVGESKLKPLEYYSNNVGGTLVLLECMKRYNINKMIFSSSATVYGSNSIPPHTEDRRIGETTNPYGTSKFIIEIILSDYCDSDNNKSVIALRYFNPIGAHKSGMIGENPNGIPNNLVPYISKVAQNQLPVLNIYGNDYPTKDGTGVRDYIHVCDLAKGHVKALEYMFLNDVNYEAFNLGTGQGYSVLEIVKMFEIVTKKSIPVAICNRREGDVAESWASADLAHKKLSWKAEKNFERMIEDVWRWQTNNPNGYKK

SEQ ID NO: 7335 - protein, 427 aa, Brassica napus
  misc_feature (282)..(282): Xaa can be any naturally occurring amino acid
  misc_feature (290)..(290): Xaa can be any naturally occurring amino acid
  unsure (1)..(427): unsure at all Xaa locations
MREILHIQGGQCGNQIGAKFWEVICGEHGIDHTGQYVGDSPLQLERIDVYFNTRPTGPYGPIFRPDNFVFGQSGAGNNWAKGHYTEGAELIDAVLDVVRKEAENCDCLQGFQVCHSLGGGTGSGMGTLLISKIREEYPDRMMLTFSVFPSPKVSDTVVEPYNATLSVHQLVENADECMVLDNEALYDICFRTLKLTTPSFGDLNHLISATMSGVTCCLRFPGQLNSDLRKLAVNLIPFPRLHFFMVGFAPLTSRGSQQYRALTVPELTQQMWDSKNMMCAAXPRHGRHLXTASAMFRAKMSTKQVHEQMINVQNKNSSYFVEWIPNNVKSSVCDIAPRGLSMASTFIGNSTSIQEMFRRVSEQFTAMFRRKAFLHWYTGEGMDEMEFTEAESNMNDLVSEYQQYQDATADEEGEYEEEEEEEVEYQD

SEQ ID NO: 7336 - protein, 664 aa, Arabidopsis thaliana
MVNPGHGRGPDSGTAAGGSNSDPFPANLRVLVVDDDPTCLMILERMLMTCLYRVTKCNRAESALSLLRKNKNGFDIVISDVHMPDMDGFKLLEHVGLEMDLPVIMMSADDSKSVVLKGVTHGAVDYLIKPVRIEALKNIWQHVVRKKRNEWNVSEHSGGSIEDTGGDRDRQQQHREDADNNSSSVNEGNGRSSRKRKEEEVDDQGDDKEDSSSLKKPRVVWSVELHQQFVAAVNQLGVDKAVPKKILEMMNVPGLTRENVASHLQKYRIYLRRLGGVSQHQGNMNHSFMTGQDQSFGPLSSLNGFDLQSLAVTGQLPPQSLAQLQAAGLGRPTLAKPGMSVSPLVDQRSIFNFENPKIRFGDGHGQTMNNGNLLHGVPTGSHMRLRPGQNVQSSGMMLPVADQLPRGGPSMLPSLGQQPILSSSVSRRSDLTGALAVRNSIPETNSRVLPTTHSVFNNFPADLPRSSFPLASAPGISVPVSVSYQEEVNSSDAKGGSSAATAGFGNPSYDIFNDFPQHQQHNKNISNKLNDWDLRNMGLVFSSNQDAATATATAAFSTSEAYSSSSTQRKRRETDATVVGEHGQNLQSPSRNLYHLNHVFMDGGSVRVKSERVAETVTCPPANTLFHEQYNQEDLMSAFLKQEGIPSVDNEFEFDGYSIDNIQV

SEQ ID NO: 7337 - protein, 242 aa, Zea mays
MQIFVKTLTGKTITLEVESSDTIDNVKAKIQDKEGIPPDQQRLIFAGKQLEDGRTLADYNIQKESTLHLVLRLRGGMQIFVKTLTGKTITLEVESSDTIDNVKAKIQDKEGIPPDQQRLIFAGKQLEDGRTLADYNIQKESTLHLVLRLRGGMQIFVKTLTGKTITLEVESSDTIDNVKAKIQDKEGIPPDQQRLIFAGKQLEDGRTLADYNIQKESTLHLVLRLRGGMQIFVKTLTGKTSP

SEQ ID NO: 7338 - protein, 266 aa, Zea mays
RPGFPSLPLPGSHSHPFRLPTQTAHELTATSHVPHPLVHVLLLPMSPPLELDYIGLSPPAAAAAAENDELKGTELRLGLPGSGSPDRRVVAATATTLDLLPAKGAKRGFSDEAPPPSPVATAGKGKKVAEEEYDEKKVAATPQPAAKAQVVGWPPVCNYRKNTMTTTQLEGSKEDGDAKQGQGFLYVKVSMDGAPYLRKIDLKTYKNYKDLSTALEKMFSGFSTVYGCNAISGKDGSSEYRKDGEYVLTYEDKDGDWMLVGDVPWE

SEQ ID NO: 7339 - protein, 397 aa, Saccharophagus degradans 2-40
MFDRLSLLSADPILGLIGQFTADSNPNKIDLGVGVYRDAQGHTPILATVKKAESILWEAEQTKSYIGPAGNQQFNRLVLELILGDEHTALADNRAIAMQTPGGCGALRVAAELIVAANPKAKIWVSDPTWGNHVPLLGDSGMEIATYPYYDYESHGIRFADMLTTLRESAVAGDLVLVHACCHNPSGADLSLAQWLQLTNLCAEKGLIPFVDMAYQGFGDGLDQDAAGLRMMADQLPEVIFAYSCSKNFGLYRERIGAVGVVAANTERATAVASQIMRIVRGIYSMPPSHGAAIVETILADPVLCQAWVDELALMRNRIQTMRQALLDAMTAQGYGDRFHFITGEKGMFSFLGLTPEQVQRLIKEHSVYMVDSSRINVAGLTPTNIDPLVKALTAVL

SEQ ID NO: 7340 - protein, 554 aa, Bifidobacterium longum NCC2705
MQLELNRRSKVPMYRQLAAELREQIVSGAMAEGYRLPPERELSSRLEVNRTTVLQAYQQLKDEGLIASKVGKGTFVLPAASASRTSHTSNSDFGNAITRTTRSSAEMGTSQASSSGDVERATSTDFLTTDQGSSSAAVHTIRESRSVQGPEPTVVRPPWSVLFSDYSNRFTYHDIASAERAQRGDTIIDFATGSPNPADIPDDLLRKVSIEAFESREFDGQPESPIEGFEELRALLAEHMRARGVQCGVRNVMVLSGSEQGIDLIVRAFINPGDCVLVEQSTFFPALQTFRSADARIIGVPVDEHGMRTDLLDGYCARFRPKLIYTVPTFQNPTGTTLSPERRSELIDVARRYQCLIVEDDAYGDLWYGGESSDAHRPIPLKGMENAGYVMYLSTFSKTVTSGLRTGWVVADPHVINRLAALRRMVDQHTSTSSQRICLELLKEGRIAEHLRGLIKAYRIRRDAAIAALEQYAPDEVYWTMPAGGYYIWVSLPDGVRSLDVLESCRSQGVTFMPGSVFDVDEMDDSHIRLNFVRPDAADIDTGIRIIGETIAQM

SEQ ID NO: 7341 - protein, 408 aa, Arabidopsis thaliana
MEPSPSSPPSSPPEILDLDSIKALKILGKGATGTVFLAHDVVSTSSSSSPFAVKLVPKSSASSLRRARWEIEVLRRLSVDSNQNPFLPRLLASFESPEYFAWAVPYCSGGDLNVLLHRQNDGVFSSSVIRFYVAEIVCALEHLHTMGIAYRDLKPENILIQQSGHVTLTDFDLSRSLKKPLRPHFYQPDPELIIDRKKSRSFSRLISPTAEKNKTGLKKTRSARVNPINRRKTSFSSGERSNSFVGTDEYVSPEVIRGDGHDFAVDWWALGVLTYEMMYGETPFKGKSKKETFRNVLMKEPEFAGKPNDLTDLIRRLLVKDPNRRLGCHRGAAEIKELAFFAGVRWDLLTEVLRPPFIPLRDDGELTVGGFDIREHFEKLRTTPSSAPPSPLRSPPHVCRKNDPFIEF

SEQ ID NO: 7342 - protein, 545 aa, Photobacterium profundum SS9
MITPSEFKRLYKIIEVQLRYGLDDFLPEDPRTKMPKMARKSLFWIKNQHPDKSLGERLRLALQELGPVWIKFGQMMSTRRDLFPPHIADQLALLQDQVEPFDGNLAKEHMELSLGGPIETWFDDFDETPLASASIAQVHTATLKENGREVVLKVIRPDILPVIQADIKLMYRMAHIVARLLPEARLLRPVEVVREYEKTLLDELNMMREAANSIQLRRNFEDSDTLYVPEMFTDYSSTNLLVMERIYGIQVSDIDALIANGTNMKLLSENAVNIFFTQVFRDSFFHADMHPGNIFVSYENPETPQWIALDCGIVGTLNRDDKRYLAENLLAFFHRDYRKVAELHVDSGWVPQDTNIDEFEFAIRTVCEPIFEKPLCDISFGHVLLNLFNTARRFDMEVQPQLMLLQKTLLYVEGLGRQLYPQLDLWITAKPFLEDWMSRQVGPQAIVEAVKSKAPFWAEKLPELPELLYDSLRQGKVMNQRIDKLYDNFMESRRSQGLARFYFGIGATLVVCSAILFSNHVETIPVASAAMGVTFWLLGWRACRK

SEQ ID NO: 7343 - protein, 161 aa, Triticum aestivum
MSLIPRGNAFDPFSLDLWDPFDGFPFGSGGSSSGGSLFPSFPRISSETAAFAGARIDWKETPEAHVFKADVPGLKKEEVKVEVEDGNVLQISGERNKEQEEKTDTWHRVERSSGKFLRKFRLPEDAKADQIKAAMENGVLTVTVPKAEAKKPEVKSIQISG

SEQ ID NO: 7344 - protein, 488 aa, Listeria monocytogenes str. 4b H7858
MTDRKNLTTNQGVPVGDNQNSMTAGRKGPTLIEDYVLIEKLAHFDRERVPERVVHARGAGAHGKFVTKKSMKKYTMAKFLQEEGTETEVFARFSTVIHGQHSPETLRDPRGFSVKFYTEEGNYDFVGNNLPVFFIRDAIKFPDVIHSLKPDPRTNIQDGNRYWDFFSLTPEATTMIMYLFSDEGTPASYREIRGSSVHAFKWINEEGKTVYVKLRWIPKAGIVNLSTEQASQIQAKEFNHASRDLYEAIENGDYPEWDLYVQVLDPKDLDNFDFNPLDATKDWFEDVFPYEHVGTMTLDRNPDNIFAETESVGFNPGVLVRGMLPSEDRLLQGRLFSYSDTQRHRVGPNYLQLPINSPKAPVANNQRDGHMPFKQQTSSINYEPNSYDTEPKENPAFIEPEQEIRGDISGRLIAEKPNNFGHAKEVWDRYSDAERAALVKNIVDDWSQVRDDIKIRNLRNFYQVDPEFASRVAAGTGVNLEAHVADLK

SEQ ID NO: 7345 - protein, 613 aa, Bacillus cereus ATCC 10987
MKKVGFFQSIHLKFVLIYMLLILIAMQVIGVYFVRELEKSLVQGFRDSLTQQTNLLSYNLKQEFKKSYTKAETESTGETIKTSIRKFASDRKKDIQEVSVFDANRKLLAISDESKQNKVNRTSTDIAVQRVLVQKKPEVKIEKDGRTGHRVQVMITPIMDDNNKDALGAIYVVASMEDVYKQMKDINQIFATGTVIALLVTAVLGILLAQTITRPISDMRRQAIEMAKGNYSRKVKVHSHDEIGQLALSFNNLSKKLQQARSSTESERRKLSSVLSHMTDGVIATDRKGDIILLNDPAEKMLNVSRETALDQSVLEVLGIQEEFTLDHLYEEPDSVLLDFSTRNEPYILRASFSVIQKETGKANGLIAVLYDVTEQERIERERREFVANVSHELRTPLTTMRSYLEALTDGAWQDPNIAPQFLTVTQEETERMIRLVNALLQLSKLDSTEHRLMKEWIDFTDFFNNIIDRFEMSKEQNVSFKRSFSKKSRFIDMDTDKITQVLYNIISNALKYSPEGGTVTYRLRDRGELLEISVSDQGMGIPKENVDKIFERFYRVDKARSRQMGGTGLGLAIAKEMIEAHGGSIWAKSEEGKGTTIYFTLPMAADEEDEWE

SEQ ID NO: 7346 - protein, 416 aa, Rubrobacter xylanophilus DSM 9941
MEDQRPQRRMRVADIIGAAGREALSRKERGILRTAVTAFVSAVLGGLITAAAIFAGVVGLGEGGGDVTIREVPGGGNIETRFGQGLSVQEIYEESGPGVVSVDVASGELGPGGGSGFVLDEEGHVVTNQHVVDGAGEVSVRFANGVRRPAEVVGEDPSTDIALLKVEAPKSMLHPLALGDSESVEVGDPVVAIGNPLNVGLSVTTGIVSGLDRPIKAPNNYTIDGAIQTDAAISSGNSGGPLLDARGAVIGVNSQVASAGAQGVAQGVGFAVPSDTVKSVVRQLITEGEVEHGYIGVRMFTLGVDEISAYTGLSKEELADRYDLPPNGAIVSEAVRGGPAYRAGIRGGPEKEVRGIPVPMGDVITRVGEKKVVSPDDVIEVVNSRRPGETMRLRVVTPGEEPREVRLVVAPQPDEV

SEQ ID NO: 7347 - protein, 533 aa, Methanothermobacter thermautotrophicus str. Delta H
MVHLAKYIVVTGGVVSSIGKGITAASIGRILRSYGLSVTAIKIDPYLNWDSGTLNPYQHGEVFVTDDGMETDLDLGHYERFLDSDLPGEANITTGKVYMSVINKERSGDYLGSCVQIIPHITDEIKSMIRKIADKSGAEVVLVEVGGTVGDIEGQPFLEALRQLRNEEGHENVMFVHVTYVPYLRAAGEFKTKPTQHSTKELRSTGINPDMIICRSEMPIDSSLKRKIAHFCDVEEEAVVNAPDASSIYEVPLVLDSERVGDYIVRRIELDVDGEADLSEWAGIVESLMIDEPVVTVGIVGKYVELEDSYISIREALKHAAAHLRVRVDIEWISADDAVNEEDLSRLDSILIPGGFGERGIAGKLEAVRFALENRVPIFGICLGMQCMVIEFARLNGMEGANSTEFDPETPYPVIDMMEEQKRIKNMGGTMRLGSYQCRIREGTLAHEAYGTELVGERHRHRFELNNEFREELESKGLIISGTSPDDFLVEMVEIKDHPWFLGCQFHPEFRSRPNRAHPLFVSFLRAALERSR

SEQ ID NO: 7348 - protein, 733 aa, Trichodesmium erythraeum IMS101
MSYCFNLNCQKPQNPNDVKFCQNCGSKLLLRGHYQGIKPIGNGSFGRTLLAVDLDRFNTPCVVKQLAPKNNNLLSNNKVLELFKREAKQLLKLGKHPQIPTFYAYFEEDENLYLVEELITGKNLLQELESEGAFSEKKIWKILYEILPLLKFIHENKVIHRDIKPENILRVDGVNSLKVGENQKDQLVLIDFGVSKFSSEVDYDKIGTITGTLGYSPIEQIRGGKAYPASDLYSLGMTCIHLLTEVPPNQLFDSFSGELIWRSHLIKKGKNISDRLGKILDKLVKDLVKERYQSATEVLIEIAIVSTQNDNQIPQINQLNLSEKKYLEKSQKFQKNPQKESPVDVILQVEINSCKNQKKLSELGDYRLKERYSNNGDSYQEITEKLSYNHYLQYNSKLLDNVIEFEHKKANFVPKKTKIRNYVELSQLWKTVQIIKDNTAPINTIAIDTQDLILVSGSDDKKIRLWNLQTGQLLHKFLGHTAEVYAIAISVDGRRIISAGDDRTILVWNLQKKTIADRFYSYSGSPYSHRYGAIFSVAISPNCETIASGSADQTVKIWNQRNGELLYKLHEHLDRVFCVTYSKVNNICTEKNSNDILASCSADGAIKIWQVGCCQSLRTLRGHSGDVYSVAFSSDGKAIASGGEDKTIRLWDVGTGELVNIFEGHSRAVLSVAISPDDQILASGSIDGTVKLWNLRTGKLLDSLCGYHPVQFSPNGKILVSGGEEGRILIWRF

SEQ ID NO: 7349 - protein, 76 aa, Triticum aestivum
MDLSMKVVVVVLLLLVTTEDQGPVQLALARDCQSKSFKFKGMCVRDDNCASVCLLEGFTGGKCKGFWHRCYCTKDC

SEQ ID NO: 7350 - protein, 140 aa, Rickettsia typhi str. Wilmington
MTIQYTFSMIKPDVIKRNKIGQVNTYLENAGLKIVAQKMKFLTKYEAECFYDEHRARPFFNSLVEYITSGAVVLQVLKGEDAITLNRIIMGATNPAEAKEGTIRKDLGESIEANSIHGSDSENSAKREIKFFFSKSEIIE

SEQ ID NO: 7351 - protein, 365 aa, Aspergillus fumigatus
MAEFVRAQIFGTTFEITSRYNLQPVGMGAFGLVCSARDQLTGQPVAVKKIMKPFSTPVLSKRTYRELKLLKHLRHENIISLSDIFISPLEDIYFVTELLGTDLHRLLTSRPLEKQFIQYFLYQILRGLKYVHSAGVVHRDLKPSNILINENCDLKICDFGLARIQDPQMTGYVSTRYYRAPEIMLTWQKYDVEVDIWSAGCIFAEMLEGKPLFPGKDHVNQFSIITELLGTPPDDVIQTICSENTLRFVKSLPKRERQPLANKFKNADPEAVDLLERMLVFDPKKRIRAGEALAHEYLSPYHDPTDEPEAEEKFDWSFNDADLPVDTWKIMMYSEILDFHNIDQGNDAGQVLMEGGVAQAQQNYA

SEQ ID NO: 7352 - protein, 463 aa, Zea mays
SLLPSSVQQQASSTPPAAAVAARSKVFGGGVNQARTRTGCRVGITRKNFGRVMMALAVDVSRFEGVPMAPPDPILGVSEAFKADKSELKLNLGVGAYRTEELQPYVLNVVKKAENLMLEKGENKEYLPIEGLAAFNKATAELLLGADNPVINQGLVATLQSLSGTGSLRLAAAFIQRYFPEAKVLISSPTWGNHKNIFNDARVPWSEYRYYDPKTVGLDFEGMIADIEAAPEGSFVLLHGCAHNPTGIDPTPEQWEKIADVIQEKKHMPFFDVAYQGFASGSLDEDAFSVRLFVKRGMEVFVAQSYSKNLGLYSERVGAINVVCSAPEVADRVKSQLKRLARPMYSNPPIHGAKIVANVVGDPIMFGEWKQEMELMAGRIKNVRQKLYDSLSAKDKSGKDWSFILRQIGMFSYTGLNKAQSDNMTDKWHIYMTKDGRISLAGLSLAKCDYLADAIIDSFHNVN

SEQ ID NO: 7353 - protein, 232 aa, Actinobacillus actinomycetemcomitans
MNYITFPTAQHAVEKIAQEFVIYSQLNHPAHISLSGGSTPKLLFKTLAQSPYAEQINWRNLHFWWGDDRMVSPSDPESNYGEVQKLLFDHIQIPAENIHRIRGENEPHFELKRFQAELSAVISDGVFDWIILGMGADGHTSSLFPHQTNFDDENLAVIAKHPESGQIRISKTAKLIEQAKRITYLVTGEGKAEILKEIQSTPAENLPYPAAKIYAKNGVTEWYLDKDAAKLL

SEQ ID NO: 7354 - protein, 232 aa, Haemophilus influenzae
MNYISFPTAQHAVDKIAQEFVIYSQLNHPVHISLSGGSTPKLLFKTLAKSPYAEQINWKNLHFWWGDDRMVPPSDPESNYGEVQKLLFDHIQIPAENIHRIRGENEPHFELKRFEEELSAVIPNGVFDWIILGMGIDGHTASLFPHQTNFDDENLAVIAKHPESGQIRISKTAKLIEQAKRITYLVTGESKADILKEIQTTPAENLPYPAAKIKAKNGVTEWYLDKAAVRLL

SEQ ID NO: 7355 - protein, 237 aa, Prochlorococcus marinus subsp. marinus str. CCMP1375
MFLNWLNPKKVEAQGKTTSKHFVLNSLINKPANKDEEEIFFGCGCFWGAEKGFWKLPGVITTAVGYAGGAKKNPTYREVCSGRTNHAEVVRVIWNKLEIDLSDLLKMFWECHDPTQGNRQGNDSGSQYRSAIYLTKQDHKTLAINSLEKYQVLLQEKGFGSITTQIETNIDFYYAEDYHQQYLAKPGSRPYCSAMPTNVSLKDFKGSNYKLNSRVWDNFNWEQNHCVLRSSNSPIIN

SEQ ID NO: 7356 - protein, 175 aa, Glycine max
  misc_feature (104)..(104): Xaa can be any naturally occurring amino acid
  misc_feature (147)..(147): Xaa can be any naturally occurring amino acid
  unsure (1)..(175): unsure at all Xaa locations
ELSFPRQVVALCQAPFLLDDPNVGLLFPADAIARAKHYLSLTSGGLGAYSDSRGLPGVRKEVAEFILKRDGYPTDPELIYLTDGASKGVMQILNTIIRGQDDGXPQYPLYSATIALLGGTLVPYYLEETANWGLDVNELRQSVEQAXKGITVKAMVIINPGNPTGQCLSEANLRE

SEQ ID NO: 7357 - protein, 973 aa, Zea mays
  misc_feature (541)..(541): Xaa can be any naturally occurring amino acid
  misc_feature (558)..(558): Xaa can be any naturally occurring amino acid
  misc_feature (578)..(578): Xaa can be any naturally occurring amino acid
  unsure (1)..(973): unsure at all Xaa locations
MASTKAPGPGEKHHSIDAQLRQLVPGKVSEDDKLIEYDALLVDRFLNILQDLHGPSLREFVQECYEVSADYEGKGDTTKLGELGAKLTGLAPADAILVASSILHMLNLANLAEEVQIAHRRRNSKLKKGGFADEGSATTESDIEETLKRLVSEVGKSPEEVFEALKNQTVDLVFTAHPTQSARRSLLQKNARIRNCLTQLNAKDITDDDKQELDEALQREIQAAFRTDEIRRAQPTPQDEMRYGMSYIHETVWKGVPKFLRRVDTALKNIGINERLPYNVSLIRFSSWMGGDRDGNPRVTPEVTRDVCLLARMMAANLYIDQIEELMFELSMWRCNDELRVRAEELHSSSGSKVTKYYIEFWKQIPPNEPYRVILGHVRDKLYNTRERARHLLASGVSEISAESSFTSIEEFLEPLELCYKSLCDCGDKAIADGSLLDLLRQVFTFGLSLVKLDIRQESERHTDVIDAITTHLGIGSYREWPEDKRQEWLLSELRGKRPLLPPDLPQTDEIADVIGAFHVLAELPPDSFGPYIISMATAPXSDVLAVELLQRECGVRXQPLPVVPLFERLADLQSAPXASVERLFSVDWYMDRIKGKQQVMVGYSDSGKDAGRLSAAWQLYRAQEEMAQVAKRYGVKLTLFHGRGGTVGRGGGPTHLAILSQPPDTINGSIRVTVQGEVIEFCFGEEHLCFQTLQRFTAATLEHGMHPPVSPKPEWRKLMDEMAVVATEEYRSVVVKEARFVEYFRSATPETEYGRMNIGSRPAKRRPGGGITTLRAIPWIFSWTQTRFHLPVWLGVGAAFKFAIDKDVRNFQVLKEMYNEWPFFRVTLDLLEMVFAKGDPGIAGLYDELLVAEELKPFGKQLRDKYVETQQLLLQIAGHKDILEGDPFLKQGLVLRNPYITTLNVFQAYTLKRIRDPNFKVTPQPPLSKEFADENKPAGLVKLNPASEYPPGLEDTLILTMKGIAAGMQNTG

SEQ ID NO: 7358 - protein, 529 aa, Wolbachia endosymbiont of Drosophila melanogaster
MKEAKFIFVTGGVVSSLGKGLVASSVGALLQAHGFKIRIRKLDPYLNIDPGTMNPTQHGEVFVTEDGAETDLDLGHYERFTGIKATKDDNITTGKIYHELLKKERRGDYLGKTVQVIPHVTDLIKSFIFNGTEGLDFVICEIGGTVGDIESQPFLEAIRQVNYTLGKQRVILIHLTLIPYLAAAQELKTKPTQHSVRELNSAGLQPDIILCRSEKEIFDNQREKIAKLCNVSLSNVIPAPDVSHIYELPVLYSQCGLDTQILEHFHLSKPKPSLTEWDQIVHSIRHPTQEVTVSIVGKYTEFPDAYKSLVEALNHGAISNKVKVKINWVNSREKEEKPIGEKLQNSHAILVPGGFGDDGVEGKILAINYARTNNIPFFGICLGMQLAIIEFARNVVKLEDAHSEEFRNCKHPIVKLAGDQDDDLGGTMRLGAYKCNINANSKMMDAYSNTTISERHRHRYIINSDYKDDLEKNGLLCSGISEDGTCIEAVELESHPWFIGVQFHPEFQSKPFSPHPLFVSFVKAAIDKK

SEQ ID NO: 7359 - protein, 451 aa, Candida albicans SC5314
MSDTIATKEEASKIFDRLKKDPANQVCFDCSNKNPTWTSIPFGIFLCLQCSAVHRNLGVHISFVKSSNLDSWQRIQLRNFKFGGNQQAKDFFLKNGGSQFVNNKNGVDATAKYTSPCANKYKEKLKQKAAQDAAKHPDIVTLDDVTDVMSLSDSPSESTDDFFSNWNKPVNNSNTASPLSSRAATPNASTDDLTKKKPVVRTTTTSARLKSNNTAVKKSILSGKGNGPRTSRLAAKRINKTEDDIDFDEIEKKAKQEAEEAKKLGYKPTETVEPTVKKQPTSTSLSLKKENEEVKLTPAPIQETTQQFQKLGFGMTQGDNIVGSSTKKYKEVKYTGEVSNKYGTQKGISSDEFFGRGPRFDEQAKTEARTKLQAFNGAQSISSSSYFGEEEGGARGGRSNSGAGGLGDLEASAREFASKFSGNANQDLEVLKDALEDGATKLGSYLRDFLR

SEQ ID NO: 7360 - protein, 420 aa, Saccharomyces cerevisiae
MLAASFKRQPSQLVRGLGAVLRTPTRIGHVRTMATLKTTDKKAPEDIEGSDTVQIELPESSFESYMLEPPDLSYESSKATLLQMYKDMVIIRRMEMACDALYKAKKIRGFCHLSVGQEAIAVGIENAITKLDSIITSYRCHGFTFMRGASVKAVLAELMGRRAGVSYGKGGSMHLYAPGFYGGNGIVGAQVPLGAGLAFAHQYKNEDACSFTLYGDGASNQGQVFESFNMAKLWNLPVVFCCENNKYGMGTAASRSSAMTEYFKRGQYIPGLKVNGMDILAVYQASKFAKDWCLSGKGPLVLEYETYRYGGHSMSDPGTTYRTRDEIQHMRSKNDPIAGLKMHLIDLGIATEAEVKAYDKSARKYVDEQVELADAAPPPEAKLSILFEDVYVKGTETPTLRGRIPEDTWDFKKQGFASRD

SEQ ID NO: 7361 - protein, 137 aa, Methanopyrus kandleri AV19
MAEKEGKKEKKERWGIAHIYASFNNTIITITDLTGAETFARWSGGMVVDADREESSPYAAMKAARRAAEEAMEKGITAVHVKVRAPGGHGPKTPGPGAQAAIRALARAGLKIGRIEDVTPIPHDGTRRPGGKRGRRV

SEQ ID NO: 7362 - protein, 138 aa, Lycopersicon esculentum
MSPLRQSASSSASDDDQRYAGMDEKKRKRMISNRESARRSRMKKQKLLQDLTGEVSRLQGANKNIVSKIDETTERYAICAAQNNVLRAQAMELTDRLRYLNDVIDSTGLAADVADPLLKPLQNPCAMQPIASSGLFKF

SEQ ID NO: 7363 - protein, 329 aa, Bradyrhizobium japonicum
MTKYKLEYIWLDGYTPTPNLRGKTQIKEFASFPTLEHVPLWGFDGSSTQQAEGHSSDCVLKPVAVFPDAARTNGVLVMCEVMMPDGKTPHASNKRATILDDAGAWFGFEQEYFFYKDGRPLGFPTSGYPAPQGPYYTGVGFSNVGDVARKIVEEHLDLCLAAGINHEGINAEVAKGQWEFQIFGKGSKKAADEMWMARYLMLRLTEKYGIDIEFHCKPLGDTDWNGSGMHANFSTEYMRTVGGKEYFEALMAAFDKNLMDHIAVYGPDNDKRLTGKHETAPWNKFSYGVADRGASIRVPHSFVNNGYKGYLEDRRPNSQGDPYQIVRRS

SEQ ID NO: 7364 - protein, 486 aa, Arabidopsis thaliana
MEDETQTLILITILILTLITLTFLIKKLKPKPNLPPSPPFSLPIIGHLRLLKPPLHRLFLTISKSLNDSPIFSLRLGNKLVFVVSSHSIVEECFTKNDVVLANPPYSEHWRNLRRIGAVEIFSNHRLNSFYTIRRDEIRRLIARLSRSPNASLEFAKVEMNSMLSNLAFNNIIRMVTGKCYYGDGAEDDPEAKRVRQLIAEAMSCFGAGHAADHLPMLRWITDFERRVKKIAARLDEFFQRLVDEKRVAKEKKENTMIDHLLSLQVSQPEYYTDHTIKGTMLSLILAGTDTSAVTLEWALSSLLNNPEVLKKVRDEIDNQIGLDRLLEESDIPNLPYLQNIVSETLRLYPAGPLLVPHISSEDCKVGGYDMPCGTMLLVNVWAIHRDPRLWDDPASFKPERFEKEGETHKLLTFGLGRRACPGSGLARRLVSLSLGSLIQCFEWERIGEEEVDMTEGGGLTMPRAIPLVAMCRARAFVGKIPHESG

SEQ ID NO: 7365 - protein, 349 aa, Solanum tuberosum
MSPPLLGVGEEEGQSNVTLLASSTSLGSICKKGSALKERNYMGLSDCSSVDSCNISTSSEDNNGCGLNLKATELRLGLPGSQSPERGEETCPVSSTKVDEKLLFPLHPAKDTAFSVSQKTVVTGNKRGFSDAMDGFSEGKFLSNSGVKSGDAKETSHVQPTKMKDANTHSTVPERPSAVNDASNRAGSGAPATKAQVVGWPPIRSFRKNTLASASKNNEEVDGKAGSPALFIKVSMDGAPYLRKVDLRTYSAYQELSSALETMFSCFTIGQYGSHGAPGKDMLSESKLKDLLHGSEYVLTYEDKDGDWMLVGDVPWEMFIDTCKRLRIMKGSDAIGLAPRAMEKCRSRN

SEQ ID NO: 7366 - protein, 390 aa, Bradyrhizobium japonicum USDA 110
MREAVIVSYARTGLAKSGRGGFNITPPMSLAAHAIRHAVDRAGVDKDYVEDCYLGNCAHGAPNIGRQAALLAGLPKTTAGVSVNRFCSSGLQTIAMAANSIRSDGADCIVAGGVESISVPGGGTPKESIDPELLKVAPDIFMAMIDTADIVAERYKLSREYQDEFSLESQRRMAAAQQANKFKDEIVPMKTKMKVVDKQTKAESIVDYVVDRDECNRPETTLEGLAKLEPVKGPGKFVTAGNASQLSDGAAAVVLMEAKDAEKRGLKPLGRFVAWATAGCEPDEMGIGPVFAIPKLLKRTGLKIDDIDLWELNEAFASQCLYCRDQLGIDPAKYNVNGGSIAIGHPFGMTGARLTGHLLQEGARRKAKWGVVTMCIGGGQGGAGLFEIYS

SEQ ID NO: 7367 - protein, 918 aa, Salmonella enterica subsp. enterica serovar Paratyphi A str.
MTNYSLRARMMILILAPTVLIGLLLSIFFVVHRYNDLQRQLEDAGASIIEPLAVSSEYGMNLQNRESIGQLISVLHRRHSDIVRAISVYDDHNRLFVTSNFHLDPSQMQLPAGAPFPRRLSVDRHGDIMILRTPIISESYSPDESAIADAKNTKNMLGYVALELDLKSVRLQQYKEIFISSVMMLFCIGIALIFGWRLMRDVTGPIRNMVNTVDRIRRGQLDSRVEGFMLGELDMLKNGINSMAMSLAAYHEEMQHNIDQATSDLRETLEQMEIQNVELDLAKKRAQEAARIKSEFLANMSHELRTPLNGVIGFTRLTLKTELNPTQRDHLNTIERSANNLLAIINDVLDFSKLEAGKLILESIPFPLRNTLDEVVTLLAHSSHDKGLELTLNIKNDVPDNVIGDPLRLQQVITNLVGNAIKFTESGNIDILVEKRALSNTKVQIEVQIRDTGIGIPERDQSRLFQAFRQADASISRRHGGTGLGLVITQKLVNEMGGDISFHSQPNRGSTFWFHINLDLNPNVIIDGPSTACLAGKRLAYIEPNATAAQCTLDLLSDTPVEVIYSPTFSALPLAHYDIMILSVPVTFREPLTMQHERLAKAASMTDFLLLALPCHAQINAEKLKQGGAAACLLKPLTSTRLLPALTEYCQLNHHPEPLLMDTSKITMTVMAVDDNPANLKLIGALLEDKVQHVELCDSGHQAVDRAKQMQFDLILMDIQMPDMDGIRACELIHQLPHQQQTPVIAVTAHAMAGQKEKLLSAGMNDYLAKPIEEEKLHNLLLRYKPGANVAARLMAPEPAEFIFNPNATLDWQLALRQAAGKPDLARDMLQMLIDFLPEVRNKIEEQLVGENPNGLVDLVHKLHGSCGYSGVPRMKNLCQLIEQQLRSGVHEEELEPEFLELLDEMDNVAREAKKILG

SEQ ID NO: 7368 - protein, 398 aa, Burkholderia fungorum LB400
MFTFNPAFAAPTGSPIRELFKYLAQPGMISFAGGYPASDLFDRDGLDAAAARASQHPTLCLQYGPTDGLVVLKEQLAHLMTRRGTPCTPPELLVTTGSQQGFDLLLRVMVAPGDVVLVEQPAYPATLQALKLQEADVVTIPVDQNGLDVDALAALLESGTLRRAPKLLYTVPTFANPTGATLSLERRVALLKLAVRHRFLIVEDDPYGDLRFSGAALPSLLALSAQVPGSRDWVVHFSSLSKIVAPGLRVGWMLAHAEILRRCVVAKQTVDLCSSPWTQAIAAEYLASGALERHLPRIVDAYAVKCRTLCDALEAQLADHIVFHRPAGGMFVWARLKAGQNASDYLRGCIGRNVMFVPGVAFYKDNIDAAALRLSFAAPGVADIETGVQRMKQALEHF

SEQ ID NO: 7369 - protein, 154 aa, Prunus persica
MALSLFGGRRSNVFDPFSLDIWDPLEGLGTLANIPPSARETTAIANTRIDWKETPEAHIFIADLPGLKKEEVKVEVDDGKVLHISGERSREQEEKNDKWHRIERSTGKFSRRFRLPDNAKIDQVKASMENGVLTVTVPKEEEKRPQVKAIDISG

SEQ ID NO: 7370 - protein, 326 aa, Bradyrhizobium sp. BTAi1
MKTRTLVAALAGISLAWPVAAFAQDAPVEQQLVDAMNKVFGVHAGFRANHAKGVVVEGKFKPSAEAASLSRASLFSGGEIPVTVRFSDSTGVPNLPDGSDDANPHGMAVKFHLADGSDMDLVINSLKFFPVSTGAELRDLFLAIADSGPGAAKPTRLEQFIGSHPSVPAALGTIATPDSFANEAYFGVNAFMLVNKAGARQAVRWQMLPEKVVHLDKADAAKRAPDFLMTELPARLKQGPVAFRFMAQLAAAGDDTKDPAKPWPADRKLAALGTLTIDKAVDDSDAAQKKLLFLPGQLTDGIEASDDPMIDIRNGAYAISFSRRNP

SEQ ID NO: 7371 - protein, 283 aa, Arabidopsis thaliana
  misc_feature (233)..(233): Xaa can be any naturally occurring amino acid
  unsure (1)..(283): unsure at all Xaa locations
MSSHGDEIEDEQISRIEKGNGKDCQGGIETAICTSPSIVCLTQKLIAEMIGTYFIVFSGCGVVVVNVLYGGTITFPGICVTWGLIVMVMIYSTGHISGAHFNPAVTVTFAVFRRFPWYQVPLYIGAQLTGSLLASLTLRLMFNVTPKAFFGTTPTDSSGQALVAEIIISFLLMFVISGVATDSRATGELAGIAVGMTIILNVFVAGPISGASMNPARSLGPAIVMGRYKGIWXYIVGPFVGIFAGGFVYNFMRFTDKPLRELTKSASFLRAVAPSHKASSSEA

SEQ ID NO: 7372 - protein, 492 aa, Triticum aestivum
MDPYKHRPTSGANSAYWTTNSGAPVWNNNNALTVGHRGPILLEDYHLIEKLAQFDRERIPERVVHARGASAKGFFEVTHDVSQLTCADFLRAPGVQTPVIVRFSTVVHERGSPETLRDPRGFAVKFYTREGNFDLVGNNMPVFFIRDGMKFPDMVHAFKPSSKTNMQENWRVVDFFSHHPESLHMFTFLFDDVGIPLNYRHMDGFGVNTYTLISRDGKAHLVKFHWKPTCGVKCLLDDEAVTVGGTCHTHATKDLTDSIAAGNYPEWKLFIQTIDADHEDRFDFDPLDVTKTWPEDIIPLQPVGRMVLNKNIDNFFAENEQLAFCPAVTVPGIHYSDDKLLQTRIFSYADTQRHRLGPNYLMLPVNAPKCAHHNNHHDGLMNFIHRDEEVNYFPSRVDPTRHAEKDPMPPRVLSGCREKCIIDKENNFKQAGERYRSFDPARQDRFLQRWVDALTDARVTHEIQSIWVSYWSQCDASLGQKLASRLKIKPNM

SEQ ID NO: 7373 - protein, 173 aa, Triticum aestivum
MAMRALALSPSQSSSFGLHQSMPSFKPSSASPARSVRAYAKADEQEEEKKKVPKQSLFGNITEALDFSQVRSEKDAELLYEARDSIKDEGRMTREQYAALRRKIGGTYKDFFKSYVEVDGEYVEEGWVDKTCKVCKKDTRGEPRQVDNLGRYMHVACAENSKPTNFFSKLFGR

SEQ ID NO: 7374 - protein, 421 aa, Pseudomonas syringae pv. tomato str. DC3000
MTESVLDYMTRLGRAAREASRVIGRASTAQKNRALQATAAALDEARDELSAANALDLAYGQANGLEPAMLERLALTPARIDSMIVGLRQVASLADPVGAIRDMSYRPSGIQVGKMRVPLGVVGIIYESRPNVTIDAASLCLKSGNATILRGGSEAIHSNRAIAACIARGLAEAGLPAAVVQVVETTDRAAVGALITMPEYVDVIVPRGGKGLIERVSRDARVPVIKHLDGICHVYVSAHADLPKAQKIAFNAKTYRYGICGAMETLLVDQTIAADFLPAMAAQFREKGVELRGCERTRELIDVMPATEDDWHTEYLAAILSIRVVSGLDEAIEHINHYGSHHSDAIVSDHQSQIRRFMAEVDSSSVMVNAPTSFADGFEYGLGAEIGISTDKLHARGPVGLEGLTCEKYIVIGDGQLRGHA

SEQ ID NO: 7375 - protein, 610 aa, Clostridium perfringens str. 13
MGKITREAIHHIAQSNYSYGYDNETLHLRVKTKKGEVNKVEIRIGDPYIWDEGGCDGGNMNATGGRWTGGKSYPMRKECETKYFDHWIVGYKPLTKRSRYGFILYGDEETLLCTEKRIEELDGKYDEEKLSAIGNFYCFPYLNAIDVAKTPQWVKDTVWYQIFPDRFCNGDKSIDPENVEPWGTEPTRDNFMGGDLQGVLDKLDYLCDLGINGLYFCPVFEATENHRYETIDYFKVDPALGGNEVFKKLVSEAHKRGMKIMLDAVFNHIGYFSPKWQDVLKNNEKSRYKDWFCIKKFPVLENGLENVDGNNLNYETFGRIATMPKLNTENPEVVEYLLKVAKFWVEEMDIDGWRLDVCNEVDHVFWRKFREVVKGTNKEVYILGEVWHDGLPWLMGDQFDSVMNYPVTDAVKEYFCLNQSNPEDFKYMIEANKVSYLRQIGETIFNLLDSHDTPRILTVAGGNKDKMKLAYLFMFTQAGSPCIYYGDEVGMEGNQGMGMEFHRRCMIWDENKQDKDMLKFMKQIIKIRKENKELNLLDNNWIRANKDENILIYSKENIFIIMNNSENEEKIYLPKELKNNKINDLFEEKIELLKEDIDLKPFAFKVYKKL

SEQ ID NO: 7376 - protein, 530 aa, Debaryomyces hansenii CBS767
MMPSSIVVNSENNEDQSSKTGKIVEEEWNVSDTALSSESTLYENSGFSERYLEKSKLLSRAIDEIGFGKYQVGLFFVAGFGWLSDNAWPIVTSLILPRLTEVDGVHSPAGKGPYLTLAQNLGLLAGALVWSLSSDIIGRRWAFNLTFLCTAIWATVAGSSPNFAAIGVFSALWSFGVGGNLPVDSAIFIENLPSRQKYLLTMMSGFWALGQILANLISWGLIGNYSCSDTDTVCHKADNKGWRYFLFTMGGITFLMFFSRFAFRVLESPMFYMARGDDEKAIENLYKIAKINGKSVSLTLEQLEEVDKKYGDQEIVPSKHAHLSKFKLTHIRDCFSSRKLAISTSLVIFAWGVIGLAFPLYNAFLPSYLERNGDANEPLPVHLVYRNSLIVAVIGIPGAIVAGICVELKIGRKGTLFISLILTGVFLYCSTTATTSNANLGWNCGFSFFSNIVYGVLYAYTPEIFPTRIRGTGVGLAASFNRVMGVFAPIIAIYADITTSAPIYVSGALFMFAGLLTLLFPYEPRGKSSY

SEQ ID NO: 7377 - protein, 814 aa, Potamogeton distinctus
MATRSLTRVLSMTERIGDSLGAYPEDLSTLFTKYIEHGKGMLQRHEILAEFEALTKGGDKDHLKNGAFGEVLMAAQEAIVLPPMVAMTVRPRPGVWGYIRVHVNDLSVESMNVTDYLKFKEQLIDGCDSNFTLELDFEPFNASFPRPTLSKSIGNGVEFLNKHLSSKLFNDKDSIFPLVDFLRNHNYKGTSIMLNVKIQSVSALESALRKAEEHLLSIPLDTPYSDFDAKFRDLGLEKGWGNTAKRVLESIHLLLDLLEAPDPCTFEKFLSIIPMVFNVVILAPHGYFAQANVLGYPDTGGQVVYILDQVRALENEMLLRIKQQGLDIVPKILVVTRLLPDAVGTTCCELVEPVEGTVHTNIIRIPFRTEEGILRKWISRFDVWPYLETYAEDCIKEVTKQLQAKPDLIIGNYSDGNLVASLMAHKLEVTQCTIAHALEKTKYPNSDLYWKKLDDHYHFSCQFTADLLAMNHADFIITSTYQEIAGSKNTVGQYESHIAFTMPGLYRVVHGINVFDPKFNIVSPGADMDIYFPYTEKEKRLVHLHPEIEELLYSQVDNTEHKFALADKTKPIIFSMARLDRVKNLTGLVELYGKNARLRELANLVIVCGDHGKESKDKEEQAELKKMFSLIEEHKLNGQIRWISAQMDRVRNGELYRVIADSGGVFVQPAFYGAFGLTVVESMTCGLPTFATVHGGPGEIIVNGVSGFHIDPYLGDKVSEILVNFFEKSKADPSHWKAISQGGLKRIYEKYTWKLYSERLLTLTTIYGFWKHVSNLERRETRRYLEMFYGLKYRPLADKVPLAVDAKPTTNGSA

SEQ ID NO: 7378 - protein, 79 aa, Lactococcus lactis subsp. cremoris
MLKPLENRVVLRVKEEEEKSMGGIVLTSASQEKPQTAEVIAVGEGKTTNHGTLISPLVKVGDTVIFEKFAGTTVKMDGE

SEQ ID NO: 7379 - protein, 464 aa, Cytophaga hutchinsonii
MPNVTPELYDSVMLIKQQMLVDSLNHAQAALNDSLHATNDLMFKTRTELQLTQNSLANSSFKANNIWMMVATAFVFIMHLGFATLESGLTQAKNTTNVLFKNSIVPAIGIMTHALCGFNLMYPGFEFGVSMDFIGFKGWGVELPEGGETFVYNPGMTYWTDFLFQAMFAATAATIVSGAVAERIKLFSFMVFSFFFTAFIYPIIGSWKWGGGWLNTIGFSDFAGSTLVHSVGGWAALAGVILLGPRLGKFNKGVINPIQGHSMTSAVIGTFLLWLGWFGFNGGSVLSAEPGMVSRVLVMTCISGSSGAIAAAFSIFAINKHFDLSMVLNGILAGLVGITAGADQMGIIDATLIGLISGCLVVFAIITFEKIRLDDPVGALSVHLVCGIWGTLAVALFGAKAGAAQFVTQLIGIGSVAVAAFGSSFLILLAIKYTIGLRVGKEEEIYGLDASEHYMEAYPNFMSK

SEQ ID NO: 7380 - protein, 842 aa, Potamogeton distinctus
MPERKLARLHSIKEQLSDSLAAHPNELLAIFSRFVHHGKGMLQPHELLAEFEAVIPDGDKEKLRDGAIGELLKAAQEAIVLPPWVALAIRPRPGVWEYIRVNVNELAVENMTIPEYLQFKEELVGEGIDNNFVLELDFEPFNVSFPRPTLSKSIGNGVQFLNRHLSSKLFHDKESMYPLLNCLRQHNYNGMTMMLNDRIRSLDALQAALRKAEEHLLLFPGDTPSSEFDHRFQELGLEKGWGDCAQRVHENIHLLLDLLEAPDPCTLEKFLGTIPMVFNVVILSPHGYFAQDNVLGYPDTGGQVVYILDQVRALENEMLLRIQQQGLDITPKILIVTRLLPDAVGTTCGQRLRKFLGTEHTHILRVPFRTENGILRKWISRFDVWPYLETYTEDVANEIAGALQAKPDLIIGNYSDGNLVATLLAHKLGVTQCTIAHALEKTKYPNSDLYWKEKESHYHFSCQFTADLIAMNHADFIITSTFQEIAGSKDTVGQYETHTAFTMPGLYRVVHGINVFDPKFNIVSPGADMSIFSPYTEDSERLTALHPEIEELLFSQVENADHKFVLNDRNKPIIFSMARLDRVKNLTGLVELYGKNQRLRELVNLVIVCGDHGKESKDKEEQAELAKMYNLIETHNLNGQIRWISAQMNRVRNGELYRYICDAKGAFVQPAFYEAFGLTVVEAMTCGLPTFATVHGGPGEIIVDGVSGFHIDPYHGDKVSELLVNFFEKCKVDPTHWVNISQGGLKRIYEKYTWKLYSERLMTLSGVYGFWKYVSNLDRRETRRYLEMFYALKYRNLAKSVPLAVDGAPALNGSKAAAVNGAKAALNGAEAALNGANGAGHH

SEQ ID NO: 7381 - protein, 522 aa, Saccharomyces cerevisiae
MKFSAGAVLSWSSLLLASSVFAQQEAVAPEDSLSLSWPPTLSMNTFSRTTWWLAEFFAPWCGHCKNMAPEYVKAAETLVEKNITLAQIDCTENQDLCMEHNIPGFPSLKIFKNSDVNNSIDYEGPRTAEAIVQFMIKQSQPAVAVVADLPAYLANETFVTPVIVQSGKIDADFNATFYSMANKHFNDYDFVSAENAEDDFKLSIYLPSAMDEPVVYNGKKADIADADVFEKWLQVEALPYFGEIDGSVFAQYVESGLPLGYLFYNDEEELEEYKPLFTELAKKNRGLMNFVSIDARKFGRHAGNLNMKEQFPLFAIHDMTEDLKYGLPQLSEEAFDELSDKIVLESKAIEPLVKDFLKGDASPIVKSQEIFENQDSSVFQLVGKNHDEIVNDPKKDVLVLYYAPWCGHCKRLAPTYQELADTYANATSDVLIAKLDHTENDVRGVVIEGYPTIVFYPGGKKSESVVYQGSRSLDSLFDFIKENGHFDVDGKALYEEAQEKAAEEADADAELADEEDAIHDEL

SEQ ID NO: 7382 - protein, 549 aa, Ralstonia metallidurans CH34
MTKFVFVTGGVVSSLGKGIAAASLAAILESRGLKVTLLKLDPYINVDPGTMSPFQHGEVFVTEDGAETDLDLGHYERFVSAKMRKSNNFTTGQIYESVIRKERRGEYLGKTVQVIPHITNEIQAFVERGAAASHDGKADVALVEIGGTVGDIESLPFLEAARQMSLRLGRNHCAFVHLTLVPFIASAGELKTKPTQHSVQKLREIGISPTALLCRADRPIPDDERAKISLFANIPQEAVISVWDADSIYKIPQMLNEQGLDRLICEELRLDPKPADLSMWQKLVKAQENPEHEITIGMVGKYVDLTESYKSLIEALRHAGMHTATRVNIEYIDSEELESGHLEVLQPLDAILVPGGFGKRGTEGKIRAIQYARENKVPYLGICLGMQLAVIEFARHVASMGDANSTEFNLDTEHPVVALITEWVDRDGKVEQRSADSDLGGTMRLGAQRVPIKTGTKASQIYGAEVNERHRHRYEVNNHYVPELEKAGMVISARTPTENLPEMMELPESMHPWFVGVQFHPEFTSTPRDGHPLFKAYVEAALAAQRQGA

SEQ ID NO: 7383 - protein, 490 aa, Alkaliphilus metalliredigenes QYMF
MYFIGIDIGTTSVKIIAIDEDGKIVKSVSKEYPLSYPKPLWSEQDPEDWWKQSINGFKELLDDLDKKEVKAIGFSGQMHGLVTLDENDKVVRPAILWNDQRTEKECNYLNNEIGQSKISQWTGNLALAGFTAPKILWLKENEPDNFAKTKKIMLPKDYVAYKMSGVFATDMSDASGTLYLDVKNRKWSSEMLRVLGVTESQLPDLFESYEAIGCMKPDIAQELGLSKDVKIIIGGGDQAVAAVGGGVVKAGSCSLSLGTSGVVFTSNEDFFVDENNSLHSFCHANGKYHLMGVTLAAAASLKWWVEGINKSDDFDGLLNEAKDAEVDDQLFYLPYLMGERTPHNDPNARGTFIGLNITHERKHMTRAVLEGVAFSLRDTFEIMKAMGVEINDISINGGGAKSTFWCEIIADVLNVKVNKLNSNEGPAYGAAILAAVGFGRFHTVEEACSQFIKITESINPNEENSKIYNEKYGKYTKIYPATKELFKQLI

SEQ ID NO: 7384 - protein, 346 aa, Alkaliphilus metalliredigenes QYMF
MKNRAVFMQGTDNMVTKDVPMPKIKEKDVLIKVDIVGICGSDVHYYKHGKIGDFVVEGEFILGHEAAGEVVEVGEQVKGLTVGDRVTMEPGKTCGKCEFCKGGKYNLCPDVEFFATPPYHGVLTNYVSHPEDMCFKLPKNVSNVEGALVEPLAVGLHASDQGGVKLGDTVVIFGTGCIGLMTIISCKAKGAAKIIVVDILENRLEVAKKVGATDTINAKEVNVLKKIQELTDGKGAEVVIDAAGAAITVKQTVDAVKPGGTIVLVGMTPKDEVEFNFMKLMGKEAEVKTVFRYRNLYPIAINAIASGAINIKDIVSHEFDFEQTKEAFDFVAEHASDVVKAVIKIK

SEQ ID NO: 7385 - protein, 276 aa, Oceanobacillus iheyensis HTE831
MSEFIAELVGTMILIIFGGGVVAGVVLKKSKAEGTGWVLITLGWGLAVALGVYAVGNFTGAHINPAVTIGFAAVGDFPWSKVPLYILAQVIGAIIGAIIVFLNYLPHWKVTESKEDKLGVFATGPAIRSPFSNLISEMIGTFALLLGLMFIGSNDFTEGLNPLIVGALIAAIGMSLGGTTGYAINPARDLGPRIAHAILPIPGKGSSDWGYAWIPVVGPIIGGVYGALFYDSVFLANYTFPFWVMTIFVIVLFIGAAVSELKTGSNPAEKMNQKLR

SEQ ID NO: 7386 - protein, 220 aa, Nitrosomonas europaea ATCC 19718
MNRIVLMIVDPIIEHYMHTLARRSDHPVLDEMEAFALEKSFPIVGRLVGISLEIYAKMIGARRVFEFGSGYGYSAYWFGRAVGPGGQVVCTDSNPLNREQAEQYLAAAGLWERVRFCTGYAQDIFGQTDGNFDICYNDADKGGYPDIWLMARERIRSGGLYIADNVLWHGWVAVEDSADAKPDWTKAIREHNRLILTDPEFDAFINPTRDGVIVARRKMA

SEQ ID NO: 7387 - protein, 495 aa, Xanthomonas campestris pv. campestris str. ATCC 33913
MYAPLALYDTAAARMLDAQATTLLGGDGYTLMQRAGQAAWQWLQERLPRARRIVVMCGTGNNGGDGYVLARLAHRAGRQVQVVHLPEQGPASELAQRACTDYLAVGGAIALFPCALAHADVLVDAVFGIGLNRAPGAQMDALFDAINAAGVPVLALDVPSGIDADRGIAPGSAVRASATLQFIVPHVGLYTGDALEYAGERDLATLEVPGSAFDGLAPVAQRWERDALAAHLLPRRRNTHKGESGRVLCVGGNAGSGGAIMLTTEAALRSGSGLVQVATRAEHVAPLLARCPEAMVRGVQEDADITALAEAADAVALGPGLGRDSWARALWSGVLASATPTVIDADGLNLLASTSVPARGPRVLTPHPGEAGRLLGQSTAQVQRDRLGAAHALATRFDAVVVLKGAGTVVAAPDRLPRLIDAGNAGMAVGGMGDLLTGVIASLLGQGWAPFDAASLGALLHACAGDAAAADGERGLLPTDLLPALRRLANAGAIA

SEQ ID NO: 7388 - protein, 214 aa, Oceanobacillus iheyensis HTE831
MSIRTILFDLDGTLIDTNTLIKASFEHTFKEYNLNFSNEEILKFNGPPLVDTFNKIDETKADRMITTFREHNIREHDNFVTAFPHVYDTLEELQNRNISLGIVSTKMRHTVHMGLELTGISKFFSTIITYDDVTHAKPHPEPVQMAMQKLGAHPEHTLMVGDNHHDIVSGQRANVQTAAVAWSLKDTNYLKSFHPDYIIEDIKDIITIVGDSFA

SEQ ID NO: 7389 - protein, 466 aa, Streptococcus suis 89/1591
ESSAQKIAALITEGANVFRFNFSHGDHQEQGDRMATVRRAEEIAGKKVGFLLDTKGPEIRTELFEDDAKEYAYTTGDKLRVATKQGIKSTKEVIALNVAGGLDVFDDVEVGKQILVDDGKLGLTVVEKDAVNREFVVLVENDGVIAKQKGVNIPYTKIPFPALAERDNADIRFGLEQGLNFIAISFVRTAKDVEVVRNICKETGNDHVQLFAKIENQQGIDNIDEIIEAADGIMIARGDMGIEVPFEMVPVYQKMIITKVNAAGKAVITATNMLETMTEKPRATRSEVSDVFNAVIDGTDATMLSGESANGKYPVESVRTMATIAKNAQTLLNEYGRLNSDQFNRASKTEVIASAVKDACHSMDIKLVVTVTETGYSARSISKYRPDADILAVTFTEKVQKSLMLNWGVIPIVTNRPDSTDDMFDLAERIAKEQGLVEAGDDIIIVAGVPVGVAGSTNTMRVRTVK

SEQ ID NO: 7390 - protein, 700 aa, Oryza sativa (japonica cultivar-group)
MITFVDSAAKERERESDKCLDPQLWHACAGGMVQMPPVSSKVYYFPQGHAEHAQGHGPVEFPGGRVPALVLCRVAGVRFMADPDTDEVFAKIRLVPVRANEQGYAGDADDGIGAAAAAAAQEEKPASFAKTLTQSDANNGGGFSVPRYCAETIFPRLDYSADPPVQTVLAKDVHGVVWKFRHIYRGTPRRHLLTTGWSTFVNQKKLVAGDSIVFMRTENGDLCVGIRRAKKGGVGGPEFLPPPPPPPPTPAAGGNYGGFSMFLRGDDDGNKMAAAARGKVRARVRPEEVVEAANLAVSGQPFEVVYYPRASTPEFCVKAGAVRAAMRTQWFAGMRFKMAFETEDSSRISWFMGTVSAVQVADPIRWPNSPWRLLQVSWDEPDLLQNVKRVSPWLVELVSNMPAIHLAPFSPPRKKLCVPLYPELPIDGQFPTPMFHGNPLARGVGPMCYFPDGTPAGIQGARHAQFGISLSDLHLNKLQSSLSPHGLHQLDHGMQPRIAAGLIIGHPAARDDISCLLTIGSPQNNKKSDGKKAPAQLMLFGKPILTEQQISLGDAASVDVKKSSSDGNAENTVNKSNSDVSSPRSNQNGTTDNLSCGGVPLCQDNKVLDVGLETGHCKVFMQSEDVGRTLDLSVVGSYEELYRRLADMFGIEKAELMSHVFYRDAAGALKHTGDEPFSEFTKTARRLNILTDTSGDNLAR

SEQ ID NO: 7391 - protein, 1186 aa, Nostoc sp. PCC 7120
MKRDTTGKFVSNWDSEPKHRYSVSLTSTAWRSLDEEAHKQGISRSELIEHFARNLGSEQSLADEAISTNAGNPEQQLILATVFHQDITNNQQLQLITSPETERQITTILESITDAFVAFDENWHYTYVNQAAVKILHKTPAELIGKHVWDEVFPELVGGLAYQELHRAVVEQVAVSWEEFGEPVQCYLEANAYPFSQGVAVYFRDITERKQAEAERERLLHELETERARFEAVLRQMPAGVMIADAASGKLVLTNEQAKQILRYQFEDSLELKEYAPVTPFAAFRCDGQPYDPYEYPLPRSLLTGEVISQEEMLLRWEDNSHIFISVNSAPILDSQGQIAAAAIVFQDVTERKHLESELQQREQEFKMVAENAPDIISRIDREFRHLYVSPAVEAATGIPPEEFIGKTNTELGMPEEICNFWCENLQRAFDTGEKQVVEFSFPTPTGLRWYQSLIVPEFASDGYATTLINVARDVTDYKQIEQALRDNEERLRLALTVAQAAQRQLATIFETSPVGIALLDSQQRYVAINQALAQINGLTREQHLGRSIAELFGQSDPQLVQVFHDIYTTGEPFISPSFAVNVPGRSDRQPGYYNVYYLPTTNSNHQVEDVLVYVLDVTEQIRLERGQRFLSETSKVLASSLDYQTTLERLAQLAVPELADWCTVHMMAEDGLIEQIAVAHVDPAKLEWAEEIRRKYPLNLNDPRGAALTLRTGQSDLLIDISDELLVQSARDPEHLEILRRVGFKSAMTVPLRTQTRTLGVISFISAESGHKYDQGSMQLAEELAYRASLAIDNAHLYRLAQSDRTKAEAANRIKDEFLAVLSHELRSPLNPILGWSRILRSKQLSPTKVEQALETIERNAKLQAQLIEDLLDVSRILQGKMTLNVASVNLAATIAAALETVQLAAEAKNIHIQTTLKPISATVVGDQNRLQQVVWNLLSNAVKFTPSGGQIEVQLEQVNLYAQIQVKDSGKGIAREFLPYVFEYFRQEDGATTRQFGGLGLGLAIVRHFTELHGGTVQVSSLGQDLGATFTVRLPLNLVEQELPADDEQLKNVTDLTGTHILVVDDDADMRELAEFILIQFGAQVTTAASAVEALNIFSQFIPDLLLCDIGMPEMDGYSLMRQIRQWLPQEGGTIPAIALTAYAGEINQQQALAAGFHQHISKPVEPEELVQAIFQLLHPCFFS

SEQ ID NO: 7392 - protein, 337 aa, Lentinula edodes
MAVKVGINGFGRIGRIVLRNALLNPEVNVVAVNDPFIALEYMVYMFKYDSVHGRFKGTVETKGGKLIVDGKEISVFGEKDAGAIPWSSVGAEYIVESTGVFTTIEKASAHLKGGAKKVIISAPSADAPMYVCGVNLDSYDSQHAVISNASCTTNCLAPLAKVIHDKFGIVEALMTTVHATTATQKTVDGPSNKDWRGGRSVNGNIIPSSTGAAKAVGKVIPSLNGKLTGLAFRVPTLDVSVVDLVCRTEKSATYDEIKAAVKEASKGPLKGILGYTEDHVVSTDFIGDNHSSIFDATAGIQLNKNFVKLIAWYDNEWGYSGRVVDLLVFAAKKDGAL

SEQ ID NO: 7393 - protein, 238 aa, Arabidopsis thaliana
MECVEAFLGDFSVDDLLDLSNADTSLESSSSQRKEDEQEREKFKSFSDQSTRLSPPEDLLSFPGDAPVGDLEDLEWLSNFVEDSFSESYISSDFPVNPVASVEVRRQCVPVKPRSKRRRTNGRIWSMESPSPLLSTAVARRKKRGRQKVDASYGGVVQQQQLRRCCSHCGVQKTPQWRMGPLGAKTLCNACGVRFKSGRLLPEYRPACSPTFTNEIHSNSHRKVLELRLMKVADPARV

SEQ ID NO: 7394 - protein, 300 aa, Nostoc sp. PCC 7120
MWDYTDKVLELFYDPKNQGVIEENGEPGVKVATGEVGSIACGDALRLHIKVEVESDKIVDSRFQTFGCTSAIASSSALTEMIKGLTLDEALKVSNKDIADYLGGLPEAKMHCSVMGQEALEAAIYNYRGIPLAAHDEDDEGALVCTCFGVSENKVRRIVIENDLTDAEQVTNYIKAGGGCGSCLAKIDDIIKDVKENKAATNLNNKGGSKPTNIPNSGQKRPLTNVQKIALIQKVLDEEVRPVLIADGGDVELYDVDGDIVKVVLQGACGSCSSSTATLKIAIESRLRDRINPSLVVEAV

SEQ ID NO: 7395 - protein, 394 aa, Ipomoea batatas
MVDGNHPKVVCVTGAAGFIGSWLVMTLLQRGYHVHATVRDPGNTKKVKHLLELPKADTNLRVWKGVMEEEGSFDEAIAGCEGVFHVATPMDFDSKDPENEVIKPAINGVLNIINSCVKAKTVKRLVFTSSAGTLNVQPQQKPVYDESCWSDLDFIYAKKMTGWMYFASKILAEKEAWKATKEKKIDFISIIPPLVVGPFITPTFPPSLITALSLITGNQAHYSIIKQGQYVHLDDLCEAHIFLYEHPKAEGRFICSSHHTTIHGLGEMIRQNWPEYYIPSQFKGIEKDLPVVYFSSKKLQDMGFQFKYSLEDMYRGAIETLRKKGLLPYSTKEPAAIEEEQETVPLKVQEPTKQEATTVPLKPAAIEQKQETVPLKLEEPTAIEQKQKVVPLKA

SEQ ID NO: 7396 - protein, 327 aa, Vibrio vulnificus YJ016
MWLVAFSARNKSLTYFDNQTKLTFKYFDYQTNGFSFMSACSQSHRFTAHNQQGEKRTFYVLLLTLFTMVAEIVAGTLYGSMALLADGWHMGTHAAAFCITLFAYRYAKKHAHSARFSFGTGKVSVLGGFTSAIALGIVALLMVVESVHRLFNPESIQFNEAILVAVVGLSVNVASMFLLHDHEHAHEHHHDHNLRAAYLHVLADALTSILAIVALIIGKFYGWIWLDALMGIVGALVIGKWTFGLVKQTAPILLDESIESNYIEQLNQTLSPYATVTDLHVWRISGHHYGAIISLVDHSKTPYEEYKHMLEKFDKIHHLTLELQPAK

SEQ ID NO: 7397 - protein, 304 aa, Sagittaria pygmaea
MALRPSLHKQFALLVAASVLAFCCSAAGRSVGLAPASPSSFNNDFDITWGDGRGKILNNGQLLSLSLDKTSGSGFQSKNQYLFGNIDMQLKLVPGNSAGTVTAYYLSSQGPTHDEIDFEFLGNVSGQPYTLHTNVFSQGKGNREQQFRLWFDPTKDFHTYSILWNPSHIVFYVDGTPIRDFRNNEARGVPFPKAQPMRIYSSLWNADDWATQGGRIKTDWTQAPFTASYRGFKADACAVGSTGSSSKCAALQTTAGNTNWWIRQELDATGQERMRWVQRNHMIYNYCTDVNRFPQGLPTECSVA

SEQ ID NO: 7398 - protein, 637 aa, Pseudomonas syringae pv. tomato str. DC3000
MSVRRTRKDDGSQWTVADSRSVYGIRHWGAGYFAINEAGRVEVRPNGPDSSPIDLYEQVDNLRKSGLSLPLLVRFPDILQDRVRQLTGAFDSNIARLEYQSQYTALYPIKVNQQEAVVENIIATQNVSIGLEAGSKPELMAVLALAPKGGTIVCNGYKDREFIRLALMGQKLGHNVFIVIEKESEVELVIEEAAELKVAPQVGLRVRLSSLASSKWADTGGEKSKFGLSAAQLLSVVERFRKAGLDQGIRLLHFHMGSQIANLADYQHGFKEAIRYYGELRKLGLPVDYIDVGGGLGVDYDGTHSRNASSINYDMDDYAGVVVGMLKEFCDAQSLPHPHIFSESGRSLTAHHAMLVVQVTDVEKHNDEVPKIADKESLPETVQWLVDLLGPTDIEMVTETYWRATHYMSDIATQYADGKISLAEKALGEQCYFAVCRRLYNSLKARQRSHRQVLDELNDKLADKYICNFSVFQSLPDTWAIGQVLPILPLHRLDEEPVRRAVLQDLTCDSDGKIKQYVDEQSIETSMPVHSLNEGEDYLLGIFLVGAYQEILGDMHNLFGDTDSVNIYQNPDGSVYHAGIETHDTIEDMLRYVHLSPEELMTHYRDKVASAKITPRERTYFLDALRLGLTRSSYLSS

SEQ ID NO: 7399 - protein, 284 aa, Sagittaria pygmaea
MNRESAASLLLPFTLIYALAVFASATSFIGNVDITWGDGRGLILENGNLLQLSLDHSSGSGFQSHQEFLFGRIDMQIKVVPGNSAGTVTAYYLSSQGTTHDEIDFEFLGNVSGEPYTLHTNLYSQGKGNREQQFRLWFDPRTDFHTYSILWNPSNIIWYVDNTPIRVFPNLESKGVPYPKSQPMRLYSSLWDAEDWATQGGRVKTDWSQAPFTSKYRGYNADICTVSGGRSMCPATNGPWLKQTLDPASLQKLRNVQQNNMIYDYCKDSRRFPGGLLPECSVQL

SEQ ID NO: 7400 - protein, 177 aa, Triticum aestivum
RRRPPPYANFSKGSSQIIAQYYQLIRLGFEGYKDIMQNCRDNATVLREGVEKMGYFHLVSKDSGVPLVAFSLKDSSKYTVFEVVESLRRFGWIVPAYTMPADAEHIAVMRVVIREDFSRGLAERLITDLKKVMVEMDAHAKKHGHHEHVKKTAHQIEKEVTTYWRTFVARKKHSLVC

SEQ ID NO: 7401 - protein, 502 aa, Tetragenococcus halophilus
MIEMDYVLGLDLGTSSLKGDLLDESGKTVCVASTEYELLTPKSGYNEQNPNDWVQACYRLFEKMSQKISDFTSNLIGISFSGQMHSLVVADEDGNALRPAILWNDVRTTKQCNDITENFGEEILKITKNLVLEGFTLPKILWIQENEPEIWKKVRKIFLPKDYLRYFLTGNFQMDYSDAAGTLLMDIKEKKWSQVILKKYNIPIEYLPELVNSFDFVGNLDENIKKSYGFKNNIKIFAGGADNAVSSLGTGLNDYETAIASTGTSGVFLSLEDSIHNEYNGKFHLFNHALPDKYYSMGVTLSAGQSISWFKDLIAKSESYDKFLSNVSDVPIGSNGLLFTPYISGERTPYFDSQIRASFIGLNDTHSLDDLKRAVIEGVTFSLKDSQVLMESLREKEFRRIISIGGGAKNKEWLQIQADIFNTQVVTLDTEEGPGLGAAMIAAMGVGWFETVEECVAHTITYINKIDPISENVAEYKKIYELYTQVYPYTKDITHALSEDPV

SEQ ID NO: 7402 - protein, 474 aa, Tetragenococcus halophilus
MKSHPLTLTQNIMNNKGLNRYVITITLIATLGGLLFGYDTAVISGAEQSIQNNLVNGVGLGSFAHGLTVSSALIGCVFGGLLSGIFSNNLGRRNSLKLAGSLFLISALGSAYPEFLFFQAGDASVGLLIVFNLYRVLGGIGVGMASGISPTYIGEIAPGKVRGSLVSWYQFAIIFGQLVVYFVNWGIATGQSPEWVNDIGWRFMFASEAIPAILFFALLFYVPETPRYLVLKNNEEKAFDVLSKINNSKEEAKDILTDIKGSLNTTETSGKLFSYGKTVVIVGVLLSIFQQFIGINVALYYAPRIFESMGAGQNASMVQTIIMGIVNVTFTYVAIRTVDKWGRRPLLLVGSIGMAIGMFAVALLAKNGVLGIWTLVFIIVYTASYMMSWGPIVWVLLSEIFPNKIRGQAMAFAVAAQWLSNFFISSTYPAMIDFSGPLTYGFYGLMCVISAIFVWKMVPETKGKTLEQLENTWL

SEQ ID NO: 7403 - protein, 575 aa, Brevibacterium fuscum var. dextranlyticum
MTTLQPATRHASLKATDEWWKASVVYQVYPRSFADSNGDGIGDIQGIISRLDHLQELGVDVLWLSPVYASPQDDNGYDISDYYSIDPTFGTLEDLDELIGELHTRGMKLVMDLVVNHTSDEHEWFQESRSDRTHPKRDWYIWRDPHHGAEPNNWGSFFSGSAWEWDEQTGQYFLHLFSKKQPDLNWENPEVRAAIYRMMNWWLDRGIDGFRMDVISFISKHPDLPDGAVGKGGIWGDGIPFFGSGPRVHEYLQEMHREVFAHRDADLLTVGEMVDVTPELARLYTDQRRKELDMVFHFEHVGLDHGADGKFSRKALDLVAVKRSFARWQDALSDVGWNSLYWNNHDQPRVVSRFGDDSDHWYESATAFATILHLMRGTPYIYQGEELGMTNMPFTSIDEFRDLESLNYYRQALERDGADAATVLAGITVGGRDNARTPVQWDASVHAGFTTGEPWIPVNPNHGWLNAATQRQDPESVYGWYKRLIQLRHEEPVIVDGRFNLILADDPQIFAYTRTDSDTELFIAANCSADPAALPGDVTEEWDDADVLLANHPGVRELGRTLLPWEVIVLRRGLA

SEQ ID NO: 7404 - protein, 311 aa, Nitrosomonas europaea ATCC 19718
MSKIVVSTSSFGFDHNPAIQQLRAQGFTITGNPYQRKLTEDEIITLLGNDTVALLAGVEPLTEHVLTSASALRVIARCGTGMDNVDLEAARRLNIQVSNTPEAPAQAVAELTLGLMLDCLRQINRIDRSVRQGEWPRSQGRLLAARTVGIVGLGHIGRRVAKLCQAFGAQVIAHDPHLQLAPDGVELVALTTLLEQADLVTLHLPYSPAVHYLIDAEAIDRMKPGTILINAARGGLVDETALCAALNTGHLEAAALDSFEQEPYHGPLCECKQAILTSHIGSLARETRQRMEIEAAENLKQGLIEAGLIDE

SEQ ID NO: 7405 - protein, 428 aa, Synechococcus sp. CC9605
MNTSHSQAIFGAAQALMPGGVSSPVRAFKSVGGQPIVFDRVKGPYAWDVDGNKYIDYIGSWGPAICGHAHPEVIAALQEAIEKGTSFGAPCALENTLAEMVIDAVPSVEMVRFVNSGTEACMAVLRLIRAYTGRDKVIKFEGCYHGHADMFLVKAGSGVATLGLPDSPGVPRSTTANTLTAPYNDLEAVKALFAENPEAIAGVILEPIVGNAGFIQPEPGFLEGLRELTKEHGALLVFDEVMTGFRISYGGAQAHFGVTPDLTTMGKVIGGGLPVGAYGGRADIMGMVAPAGPMYQAGTLSGNPLAMTAGIKTLELLKQPGTYEKLTATTQKLVAGIKDAAQSAGMSITAASVSAMFGFFLCEGPVRNFEEAKATDSERFGKLHRAMLEHGVYLAPSAFEAGFTSLAHSEADIEATINAFRESFAAVA

SEQ ID NO: 7406 - protein, 160 aa, Glycine max
MSNAAEQARSLFGICLSHRPKWQQFLICSSGFFFGYLVNGICEEYVYNRLQFSYGWYFTFVQGFVYLFLIYLQGFTSKQMMNPWKTYVKLSAVLMGSHGLTKGSLAFLNYPAQIMFKSTKVLPVMVMGAFIPGLRREYPFHEYVSAVLLVIGLILFTLAD

SEQ ID NO: 7407 - protein, 243 aa, Bacillus licheniformis
MSYRVKRMLMLLVTGLFLSLSTFAASASAQTGGSFYEPFNNYNTGLWQKADGYSNGNMFNCTWRANNVSMTSLGEMRLSLTSPSYNKFDCGENRSVQTYGYGLYEVNMKPAKNVGIVSSFFTYTGPTDGTPWDEIDIEFLGKDTTKVQFNYYTNGVGNHEKIVNLGFDAANSYHTYAFDWQPNSIKWYVDGQLKHTATTQIPQTPGKIMMNLWNGAGVDEWLGSYNGVTPLSRSLHWVRYTKR

SEQ ID NO: 7408 - protein, 499 aa, GIBBERELLA ZEAE PH-1
MAYIKNLIAILPFLGAGVEAAVSFPPLPSDLSTPVQQRIAFSGPNSITVGWNTYAKQAKPCVQYGTSQNALDKQACSDISTTYPTSRTWVNSVTLSGLSPATTYYYKIVSKNSTIDHFLSPRTAGDKTPFAINAIIDLGVYGEDGFTIDMDHSKRDIIPTIQPSLNHTTIGRLSTTADDYEFVIHPGDLGYADDWFERPKNLLHGQEAYQAILENFYDQLAPIAGRKPYMVSPGNHEAACEEIPVLNHFCPEGQKSFTDFMVRFGNIMPLPFASTSSDATAKVNANKAKQLANPPFWFSFDYGMAHVVMIDTETDFPDAPDQPGGSAHLNGGPFGRPNQQLQFLEADLSSVDRDVTPWLIVAGHRPWYSTNNEGCKPCQEAFEGLFYKYGVDLGVFGHVHNSQRFHPVYNGTIDPAGQQDPKAPMYIISGGTGNIEGLSAVGTKGPENAFAYADDFAYATIRFQDANNLQVDFIRSATGELLDRSKLFKSHKQHFVKQN

SEQ ID NO: 7409 - protein, 461 aa, Zea mays
MQSLLLPTAAVAPVAPPCGRRNLPGRLSVRASATVVAAPRRETDPKKRVVITGMGLVSVFGNDVDAYYDRLLVGESGIGPIDRFDASKFPTRFAGQIRGFSSEGYIDGKNDRRLDDCLRYCIVSGKKALEASGIAHGSKPMEKIDKTRAGVLVGTGMGGLTVFSDGVQNLIEKGYRKITPFFIPYAITNMGSALLGMDIGFMGPNYSISTACATSNYCFYAAANHIRRGEADIMIAGGTEAAIIPIGVGGFVACRALSQRNDDPKTASRPWDKDRDGFVMGEGAGVLVMESLEHAIKRDAPIIAEYLGGAVNCDAYHMTDPRSDGLGVSSCIKQSLEDAGVAPEEVNYINAHATSTLAGDLAEVNAIKQVFKDPSGIKINATKSMIGHCLGAAGGLEAIATVKAITTGWVHPSINQFNPEEAVEFDTVPNVKKQHEVNVGISNSFGFGGHNSVVVFAPFKP

SEQ ID NO: 7410 - protein, 252 aa, Brassica juncea
MAYQTELGGESSSQRKAGRGKIEIKRIENTTNRQVTFCKRRNGLLKKAYELSVLCYAEVALIVFSSRGRLYEYSNNSVKGTIERYKKAISDNSNTGSVAEINAQYYQQESAKLRQQIISIQNSNRQLMGETIGSMSPKELRNLEGRLDRSVNRIRSKKNELLFAEIDYMQKREVDLHNDNQLLRAKIAENERNNPSMSLMPGGSNYEQIMPPPQTQPQPFDSRNYFQVAALQPNNHHYSSAGREDQTALQLV

SEQ ID NO: 7411 - protein, 513 aa, Glycine max
MSKTTTSSEQTARNRLATLAAHLLPSDATSAAAILHPHRLSAPTGDLPPANLKGTLTVVDERTGKKYQIEVTPDGTVRASDFKKISSGKNDKGLKLYDPGYLNTAPVISRISYIDGDAGILRYRGYPIEDLAEKSTFTEVSYLILYGNLPSESQLAEWEFALSQHSAVPQGVLDMIESMPHDAHPMGMLVNAMSALSVFHPDANPALKGLDIYNSKQVRDKQIARVIGKITTIAAAINLRLAGRPPVLPSNKLSYTENFLYMLDSFGNRSYKPNPRLTRALDIIFVLHAEHEMNCSTSAVRHLSSSGVDVYTAIAGAVGALYGPLHGGANEAVLKMLSEIGTVENIPAFIEGVKARKRKLSGFGHRVYKNYDPRAKVLRKLTEEVFSIVGRDPLIEIAVALEKIALSDEYFIKRKLYPNVDFYSGLIYRAMGFQPEFFTVLFAIPRMAGYLAHWRESLDDPDTKIMRPQQVYVGEWLRHYAPINQRTASSNTDKLGQLAVSNASKRRLAGSGA

SEQ ID NO: 7412 - protein, 327 aa, Zea mays
MVKSKAIRVHELGGPEVLRWEEVEVGEPGEGEIRIRTTAVGVNLVDIYFRKGVYSAPTMPFTPGMEAVGVVTAVGPGLTGRKVGDVVAYAGNPMGSYAQEQILPAAVAVPVPPSVDHKQAASVMLKGMTAHVLLFRVFKVESGHTILVHAAAGGVGSLLWQCANALGATVIGTVSNQEKAAQAAQDGCHHPIIYTSEDVVARVKDITSGKGVNVVYDSVGKDTYKASLECLASRGFLVSFGQSSGKPDPIPTSDLASKSLFLTRPSLMHYTATRDELLESAGEVFANVANGVLHVRVNHTYPLSEAAQPHADLEGRKTSGSIVLIPG

SEQ ID NO: 7413 - protein, 498 aa, Nostoc sp. PCC 7120
MAINTGKNKLMNRHIRPWQRLLVLAIGSMVFAVFAPTIVQAVDTPTLESLSETTIKLQISIDTTWVLLSGFLVFFMQTGFAMLEAGLVRQRSVVNTLLENFIDAAVTVLAWWAVGFGIAFGTSAGGLFGIDTFFLSQLPGADGSYPLGAPGSTAAINTYTLFFFQFAFAATASTITTGSMAGRTDFIGDLIYSAIMGAISYPIIVHWAWNSNGWLGKLSYHDFAGGSIVHTVGGWTALVGAYLLGPRPDRPPWGKLPPAHNLALATLGTMILWFGWYGFNPGSTLGTANPGLIGLVTINTTLAAGAGALAALIFLYVRTGKWDLVYCLNGSLAGLVAITAPCAYVAPWASVLIGLTGGIAVVLGVSLIESLHIDDPVGAFSVHGISGMMGTLSIGFLGQEELTLNQKAGLLLGGGFDLLGIQMLGIVAITVFTVAFAFLMYGGLKAMGHLRVNAEADRIGIDTYEHGASVWPDVYSVEELSKPQEHTKISENKTLEGE

SEQ ID NO: 7414 - protein, 518 aa, Nostoc sp. PCC 7120
MYQQKSRTRNRRFSTRNYAKSRQSNSQIQIFNLVKKLSPSWQACIPLACLIVLGWSYVAVAQAPAAGPTTAELKVALDTLWVAIAAFLVFFMNAGFGMLETGFCRQKNAVNVLAKNLIVFALATVAFWAIGFGLMFGDGNDFIGFNGLFLSGVDNSPATGDAYKGVFSALSWAGVPLAAKFLFQLVFAGTAATIVSGAVAERIKFVDFLIFSLLLVGIAYPITGHWIWGAGWLAKAGFWDFAGSTVVHSVGGWAALMGAAFLGPRIGKYQDKQIVALPGHNMSIATLGCLILWLGWFGFNPGSVMAADPNAITHIALTTNMAGAVGGIAATATAWLYLGKPDLSMIINGILAGLVGITASCAYVSIPSSIIIGLIAGVIVVFSVTFFDKLGIDDPVGATSVHLVCGVWGTLAVGLWSVGPGVYSWYGEGLGPTKGLFAGGGLGQLITQFLGAAAVGGMTVLVSSIFWVVLKATLGIRVTREEELEGLDIGEHGMEAYSGFLKEASPGGFAEGKTSDGY

SEQ ID NO: 7415 - protein, 169 aa, Capsicum chinense
MASQSNRPQSVYDFTVKDAKGKDVDLSIYKGKVLIIVNVASQCGLTNSNYTDMTELYRKYKDKGLEILAFPCNQFGGQEPGSIEDIQQMVCTRFKAEYPVFDKVDVNGDNAAPLYKFLKSSKGGFFGDGIKWNFSKFLIDKEGNVVDRYSPTTSPASMEKDIKKLLGVA

SEQ ID NO: 7416 - protein, 372 aa, Bacillus subtilis
MTATRGLEGVVATTSSVSSIIDDTLTYVGYDIDDLTENRSFEEIIYLLWHLRLPNKKELEELKQQLAKEAAVPQEIIEHFKSYSLENVHPMAALRTAISLLGLLDSEADTMNPEANYRKAIRLQAKVPGLVAAFSRIRKGLEPVEPREDYGIAENFLYTLNGEEPSPIEVEAFNKALILHADHELNASTFTARVCVATLSDIYSGITAAIGALKGPLHGGANEGVMKMLTEIGEVENAEPYIRAKLEKKEKIMGFGHRVYKHGDPRANDLKEMSKRLTNLTGESKWYEMSIRIEDIVTSEKKLPPNVDFYSASVYHSLGIDHDLFTPIFAVRRMSGWLAHILEQYDNNRLIRPRADYTGPDKQKFVPIEERA

SEQ ID NO: 7417 - protein, 490 aa, Arabidopsis thaliana
MAFTNVCLWTLLAFMLTWTVFYVTNRGKKATQLADAVVEEREDGATDVIIVGAGVGGSALAYALAKDGRRVHVIERDLREPERIMGEFMQPGGRLMLSKLGLEDCLEGIDAQKATGMTVYKDGKEAVASFPVDNNNFPFDPSARSFHNGRFVQRLRQKASSLPNVRLEEGTVKSLIEEKGVIKGVTYKNSAGEETTALAPLTVVCDGCYSNLRRSLNDNNAEVLSYQVGFISKNCQLEEPEKLKLIMSKPSFTMLYQISSTDVRCVFEVLPNNIPSISNGEMATFVKNTIAPQVPLKLRKIFLKGIDEGEHIKAMPTKKMTATLSEKKGVILLGDAFNMRHPAIASGMMVLLSDILILRRLLQPLSNLGNAQKISQVIKSFYDIRKPMSATVNTLGNAFSQVLVASTDEAKEAMRQGCYDYLSSGGFRTSGMMALLGGMNPRPISLIYHLCAITLSSIGHLLSPFPSPLRIWHSLRLFVGYENVGSPSQG

SEQ ID NO: 7418 - protein, 392 aa, Burkholderia sp. 383
MTEAVIVSTARTPLAKSWRGAFNMTHGATLGGHAVAAALERSKLDPARVEDVIMGCANPEGATGANIARQIALRAGLPVTVPGMTVNRFCSSGLQTIALAAQRIIAGEGEVYVAGGVESISCVQNEMNHHMIQEGWLVQHKPEIYWNMLQTAENVAKRYGISKERQDEYGVQSQLRAAAAQEAGRFRDEIAPITVLAGLADKATGRLFTKEVTVSADEGIRPDTTLEGVSKIRSAVPGGVITAGNASQFSDGASACVVMSADAAQREGLQPLGVFRGFAVAGCEPDEMGIGPVFAVPKLLKQAGLKVDDIGLWELNEAFAVQVLYCRDTLGIPEDRLNVNGGAIAVGHPYGVSGARLTGHALIEGKRRGVKYVVVTMCIGGGQGAAGLFEIL

SEQ ID NO: 7419 - protein, 561 aa, Klebsiella pneumoniae
MTHLKITGMTCDSCAAHVKEALEKVPGVQSAIVSYAKGAAQLALDPGTAPDALTAAVAGLGYKAMLADAPPTDNRTGLFDKVRGWMGAADKGSGGERPLQVAVIGSGGAAMAAALKAVEQGAQVTLIERGTIGGTCVNVGCVPSKIMIRAAHIAHLRRESPFDGGMPPTPPTILRERLLAQQQARVEELRHAKYEGILDGNSAITVLHGEARFKDDQSLIVSLNEGGERVVMFDRCLVATGASPAMPPIPGLKESPYWTSTEALVSDTIPERLAVIGSSVVALELAQAFARLGSQVTILARNTLFFRDDPSIGEAVTAAFRAEGIKVLEHTQASQVAHVNGEFVLTTGHGEVRADKLLVATGRTPNTRSLALDAAGVTVNAQGAIVIDKGMRTSTPHIYAAGDCTDQPQFVYVAAAAGTRAAINMTGGDAAINLTAMPAVVFTDPQVATVGYSEAEAHHDGIETDSRTLTLDNVPRALANFDTRGFIKLVIEEGSGRLIGVQVVAPEAGELIQTAVLAIRNRMTVQELADQLFPYLTMVEGLKLAAQTFTKDVKQLSCCAG

SEQ ID NO: 7420 - protein, 473 aa, Glycine max
PGFEGSSSVNSSPLQFFSMMSLSPSLGSPNNLLFREMKSEERGLYLIHLLLTCANHVAAGNLENANTTLEQISMLASPDGDTMQRIATYFMESLADRILKTWPGIHRALNSTRMTLISDEILVQKLFFELFPFLKVAFVLTNQAIIEAMEGEKVIHIIDLNAAEAAQWIALLRVLSAHPEGPPHLRITGVHQKKEILDEVAHRLTEEAEKLDIPFQFNPVASKLENLDFDKLRVKTGEALAISSILQLHTLLAWDDEAMQRKSPLLLKSSNGIHLQRVLPMGQSTLGDLLEKDMVNGYTPSPDSTSSSPSSLTTSNSMNMESFLNALWGLSPKVMVVTEQDCNHNGPTLMDRLLEALYSYAALFDCLESTVSRTSLERLRVEKMLFGEEIKNIIACEGSKRKERHEKLEKWFQRFDLAGFGNVPLSYFGMVQARRFLQSYGCEGYRMRDENGCVLICWEDRPMYSISAWRSRK

SEQ ID NO: 7421 - protein, 401 aa, Arabidopsis thaliana
MWTLNVQVMDFPGGKVAFTPEIQFISESDKERVPCYRVLDDNGQLITNSQFVQVSEEVAVKIYSDMVTLQIMDNIFYEAQRQGRLSFYATAIGEEAINIASAAALTPQDVIFPQYREPGVLLWRGFTLQEFANQCFGNKSDYGKGRQMPVHYGSNKLNYFTVSATIATQLPNAVGAAYSLKMDKKDACAVTYFGDGGTSEGDFHAALNIAAVMEAPVLFICRNNGWAISTPTSDQFRSDGVVVKGRAYGIRSIRVDGNDALAMYSAVHTAREMAIREQRPILIEALTYRVGHHSTSDDSTRYRSAGEIEWWNKARNPLSRFRTWIESNGWWSDKTESDLRSRIKKEMLEALRVAEKTEKPNLQNMFSDVYDVPPSNLREQELLVRQTINSHPQDYPSDVPL

SEQ ID NO: 7422 - protein, 143 aa, Burkholderia sp. 383
MSHDSDDKTFPYEKDDAELRRRLTPMQYEVTQHAATERAFTGEYTDTEDDGIYKCVVCSTPLFESGSKFHSGCGWPSYFKPLNGEVIDEKVDYSHGMVRVEVRCNHCGAHLGHVFEDGPRDQTGLRYCINSAALNFESRPENE

SEQ ID NO: 7423 - protein, 644 aa, Streptomyces sp. 139
MCGIAGTYRWPDGKAVTDRLTETLAHRGPDGSGGYSHALGDGEVHLGHRRLAILDLSENGAQPMVSGGLALTYNGELYNAPELRAELEGAGVRFRGTSDTEVLLEAWRRWGTDCLPRLRGMFAFAVFDERTGDLVLVRDQLGIKPLFLLRRGKGLVFASELKALAAVTGGSLEVDPAALVASLLYYWVPDSRCAFRGAEKLPPGTWLRCRADGSVSAAGSGTCARSPPRAGAGTVRYLPDLAAVVEESTRRHLLSDVPVATFLSGGLDSSYLTALAARDRPGIPAYTIGFRAEDARFEAMPDDLRYARRVAERFGVDLREIEIAPDVLDLLPRMTYHLDEPVGDPAAINTFLICSAAREAGVKVMLSGMGADELFAGYRKHLANLIAVRYRHVPGPVRRGVASAVDRLPVATSRRGLRSVRFAKRFLSFAGLPEETAFRRSYTLYDRQELAGLLDPDLAPAVDDVLAEHADVYQDNELDDFVNRMCLADARMFLPGLNLAYTDRSSMAASTEVRVPYVDVEVVRAAFAVPGARKIAGRQGKAVLKEAATTVLPREIVYRPKGLFSAPLRAWMSRDLAPLVREVVNDGLLVRSGFLRREALARMVAEDAAGQRDFSKHLWHVLTLEYWYRDATSRAGRNSPTSTA

SEQ ID NO: 7424 - protein, 145 aa, Nicotiana tabacum
MASTQQAVSSASDADQQYAKFDERKRKRMESNRESARRSRMRKQQRLGELMGETTQLHKQNSICRERIDSVERNYRAMDAENNVLRAQIAELTERLNSLNSLTQFWADANGFPVELSEIPDALLEPWQLPCPIQPIDASSDMLLF

SEQ ID NO: 7425 - protein, 372 aa, Methanopyrus kandleri AV19
MILQRDSDYSDGTVLGSMCTEPHPVAAEAFVAGLHVNLGDPYLFPNAYRAERECIGWLAETLLDHPAPEEAEGSIVSGGTEANILAAYAAREVTGGREIIVPATRHFSFEKAARMLRMKLVEAPLRSDYTVDVDAVQDLISRDTALIVGIVGTTETGSVDDIEALSDVAEDHGVPLHVDAAFGGFTAPFLREEYPLPRFGFDLEAVVSVTVDPHKMGLVPPPAGGIVFRDDEFPKAIEVYAPYLSGGGASQYTITGTRPGAPVLALYANILELGEEGYRRIAFRCYEETLKVAEKARELGLELAVDPPHLNLVNIRLPDRGTAERLLRESEREGWKISVSTKPLGVRIVMMPHLDAETVSRFLELVARVLGG

SEQ ID NO: 7426 - protein, 75 aa, Oryza sativa
APDHILSVVLGEKHRSCIESEAVLRIMGYLNLPFPQLATFLNFVPLFLRDFAYDNVADNRYAVFGRSESESCEIL

SEQ ID NO: 7427 - protein, 367 aa, Ehrlichia ruminantium str. Welgevonden
MLDQVLDKELIELRYSDIYRELPKVTRYDAGYMVYHDGKKLISFSCNNYLGLIGHPLLKKSAIDAINLYGVGAGASRMVTGDNLLYYSLESKLAKLYDKEKALVFSSGYLTNIGIISALVNRHDMIISDKLVHSSIIDGIKLSQAKNYRFKHNDYLDCEYILKKYRNLHRRCLIIVEQVYSMDGDIAPTKQLKMLAEKYDAWLVIDCAHSFGLMMHCDADIYIGTLSKAVGVLGGYVCASEIVIKYIQNKARTFIYTTALPPMIIAAANSALDIIGESVIDIPIKLARFFCNNLDFPEPNSHIVPIIMKDVTTVLHAQKILKEEGFLVIAIRPPTSPTPRLRFVFNASHKLSDVKRLCKVLKQKEIV

SEQ ID NO: 7428 - protein, 402 aa, Desulfotalea psychrophila LSv54
MDMSNNSLAKISVRGYGCVTAAGRSCQSAWQSLLLGRVNNKTLPTFFPAPCFYVDEGETSYQVLNSKREKPHNRTISLALQAIDEALAQAGLSLEELQGKRVGLALGTTVGSTFDDESYYRTWEEGKNPEPGPIHQHLDNNLAAYIQRFLGIHGPRIVITNACASGTDAIGMAKIWLEQGLCDIAIAGGADALSRIACNGFKSLRLISETSCQPFDAERQGLNLGEGAGIFVMEPYSAGKKAPLGFVRGYGVAGDAYHPTAPHPQGRGLQLAIASALKNARLDLNNISMINAHGTGTAVNDQAETQAIYQAGFSPSLPMVSTKGITGHTLGAAGGVEAVFTLMSLNEGHLPGTVGCHSPDPLFAFPIIPEGEERALLGRIGMSQSLAFGGSNSVLILEGGRI

SEQ ID NO: 7429 - protein, 507 aa, Arabidopsis thaliana
MAMASLARRKAYFLTRNLSNSPTDALRFSFSLSRGFASSGSDENDVVIIGGGPGGYVAAIKASQLGLKTTCIEKRGALGGTCLNVGCIPSKALLHSSHMYHEAKHSFANHGIKVSSVEVDLPAMLAQKDNAVKNLTRGIEGLFKKNKVTYVKGYGKFISPNEVSVETIDGGNTIVKGKHIIVATGSDVKSLPGITIDEKKIVSSTGALSLSEVPKKLIVIGAGYIGLEMGSVWGRLGSEVTVVEFAGDIVPSMDGEIRKQFQRSLEKQKMKFMLKTKVVSVDSSSDGVKLTVEPAEGGEQSILEADVVLVSAGRTPFTSGLDLEKIGVETDKAGRILVNDRFLSNVPGVYAIGDVIPGPMLAHKAEEDGVACVEFIAGKHGHVDYDKVPGVVYTHPEVASVGKTEEQLKKEGVSYRVGKFPFMANSRAKAIDNAEGLVKILADKETDKILGVHIMAPNAGELIHEAVLAINYDASSEDIARVCHAHPTMSEALKEAAMATYDKPIHI

SEQ ID NO: 7430 - protein, 292 aa, Bradyrhizobium japonicum USDA 110
MSDNRTFTAAMVQMRTGLMPEPSLAQATRLIRQAAANGADYVQTPEVSNMMQLNRKALFEHLQSEENDASLKAYRALAAELKIHIHVGSLALRFSDEKAVNRSFLIGPEGNVLASYDKIHMFDIELPDGESYRESANYQPGETAVISDLPWGRVGLTICYDVRFPALYRALAESGAYFITVPSAFTRKTGEAHWHVLLRARAIETGCFVFAAAQAGLHENKRETYGHSLIIDPWGEILAEGDVEPGIIMATIDPAKVETARRAIPSLQHGRRFGVADPKAGPDHLHLVRGSA

SEQ ID NO: 7431 - protein, 407 aa, Brucella suis 1330
MRRVVVTGMGIVSSIGSNTEEVTASLREAKSGISRAEEYAELGFRCQVHGAPDIDIESLVDRRAMRFHGRGTAWNHIAMDQAIADAGLTEEEVSNERTGIIMGSGGPSTRTIVDSADITREKGPKRVGPFAVPKAMSSTASATLATFFKIKGINYSISSACATSNHCIGNAYEMIQYGKQDRMFAGGCEDLDWTLSVLFDAMGAMSSKYNDTPSTASRAYDKNRDGFVIAGGAGVLVLEDLETALARGAKIYGEIVGYGATSDGYDMVAPSGEGAIRCMKMALSTVTSKIDYINPHATSTPAGDAPEIEAIRQIFGAGDACPPIAATKSLTGHSLGATGVQEAIYSLLMMQNNFICESAHIEELDPAFADMPIVRKRIDNVQLNTVLSNSFGFGGTNATLVFQRYQG

SEQ ID NO: 7432 - protein, 328 aa, Acinetobacter sp. ADP1
MKQPVRVAVTGAAGQIGYSLLFRIASGEMLGKDQPVILQLLEIPVEKAQQALKGVMMELDDCAFPLLAGMIGTDDPKVAFKDADYALLVGSRPRGPGMERADLLKVNGEIFIGQGQALNEVASRDVKVLVVGNPANTNAYIAMKSAPDLPAKNFTAMLRLDHNRALTQIAQKAGVAVADIEKLTVWGNHSPTMYADYRFATANGENLKDKINDAEWNKDVFLPTVGKRGAAIIEARGLSSAASAANAAIDHMRDWALGTNGKWVTMGIPSDGSYGIPEGVIYGVPVTCENGEYKRVEGLEIDEFSRERMDKTLQELEEERAAIADMLK

SEQ ID NO: 7433 - protein, 445 aa, Nitrosomonas europaea ATCC 19718
MKIIIAALTGLIMVVTVFAMEKTVTPNSVNVKQTIDSKTDYIVLGMGCFWGAEKRMGELSGVIDVESGYAGGDHADAGYQDILNFEHALRAGKTAGRNHAEVVKVTFDPAQVALEHVLARFWESHNPTQGDRQGNDIGSNYRSAVYYHDENQKTLALTTRKIYQQALATAGYGQITTEILPLKNYITAEEYHQNYLQKNPDGYCGLGGTGVKYPAPDQHIIRGDTSSVPASPSPQSLDGKNLNFDQQLVIFESENCEFCAQFDRDILAHWQADIPMVATKNTNPPADWTLDKPLFAAPTIVLFREGKEVVRYTGYTGEKENFWQWLGFQMLTPEQQKIAFQQGTERPFTASNLDEKRPGRFVDPITGATLFFSKTKFNSGTGWPSFFEPVEGSVTYHEDHSGYMQRIEVRSASSGIHLGHVFDDGPPPSYKRYCINGNVLKFIPD

SEQ ID NO: 7434 - protein, 666 aa, Bacillus cereus G9241
MSHSIEQLSINTIRTLSIDAIEKANSGHPGMPMGAAPMAYTLWTQFMKHNPNNPTWFNRDRFVLSAGHGSMLLYSLLHLSGYDVTMDDLKNFRQWGSKTPGHPEYGHTAGVDATTGPLGQGIATAVGMAMAERHLAAKYNRDAYNVVDHYTYAICGDGDLMEGVSAEASSLAAHLQLGRLVVLYDSNDISLDGDLNRSFSESVEDRYKAYGWQVIRVEDGNDIEAIAKAIEEAKADEKRPTLIEVRTTIGFGSPNKSGKSASHGSPLGVEETKLTKEAYAWTAEQDFHVAEEVYDNFRKTVQDVGETAQAEWNTMLGEYAQAYPELANEFQAAMNGQLPEGWEQNLPTYELGSKAATRNSSGAVINAIAESVPSFFGGSADLAGSNKTYMNNEKDFTRDDYSGKNIWYGVREFAMGAAMNGIALHGGLKTYGGTFFVFSDYLRPAIRLAALMQLPVTYVFTHDSIAVGEDGPTHEPIEQLAALRAMPNVSVIRPADGNESVAAWRLALESTNKPTALVLTRQDLPTLEGAKDDTYEKVAKGAYIVSASKKETADVILLATGSEVSLAVEAQKALAVDGVDASVVSMPSMDRFEAQTAEYKESVLPKAVTKRFAIEMGATFGWHRYVGLEGDVLGIDTFGASAPGEKIMEEYGFTVENVVRKVKEML

SEQ ID NO: 7435 - protein, 192 aa, Triticum aestivum
  misc_feature (164)..(164): Xaa can be any naturally occurring amino acid
  unsure (1)..(192): unsure at all Xaa locations
MEVVSSSHSCLAFHQTPTSARRSLGTGLGPRHTKLARPRKSSVLCVGRASNPGDSGKLNVSRSFGVSDVDAALQGISKKVGQIEKVAIPGLPEGPDSSQISTGLWEWKPKLTVYYEKSGTKNSKAPAVLFLPGFGVGTFHFEKQLMDLGRDYKVWTMDFLGTGXMHCPCEDPAPKAMPGGEDEESLWGVWNK

SEQ ID NO: 7436 - protein, 506 aa, Frankia sp. EAN1pec
MSDIDLLDLPLVLLSNRGPVSFDRDASGRTVNRGAGGLVSALSGLAEHLDDAVWVCGAATPEDAAVAGENDGGAILVQTQPTPHVVEGQPDGPSIRVRLVVTDPDAYADFYSVWSNPILWFIQHGLYGRSLAPVLTRAEHDAFENGYAAVNRAYADAVADEVQSRGGKALVLLQDYHFYLVAEHVREQCPDVVLTHFVHIPWPGPDEWRVLPGNIRERLLRGLLGSDVVGFHTRRYARNFVLCAGELLGLPINLDDLTVTVNNRVVSARYYPISVDPAALDATLASEDVAAHMAMLRYVFLDEDRQLVLRVDRTDPSKNVVRGFLAFGTLLDQHPELVGRVSFLALLQPSRTDVPEYADYIALIGAVVAEINAKHTKEGRQPIDLRMVEDFALAVAAYSICDVLMVNAIADGMNLVAKEVAVVNRRGGVLALSEMAGSHEELGEFAVTLHPFDVQQMADALYTALTMPMEERHRRLAAAAEQVRTHDVRRWLNDQLADLRHLAGFS

SEQ ID NO: 7437 - protein, 334 aa, Brucella suis 1330
MSNKKKPMVVLTRKLPDPVETRMRELFDARLNIDDHRMSQPEIIAALKEADVLVPCITDVIDAAVIEQAGPNLKLIANFGNGVDNIDVAAAARRGITVTNTPNVLTEDTADMTLALLLSVPRRLVEGANVINERHGQWPGWSPTWMLGRRIWGKRLGIVGMGRIGTAVARRAKAFGLSIHYHNRKRVSPQVEEELEATYWDSLDQMLARMDIISVNCPSTPATFHLLSARHIALMQPTAYLVNTARGQIIDENALIDLIEEGRLAGAGLDVFEHEPAVNPRLLALAEKGKVVLLPHMGSATIEGRIDMGDKVITNIRAFVDGHRPPDRVLPNRV

SEQ ID NO: 7438 - protein, 929 aa, Pseudomonas syringae
YRRTDTCCRRKSVLTKLGIKGRVLLLTILPASLMAAMLGGYFTWMQLSELQSQLLQRGEMIAQDLAPLAANALGRKDKVLLSRIATQTLEQTDVRAVSFLDTDRTVLAHAGPTMISPSPIGSGSQLLSSTGTDATRYLLPVFGSQRHLTSPIIPAEADTLLGWVELEISHNGTLLRGYRSLFASLLLILTGLAFTATLAVRMSRTINGPMSQIKQAVSQLKDGNLETRLPPLGSRELDELASGINRMAATLQNAQEELQLSIDQATEDVRQNLETIEIQNIELDLARKEALEASRIKSEFLANMSHEIRTPLNGILGFTHLLQKSELTPRQFDYLGTIEKSADNLLSIINEILDFSKIEAGKLVLDNIPFNLRDLLQDTLTILAPAAHAKQLELVSLVYRDTPLALSGDPLRLRQILTNLVSNAIKFTREGTIVARAMLEDETEEHAQLRISVQDTGIGLSSQDVRALFQAFSQADNSLSRQPGGTGLGLVISKRLIEQMGGEIGVDSTPGEGSEFWISLKLPKAREDKEESLNIPLGGLRAAVLEHHDLARQALEHQLEDCGLQTIVFNNLENLLNGVTAAHETPAAIDLAVLGVTALEISPERLRQHIWDLENLNCKVMVLCPTTEHALFQLAVHDVYTQLQAKPACTRKLQKALSELIAPRAVRADIGPPLSSRAPRVLCVDDNPANLLLVQTLLEDMGAEVVAVEGGYAAVNAVQQEAFDLVLMDVQMPGMDGRQATEAIRAWEAERNQSSLPIVALTAHAMANEKRSLLQSGMDDYLTKPISERQLAQVVLKWTGLALRNPAPERQNEALEVHVGPLVLDHEEGLRLAAGKADLAADMLAMLLASLDADREAIRVARANQDVHALIERIHRLHGATRYCGVPQLRSACQRAETLLKQNAPHTEEALNDLDKAIIRLEAEARVMA

SEQ ID NO: 7439 - protein, 417 aa, Magnaporthe grisea 70-15
MEQKSNAGKLEAQYLRFLRTPNRPDDYDTIKLIGRGAFGEVRLVRRKQTGKVFALKSLLKSQTIAQLQAARVRAERDILAESDSPWVVKLYTTFQDSNFLYMLMEFLPGGDLMTMLIKYQVFSEDITRFFMAEVIEAIEAVHRLGFIHRDIKPDNILLDRHGHIKLTDFGLSTGFRKLHDTNYYQRLLKAPELPKPIAKPIDHRHRDSVNIDQINMTVSNRDQINEWRRSRRTMAFSAVGTPDYIAPELVMGLGYSFSIDWWSLGAIMYECLIGWAPFCSEDATDAYRKIVHWRDSLQFPEDFQLTYNAENLIRSLMCEAENRLGRIGAEEIKAHPFFAGVDFSSLRRIRAPFEPHLSSETDTAYFPSEEELANNAIQLEAARAAAEPAGATDGFEPPEMTLPFIGYTFKRFENNFQ

SEQ ID NO: 7440 - protein, 608 aa, Zea mays
  misc_feature (204)..(204): Xaa can be any naturally occurring amino acid
  unsure (1)..(608): unsure at all Xaa locations
MPEAPTTKINPPAGGFAPGAHREALEFIEHVTANAGKVQRRVLAEILSQNAPAEYLRRYGVPGGSADAVEAFRRVVPLVTYEGLQPDILRIANGDASPILSGKPISEFLTSSGTSGGERKLMPTIADELDRRSLLYSLQMPVMSQSVPGLDKGKAMYLLFVKAESRTPGGLVARPVLTSYYRSRQFLERAHDPYTEYTSPNEGXLCVDSYQSMYAQLLCGLVHRADVLRVGAVFASGFLRAIRFLEKHWPRLCRDIRTGTLDPEITDRAVRDAVARVLRGADPALADEIEAVCGGSSWESIIRRLWPRTRYVDVIVTGAMSQYIPTLEFYGGGLPLACTMYASSECYFGLNLNPMCKPGDVAYTLIPTMCYFEFLPLQCSNGKAEPSHRDLVGLVDVKLGHEYELVVTTYSGLYRYRVGDVLRVAGFKNEAPMFKFVRRQNVALSVDSDKTDETELHAAVSGAVQHLAPFGASLVEYTSYADAATIPGHYVLFWELRAGSTAVPASVFEDCCLSVEEELNSVYRQCRACDKSIGPLEIRVVSEGTFDKLMDYAISRGASINQYKAPRCVRPGPVVELLDARVQAKYFSPKCPKWSPGNKQWNASNGDA

SEQ ID NO: 7441 - protein, 121 aa, Triticum aestivum
  misc_feature (68)..(68): Xaa can be any naturally occurring amino acid
  misc_feature (85)..(85): Xaa can be any naturally occurring amino acid
  unsure (1)..(121): unsure at all Xaa locations
QRALEESRLVPVRNCDIVDPRVRQNLVERNEQLYGSGDAPSGGVALPFILVQTRPHATVEVEISEDMXVVHFDFNSTPFELHDDXFVLKSMGSLLKKLMVQWLWLQMPLNGPVHQMFTGIG

SEQ ID NO: 7442 - protein, 55 aa, Triticum aestivum
  misc_feature (32)..(32): Xaa can be any naturally occurring amino acid
  unsure (1)..(55): unsure at all Xaa locations
MGSATVLEVILAIILPPVGVFLRYKLGVEFWXICLLLTILGYIPGIIYAVYVLVV

SEQ ID NO: 7443 - protein, 175 aa, Glycine max
MMTELVARTGRHQQRYGHGYRLIAGCVPFRYKEDDCGDSCSEKIVEVLMINSTSGPGLLFPKGGWENDETVEEAAVREAIEEAGVRGDLMDFLGYYEFRSKTLQDECSPEGLCKAAMFALFVKEELESWPEQSTRKRSWLVVSEALGNCRHAWMRDALQCFCKWHEECKGGSRLN

SEQ ID NO: 7444 - protein, 455 aa, Ruminococcus flavefaciens
MALKNQYLKELLERVEKRNPGEPEFIQAVTEVLETLQPVAEKRQDLIDAGVFERIVEPERQIIFRVPWVDDNGKVQVNRGFRVQFNSAIGPYKGGIRLHPSVYLGIIKFLGFEQVFKNSLTTLPMGGGKGGSDFDPKGKSDGEIMRFCQSFMTELSKHIGADCDVPAGDIGTGAREIGFMFGQYKRLRNEFVGVLTGKGLTYGGSLARTEATGYGLCYFTNEMLQANGKSFEGKTVVISGSGNVAIYATEKATQYGAKVVTVSGSNGYIYDPDGIELDLVKQIKEVERGRIKEYASRTSHKNAEYHEGSVWTLKCNAGGIKLDIALPCATQNEINGDGAKAIVANGGFAIAEGANMPSTPEAIETYLSNGLLYGPAKAANAGGVATSGLEMSQNSERLSWTFEEVDEKLHGIMKSIFKACDDAAKEYGMAGNYMAGANIAGFLKVAEAMKAQGCV

SEQ ID NO: 7445 - protein, 469 aa, Symbiobacterium thermophilum IAM 14863
MRRVIIGPGAGFRTGGDHMNLKELDLRHLIHNEVRFRELARKGTTVITRAEGSTIWDIDGRAYLDAQAGMVLVNVGYGRRELGAVAAAQMERLMYYHTYFQYSNEPAVRLAAKLASLAPEGLGKVFFTLGGAESVETAVKIARLYQRARGRADGHKIICLDLGYHGNSLGALSATAFEAHRAYYGPLVPGFVHIPSPDTFEGPFRADDPEAGRKYAALLEERILAEGPETVAAFLAEPILGVGGIIVPPDDYLKHVRRICDKYGVLLILDEVMTGFGRAGTMWACGQFGVVPDLMCTAKGLTSGYLPLGAVLVGDHVIEAIAEADFPFEHGFTYAGHPVSCAVAMENIAILEREGLAERAARMGERLKEALLARDNPYIAEVRGRGLMVAAELVRDRETRERFPEGNRAFRFDVEAGCLREGVITGIAPYRDTLMITPPLVITEAEIDRLVDVYDRVIRQEGDRRRKQG

SEQ ID NO: 7446 - protein, 296 aa, Arabidopsis thaliana
MSPKVKSSRYLPDQRSFLEVVIMLTLYHQERSPDATSNDRDETPETVVREVHALTPAPEDNSRTMTATLPPPPAFRGYFSPPRSATTMSEGENFTTISREFNALVIAGSSMENNELMTRDVTQREDERQDELMRIHEDTDHEEETNPLAIVPDQYPGSGLDPGSDNGPGQSRVGSTVQRVKREEVEAKITAWQTAKLAKINNRFKREDAVINGWFNEQVNKANSWMKKIERKLEERKAKAMEKTQNNVAKAQRKAEERRATAEAKRGTEVAKVVEVANLMRALGRPPAKRSFFSFS

SEQ ID NO: 7447 - protein, 338 aa, Arabidopsis thaliana
MALGLSSEESEMSPDGELVPVDSSAVVTAKRKTSQLSRSWISIDATGQKTVLDVDKHVIMHRVQIHARDLRILDPNLFYPSAILGRERAIVLNLEHIKAIITAEEVLIRDSSDENVIPVLEEFQRRLPVGNEAHGVHGDGDLGEEDESPFEFRALEVALEAICSFLAARTTELEKFAYPALDELTLKISSRNLERVRKLKSAMTRLTARVQKVRDELEQLLDDDGDMADLYLTRKLVGASSSVSVSDEPIWYPTSPTIGSMISRASRVSLVTVRGDDETDVEELEMLLEAYFMQIDSTLNKLTELREYIDDTEDYINIQLDNHRNQLIQEPSVYQCTL

SEQ ID NO: 7448 - protein, 316 aa, Burkholderia fungorum LB400
MSELFIPTDHQHVQIKPGQRTGLPVMIGVHSTLLGPAIGGLRIKPYARGADAVADVLRLSQAMTVKAAAIDNGTGGGKAVVPLPVGSNLSASLKDAILLDVADQVHALGGIYHVGPDVGSGESDMDAIRRRTPYVGGFSKRAGGAGGTTYGTYIGLDAAIRTAVRQVLNADSLQGLHVSVVGLGGIGTLIARAYAAEGARLTVSDIDETRRPLADEIGAAWVSPEEAMTVRCDVLAPCALGGVLTREIVPRLTARVICGAANNQLATEDIADALRSRETVYVPDFIANAGGLMYASGIELHHARPTHPTPIPVQPW

SEQ ID NO: 7449 - protein, 281 aa, Mesorhizobium sp. BNC1
MTTTRIDRLFTKLKAENRPALVTYFMGGDPDYETSLSIMKALPVAGSDIIELGMPFSDPMADGPAIQAAGLRALKGGQTLDKTLRMAKSFRQDNDHTPIVMMGYYNPIYIYGVDRFLTEARASGIDGLIIVDLPPEMDEELCVPALRAGINFIRLATPTTDDKRLPKVLENTSGFVYYVSMTGITGSALPDTSKVAGAVARIKGHTKLPVCVGFGVKTASQARAIGAAADGVVVGTAIVNAVANVLGPDGKTTADPAEAVATLVRGLADGVREARITAAAE

SEQ ID NO: 7450 - protein, 438 aa, Arabidopsis thaliana
MSLFLKDDSIQIREVWNDNLESEMALIREVVDDFPFVAMDTEFPGIVCRPVGTFKTNTEYHYETLKTNVNILKMIQLGLTFSDEKGNLPTCGTDNKYCIWQFNFREFDLESDIYATDSIELLRQSGIDFVKNNEFGIDSKRFAELLMSSGIVLNENVHWVTFHSGYDFGYLLKLLTCQNLPETQTGFFEMISVYFPRVYDIKHLMKFCNSLHGGLNKLAELLDVERVGICHQAGSDSLLTSCTFRKLQENFFIGSMEKYSGVLYGLGVENASLSLRFGKDLCFSSFGKPAQRFNMSGDEAVAAPVVPPVAEAAVIPEDMDVSTALELTVRKSRAYGGVVRGLHESAKLIEKRNAQLCVLAEDCNQPDYVKLVKALCADHSIKLLTVPSAKTLGEWAGLCKIDSEGNARKVVGCSCLVIKDFGEETTALNIVKKHLDSN

SEQ ID NO: 7451 - protein, 379 aa, Synechococcus sp. CC9605
MTTAPATANIPVTILSGFLGAGKTTLLNHILSNQQGVKTAVLVNEFGEIGIDNDLIVTTDEDMVELSNGCICCSINDELMEAVERVIERPEPLDYIVVETTGLADPLPVAMTFLGSELRDQTRLDSIITLIDAENFDDVVLDTEVGRAQVIYGDILLLNKCDLVSEERLEAVEQQLRDVKNDARILRSVKGDVPLPLLLSVGLFESDKVSSPADDPSLDHSDCDHDHGHCSHNHDHGHDRGHDHSQGHDHSHGHDHSHGDSHDHGHHHHSHNHGDHQDIEGFTSVSFQSDGPFSLRKFQNFLDNQMPQEVFRAKGVLWFNESERRHVFHLAGKRFSIDDTDWTGDRKNQLVLIGRDIDHTTLREQLQACVAPDAGKGFS

SEQ ID NO: 7452 - protein, 69 aa, Zea mays
MEWPKAPFALLNWQALKMRSPRQGLLPVREFTLAEIEHFLDPQDKSHPKFVDVADLEFLMFPRELQLSG

SEQ ID NO: 7453 - protein, 424 aa, Pseudomonas fluorescens Pf-5
MQDEFNDPLWRQVLSGAQMLFVAFGALVLMPLITGLDPNVALFTAGLGTLLFQVVTGRQVPVFLASSFAFITPIILAKGQFGLAATMGGVMAAGFVYTFLGLAVKIKGTGFIDRLLPPVVIGPVIISIGLAMAPIAANMAMGKAGDGSELIHYQTAMMISMPALLTTLIVAVFGKGIFRLVPIISGVLVGFALSFYFGVVDTAKIAAAPWLALPHFTAPEFNWQAILFIVPVALAPAIEHIGGVIAVGSVTGRDYLKKPGLHRTLFGDGIATTAAGLFGGPPNTTYAEVTGAVMLTKNYNPKIMTWAAVFAITLAFIGKFGALLQSIPVPVMGGILCLLFGSIAAVGMNTLIRHKIDLGEARNLVIVSVTLVFGIGGVLVGTGTGPDDFGLKGIALCAVVAIVLNLVLPGNDGWKNKKADEPLI

SEQ ID NO: 7454 - protein, 1136 aa, Oryza sativa
MGAEAEESLDHPGSLSGMSPATPDVAWKPAERRRRRSEADAEGSSCCSLSAATAAWVGAGNVESDDPSVRSVAAGEQSRSVSRPEEEEEECASCTQDSTVSPPVSECGDRTAQQEPSTQEYTVSPPPVSECGDKVVQQESSNQESTVSPPPVSECGDKIAQQGSSTRESTVLLPVSECCNKVAQQESSTQESTVSLPVIECGDKVAQQESSTQESTVSLPSSECGDKVAQQESSTQESTVSLPLSECGDKVAQQESSTQESTVSPPVSECGDKIARQEGAASAIPTPEKVEATPRRPRKRSTKGLTRFKIMKDHKAAQRTATPVEVKIKRKAKDNGRRPLGDKSVRRKLNFEGDAVDFEGNREFSRAKLMEDLRCLAKVHGLRDDLGAGKRSKKGKKRKKMTGEHQDNGESALVPYQKAPAATSSSALVPIQNSTQLAIVHHRNHLKNLRTKVLGLDEKTLQVYNVLRKWDETDSESFEGVDIGSGPEWNETRRHFEHYVDVFIATVHGLLGPRRFSEWGGSVTDSVVGTFLTQNVADNLSSNAFLNLVAKFPPTKRHINAEACSNLSLLIDDMRRKLNLNEQSNGTDSGSSDFTKPVDFEKENGYNEEVKGNYGRDYSTIIENFISIIEKHHKDMSTWDNARLENMVKDKSGTPVCSHRTLRKFMDTFEEKDTSHWDKLREEAYSKGYKIKGTGISDSADWEAVLHAPAVEIANSIAVRGQHYVIALRIQAFLKRVKKDHGNFDLDWLRYVPRESAKNYLISILGLGDKSVDCIRLLSLKHKGFPVDVNVARIVTRLGWVKLQPLPFSAEFHLVGLYPIMRDVQKYLWPRLCTISKEKLHINVYIVNIDCVLFPLHRQSAQKLSLPPAEGHGHEYGEEQASTATPGRLLLSNDSHIAGFQQVCQPQIKINMPAGRESIYKCEPIIEIPPSPEHEYEESPYEQELYEDDLCDIEDTIPELQYVLPDDHAILEEFEDRVPEDPCPYLLVVISCSDEHTVKGTILIPCRTATRGNFPLNGTYFQDHEVFADHSSSRSPITIPRECIWNLDRCIVYFGSSIQSIMKGQTRQDIEDCYKKGYICVRGFDRNTRYPKPICAKLHATNERNGTGENSRKKKKTSQEGKKIDDKSSFGKLEIN

SEQ ID NO: 7455 - protein, 280 aa, Picea abies
MVNEGRSQKAQYEEPPPAPFLDRNEFYLWSFYRAIIAEFVATLLFLYVTIATVIGNANQKKPCGGVGTLGIAWSFGGMIFVLVYCTAGVSGGHINPAVTFGLFIARKVSLNRAVFYIVAQCLGAVCGAGMVKALQKNYYSAGGGGANTVREGYASETALAAEIAGTFVLVYTVFCATDPKSNARDSHVPALAPLSVGFAVFMVHLATIPITGTSINPARSFGPAVIYGHKKSWDDLWIFWVGPLVGAAIAAAYHQYVLRAGGLGLKSLRSFRSQPTSLAI

SEQ ID NO: 7456 - protein, 415 aa, Desulfotalea psychrophila LSv54
MEKCATVNKRVVITGRGAVSPFGLGVPTLLENLWQGCSAIRSIPEWQDVAGLGSHLAAPVPDFDLKILPRIQRRTMGKMAMFATIASQEAVADSGIDKECLSSGDIGVAIGSTTGSPAAYETFYLQYLVNSSLQGIKSGEFFKSMGHSCAANVSLTLGIKGEQWGPASACTSSSQAIGLGYILIKAGRQQAMLCGGAEETHPSVTGVFDLLGAASRRHQEPESSCRPFAKDRDGVVCGGGSGVLVLEELASAQARGAKIYGEIVGFGNVTDSGHIANPDTHSMQRAMSRAMSEAGIIAADIDYVNAHATGTELGDIAEARAIASVLGPLIPVSSFKGHLGHTLGASGALEIIAVLEMMQRQEIIPTRNLSLADPRCNGISLIREKSSAFLKTILKNNFALGGVNTSLAIRNDIYP

SEQ ID NO: 7457 - protein, 772 aa, Thiobacillus denitrificans ATCC 25259
MALTHNLGFPRIGARRELKFALESYWKGESSRDALEAVGADLRRRHWQDQAALDLVPVGDFAFYDQVLDMSFTLGNLPERVQGFDGHPLDNAFRVARGRSADIAETHCCSAACSGVAAGEMTKWFDTNYHYIVPEFAASTSFKLDASRLLAQLAEAQAAGVRAKPVIIGPVTYLALGKAKDGSDKLGLLDRLLPVYVELLEALAGAGAEWVQIDEPLLVTELNAEWQHAFNRAYHALKASRVKLLLATYFGQLLENRYLAATLPVAGLHVDAISGRDDVEPLLGLLPAHKVLSLGVVNGRNIWKTDLGATLDWLEPVAERLGERLWIAPSCSLLHVPVDLDSEDALDGEIKSWLAFAKQKLDELRVLVAALNHGRDTVSAELAANRAACDARRNSPRVNDPAVKAAVAAITPQSGARQSPYAVRAAKQAAHLRLPRFPTTTIGSFPQTAEIRQARRRFKAGEIDDAAYRAAMQDEIAHSVRAQEALGLDVLVHGEAERNDMVEYFGEQLDGYAFSRFGWVQSYGSRCVKPPILFGDVRRPRPMTVEWTRYGQSLTEKPMKGMLTGPVTLLNWSFVRDDQPRAESCKQLALTIRDEVADLEKAGVRVIQIDEAALREGLPLRRSQWKTYLGWAVESFRIAANGVADETQIHTHMCYSEFNDIIEAIAAMDADVITIETSRSDMELLDAFDHFSYPNEIGPGVYDIHSPNIPTPQHIVNLIKKAAERIPAERLWINPDCGLKTRQWNEVIPALGNMVAAARTLRAGWQETGRAG

SEQ ID NO: 7458 - protein, 129 aa, Oryza sativa
  misc_feature (47)..(47): Xaa can be any naturally occurring amino acid
  misc_feature (65)..(65): Xaa can be any naturally occurring amino acid
  unsure (1)..(129): unsure at all Xaa locations
MDPCTLRATSSFDTNTTTTNARAPGRNDNEALTEASRGPILLEDYHXLIEKVSHFARERMLERVXHARVAYAKGFFESTHNVTDITCAHFLRPPSAHTPAIARFYTVIHERVLPETIRDPSGLVARFYI

SEQ ID NO: 7459 - protein, 477 aa, Arabidopsis thaliana
  misc_feature (336)..(336): Xaa can be any naturally occurring amino acid
  misc_feature (354)..(354): Xaa can be any naturally occurring amino acid
  unsure (1)..(477): unsure at all Xaa locations
MAATTRRLLYYVSKRFSTAGVRRSYGGLPQSNSKSPPSSSQRLMELESEFSAHNYHPVPVVFSRANGSTIWDPEGKRYIDFLAAYSAVNQGHCHPKIMKALQEQVEKLTLSSRAFYNDKFPVFAERLTNMFGYDMVLPMNTGAEGVETALKLARKWGHEKKNIPKDEAIIVSCCGCFHGRTLAIVSMSCDNDATRGFGPLLPGNLKVDFGDADSLEKIFKEKGDRIAGFLFEPIQGEAGVIIPPDGYLKAVRELCTKYNVLMIADEVQSGLARSGKMLACDWEEIRPDMVILGKALGGGVIPVSAVLADKDVMLHIKPGQHGSTFGGNPLASAVAXMASLDVIVEEKLVERSAXVLGEELRIQLNEIKKQFPKYIKEVRGRGLFNAIEFNSESLSPVSAYDICLSLKERGVLAKPTHNTIVRLTPPLSISSDELREGSEALHDVLELDLPNLLKINSGKTPVSHITECDRCGRNLYA

SEQ ID NO: 7460 - protein, 476 aa, Glycine max
MGMEEESSNNSSIIEGGASLPSTGSDAKKRRVTYFYEPTIGDYYYGQGHPMKPHRIRMAHNLIVHYSLHRRMEINRPFPASPADIRRFHSDDYVDFLSSVSPENLADSAFSRHLKRFNVGEDCPVFDGLFPFCQASAGGSLGAAVKLNRADADIAINWAGGLHHAKKSEASGFCYVNDIVLGILELLKVHRRVLYVDIDVHHGDGVEEAFYTTDRVMTVSFHKFGDFFPGTGHVKDIGVGSGKNYAVNVPLNDGMDDESFRSLFRTIIQKVLEVYQPEAVVLQCGADSLSGDRLGCFNLSVRGHADCLRFLRSFNVPLMVLGGGGYTIRNVARCWCYETAVAVGVEPDNKLPYNEYYEYFGPDYTLYVDPSNMENLNTPKDMEKIRNTLLEQISQLPHAPGVPFQTTPPTLQLPEEAEEDMDRRPKLRKWDGEDYDSDPDEGGKANSKFPNVTAHMRDITDEMEEEKPEVHPSSCC

SEQ ID NO: 7461 - protein, 702 aa, Bradyrhizobium sp. BTAi1
MATKAKTLQVKDKEKDDKAADAPEKDSADAPSPLLDLSDAAVKKMIKQAKKRGFVTFDQLNEVLPSDTTSPEQIEDIMSMLSDMGINVTEAEEADESEEKDDGDDETDNELVEITQKAVTEVKKSEPGERTDDPVRMYLREMGTVELLSREGEIAIAKRIEAGREAMIAGLCESPLTFQAIIIWRDELNEGKIFLRDIIDLEATYAGPESKGGMNPQIAAPANGEGEAADGGEIQAAVAPPAAPQQPTPFRAAPNGAPVEEKDPGEAAAEADMDDDEFENQMSLAAIEAELKPKVVETFDKIASEYKKLRRLQEQDIANQLQSESLSPSQERKYKKLKDEIIVEVKSLRLNQARIDSLVEQLYDINKKLVSFESRLMRLADSHGVAREDFLRNYQGSELDPRWLNRVSKLSAKGWKNFVHYEKDRIKDLRQEVQSLAALTGLEIGEFRKIVHSVQKGEREARQAKKEMVEANLRLVISIAKKYTNRGLQFLDLIQEGNIGLMKAVDKFEYRRGYKFSTYATWWIRQAITRSIADQARTIRIPVHMIETINKIVRTSRQMLNEIGREPTPEELAEKLGMPLEKVRKVLKIAKEPLSLETPVGDEEDSHLGDFIEDKNAILPIDAAIQSNLRETTTRVLASLTPREERVLRMRFGIGMNTDHTLEEVGQQFSVTRERIRQIEAKALRKLKHPSRSRKLRSFLDN

SEQ ID NO: 7462 - protein, 175 aa, Glycine max
RLREDDRRVRLREDHATVRLREDDRRGHITTTTTTKKDKNYFLLSFAVFSFSKMGRTYVLMMVAALLLSSTMAQSPASSPALSPTHTPVATPPRRALSPSPSSVSPAASPATGNSPPAPPTSSPSESPLPSAATPNISPSTISTPPSEGPAANGAVFNRVSGSALLLIFAAAILI

SEQ ID NO: 7463 - protein, 381 aa, Nostoc sp. PCC 7120
MAQIISINDNQRLQLEPLEVPSRLLLGPGPSNAHPSVLQAMNVSPVGHLDPAFLALMDEIQSLLRYVWQTENPLTIAVSGTGTAAMEATIANAVEPGDVVLIGVAGYFGNRLVDMAGRYGADVRTISKPWGEVFSLEELRTALETHRPAILALVHAETSTGARQPLEGVGELCREFGTLLLVDTVTSLGGVPIFLDAWGVDLAYSCSQKGLGCSPGASPFTMSSRAIEKLQRRRTKVANWYLDMNLLGKYWGSERVYHHTAPINLYYALREALRLIAQEGLANCWQRHQKNVEYLWERLEDIGLSLHVEKEYRLPTLTTVCIPDGVDGKAVARRLLNEHNIEVGGGLGELAGKVWRVGLMGFNSRKESVDQLIPALEQVLR

SEQ ID NO: 7464 - protein, 113 aa, Brassica napus
MRNRVKEKFLEFYESWIFQLEQYLHQLLIAQNKINTMSEIELRGLISKLTADHKAYYTAKWAAIGEDILAFFGPVWLNPLEKSCFWLTGWKPSTAFRMLDKLRKSWRPTVVRV

SEQ ID NO: 7465 - protein, 509 aa, Halomonas sp. SK1
MSDDTKKCPVTHMTTDFGAPVVTNRDSLTAGPRGPLLAQDVWLNEKLAGFVREVIPERRMHAKGSGAFGTFTVTHDITKYTRAKIFSEVGKKTEMFARFTTVAGERGAADAERDIRGFALKFYTEEGNWDMVGNNTPVFFIRDPRQFPDLNKAVKRDPRTNLRTATNNWDYWTLLPEALHQVTVVMSDRGIPASYRHMHGYSSHTYSLWNQAGERFWVKMHFRTQQGIKNLTDAEAGELVAQDRESHQRDLYEAIERGEYPKWTMFIQVMPEADAEKYALHPFDLTKVWYKGDYPLIEVGEFELNKNSENFFADVEQVAFSPSNLVPGIGVSPDRMLQRRLFNYADAQRYRLGVNYHQIPVNQARCPVHSNHRDGQGRVDGNYGALPHYEPNSFGQWQGQPQFSEPPLKLTGNAAHWSYDKDDHNYFEQPGKLFRLMNDGQKEALFGNTGRAMGDAPEFIKFRHIRNCHAADPAYGAGVAKALGINLEKALASKKDDPMYGNPLVALPA

SEQ ID NO: 7466 - protein, 173 aa, Oryza sativa
MGSYYEITSRGALIKGRQFNFSNLYLYHIYNSSEPNQQQIIDDVSSTAMGGLSVNNWTVYDGVASDATLVARGQGLHTYAGNWHCSFTLVFEDERFNGSTLEVKGIFEETHDWAIVGGTGEFAMASGVIKKTVYERTPEGTIIELTIRGFWPDFYLFEGDIWSGEWRPFGVHW

SEQ ID NO: 7467 - protein, 296 aa, Oryza sativa (japonica cultivar-group)
MLSWNNSWHSSSTENRTMEREIVASYEPKKNNEIRMFESSDEMATDLAEYISQVSEISIKERGYFAIALSGGPLISFMRKLCEAPYNKTLDWSKWYIFWADERAVAKNHVDSYYKSTKEDFLSKVPILNGHVYSINDNVTVEDAATDYEFVIRQLVKIRTVGVSESNDCPKFDLILLSIGSDGHVASLFPNHPALELKDDWVTYITDSPVPPPERITFTLPVINSASNIAVVATGEDKAKAVYFAISDGTEGPDAPSIPARMVQPTDGKLVWFLDKASASFLEAKTKNDGYEHPKY

SEQ ID NO: 7468 - protein, 371 aa, Glycine max
RNLGGIPPRGGGELRLRRENDRRPQNQTKKNPFPSTYTLLQSHPKKTCNKPKTMLDESVSSTPTFLGSLYSWFTPTVFFLLLQLVIGTIFIISNLANTHKHQQQEPQQAHDFPHHHLPRSPSMLQRLKSINFYPSSPFRSQDLQNPHFHNAHENEQPQLARSPSVLQRLKSINLYSYFPTEPFTSKLTPDQHVPEKPYVREQNQPQQVVETDEEKEEGYDDYVVEDDNNIIMSTHNYNYNLGVSEEGGAGSSSLDEIYCKLQQQGQEGHFERTHSDTKPASGEVPVKLPRKMKKSASSKSAFSHFKEDDIVETRRPATVREAKVTGGAAEDDAEVDAKADDFINKFKQQLKLQRLDSIIRYKEMIGRGSAK

SEQ ID NO: 7469 - protein, 508 aa, Oryza sativa
MAATPPSSQHRRPLSSSASAASLAGKPRGGGLLLGRYELGRLLGHGTFAKVYQARSADSGEPVAIKVLDKEKAMRHGLVPHIKREIAILRRVRHPNIVRLFEVMATKSKIYFVMELVRGGELFGRVAKGRLKEDTARRYFQQLVSAVGFCHARGVFHRDLKPENLLVDEHGDLKVSDFGLSAVADQFHPDGLLHTFCGTPSYVAPEVLARRGYDGAKADIWSCGIILFVLMAGYLPFHDQNLMAMYRKIYRGEFRCPRWFSKDLSSLLNRILDTNPETRITVKEVMESRWFQKGFRPVRFYVEDDQVHSLADGDNDMPELEPSEPPPPPPFPPPPPQQDDDGEESGWESDSSVASCPATLSSEERRQRPLGSLTRPASLNAFDIISFSKGFDLSGLFEERGSEVRFISAEPMQTIITKLEEIAKVKSFFVRRKDWRVSIEGTREGLKGPLTIGAEIFELTPSLVVVEVKKKAGDKEEYDDFCNRELKPGMQHLVHHMGSVPNIPSDTE

SEQ ID NO: 7470 - protein, 498 aa, Vibrio vulnificus YJ016
MTAMDLRKALYTAKQVREGEVGAAANAGVTLYELMERAGRATFAVILNYYPAVSRLCVVCGKGNNGGDGYVVARLARQQGLYVVLIQSSDAESLSGDAKQAQQAWRDAGGEISDTASLNAALSDCDLVVDALLGTGLAGAVRDEMAKLIDAVNLAGKPIVSVDIPSGLCADTGQALPDAIHADHTVTFIGTKQGLVTGKARAFCGAIHFADLGIGTEFSKLVPSFKTTIERDEITQWRLTRARCAHKGDHGRVVLLGGNRGMSGAISLAATACARSGAGLVAALTHPESALPLQIHCPEVMTLGYNEDKRELEKKLDWADVLVVGPGLGTDEWAKKRWNDIANFQGPMVLDADGLNWLARYPNHNDQRIITPHPGEAARLLGCSVNEVEADRFAAVSVLQSQYGGVVVLKGAGTLVYDGTQTFVCNAGNPGMATGGMGDVLSGVIGALLVQKLPLLRAASLGVLLHSCAADICATEKGEIGLLASDLLDKIRQLLNAD

SEQ ID NO: 7471 - protein, 472 aa, Yersinia pestis KIM
MRECTMKNDSSTLKRGLSARHIRFMALGSAIGTGLFYGSAEAIRLAGPAVLLAYLIGGAAVFMVMRALGEMAVHDPVAGSFGHYASRYLGPLAGFLTGWTYTFEMVVVALADVTAFGIYMGLWFPDAPQWVWVLSIIFFIGALNLCSVKVFGEMEFWLSLLKVAAIIAMIAAGLGIMMFGFGAGHDSTGVSNLWAHQGFMPNGITGVIASFAVVMFAFGGIEIIGVTASEAKDPGKVLPRAINTVPIRILLFYVLTLFVLMAIYPWNSIGQNGSPFVEIFSSLGINSAANILNLVVITAAISAINSDIYGAGRMMYGLAQEGLAPKSFSRLTRNGVPYMTILVMAITLLCGVVLNYLIPKNVFLVIASIATFATVWVWLMILVSQVAMRRSMSKAQVARLAFPVPFWPLAPILTILFMAFIIAVLGYFPATRIAMYVGLAWVALMTLAWWIWLRKAPSCVIQERAKSSEMPS

SEQ ID NO: 7472 - protein, 599 aa, Actinobacillus pleuropneumoniae serovar 1 str. 4074
MQSVNFDVAIIGAGGGGLRAAIAAAEANPNLKIALISKVYPMRSHTVAAEGGSAAVIKDTDSFDNHFNDTVGGGDWLCEQDIVEYFVEHSPIEMTQLERWGCPWSRREDGEVNVRRFGGMKIERTWFAADKTGFHLLHTLFQTSIKYPNIVRFDEHFVLDILTDNGEARGCVAMNMMEGTLVQINANAVVIATGGGCRTYRFNTNGGIVTGDGLSMAYRHGVALRDMEFVQYHPTGLPNTGILMTEGCRGEGGILVNKDGYRYLQDYGLGPETPIGKPENKYMELGPRDKVSQAFWQEWKKGNTLKTAKGVDVVHLDLRHLGEKHLTERLPFICELARAYEGVDPVTSPIPVRPVVHYTMGGIEVDMHAETSIKGLFAVGECASSGLHGANRLGSNSLAELVVFGKVAGENAARRAQEAGPRNQAQIDAQAQDVVARLHALARQEGNESWSDIRNQMGDAMEEGCGIYRTQESMEGAVNKIHELRERYKNISVKDKSSVFNTDLLYKIELGFILDVAQSIACSAVERKESRGAHQRLDYTERDDVNYLKHTQAFYNADGTPTIKYSDVKITKSQPAKRVYGAEAEAQEKAKKAAEQAQK

SEQ ID NO: 7473 - protein, 168 aa, Zea mays
  misc_feature (67)..(67): Xaa can be any naturally occurring amino acid
  unsure (1)..(168): unsure at all Xaa locations
MASAEGERWVGLATDFSQGSREALQWAATNLLRAGDHLLLLHVIKEPDYEQSGAILWESTGSPLIPXLSEFSDPIIAKKYGAKPDMETLDLLNTTATQKDIVVVVKVLWGDPREKLCQVIHDTPLSCLVIGSRGLGKLKRVLLGSVSDYVVNNATCPVTVVKSTSTEG

SEQ ID NO: 7474 - protein, 413 aa, Symbiobacterium thermophilum IAM 14863
MERRVVVTGMGLISPLGNSVRANWEAAVAGRSGIGPITRFDASRLPTRFAGEVRDFDPATVMDPKEVRRYDPFIHYALAAAAEAVEDAGLTFEGELAERTGVVFGSGMGGLEGIVENALILQERGPRRISPFFVPRCIINSAAGLISMKYGVHGPNYGTVSACASAGHAIADAMHIIRRGDADVMITGGSEATITELAFAGFSSAKALSTRNDDPQGASRPFDADRDGFVMSEGAGCLVLEELEHARRRGARIYAELAGAGMSGDAYHITAPHPEGRGAVLAMKGALRSARLNPEDVGYINAHATSTDLGDVQESLAIEQVFGDHARKLAVSGTKSMHGHLLGAAGAIEAILTVLSLYHQVLLPTINLHRPDPECRLDYVPHTAREVRGVEAALCNNFGFGGTNVSLAFRRFV

SEQ ID NO: 7475 - protein, 290 aa, Arabidopsis thaliana
MALRIRKATTTLLFSGGITHGTDRIARTGALLSRWISSASSSSAVVADDESSGIYGLGSVLKEYEDYRRSLYGEITHKALLVDAVGTLLVPAQPTAQIYKNIGEKYGVEYSEAEILTRYRRAYQKPWGGSHLRYVNDARPFWQYIVTASTGCSDSQYFEELYSYFTTEQAWKLCDPDAGKVFKAIKEAGVKVAIVSNFDTRLRPLLRALRCEDWFDAVAVSAEVEAEKPNPTIFLKACELLEVNPEDAVHVGDDRRNDVWGARDAGCDAWLWGSEVTSFKQVAQRIGVKV

SEQ ID NO: 7476 - protein, 365 aa, Lotus corniculatus var. japonicus
MDFSSSNGSEDTELSQAQIHLYKHVYNFVSSMALKSAMELGIADVIHSHGKPITLPELATALNLRPSKIGVLHRFLRLLTHNGFFAKTTVSRGEGAEEETAYGLTPPSKLLVKSNSTCLAPIVKGALHPSSLDMWRSSKKWFLEDNEELTLFESATGESFWEFLNKETESDTLSMFQEAMAADSHMFKLALKECKHVFEGLGSLVDVAGGRGGVTKLIREAFPHVKCTVFDQPQVVANLTGDENLNFVGGDMFKSVPPADAVLLKWVLHDWNDELSLKILKNCKEAISGRGKEGKVIIIDISIDETSDDRELTELKLDYDLVMLTMFNGKEREKKEWEKLIYDAGFSSYKITPICGFKSLIEVFP

SEQ ID NO: 7477 - protein, 422 aa, Methanococcoides burtonii DSM 6242
MVTLDKSKDLFDKARKILPGGVSSPVRAIKPYPFYTESANGCRIKDVDGNEYIDYCLAYGPNILGHANPVIKQAIIDQLDKGWLYGTPTGLEVTLGEKIASLYPSIDMLRFVSTGTEATMSALRAARGFTCKNKFVKIEGGFHGAHDAVLVKAGSGATTHGKPDSLGIPEDFTKNTLQVAYNDIEAMTEVIESNQDDMAAVIMEPVLGNIGPILPEGDYLKEVRKVTEENDVVLIFDEVITGFRLAMGGAQEYFGVTPDMTTLGKIVGGGLPIGVFGGKREILEMISPSGSVYQAGTFSGSPASVAAGIAAVDVLEKEKVHEKLEATGNMLRAGLNDIIADKRLDFHVGGIASMFKVFFGDKPLNYQDVLKCDKEGYLQFFHDMLDSNVFLPPSQFETNFLSTAHTEADLETTLEAYAVNLK

SEQ ID NO: 7478 - protein, 198 aa, Arabidopsis thaliana
MSASRFIKCVTVGDGAVGKTCLLISYTSNTFPTDYVPTVFDNFSANVIVDGNTINLGLWDTAGQEDYNRLRPLSYRGADVFLLAFSLVSKASYENVSKKWVPELRHYAPGVPIILVGTKLDLRHDKQFFAEHPGAVPISTAQGEELKKLIGAPAYIECSAKTQQNVKAVFDAAIKVVLQPPKNKKKKKRKSQKGCSIL

SEQ ID NO: 7479 - protein, 481 aa, Pseudomonas fluorescens Pf-5
MQLIWLRSDLRLHDNTALSAAAQRGAAVAVYLLSPEQWLAHDDAPCKIDFWLRNLQSLSTALGRLNIPLLIRSAATWEQAPQVLLELCRQLQVQMLHFNQEYGIHESRRDAAVTRALQHAGISVQGHLDQLLFQPGSVLTKSGGYFQVFSQFRKVCYSRLHTALPALVKAPGAQLPLSINADPLPQRVEGFPSPTQALRELWPAGDDEAQRRLEKFSDEQIHYYQSERDFPAKPGTSQLSPYLAAGVISPRQCLHAALRGNQGEFESGSPGAVTWINELLWREFYKHILVGYPRVSRHRAFRPETEAVKWRHAPEELAAWQEARTGLPIIDAAMRQLLETGWMHNRLRMVVAMFLTKNLLIDWREGERFFMRHLIDGDLAANNGGWQWSSSTGTDSAPYFRIFNPISQSQKFDSEGRFIKHWLPQLAGLNKKDIHNPAAMGGLFGVPGYPAPIVDLSRSRERALAAFKALPARMDAGVSHE

SEQ ID NO: 7480 - protein, 435 aa, Synechococcus sp. CC9605
MKDVAKGSEKEAKKAPARRRTSKASAKDLNAAADELLAAADQAKASGTTKKAAAKSTKAKTTTKKATTTKKAATTKKTATKATTAKAAAKPTAEEKAKTAAAEKEAKAKALASIKIGPKGVYTEDSIRVYLQEIGRIRLLRPDEEIELARKIADLLYLEELAAQFESDNGREPDNKEWAALVEMPLIRFRRRLMLGRRAKEKMVQSNLRLVVSIAKKYMNRGLSFQDLIQEGSLGLIRAAEKFDHEKGYKFSTYATWWIRQAITRAIADQSRTIRLPVHLYETISRIKKTTKVLSQEFGRKPTEEEIAESMEMTIEKLRFIAKSAQLPISLETPIGKEEDSRLGDFIEADIENPEQDVAKNLLREDLEGVLATLSPRERDVLRLRYGLDDGRMKTLEEIGQIFDVTRERIRQIEAKALRKLRHPNRNGVLKEYIK

SEQ ID NO: 7481 - protein, 374 aa, Mesorhizobium sp. BNC1
MKADFYETLCVSRNADEKELKSAFRKLAMQYHPDRNPGDMEAEKKFKEINEAYETLRDPQKRAAYDRFGHAAFEQGMGARGGFNGGGFADIFEDIFGDIMGGARQRRSGGRERGADLRYNMEITLEESFTGKTAQIRVPTAVTCDECAGSGARPGSSPVQCPMCHGAGRVRASTGGFFSIERTCPQCQGRGQIIDDPCRKCSGQGRLTEERSLSVNIPAGIEDGTRIRLAGEGEAGLRGGPPGDLYIFLSIKPHEFFQRDGADLYCKVPISMTTAALGGSFEVTTLDGTQTRVKVPEGTQSGRQFRLRGKGMPVLRQPQVGDLYIQVAVETPQNLTRRQRELLEEFEKISSGENSPQSTGFFARMKDFFETFGE

SEQ ID NO: 7482 - protein, 300 aa, Corynebacterium diphtheriae NCTC 13129
MTAENIVVVAVDGSEASQNAVRWAANTANKRGVPLRLAASYTMPQFLYAEGMVPPQELFDELQSETMDMIEAARVVAHEVAPDIKIGYVIAEGSPIDMLLDMSSDVTMIVMGSRGLGGLSGMVMGSVSAAVVSHADCPVVVVRSDNHVTETNKYGPVVVGVDGSDVSQRATEFAFEEAQARGAKLVAIHTWMDMQVQASLAGLAAAQQEWEIIEKEQTTLLKDRLQPLLERFPDVEVEMVITRDRPVRALEDCAHNAQLLVVGSHGRGGFRGMLLGSTSRALLQSAPCPMVVVRPNEKEN

SEQ ID NO: 7483 - protein, 156 aa, Desulfotalea psychrophila LSv54
MTIFPRSRRNIMSLVKWNPWREIEDVFDRNIKRVPSRLSDLGFATSEDWTPKVDISETDKEFIIKAELPEVKREDVKVTVDKGVLTICGERKQEREEEGKTFHRVERYYGSFTRSFTLPENVDESKVDASYKDGMLNLKIEKTEEAKPTSIEVEIK

SEQ ID NO: 7484 - protein, 226 aa, Arabidopsis thaliana
MSSSDSVNNGVNSRMYFRNPSFSNVILNDNWSDLPLSVDDSQDMAIYNTLRDAVSSAWTPSVPPVTSPAEEDKPPATKASGSHAPRQKGMQYRGVRRRPWGKFAAEIRDPKKNGARVWLGTYETPEDAAVAYDRAAFQLRGSKAKLNFPHLIGSCKYEPVRIRPRRRSPEPSVSDQLTSEQKRESHVDDGKSSLVVPELDFTVDQFYFDGSLLMDQSECSYSDNRI

SEQ ID NO: 7485 - protein, 584 aa, Saccharomyces cerevisiae
MTISDHPETEPKWWKEATIYQIYPASFKDSNNDGWGDLKGITSKLQYIKDLGVDAIWVCPFYDSPQQDMGYDISNYEKVWPTYGTNEDCFELIDKTHKLGMKFITDLVINHCSTEHEWFKESRSSKTNPKRDWFFWRPPKGYDAEGKPIPPNNWKSFFGGSAWTFDETTNEFYLRLFASRQVDLNWENEDCRRAIFESAVGFWLDHGVDGFRIDTAGLYSKRPGLPDSPIFDKTSKLQHPNWGSHNGPRIHEYHQELHRFMKNRVKDGREIMTVGEVAHGSDNALYTSAARYEVSEVFSFTHVELGTSPFFRYNIVPFTLKQWKEAIASNFLFINGTDSWATTYIENHDQARSITRFADDSPKYRKISGKLLTLLECSLTGTLYVYQGQEIGQINFKEWPIEKYEDVDVKNNYEIIKKSFGKNSKEMKDFFKGIALLSRDHSRTPMPWTKDKPNAGFTGPDVKPWFFLNESFEQGINVEQESRDDDSVLNFWKRALQARKKYKELMIYGYDFQFIDLDSDQIFSFTKEYEDKTLFAALNFSGEEIEFSLPREGASLSFILGNYDDTDVSSRVLKPWEGRIYLVK

SEQ ID NO: 7486 - protein, 458 aa, Streptomyces coelicolor A3(2)
MATSVVLFTRDLRLHDHPPLRAALDRSDAVVPLFVRDRAVDAAGFAAPNRLALLADCLRDLDSGLRDRGGRLVVRSGDLVEEVCAVAGEAEADEVHLAADVSAHAHRREELLRSALSARGCRLHVHDAVTTVLAPGSVTPASSDHFAVFTPYFRRWSERAVREPLAAPRRVRVPDGVGSEPLPARGDLTGLSPGLPTGGERDARKRLTAWLRGGIADYADHHDDLAGDATSRLSPDLHLGALSPVELVHRARRAGGPGAEAFVRQLAWRDFHHQVLAARPHASAADYRTRHDRWRTGAAAEADAAAWRDGRTGYPVVDAAMRQLRHEGWMHNRGRLLVASFLTKTLYVDWRVGAWHFLELLVDGDVANNQLNWQWAAGTGTDTRPHRVLNPTTQARRFDPGGTYVRRWVPELAGLAGRSVHEPWRLARAARAAYDAYPDPIVDLSEGLDRFRRARGRD

SEQ ID NO: 7487 - protein, 352 aa, Zinnia elegans
MAFIFSSKKTSLLFLFVSILACSALAHEFSILGYAPEDLTSIHKVIHLFESWLVKHSKFYESLDEKLHRFEIFMDNLKHIDETNKKVSNYWLGLNEFADLTHEEFKHKFLGFKGELAERKDESSKEFGYRDFVDLPKSVDWRKKGAVAPVKNQGQCGSCWAFSTVAAVEGINQIVTGNLTMLSEQELIDCDTTFNNGCNGGLMDYAFAYVMRSGLHKEEEYPYIMSEGTCDEKKDVSEKVTISGYHDVPRNDEASFLKALANQPISVAIEASGRDFQFYSGGVFDGHCGTELDHGVAAVGYGTTKGLDYVIVRNSWGPKWGEKGYIRMKRGSGKPHGMCGLYMMASYPTKQK

SEQ ID NO: 7488 - protein, 498 aa, Deinococcus radiodurans R1
MSRPPAILRPAMSEPVSAVPLSAPVTPEWVADAVFYQIFPDRFARSGRVTGLHLQPWGSAPTIHGYMGGDLWGVAERLGDLAGLGVNALYFCPVFQSASNHRYHTHDYFQVDPMLGGNAALRHLLDEAHARGIRVVLDGVFNHASRGFFQFNDLLEHGEASAYRDWFHVTGWPLSAYDEDRPANYAAWWGIRALPKFNTDHPEVREFLLSVAEYWMHFGIDGWRLDVPNEIDDDAFWQEFRRRVKAINPDAYIVGEIWGDAGRWLAGDQFDAVMNYHFTRPCLGFFGARTLDHPMNERSGTGRVEPLDAAAFAVRVEEVTRMYHPAVVRAQLNLLDSHDTARFLTAVGGDASAQRLALVFQFSYVGAPCLYYGDEIGLPGGVDPDCRRAFPWDEPQTWDHDTLTLVRELTAARHRSAALRRGDFTVLHAQGEQVSFARKHDGEAAYVAFNCALDAAPVPVPATSGRYRDMLTGAVHDLNESSVLTLPARTAALLLCEG

SEQ ID NO: 7489 - protein, 340 aa, Haemophilus influenzae R2846
MLKKLFHSALWGLAAAGVILFAVPRLNNSNIFTSDDIVSFKNAVRIASPAVVNVYNRSFSSASINDNDQLQVNNLGSGVIMSKDGYILTNKHVIQNADQIVVALQNGNIFEASLVGSDDLTDLAVLKIRANNLSTIPQNSARQAHVGDVVLAIGNPYNLGQSVSQGIISAIGRNAVGDSVGRQNFIQTDASINRGNSGGALINSAGELVGISTLSIGKTANEIAEGLNFAIPIDIANDVLRKIMRDGRVIRGYFGVQSDISSSSEEGIVITDVSPNSPAAKSGIQVGDVILKLNNQEGISAREMMQIIANTKPNSKVLVTILRLGKILQIPVVIEEFPVN

SEQ ID NO: 7490 - protein, 490 aa, Nicotiana attenuata
MGFENEKNNSILSKLATNEEHGENSPYFDGWKAYDNDPFHPLKNPNGVIQMGLAENQLCFDLIEEWIKRNPNASICTTEGIKSFRAIANFQDYHGLPEFRRAIAKFMEKTRGERVTFDPERVVMAGGATGANETIIFCLADAGDAFLVPSPYYPAFNRDLRWRTGVQLIPIPCDSSNNFQITTKAVNEAYENAQKSNIKVKGLILTNPSNPLGTTLDRDTLKNFLTFTNQHNIHLVCDEIYAATVFNTPQFVSIAEILNDEMSHCNKDLVHIVYSLSKDMGLPGFRVGIVYSFNDAVVNCARKMSSFGLVSTQTQYLLAEMLSDEKFVSNFLAESSKRLAKRHKHFTNGLEEVGIKCLRSNAGLFCWMDLRPLLKQSNFDAEMSLWKVIINDVKLNVSPGSSFDCQEPGFFRVCFANMDDETVDIALARIRRFVGVKESGDETTAMEKKQQWKKNNLRLSFPKRMYDESVNNLSPLSSPIPHSPLVRARN

SEQ ID NO: 7491 - protein, 452 aa, Arabidopsis thaliana
MNRPKVQRRVGKYEVGKTLGQGTFAKVRCAVNTETGERVALKILDKEKVLKHKMAEQIRREICTMKLINHPNVVRLYEVLASKTKIYIVLEFGTGGELFDKIVHDGRLKEENARKYFQQLINAVDYCHSRGVYHRDLKPENLLLDAQGNLKVSDFGLSALSRQVRGDGLLHTACGTPNYAAPEVLNDQGYDGATADLWSCGVILFVLLAGYLPFEDSNLMTLYKKIIAGEYHCPPWLSPGAKNLIVRILDPNPMTRITIPEVLGDAWFKKNYKPAVFEEKEEANLDDVDAVFKDSEEHHVTEKKEEQPTSMNAFELISMSRALDLGNLFEEEESIPFNLQGFKRETRFAAKGAANDLVQKIEEASKPLGFDIQKKNYKRYLCTQMRLENVTAGRKGNLRVATEIFQVSPSLHMIEVRKTKGDTLEFHKFYKKLSTSLNDVVWKSGESSGLSK

SEQ ID NO: 7492 - protein, 404 aa, Kluyveromyces lactis NRRL Y-1140
MASRLQQLEKHLTGRSSEKDIKSKNPDDVVVVAAYRSAIGKGFKGGFKDVNTDYLLTQFLKEFFEKVDIDKSVIEEIACGNVLNPGAGATEHRAAMLAAGLPYQTPLVAINRQCSSGLTAVNDVANKIISGQINVGLAIGVESMSKNYGPKALGSISNELKSNTAAAKCMIPMGFTNENVAKKFQISREDQDKFALESFYKAERAVSQGLFKDEIIPIELPDGSIIAQDEGPRKGVTFESLQKIKPAFVKETGVTTAGNASQISDGVAGVLLMRRSMAMKLGLEIVGKYVAFQAVGVPPEIMGVGPAYAIPRVLKDCGLNVNDVDVYEINEAFAGQAIFCVNHLKIDKKKLNPRGGAIALGHPLGCTGARQVATILRELDAGQIGVVSMCIGTGMGAAAVFVKE

SEQ ID NO: 7493 - protein, 483 aa, Nicotiana attenuata
MGFISNIENELLSKVATNNGHGENSAYFDGWKAYEIDPFHLTQNFDGVIQMGLAENQLCFDLIQEWVVNNPKASICTAEGSEDFKDIAIYQDYHGLPEFRSAVARFMEKVRGDRITFEAERIVMSGGATGAHELLAFCLADPAEAFLVPTPYYPGFDRDLRWRTGVQLFPVVCESSNNFKVTRTALETAYQKAQESNITVKGLLLNNPSNPLGTILDRETLKDTVRFINEKNIHLVCDEIYAATIFNKPDFISISEVILDEDVECDRDLIHIVYSLSKDLGFPGFRVGIIYSYNDVVTNCARKMSSFGLVSTQTQFLISNMLSDEKFVTKFIGESSERLAKRHDMFTKGLAQVGINTLKSNAGLFIWMDLRRLLKELTFESELELWRIIINEVKLNVSPGCSFHCSEPGWFRVCFANMDDETMRVALRRINNFVIQRKGIEGGVKKLQCRRSKLEISLSFRKLDDFINSPHSPMSSPLVQART

SEQ ID NO: 7494 - protein, 317 aa, Arabidopsis thaliana
MATLKVSDSVPAPSDDAEQLRTAFEGWGTNEDLIISILAHRSAEQRKVIRQAYHETYGEDLLKTLDKELSNDFERAILLWTLEPGERDALLANEATKRWTSSNQVLMEVACTRTSTQLLHARQAYHARYKKSLEEDVAHHTTGDFRKLLVSLVTSYRYEGDEVNMTLAKQEAKLVHEKIKDKHYNDEDVIRILSTRSKAQINATFNRYQDDHGEEILKSLEEGDDDDKFLALLRSTIQCLTRPELYFVDVLRSAINKTGTDEGALTRIVTTRAEIDLKVIGEEYQRRNSIPLEKAITKDTRGDYEKMLVALLGEDDA

SEQ ID NO: 7495 - protein, 312 aa, Debaryomyces hansenii CBS767
MSNTVRVACGQLCSSSNLLSNANIVKKLIRKAVTAKAKVLFLPEATDYIAKDAIQSMQLAQSSHEKFISDIQRELKEVYADNGDGLFVAVGVHEPSSSTGVNAKEILNKVLNNQLWIGNRGEILHRYQKLHLFDINIENGPILKESNSVEPGSSVLKPFPINTSSLSEFLIGFATCYDIRFPELGLRLRSLGANIITYPSAFTTKTGQAHWELLARARAVDTQCYVVMAAQCGEHDTGGDKKRISYGNSIIIDPWGNKISECHKYNEDLVVDSEGDYYEMCVADLDLDMVEKTRRDMPLMTHRRPDVFGNEV

SEQ ID NO: 7496 - protein, 484 aa, Nicotiana attenuata
MVFISGNVQKQQLLSKIATNDGHGENSAYFDGWKAYENDPFHLTNNPNGVIQMGLAENQLCFDLIQEWVVNNPKASICTTEGAEDFRDIAIFQDYHGLPEFRQAVARFMEKVRGDKVTFDPNRIVMSGGATGAHETLAFCLANPGDAFLVPTPYYPGFDRDLRWRTGVQLFPVVCDSSNDFKVTKKALESAYEKAQESNINIKGLLINNPSNPLGTILDSDTLKDIVTFINSKNIHLICDEIYAATVFDQPKFISVSEIVEEHVGCNKDLIHIVYSLSKDLGFPGFRVGIVYSYNDTVVNIARKMSSFGLVSTQTQHLIASMLSDETFIEKFIAESSERLGKRHEMFTKGLAQVGISTLKSNAGLFFWMDLRRLLKELTFESELELWRIIINEVKLNVSPGCSFHCSEPGWFRVCFANMDDETMRIALRRIRNFVLQTKGLNSKSAVKKQCSRSKLQISLSFRRMDDFMNSPVHSPMNSPLVRT

SEQ ID NO: 7497 - protein, 118 aa, Musa acuminata
IFQGLKMVSVERSFAEKHYADLSAKPFFAGLVEYIISGPVVAMVWAGKNVVVTGRKIIGATNPADSAPGTIRGDLAIEIGRNVIHGSDSIESASKEIALWFPEGVAEWQSNLHPWIYE

SEQ ID NO: 7498 - protein, 488 aa, Bacillus anthracis str. Sterne
MNSATNQTTSQTETTKGKGELRRGLKSKHLTMISLGGTIGTGLFLASGGVIHSAGPGGALIAYAAIGIMVYFLMTSLAELTAYMPVTGSFSTYATKFVDPSLGFALGWNYWYNWAITIAAELAAVTLIMKFWFPDTPSLIWSGLCLAIIFLLNYLSVKGFGESEYWFALIKVATIIIFLIVGFMMIFGIMGGETVGFKNFTVADAPFNGGIMAIIGVFMAAGFSFQGTELLGVAAGETSDPERNIPKAIRSIFWRILLFYILAILVIGLLIPYTTESLAASDVTVSPFTLIFEKAGVAFAASVMNAVILTAVLSAGNSGMYASTRMLWDLARQGKAPKFLGKLDSRGVPVNALIVTSIVGSIAFIASLFGDGVVYIWLLNASGMSGFIAWVGIAISHYRFRKAYIAQGKDLNDLPYRAKWFPFGPIFAFALCVIVILGQNYGAFMGESIDWNGVLVSYIGLPLFLVLWLGYKFTKKTKVIPLDKCELK

SEQ ID NO: 7499 - protein, 485 aa, Nicotiana attenuata
  misc_feature (118)..(118): Xaa can be any naturally occurring amino acid
  unsure (1)..(485): unsure at all Xaa locations
MVFISSNNQKQQLLSKIATNDGHGENSAYFDGWKAYENDPFHLSNNPNGVIQMGLAENQLCFDLIQEWVVNNPKASICTTEGAEDFKDIAIFQDYHGLPEFRQAVARFMERVRGDKVXFDPNRIVMSGGATGAHEMLAFCLADPGDAFLVPTPYYPGFDRDLRWRTGVQLFPVVCDSSNDFKVTREALESAYEKAQESNIKIKGLLINNPSNPLGTLLDRDTLKDIVSFVNSKNIHLVCDEIYAATVFNKPNFISISEILEENLGLCNQDLIHIVYSLSKDLGFPGFRVGIVYSYNDTVVNIARKMSSFGLVSTQTQHLIASMLSDEIFVEKFIVESSERLGIRQGMFSKGLAQVGISTLKSNAGLFFWMDLRRLLKESTFEAELELWRIIINEVKLNVSPGCSFHCSEPGWFRVCFANMDDETMRIAIRRIRNFVLQTKGITNKVAAFKKQCSRSKLQISLSFRRLDDFNSPVHSPMNSPLVRT

SEQ ID NO: 7500 - protein, 449 aa, Novosphingobium aromaticivorans DSM 12444
MSKPASPIATSRPKCLDAAPRWSAASSTPLARREFSATGRFRGSSATSMPDGPTWPTIRPRSAAISAACCSARRTWTASSDRRGVDAMATTAEYGLGPLTFPRGWFMVAVADEVTSTPQPVRFFGKEMVLYRGKGSGRVVLLDAYCPHMRVHLGRNTTSYVVKDGTHVEGDAIRCPAHGWRYTPEGKCDDIPYTTQPIPKAACVKSHKVVEKAGCVWMWHDMEGGDPEFDLPDFAEWDMEGEGWVRWRLDHLGTLPIHPQEIVDNMADLAHFRPVHGSTEIIRFENGFHDHIITQRLCSGHRTLVGSDQALVNDTWYTGPGILLSRMEGQHPSVIMICNTPVEDGEVRVWYALAVRVSDKAADDAGVALARAYQDTALEAFAQDFELWKYKEPAISILQVAGDGPFHKERIWHRQFYNPRERAGEFQRRVNGVHVSLGAAKDFAAEAAE

SEQ ID NO: 7501 - protein, 446 aa, Suillus bovinus
MREIVHIQTGQCGNQIGAKFWEVVSDEHGIERDGLYKGTNDMQLERISVYYNEIGSNKYVPRAVLVDLEPGTMDSVRSGPLGGLFRPDNFIFGQSGAGNNWAKGHYTEGAELVDSVLDVVRKEAEGTDCLQGFQITHSLGGGTGAGMGTLLMSKIREEYPDRMMCTYSVVPSPAVSDTVVEPYNATLSVHQLVENSDETFCIDNEALYDICFRTLKLSTPTYGDLNHLVSFVMSGITTCLRFPGQLNSDLRKLAVNMVPFPRLHFFMTGFAPLTARGSQQYRAVTVPELTQQMFDAKNMMAASDPRHGRYLTVAAVFRGKVSMKEVEEQMQNVQNKNSAYFVEWIPNNVLSAQCDIPPRGVKMAVTFLGNSTAIQELFKRVSDHFTAMFKRKAFLHWYTQEGMDEMEFTEAESNMQDLIAEYQQYQDATVEEEAEYEEEVPADEES

SEQ ID NO: 7502 - protein, 230 aa, Moorella thermoacetica ATCC 39073
MAEIFDRKAGDYDDWYTRPLGALVDRVEKEPIYAYLDPHAGEHILDVGCGTGNFSLELARRGVKVTGIDISDPMLAKARKKAADAGLAIEFLHADAMNLPFGDNTFDKIVSVTALEFAPELKAVLEESYRVLKPGGRMVIGLIGGNSLWSRHYEARAAREPDCLFRYARFYTLDELLAAMPGKNVQGKAVLFFGPDFDGTKVDEALAIEAAAAREGRTNGGFITAVSYKD

SEQ ID NO: 7503 - protein, 338 aa, Synechococcus sp. CC9605
MSSETRFPSDCCSLDVVGIGNAIVDVLVQTDDSFIAEHGLQKGGMALIDEQQAEALYKASGTGLETSGGSVANTMVGIAQLGGRAGFIGRVRDDQLGSIFSHDIRAVGARFETPAATSGATTARCLIYVTPDAERTMCTFLGASTQLEPEDLDLSMVKQAKVLYLEGYLWDSPAAKRAFIAAAEACREAGGKVALSLSDGFCVDRHRASFLELVNGHVDVLFANDVEIQSLYETDNFDQALERVRGCCSVIAITRGAQGSVVLSGDQRRDVGIFGLGDLVDTTGAGDLYAGGFLHGFTHGESLERCGELGALCAGQIVTQLGARSQVSLKQLAETHLN

SEQ ID NO: 7504 - protein, 622 aa, Xanthomonas campestris pv. campestris
MANERPAQQSDIKLLISKGLEQGYLTYAEVNDHLPDDLVDPEQIEDIISMINGMGIDVHEVAPDAETLLLNDGNTGNREVDDTAAEAAAAALTALDTEGGRTTDPVRMYMREMGTVELLTREAEIAIAKRIEEGLSQVQAALGTFPLVDRAAAVRLRSAQGRQEAPGRDRGRLQRPDRRSRRCRCSLAAAGRSPLTKMRWTKTQTKTAMTTLPRKKSGPTVRTRWKLPRAWRTWPTSTPSSRRPYVKYGAEHKNVAKAREDMAAIFTTLNVPLTDALVTQLRGVVNGIKDHERKVLHLATTVARMPRKDFIRSWEGNQTNLEWVEDALKRKQKWSSALRDVKDQIVSEQQGSIEMEKANYLTLAEIKDISRAMAYGEAKARKAKKEMVEANLRLVISIAKKYTNRGLQFLDLIQEGNIGLMKAVDKFEYRRGYKFSTYATWWIRQAITRSIADQARTIRIPVHMIETINKLNRISRQMLQQFGREPTPEELAKEMDMPEDKIRKVMKIAKEPISMETPIGDDEDSHLGDFIEDTNVESPIDNTTNINLSETVRDVLAGLTPREAKVLRMRFGIDMNTDHTLEEVGKQFDVTRERIRQIEAKALRKLRHPSRSEQLRSFLDID

SEQ ID NO: 7505 - protein, 326 aa, Geobacter sulfurreducens PCA
MPVLVTGGAGYIGSHVVRQLSEAGYTVVVYDNLSTGFPDALVHGERLVTGDLSDTARLDALFVEYGFSTVLHFAASIIAPESVTAPLKYYGNNTRNTLNLLGACVKHGVERFIFSSTAAVYGIPDSGVAAEESATVPINPYGTSKLMSEWMLRDVCAAHGMRSVALRYFNVAGADPQARMGQRTPEATHLIKVSCQAALGLRDKVCIFGTDYPTPDGTGIRDYIHVEDLASAHLAALSYLEKGGESTRINVGYGSGSSVREVIDMVRRVSGVHFLAEEAPRRPGDPPSLVARADRARTLLGWTPRYDNLETIVADAWRWEKKISGN

SEQ ID NO: 7506 - protein, 253 aa, Zea mays
  misc_feature (70)..(70): Xaa can be any naturally occurring amino acid
  misc_feature (185)..(185): Xaa can be any naturally occurring amino acid
  unsure (1)..(253): unsure at all Xaa locations
MAQLPPKIPTVAPAWPEFGGGHQQQRSPSVGTFLAAAPMQPSWVDEFLDFSAAKRGAHRRSVSDSVAFLXPSDHNSINDEKTDRGDAEEAQSKCHGAAAATAVDPKRVKRILANRQSAQRSRVRKLQYISELERSVTSLQTEVSALSPRVAFLDHQRSLLTLGNSHLRQRIAALAQDKIFKDAHXGGTEEGDREAEANLPAAEPEERQGARRGPVGPRRQGHDRQRGDRRARPALVMRRRWWGDTSRHPSRSL

SEQ ID NO: 7507 - protein, 441 aa, Corynebacterium diphtheriae NCTC 13129
MLDAQQSPPLTRNQRLDRLPLNSQHKRLLVGSGLGWALDAMDVGLISFVMAALIKHWGLTHGQTSVLASAGFVGMAIGATFGGLLADKWGRRNVFALTLLVYGLATGASALAGGLAVLIVLRFIVGLGLGAELPVASTLVSEFAPLRHRGRLVVILEAFWAVGWILAAIIGAFVVSASDSGWRWALVLGCVPALYSAYVRSSLPESVRFLEARGRHDEAEAAVQQFEKASATIPDTPVIATEDPADQADSIFAPNMRRRTFGLWTVWFCINLSYYGAFIWIPSLLVADGFSLVKSFQFTLIITLAQFPGYALAAWLIEIWGRRTTLAVFLLGSAGSAALYGFADTTALIIAAGCCLSFFNLGAWGALYAISPELYPSQIRGTGTGSAAGFGRIASIIAPLIVPPIVAAAGTPALFALFGAAFLAAAIAAFTLPEQRGKALV

SEQ ID NO: 7508 - protein, 514 aa, Candida albicans SC5314
MSDIEKKQTKISPASSVAHDEDTLANDELFQLTDSVLNKKLKLINDAIDEIGFTPYHLKLFFLNGMGYWTDTQLTYLESSVRTFVNYQFGYKYPVSNEMLAAGLLVGALFWGFSADLIGRRLAFNLTLLLSALFTILTGVMNNMASYCIFVFLSCFAAGGNLVLDTCIFLEFLPHKDQWLLTFFAFFWGIGQTIAVALAYAFLPNNSCESADNCPSHINRGWRYVYYTNGSIVLAMAILRLTLIRLQETPKFLVSNNRDQEAVEILQRIAQKHNRTCSLTIEDLESLGKVEINDDYRKHIDIKGTFRLVTHHVQILFSNRTMARSSVLVFVSWLLLGISYPLYSSFLPVYLATRGANISAPDVHGVYRDNLISNCVSMGGPLIAGALLFCFPWLGRRGVLFIGGVASMAFLFGYTQIKTRAQNVALSSISFASMYIYYSALYAYTPEVFPSVARATGNAIAIACTRVMTCIVPVIAYYSNTSSSVPIWVCGAFVGVIGFLALLFPYEPSKQRVV

SEQ ID NO: 7509 - protein, 475 aa, Triticum aestivum
  misc_feature (19)..(19): Xaa can be any naturally occurring amino acid
  misc_feature (24)..(24): Xaa can be any naturally occurring amino acid
  misc_feature (105)..(105): Xaa can be any naturally occurring amino acid
  misc_feature (272)..(272): Xaa can be any naturally occurring amino acid
  misc_feature (290)..(290): Xaa can be any naturally occurring amino acid
  unsure (1)..(475): unsure at all Xaa locations
MRYVQLRCFGVSSYFWTPXTSSDXLAHVCFPPSVSDFIGVKPTDPLKTELRTIYGQLCQDDMPMVRRAAASNLGKFAATVEQSHLKTEIMSIFDDLTQDDQDSVXLLAVEGCAALGKLLEPQDCVAHILPVIVNFSQDKSWRVRYMVANQLYELCEAVGPEPTRADLVPAYVRLLRDNEAEVRIAAAGKVTKFCRILSPQLAIQHILPCVKELSSDSSQHVRSALASVIMGMAPVLGKDATIEQLLPIFLSLLKDDFPDVRLNIFSKLDSSXNRVIGIDLLSQSLLPGYXVNLREDRHWRVRLAIIEYIPLLASQLGVGFFDDKLGALCMQWLEDKVFSIREAAANNLKRLAEEFGPEWAMQHIIPQVLEKINNPHYLYRMTILQAISLLAPVMGAEITCQKLLPVVINSSKDRVPNIKFNVAKVLQSLVPILDQSVAEKTVKPCLVQLSEDPDVDVRYYANQALQACDQFMMSS

SEQ ID NO: 7510 - protein, 460 aa, Xanthomonas campestris pv. campestris str. ATCC 33913
MSERVVDPSVLRSLQQLDAAHHLHPFNDNAALASKGTRILTRGEGVYVWDADGNKLLDAFAGLWCVNLGYGRAELAQAAARQMEQLAYYNSFFQCTTEPTVHLAAKLAELAPGDLNHAFFANSGSEANDTILRLVRHFWAVQGQPQKHIFIGRHDGYHGTTMGGASLGGMRGMHRQGGLPIPGIEHIAPPNHFGEGGEMDPDDYGLLAARRLEEKILQLGPDTVAAFIGEPIMGAIGVYIPPRSYWPEIERICRRYDVLLVADEVICGFGRTGAWFGAEYFGFQPDVMTLAKGITSGYIPLAAAMFNDRVAGVLKRQGGELAHGGTYAGHPVCAAVALENLRLLQDEGIVDTARTQIAPYLAQRWAELGAHRLVGEARIAGLVGALELVPDKRRRGVYFPERGRVGALCRDFALRRGLILRATYDAMLLSPPLIITCEQVDELFDKTWAALDDTAQALGK

SEQ ID NO: 7511 - protein, 615 aa, Phaseolus vulgaris
MATLTASSNLVSGSSHVHHGPTASYESKAVTMGLKSLKQTNTHNGLRILNPVDELRNRTPVKINSKATRKGLQGKNVKPKGEIICGMKLIFVGMEVGPWSKTGGLGDVLGGLPPALAAYGHRVMTIAPRYDQYKDAWDTSVVVELKVGDRTEKVRYFHCYKRGVDRVFVDHPLFLSKVWGKTGTKLYGLTTGDDYEDNQLRFSLFCQAALEAPRVLNLNSSKYFSGPYGEDVIFIANDWHTALLPCYLKTMYQSVGIFKNARVVLCIHNIAYQGRFAFTDYALLNLPDQFKSSFDFIDGHVKPVIGRKINWMKAGILESWFVITVSPNYAKELLSGPDKGVELDNILRKNEDRLIGIVNGMDVQEWNPSTDKYIAVKYDASTVLEAKALLKEALQAEVGLPVDRNIPLIGFIGRLEEQKGSDILAEAIPQFIEENVQLVALGTGKKQMEKQLQELEISYPDKARGVAKFNVPLAHMIIAGADFILVPSRFEPCGLIQLQAMRYGSVPIVSSTGGLVDTVEEGFTGFQMGSFNVECEAVDAADVDAIAKTIKRALALYGTPAFTEMIKNCMAQDLSWKGPAKKWEDVLLSLEVPGSEPGIDGEEIAPQAKENVATP

SEQ ID NO: 7512 - protein, 253 aa, Streptomyces exfoliatus
NDLSGKTVIITGGARGLGAEAARQAVAAGARVVLADVLDEEGAATARELGDAARYQHLDVTIEEDWQRVVAYAREEFGSVDGLVNNAGISTGMFLETESVERFRKVVEINLTGVFIGMKTVIPAMKDAGGGSIVNISSAAGLMGLALTSSYGASKWGVRGLSKLAAVELGTDRIRVNSVHPGMTYTPMTAETGIRQGEGNYPNTPMGRVGEPGEIAGAVVKLLSDTSSYVTGAELAVDGGWTTGPTVKYVMGQ

SEQ ID NO: 7513 - protein, 319 aa, Bartonella grahamii
DGDKGILLYRGYPIDQLAEKGDFLESCYLLLYGELPTQQEKNEFDRCIMQHTMVHEQFARFFHGFRRDSHPMAVMVACLGAMSAFYHDSIDITDPHQRMIASVRLISKVPTLAAMAYKYSIGQAFVYPRNDLSYAANFLRMCFAVPCEEYKTNPVLARAMDQIFILHADHEQNASTSTVRLAGSSGANPFACIAAGVACLWGPAHGGANEACLKMLQEIGSIERIPEFIARAKDKNDPFRLMGFGHRVYKNYDPRAKIMQKTCHEVLKELNIQDDPLLDIAIELEKIALSDEYFIEKKLYPNVDFYSGITLKALGFPTE

SEQ ID NO: 7514 - protein, 737 aa, Thiobacillus denitrificans ATCC 25259
MRRRCAPGSRDAASRQSPLAARPCLAPLSAYKDESKRTFRKATMSQKKKPAKAGPDENFERGAGGEIHQTANGAHPPLTTNDGVPISDDQNSLRSHPRGPTLLEDFVLRDKITHFDHERIPERVVHARGSAAHGYFELTESLEKYTTARILTEVGEKTPVFTRLSTVAGGAGSVDTPRDVRGFAVKFYTKEGNWDLVGNNIPVFFIQDAIKFPDLVHSFKMEPDRGFPQSSTAHDTFWDYVSLTPESMHMILWIMSDRTTPRSLRMIEAFGVHSFRLVNAKGASTFVKFHWRPKLGLQSTIWDETVKIAGADPDFHRRDLFEAISEGNFPEWEFAVQLFTEADAERFPFDHLDATKLIPEELVPLKVIGRMVLDRWPDNFFAETEQVAYCPTHVVPGIDFSNDPLLQGRLFSYVDTQLLRFNSPNFHQVPVNMPKCPFANLQRDGHMQMERPKGRVNYEPNTLGTDTPRETPQGFRSAAVTESGEKGRIRAERFADHYSQARQFYVSQTEYEQAHIASTLVFELAKVDHVHIREAMVGHLRHVDEDLAHRVAKGLGIDPLPPAPEAAAPVQDLPPSPALQIIGNMKDTLEGRMVGILVGDGSDGARVEALRRAATDAGAAVKIIAAHVGQVKLANGKMLKVDKQLAGTPSVLFDAVAVVVSEDAAKMLLKESAALDFVHDAFGHLKAIASDAGGQALLDAVHVVRDAGVVDAADVGAFIAAAKTRQWDREPSVRLLA

SEQ ID NO: 7515 - protein, 281 aa, Corynebacterium glutamicum
MSRYDDLFGDASTRSGEGAFVPFIMLSDPSPEEAFQIISTAIERGADALELGVPFSDPVADGPTVAESHLRALDGGATVDSALEQIKRVRAAYPEVPIGMLIYGNVPFTRGLDRFYQEFAEAGADSILLPDVPVREGAPFSAAAGIDPIYIAPANASEKTLEGVSAASKGYIYAISRDGVTGTERESSTDGLSAVVDNIKKFDGAPILLGFGISSPQHVADAIAAGASGAITGSAITKIIASHCEGEHPNPSTIRDMDGLKKDLTEFISATEGSDQEGLGL

SEQ ID NO: 7516 - protein, 245 aa, Triticum aestivum
LNYFTVSSRHAAQLPHAVGAAYSLKMDKKDACAITYFGDGGTSEGDFHAALNFAAVMEAPVIFFCRNNGWAISTPTTEQFRSDGVVIRGQAYGIRGIRVDGNDALAVYSAVHAAREMAITEGRPILVEALTYRVGHHSTSDDSTKYRPVDEIEHWRTARDPISRYRKWVQGNDWWSDAEESELRSRVRKELLQAIQVAERMPKPPVADLFTDVYDKIPSNLCEQEQLLRDTIMKHPADYPTDVPV

SEQ ID NO: 7517 - protein, 252 aa, Novosphingobium aromaticivorans DSM 12444
MAINYGLDGKVALVTGAGGGIGRAAAQVFARSGASVMVSDVNEAGGAETVALIEAAGGKAAFVRCDVSNADEVKAMVKATVDTFGGLDCAFNNAGINRVTDDQYDDAIWERDIAINLSGVMRCMREESAVMLERGGGAIVNTASINGLVGNGSQPAYTAAKHGVVGLARHGALRWAKNGIRVNAVCPGVIETPMTAPLVQNPEIKALMDSMTPMGRMGSAMEIAEAVVWLCSPAASFVTGHAMVVDGGATAF

SEQ ID NO: 7518 - protein, 359 aa, Novosphingobium aromaticivorans DSM 12444
MATSKEYGLGEFDFPRGWFMIGTAADATRIPAPIRYFGKDLVVYRGESGAPYVVDAYCPHMGAHLAKNSTSYIVRDGEHVEGESIRCPFHGWRFGTDGACNHIPYSDFIPKAAKLRTYPVVERAGILWMWHDPEGLEPDVELANFGGHHGEPGWVEWKIDYMGDLNSHGIEIVDNMADFGHFVPIHGATDWQYFANEFKGPHLHQYYSAGHRTLTANPEDFLVLDTWYEGPGFLQSEMAGAFDSFIMIANTPVEDGVSRCWHALMVKVHDGSRETTDEDRANALAYQEGSRLAFAQDVEIWANKRACLNPLAVPNDGPYGKVRLWYRQFYNPRDKAPEIQGRVNGLHVTLDKRPGQKVA

SEQ ID NO: 7519 - protein, 164 aa, Cleisostoma racemiferum
IENKINRQVTFAKRRNGLLKKAYELSVLCDAEVALIIFSNRGKLYEFCSSTSMLKTLEKYQKCNFGSPESTIISRETQSSQQEYLKLKSRVEALQRSQRNLLGEDLGPLGSKELEQLERQLDSSLKQIRSTRTQFMLDQLADLQRREHMLCEANKALKRRFEES

SEQ ID NO: 7520 - protein, 508 aa, Haemophilus influenzae R2846
MSSQCPFSHLAATNLTMGNGAPVADNQNSLTAGPRGPLLSQDLWLNEKLADFVREVIPERRMHAKGSGAFGTFTVTHDITKYTRAKIFSEVGKKTEMFARFTTVAGERGAADAERDIRGFALKFYTEEGNWDLVGNNTPVFFLRDPRKFPDLNKAVKRDPRTNMRSATNNWDFWTLLPEALHQVTVVMSDRGIPASYRHMHGFGSHTYSFWNEAGERFWVKFHFRTQQGIKNLTNAEAAEIIANDRESHQRDLYEAIERGDFPKWTLFVQIMPEADAEKVPYHPFDLTKVWPKKDYPLIEVGEFELNRNPENFFADVEQSAFAPSNLVPGIGASPDRMLQARLFNYADAQRYRLGVNYRQIPVNRPRCPVHSNQRDGQGRVDGNYGSLPHYEPNSFSQWQQQPDFAEPPLRINGDAAHWDYRNDDNDYFSQPRALFNLMNAEQKQSLFNNTAAAMGDAPDFIKYRHIRNCHWCDAAYGEGVAKALGLTVEDALKARDTDPALGQGGLL

SEQ ID NO: 7521 - protein, 259 aa, Novosphingobium aromaticivorans DSM 12444
MGRLSGKVAIVTGGARGMGAATSRLFVAEGAKVAIADVLDEAGEALAAELGDAARFFKLDVTSEDNWASVVSEVEAALGPVDVLVNNAGILMFKSLLETTKADYEKVLGVNLVGEFLGIKAVAPGMIARGKGSIVNISSVDGMKGANSLVAYASSKWGVRGLTKVAAMELGHKGIRVNSVHPGGVDTVMSNHSGAAREDVDKGYANVPLQRIGGPEEVAAASLFLASDDASYLHGAEIVVDGGMTVGTYYMGFPGSPGM

SEQ ID NO: 7522 - protein, 662 aa, Escherichia coli
SSRKELANAIRALSMDAVQKAKSGHPGAPMGMADIAEVLWRDFLKHNPQNPSWADRDRFVLSNGHGSMLIYSLLHLTGYDLPMEELKNFRQLHSKTPGHPEVGKTAGVETTTGPLGQGIANAVGMAIAEKTLAAQFNRPGHDIVDHYTYAFMGDGCMMEGISHEVCSLAGTLKLGKLIAFYDDNGISIDGHVEGWFTDDTAMRFEAYGWHVIRDIDGHDAASIKRAVEEARAVTDKPSLLMCKTIIGFGSPNKAGTHDSHGAPLGDAEIALTREQLGWKYAPFEIPSEIYAQWDAKEAGQAKESAWNEKFAAYAKAYPQEAAEFTRRMKGEMPSDFDAKAKEFIAKLQANPAKIASRKASQNAIEAFGPLLPEFLGGSADLAPSNLTLWSGSKAINEDAAGNYIHYGVREFGMTAIANGISLHGGFLPYTSTFLMFVEYARNAVRMAALMKQRQVMVYTHDSIGLGEDGPTHQPVEQVASLRVTPNMSTWRPCDQVESAVAWKYGVERQDGPTALILSRQNLAQQERTEEQLANIARGGYVLKDCAGQPELIFIATGSEVELAVAAYEKLTAEGVKARVVSMPSTDAFDKQDAAYRESVLPKAVTARVAVEAGIADYWYKYVGLNGAIVGMTTFGESAPAELLFEEFGFTVDNVVAKAKELL

SEQ ID NO: 7523 - protein, 484 aa, Yersinia pestis KIM
MYVGIDLGTSGVKAILLAENGRVIASQNAALVVSRPHPLWSEQNPADWWQATDQVMQALAAEHDMQQVKALGLTGQMHGATLLDKQHQVLRPAILWNDGRSFSQCQTLEQAVPASRQITGNLMMPGFTAPKLQWLAEHEPDMFQCIDKVLLPKDYLRFLMSGDFATDMSDAAGTMWLNIAQRDWSDEMLAACGLGRQHMPTLFEGNQITGHVSADIAKRWGINRIPIVAGGGDNAAGAVGVGLYQAGQAMLSLGTSGVYFAVSEGFLSNPASAVHSFCHALPNTWHLMSVMISAASCLDWACQLTGAESVPALIAEVEKTPMAATPVWFLPYLSGERTPHNNPKAKGAFWGFTHEHRRPDLARAVLEGVGFALADGMDALHASGLQPKSVTLIGGGARSAYWRQMLADISGQTLEYRTGGDVGPALGAARLAQIAMNPDVSLADLLPALALEQTHLPDPQKHHYYTDRRVTFKKLYQQLLPLCE

SEQ ID NO: 7524 - protein, 406 aa, Actinobacillus pleuropneumoniae serovar 1 str. 4074
MKRVVITGLGVISSIGNNKEEVLASLKEGKSGIEFVPEFAEVGMRSQVAGTIKLNPAELIDRKVYRFMGDAAAYAYLSMKEAIEDSGLTEDQVSNDRTGLVIGAGTGSAHSQLVACDAVRGPRGVKAVGPYAVTKTMASSVSACLATPYKIRGVNYSISSACATSAHCIGHAMELIQLGKQDVVFAGGAEELSWECATEFDAMGAVSTKYNDNPTKASRAYDANRDGFVIAGGGAVVVVEELEHALARGAKIYAEIVGYGATSDGYDMVAPSGEGAERCMKQALATVNGEVEYINVHGTSTPVGDVKELGAIKNVFGDKSPAISSTKSMTGHSLGAAGAHEAIYSLLMLENGFIAPSINIETLDEQAEGLNIVTERQDKALTTVMSNSFGFGGTNACLVFQKYNGQ

SEQ ID NO: 7525 - protein, 180 aa, Oryza sativa
MFPMVTGFMSYGQQTIRAARYIGQSFIITLSHTNRLPITIHYPYEKSITSERFRGRIHFEFDKCIACEVCVRVCPIDLPLVDWRFEKDIKRKQLLNYSIDFGVCIFCGNCVEYCPTNCLSMTEEYELSTYDRHELNYNQIALSRLPISIMGDYTIQTIRNSTQSKIDEEKSWNSRTITDY

SEQ ID NO: 7526 - protein, 632 aa, Oryza sativa
MGRCHTGLACLLTGLARDSGDALYDMKLKLNATGNQLSDWNQNQVNPCTWNSVICDNNYNVVQVFFVCSKLVCLMTDALLQNIGIYGIHWSSITTNWRASVFECFIFGGSCDEIATVILEETRSWSLPGNKITGGIPEQIGNLSSLTSLDLEDNLLVGPIPASLGQLSKLQILRLAYNKLSGSIPGSLFQVARYNFSGNNLTCGANFLHPCSSSISYQGSSHGSKVGIVLGTVVGAIGILIIGAVFIVCNGRRKSHLREVFVDVSGEDDRRIAFGQLKRFAWRELQLATDSFSEKNVLGQGGFGKVYKGALPDGTKIAVKRLTDYESPGGEAAFLREVELISVAVHRNLLRLIGFCTTQTERLLVYPFMQNLSVAYRLRDSILEDFNMYLIVFNDAEFKPGEPILDWSARKRVAIGTARGLEYLHEHCNPKIIHRDVKAANVLLDEDFEPVVGDFGLAKLVDVQKTSVTTQVRGTMGHIAPEYLSTGKSSERTDVFGYGIMLLELVTGQRAIDFSRLEEEDDVLLLDHVKKLQREGQLGAIVDRNLSSNYDGQEVEMMIQIALLCTQASPEDRPSMSEVVRMLEGEGLAERWEEWQQVEVTRRQDYERMQQRFDWGEDSIFNQEAIELSAGR

SEQ ID NO: 7527 - protein, 499 aa, Sulfolobus tokodaii str. 7
MIDTKRMRAIEINSEALGIPTLLLMENAGRSVKDEILARIKPNNAVIFVGHGGKGGDGLVTARHLASEGVKVKVIVLGENKHKDAVFNYNAILDMDYSIEINEIKDLEELKPVEADVLVDAMLGTGFRGKPREPFATAIRVFNESKGFKVSIDLPSGIDADTGEAPGEYVKPDLVVTFHDMKKGLLRYNFNVVVKKIGIPPEAEIYVGPGDVVVSIKKRDYKSKKGDNGRVLVIGGSYTFTGAPTLSALAALRTGADLVYVASCEETAKIIAGYSPDLIAIKLSGKNISPNNLEELKPWIDRADSVIIGPGMGLSEETIEASKMIVNYLMEKNKPAVIDADALKAISGYKLYPNAVITPHAGEFKIFFKEETEKDIRKRIAQVVEKAKECNCVVLLKGYVDIVSDGKEFRLNKTGNPGMTVGGTGDTLTGIVGTFLAQKLSPFDAAAIGVFVNSLSGTLAYSELGPHITPSDILNKIPVVLNDPIESFKKKIYKRVVNS

SEQ ID NO: 7528 - protein, 533 aa, Zea mays
MQIFVKTLTGKTITLEVESSDTIDNVKAKIQDKEGIPPDQQRLIFAGKQLEDGRTLADYNIQKESTLHLVLRLRGGMQIFVKTLTGKTITLEVESSDTIDNVKAKIQDKEGIPPDQQRLIFAGKQLEDGRTLADYNIQKESTLHLVLRLRGGMQIFVKTLTGKTITLEVESSDTIDNVKAKIQDKEGIPPDQQRLIFAGKQLEDGRTLADYNIQKESTLHLVLRLRGGMQIFVKTLTGKTITLEVESSDTIDNVKAKIQDKEGIPPDQQRLIFAGKQLEDGRTLADYNIQKESTLHLVLRLRGGMQIFVKTLTGKTITLEVESSDTIDNVKAKIQDKEGIPPDQQRLIFAGKQLEDGRTLADYNIQKESTLHLVVRLRGGMQIFVKTLTGKTITLEVESSDTIDNVKAKIQDKEGIPPDQQRLIFAGKQLEDGRTLADYNIQKESTLHLVLRLRGGMQIFVKTLTGKTITLEVESSDTIDNVKAKIQDKEGIPPDQQRLIFAGKQLEDGRTLADYNIQKESTLHLVLRLRGGQ

SEQ ID NO: 7529 - protein, 565 aa, Saccharomyces cerevisiae
MKRTVISSSNAYASKRSRLDIEHDFEQYHSLNKKYYPRPITRTGANQFNNKSRAKPMEIVEKLQKKQKTSFENVSTAMHWFRNDLRLYDNVGLYKSVALFQQLRQKNAKAKLYAVYVINEDDWRAHMDSGWKLMFIMGALKNLQQSLAELHIPLLLWEFHTPKSSLSNTKEFVEFFKEKCMNVSSGTGTIITANIEYQTSELYRDIRLLENEDHRLQLKYYHDSCIVAPGLITTDRGTNYSVFTPWYKKWVLYVNNYKKSTSEICHLHIIEPLKYNETFELKPFQYSLPDEFLQYIPKSKWCLPDVSEEAALSRLKDFLGTKSSKYNNEKDMLYLGGTSGLSVYITTGRIRTRLIVNQAFQSCNEQIMSKALKDNSSTQNFIKEVAWRDFYRHCMCNWPYTSMGMPYRLDTLDIKWENNPVAFEKWCTGNTGIPIVDAIMRKLLYTGYINNRSRMITASFLSKNLLIDWRWGKRWFMKHLIDGDSSSNVGGWGFCSSTGIDAQPYFRVFNMDIQAKKYDPQMIFVKQWVPELISSENKRPENYPKPLVDLKHSRERALKVYKDAM

SEQ ID NO: 7530 - protein, 253 aa, Arabidopsis thaliana
MCALVPSFFTNFGWPSTNQYESYYGAGDNLNNGTFLELTVPQTYEVTHHQNSLGVSVSSEGNEIDNNPVVVKKLNHNASERDRRKKINTLFSSLRSCLPASDQSKKLSIPETVSKSLKYIPELQQQVKRLIQKKEEILVRVSGQRDFELYDKQQPKAVASYLSTVSATRLGDNEVMVQVSSSKIHNFSISNVLGGIEEDGFVLVDVSSSRSQGERLFYTLHLQVENMDDYKINCEELSERMLYLYEKCENSFN

SEQ ID NO: 7531 - protein, 143 aa, Brassica napus
MEVPMINIIRDFEVGMNSINDPSSFLSRSVAVSGIGKLHQAYGFWKWGALIIAFLAYFTNFITRLKSLLVRLRKIDVSISPPTLFDDYDSDSDVSCSSSVSSDEEDEDDREDDEDEDEKDVDFIYNKGWVNGRFRVKGSAGAK

SEQ ID NO: 7532 - protein, 149 aa, Thiobacillus denitrificans ATCC 25259
MANISRYDPFSMSRIDPFTDLDDFFKGFFVRPALMEGGAQAPLQIKMDVKENDNAYTIHADIPGVKKEDIQVSVDGNQVSISAETRSEKEEKEGEKVLRSERHVGKIARSFTLPHEVDDAQCQAKYSDGVLELTLPKKAAASAKKLSIQ

SEQ ID NO: 7533 - protein, 473 aa, Zea mays
MTMTPAPVANGAAAGAGGGMKRRGGRLWYAAAGALLVALLAVAVSYRSFPGVPSSPSSPGSCGCPAARKYTGMVEDCCCDYETVDAINEEVLHPILQELVKLPFFRYFKVKLWCDCPFWPDDGMCKLRDCSVCECPENEFPEPFRKPYNGLSPDSMMCQEGKPQAAVDKTLDSKVFKGWVETDNPWTSDDETDNNEMTYVNLQLNPERYTGYTGDSARRIWDAIYKENCPKYPSEELCHEKKALYKLISGLHSSISVHIAYDYLLDESTNSWGQNLPLLYDRVLKYPERVQNLYFTYLFVLRAVTKAANYLEQAEYNTGNPEDDLKTESLVKQLLYNSKLRSACPLPFDEAKLWQGENGPELKQEIQKQFRNISAIMDCVGCEKCRLWGKLQVHGLGTALKILFSVDGDSHMNQPLQLQRNEVIALFNLLNRLSESVKFVHEKGSSIEEVIEEQIPSTVQKSVSMPNLKLDFL

SEQ ID NO: 7534 - protein, 602 aa, Desulfotalea psychrophila LSv54
MKAKKIIWQIFPANLLILLVALTAATWYSTASIQAFFLAETENSLESRCRLVGARVVELVEEDNIAELRDFIVQGGRESGVRLTVIAASGRVLADSNEDPDIMNNHRNRPEVATALSGTTGSSLRFSTTLSDALLYVAIPLRLQASPVTTNLILRASLSISSLYQTIARIKRRVALGALAIVILAILTTLFISRNISRPLEELKIWAERFAHGDFSKRKELLQSRNASREVVALAKTMERMAENLHEKIDMISNQRNQLETLFSSMREGIIAIDFEERIVLINDAATRLFDPGGSPSAGKLVQEFTRSLDLLQQIQYVRETGESLKAELTLHGSQTTSYLQTSAVPFHMANDDSSGVLIVLNDVTHLRRLESVRRDFVANVSHELRTPITAIRGYVETLLDGALDQKEDARRFLAIVLRQSSRLSDIINDLLALSRIELDSSTDNIELEEQHICSVVRAALQTCQIDAEQKGIILQLHCPEDIRVPLNPHLIEQALVNLIVNAVRYSPEKSEIRVEVLACEEGQEVSISVADDGCGIGAEHLPRVFERFYRSDKARSRELGGTGLGLAIVKHIVQAHNGRVAVNSEEGVGTEFSFFLPIKGE

SEQ ID NO: 7535 - protein, 613 aa, Alkaliphilus metalliredigenes QYMF
MCGIAGWIDYQRDLRDENPIIERMTASLGHRGPDTKSSYISKHGLLGHRRLIVVDPSGGAQPMTKRLGEKTYTMVYNGELYNTEDLRKELKDKGHTFNSYSDTEVLLVAYMEWGENCVQHLNGIYAFGIWNEVEKTVFLARDRLGVKPLFYNLKNGGLFFASEIKALLAHPEIDPVVTTEGLCEVFGLGPARSPGNGVFKDINEIKPGYCLTYTPQGVKIKSYWQLESKPHEDSLGDTIENVRGLLIDAIERQLVSDVPICTFLSGGLDSSAIASVTANAFKRDGRGQLHTYSIDYVDNDQYFKPSEFQPNADSEWIGRMVSHIDSKHHDIIIDTPQLTEALEAAVLSTDLPGMADVDSSLYLFCKNVKQNDTVALSGECADEIFGGYPWFRRREDIEANTFPWSKATTERRNILSGDLRKLPLEEYVATKYEETLREVPRMKGESLETHRMREIFYLNMKWFMITLLNRKDRMSMANGLEVRVPFADHRIVEYAWNIPWEMKYLGQREKGLLRSALKDILPEDVRTRKKSPYPKTHNPAYLKAVQQWMGEIMQDPSSPILQVINQEKVKEIVETGGKSFGKPWFGQLMTGPQLIAYLIQVNLWMKHYNVSIE

SEQ ID NO: 7536 - protein, 325 aa, Pseudomonas putida
MSNQLSTEQLLHAYEVMRTIRAFEERLHVEFATGEIPGFVHLYAGEEASAAGVMAHLRDSDCIASTHRGHGHCIAKGVDVYGMMAEIYGKKTGVCGGKGGSMHIADLEKGMLGANGIVGAGAPLVAGAALAAKIKGKDDVSVAFFGDGASNEGAVFEAMNMASIMNLPCIFVAENNGYAEATASNWSVACDHIADRAAGFGMPGVTIDGFDFFAVYEAAGAAIERARSGQGPSLIEVKLSRYYGHFEGDAQTYRAPDEVKNLRESRDCLMQFRNKTTRAGLLTAEQLDAIDARIEDLIEDAVRRAKSDPKPQPADLLTDVYVAYP

SEQ ID NO: 7537 - protein, 327 aa, Leptospira interrogans serovar Copenhageni str. Fiocruz L1-130
MMNHPKTKQETQDLFELYRQMLLIRRFEEGAAKSYSTGKIGGFCHLYIGQEAVGVGSIAALKEQDYIVSTYRDHGHALARGLDPKALMAELFGKRTGISSGYGGSMHFFDKNKRFMGGHGIVGGHISLAAGIAYASKYKNENSVTICFFGEGAANIGSFHEGMNLAAIWKLPLVMICENNHYAMGTPEYRSLSVKDVSVRATAYDIARDHIEGDEVRKVRDHVSVAVERARRGEGPTLMEISTYRFRGHSMSDPAKYRTKEELDRYKKSDPLLKAKDDLIHSEWKEEELEKLDIDIQAQVEDAIVFADKSEEPPLGWLYKHVYAEDV

SEQ ID NO: 7538 - protein, 1151 aa, Saccharomyces cerevisiae
MSFSQLEQNIKKKIAVEENIIRGASALKKKTSNVMVIQKCNTNIREARQNLEYLEDSLKKLRLKTAQQSQGENGSEDNERCNSKEYGFLSTKSPNEHIFSRLDLVKYDCPSLAQRIQYMLQQLEFKLQVEKQYQEANTKLTKLYQIDGDQRSSSAAEGGAMESKYRIQMLNKALKKYQAINVDFDQFKHQPNDIMDNQQPKFRRKQLTGVLTIGITAARDVDHIQSPMFARKPESYVTIKIDDSIKARTKPSRNDRWSEDFQIPVEKGNEIEITVYDKVNDSLIPVAIMWLLLSDIAEEIRKKKAGQTNEQQGWVNASNINGGSSLASEEGSTLTSTYSNSAIQSTSAKNVQGENTSTSQISTNSWFVLEPSGQILLTLGFHKSSQIERKQLMGGLHRHGAIINRKEEIFEQHGHHFVQKSFYNIMCCAYCGDFLRYTGFQCQDCKFLCHKKCYTNVVTKCIAKTSTDTDPDEAKLNHRIPHRFLPTSNRGTKWCCHCGYILPWGRHKVRKCSECGIMCHAQCAHLVPDFCGMSMEMANKILKTIQDTKRNQEKKKRTVPSAQLGSSIGTANGSDLSPSKLAERANAPLPPQPRKHDKTPSPQKVERDSPTKQHDPIIDKKIPLQTHGREKLNKFIDENEAYLNFTEGAQQTAEFSSPEKTLDPTSNRRSLGLTDLSIEHSQTWESKDDLMRDELELWKAQREEMELEIKQDSGEIQEDLEVDHIDLETKQKLDWENKNDFREADLTIDSTHTNPFRDMNSETFQIEQDHASKEVLQETVSLAPTSTHASRTTDQQSPQKSQTSTSAKHKKRAAKRRKVSLDNFVLLKVLGKGNFGKVILSKSKNTDRLCAIKVLKKDNIIQNHDIESARAEKKVFLLATKTKHPFLTNLYCSFQTENRIYFAMEFIGGGDLMWHVQNQRLSVRRAKFYAAEVLLALKYFHDNGVIYRDLKLENILLTPEGHIKIADYGLCKDEMWYGNRTSTFCGTPEFMAPEILKEQEYTKAVDWWAFGVLLYQMLLCQSPFSGDDEDEVFNAILTDEPLYPIDMAGEIVQIFQGLLTKDPEKRLGAGPRDADEVMEEPFFRNINFDDILNLRVKPPYIPEIKSPEDTSYFEQEFTSAPPTLTPLPSVLTTSQQEEFRGFSFMPDDLDL

SEQ ID NO: 7539 - protein, 390 aa, Synechococcus sp. CC9605
MASLLDQLSQMTVVVADTGDLEAIRKFTPRDATTNPSLILAAAQIPAYQNLIDEALRSSRKLMGSDAAVEDVVREALDEISVIFGKEILKIVPRRVSTEVDARLSFDTDATIEKGRKLIRLYNDAGISNDRVLIKIASTWEGIKAAEVLEQEGIHCNLTLLFGFGQAIACAEAGVTLISPFVGRILDWYKAETGRDSYPGPEDPGVISVTKIFNYYKTHGYDTEVMGASFRNIDEITELAGCDLLTISPKLLDQLRETDAVLTQKLDATHPTDGEAKIHVDRATFDALMQDDRMASDKLTEGIKGFSKAIETLEHQLAHRLAELEGGSAFRHAVSEIFMLNDMNGDGSITRDEWLGSDAIFDALDQDHDGLISQEDVRQGFGAALTLTSV

SEQ ID NO: 7540 - protein, 423 aa, Ehrlichia ruminantium str. Welgevonden
MTGKRVVITGLGLVTPLGNDIKTVWDLLCKGTSGIKKINRFDASDLDCKIGGQIIMKSDSEIHTFDPANWIEEKELKKMDIFIHFGIAAAIQAVNDSNLLAYSNLDYNRVGVIVGSGIGGLAFIEKTSICLQDRGPKRISPFFIPASLINLLPGHISIKYGFAGVNDGGVTACATSAQTIGNAARIIKSGEADVIIAGGAESAICRMGVAGFAALKALSTKFNDTPELASRPWDKQRDGFVMGEGSGIIVLEDYEHAKKRNAKIYAELIGYGMTADAYHITAPHPEGKGGKKSMELALSSAQLSPDSINYINAHGTSTPIGDSTEIHAIKEVFKDSTYKIPISSTKSSIGHLLGAAGSVEAIFCILAINTGIVPPTLNLYDSSEDPKLNLVPLTAQEHTINYALSNSFGFGGTNVSLVFSKLY

SEQ ID NO: 7541 - protein, 321 aa, Bartonella sp.
YIDGDKGILLYRGYPIDQLAEKGDFLESCYLLLYGELPTQQEKNDFDRCIMQHTMVHEQFSRFFHGFRRDSHPMAVMVACLGAMSAFYHDSIDITDPHQRMIASVRLISKVPTLAAMAYKYSIGQAFVYPRNDLSYAANFLRMCFAVPCEEYKINPVLARAMDQIFILHADHEQNASTSTVRLAGSSGANPFACIAAGVACLWGPAHGGANEACLKMLQEIGSIKRIPEFIARAKDKNDPFRLMGFGHRVYKNYDPRAKIMQKTCHEVLKELNIQDDPLLDIAIELEKIALSDEYFIEKKLYPNVDFYSGITLKALGFPTE

SEQ ID NO: 7542 - protein, 362 aa, Pseudomonas putida
MNDLSHTHMRAAVWHGRNDIRVEQVPLPADPAPGWVQIKVDWCGICGSDLHEYVAGPVFIPVEAPHPLTGIQGQCILGHEFCGQIAKLGEGVEGFAVGDPVAADACQHCGTCYYCTHGLYNICERLAFTGLMNNGAFAELVNVPANLLYRLPQGFPPEAGALIEPLAVGMHAVKKAGSLLGQTVVVVGAGTIGLCTIMCAKAAGAAQVIALEMSSARKAKAKEVGATVVLDPSQCDALAQIRALTFGLGADVSFECIGNKHTAKLAIDTIRKAGKCVLVGIFEEPSEFNFFELVSTEKQVLGALAYNGEFADVIAFIADGRLDIRPLVTGRIGLEQIVELGFEELVNNKEENVKIIVSPGVR

SEQ ID NO: 7543 - protein, 450 aa, Xanthomonas campestris pv. campestris str. ATCC 33913
MHDHPSSDAAHAMQTPAAMEAFWMPFTANRQFKARPRLLASAAGMYYRDVEGRQILDGTAGLWCCNAGHARERIVAAIRAQAGTLDFAPTFQMGSPLPFALAERLAALAPPGLGHVFFTNSGSEAVDSAMKIVLAYHRLRGEGQRTRFIGREKAYHGVGFGGMSIGGLPNNRKWFGPLLAGTDHLRHTLDLQRNAYSRGLPAFGVELADDLERLITLHDASTIAAVFVEPVSGSAGVILPPEGYLQRLRAICDRHGIVLVFDEVITGFGRVGEAFAAQRFGVTPDLITAAKGLTSGTVPMGAVLVADAIHDAFMHGPQAAIELFHGYTYSGHPLACAAALATLDTYAEEQLFTRAITLGPQWEEALHSLRGLPHVIDIRNIGLIGAIELAPREGAPGARGYEVFERCFHEGGLLVRVTGDVIALSPPLIVTPDQIGQMVETLAAILRKVD

SEQ ID NO: 7544 - protein, 493 aa, Synechococcus sp. CC9605
MAALQIVWFKRDLRIVDHQPLAAAVERGLVLPLYVVEPELWRQPDASERQWMFCRESLLELRQALADRGQPLVVRAGDVVQVLERARRQFGIDGLWSHEETGNGWTYQRDKRVGAWARRHGIAWMELPQFGVTRRMHSRNGWAKRWEVQMTEPITPVPAALQALDGIDHGVIPERPCSELLLDACPQRQIGGRSTGLEELNDFLQHRAQRYQRSMSSPNTAFTGCSRLSTYLTWGCLSMREVLQTSRTHSGRGVSSFESRLHWHCHFIQKLEDQPAIEFSDFHPFMRGIRAADAERLTAWSEGRTGVPFVDACMRALRAHGWINFRMRAMLMSFASYNLWLPWRDSGLHLARQFVDYEPGIHWSQCQMQSGSTSINTIRIYNPIKQGMDHDPQGLFIRQWCPELKDVPTIHIHEPWMLGGGMPAPIVDVTASMQDAKDRIWDIRRSAGFDRHADAIQCKHGSRKAGLKPTTARRRRRQPQPPDNGSQQLSLGF

SEQ ID NO: 7545 - protein, 485 aa, Nicotiana plumbaginifolia
PSSAFNSPFCTTNSGAPVFNNNSSLTVGARGPVLLEDYHLVEKLANFDRERVPERVVHARGASAKGFFEVTHDITHLTCADFLRAPGVQTPVIVRFSTVIHERGSPETLRDPRGFAVKFYTREGNFDLVGNNFPVFFIRDGMKFPDMVHALKPNPKSHIQENWRVLDFFSHVPESLHMFTFLFDDIGIPQDYRHMDGSGVHTFTLINKAGKSTYVKFHWKPTCGVKSLLEDEAARVGGANHSHATQDLYDSIAAGNYPEWKLFIQTMDPDHEDRFDFDPLDVTKTWPEDILPLQPVGRLVLNKNIDNFSNENEQLAFCPSIVVPGVYYSDDKMLQTRIFSYSDTQRYRLGPNYLQLPANAPKCAHHNNHYDGSMNFMHRDEEIDYFPSRYDPVRHAEKYPIPSTMCTGKREKCVIQKENNFKQPGERYRSFTPDRQERFIRRWVETLSDPRITYEIRSIWISYWSQADKSLGQKLASRLNVRPSI

SEQ ID NO: 7546 - protein, 319 aa, Frankia sp. EAN1pec
MTGYVAVVGENVADAVVQPTETPNGAMRWQVFPGGSPANTAVALGRLGTPTRFLSRLPCGVLGGLFKRRLDDSSVDLSLSTWSDEPATLAITSVENSAAHYEFYATGTVDWQWRPDELNPARLRGASCIHAGSLGLVMEPGGRIVEELLDSIREHATVSIDPNVRTTLVSSEHYQSRLKEWYRLADIFRISEDDLTHLAPGFTPERIIGELNETGVQLAIVTRGEAGVLASFRGTLIDVPAVPTEIVDTIGAGDAFSAGLLHWLHQNGHLGGRLERLDQQGARSALIFASHVAALTCAAPGADPPWNRHLTPAVRNLLR

SEQ ID NO: 7547 - protein, 492 aa, Nicotiana plumbaginifolia
MDPSKFRPSSAYDSPFLTTNAGGPVYNNVSSLTVGPRGPVLLEDYHLIEKLATFDRERIPERVVHARGASAKGFFEVTHDISHLTCADFLRAPGVQTPVIVRFSTVVHERGSPESLRDIRGFAVKFYTREGNFDLVGNNVPVFFNRDAKSFPDTIRALKPNPKSHIQEYWRILDFFSFLPESLHTFAWFFDDVCLPINYRHMEGYGVHAYQLINKAGKAHYVKFHWKPTCGVKCMTEEEAIRVGGTNHSHATKDLYDSIAVGNYPEWKLSIHIMDPEDVERFDFDPLDVTKIWPEDILPLMPVGRLVLNRNIDNFFAENEQLAFNPGHIVPGLYYSEDKLLQTRIFAYADTQRHRIGPNYMQLPVNAPKCAHHNNHRDGAMNFMHRDEEVDYLPSRFDPCRHAEQYPIPSRVLNGRREMCVIEKENNFKQAGERYRSWEPDRQDRYVSKWVEHLSDPRVTYEIRSIWISYLSQADKSCGQKVASRLTLKPTM

SEQ ID NO: 7548 - protein, 355 aa, Triticum aestivum
SPTYPSSPSESPPIPSRRRRKEHGEMSSGMGKVVCVTGGSGYIASWLVKLLLHRGYTVRATVRDTADPKKTLHLQALDGAKDRLHLFKASLLEEGSFDAAIAGSDCVFHTASPFYHNVKDPKAELLDPAVNGTLNVLRSCKKASIKRVIITSSMAAVAYNGKPRTPDVVVDETWFSSAEVCEKNEQWYVLSKTLAEEAAWKFANDNGFEIVTINPAMVIGPLLQPTLNTSAEAILKFINGSSSTYPNFSFGWVNVKDVALAHILAYEVPSANGRYCMVERVAHHSEIVKIIHEMYPNFPVPDKCADDAPFVPIYQVSKDKIRSLGMELIPLETSLKETIESLREKGFVTSESSHL

SEQ ID NO: 7549 - protein, 750 aa, Oryza sativa
MPLGPMASPSLLFLSLLLRFVPPADMVERGEVVVVVADEGIDLSGMRRNKLATMVWDRARPSKGHGAWLMAAMKKTSQQRLRAPARRCQLIPFDMKACMCIHEVGWPDIDDAEAAALQDDDGTTVFPLLQWIKRDGVKRKFVLQDELSMERKRDKDDRGLVMNMIIVFISAGDGIETKEAAHACSLDVVGSRVESEMGRRSWEKTIATAAAATQCAGEAMVFCPLLAALTRKGNFVSSSGGGEKNDFENAQNGKNGKVAIPSSIESLIFGGSDSTQHRIQHQLDEENQRAALFHSSAPSSSLGADGEEERETVPLLSCKMADDKSDTVQVSEDTAHQISIDPWYQVGFILTTGVNSAYVLGYSASIMVPLGWIGGTCGLILAAAISMYANALLAHLHEVGGKRHIRYRDLAGHIYGRKMYSLTWALQYVNLFMINTGLIILAGQALKAIYVLFRDDGVLKLPYCIALSGFVCALFAFGIPYLSALRIWLGLSTVFSLIYIMIAFVMSLRDGITTPAKDYTIPGSHSDRIFTTIGAVANLVFAYNTGMLPEIQATIRPPVVKNMEKALWFQFTVGSLPLYAVTFMGYWAYGSSTSSYLLNSVKGPIWIKTVANLSAFLQTVIALHIFASPMYEFLDTRFGSGHGGPFAIHNIMFRVGVRGGYLTVNTLVAAMLPFLGDFMSLTGALSTFPLTFVLANHMYLTVKQNKMSIFRKCWHWLNVVGFSCLSVAAAVAAVRLITVDYSTYHLFADM

SEQ ID NO: 7550 - protein, 492 aa, Nicotiana plumbaginifolia
MDPYKYRPSSANNSPFWTTNSGAPVWNNNSSMTVGTRGPILLEDYHLVEKLANFDRERIPERVVHARGASAKGFFEVTHDITHLTCADFLRAPGVQTPVIVRFSTVIHERGSPETLRDPRGFAVKFYTREGNFDLVGNNFPVFFVRDGMKFPDMVHALKPNPKSHIQENWRILDFFSHHPESLHMFSFLFDDLGVPQDYRHMEGSGVNTYMLINKAGKAHYVKFHWKPTCGVKCLLEEEAIKVGGANHSHATKDLYDSIAAGNYPEWKLFIQIIDPDHEDRFDFDPLDVTKTWPEDILPLQPVGRLVLNKNIDNFFAENEQLAFWPAIVVPGVYCSDDKLLQTRIFSYSDAQRHRLGPNYLQLPVNAPKCAHHNNHHEGFMNFMHRDEEVNYFPSRFDPCRHAEQYPIPPCVLTGKRDKCIIEKENNFKQPGERYRSWAPDRQERFICRWVDALSDPRVTHEIRSIWFSYWSQADKTLGQKIASRLNVRPTM

SEQ ID NO: 7551 - protein, 449 aa, Bacillus cereus G9241
MISIGGVIGAGLFVGSGAVVHSAGPGSIVSYALAGLLVIFVMRMLGEMAAINPTSGSFATYAREAIGPWAGYTIGWLYWFFWVIVIAIEATAGAGIIQYWIPEIPLWLLSLILTILLTLTNVFSVKSFGEFEYWFSFIKVISIVLFLCLGLAVILGFVPGTEAPGTSNLVGQGGFMPNGISSVLLGITVVIFSFMGSEIVAVAAGESAEPVKAVKTATNSVIWRILVFFIGSIAIVVTLLPWNSANILKSPFVAVLEHIGIPAAAQIMNFIVLTAVLSCLNSGLYTNSRMLFSMAERGDAPKAFLKLNNSGVPVRAVLFGTFFAYIGVVFSYISPDKVFLFLVNASGGIALLVYLVIAVSHLNIRKKMGRVEQQNLKVKMWFFPYVTYVTIAAIIAVLIAMLAIESLRSQALLTMFVTVLIIISYFIFNRNKNSTVLNTKSKNEESIRF

SEQ ID NO: 7552 - protein, 209 aa, Zea mays
  misc_feature (167)..(167): Xaa can be any naturally occurring amino acid
  misc_feature (182)..(182): Xaa can be any naturally occurring amino acid
  unsure (1)..(209): unsure at all Xaa locations
MQIFVKTLTGKTITLEVESSDTIDNVKAKIQDKEGIPPDQQRLIFAGKQLEDGRTLADYNIQKESTLHLVLRLRGGMQIFVKTLTGKTITLEVESSDTIDNVKAKIQDKEGIPPDQQRLIFAGKQLEDGRTLADYNIQKESTLHLVLRLRGGMQIFVKTLTGKTITXLEVESSDTIDNVKAXILGWEGIPPEQQRLIFGAQQWEDGTTL

SEQ ID NO: 7553 - protein, 290 aa, Novosphingobium aromaticivorans DSM 12444
MLELSQDGSGQGDSSWRLAYGGDTLNTAIHLARNGLDVAYLTALGTDLFSEDLKARWRAEGLDTTLVLADPARNPGLYAITCDEAGERSFTYWRGESAARKLFGCAGIEAALESAATADLLAFSLVSLAILPEEGRQALISLARKVRARGGLVAFDGNYRPRLWPDWQTARAARDAAIAVASLGLPTLEDETMLSGETGADAVAAHWQGLGCAETVVKLGPEGCRLPDGAIVAPERVLAPVDTSGAGDAFNAGYLGARLRGEAPAQAAIAGHALAGWTIMRRGAIPVRDF

SEQ ID NO: 7554 - protein, 405 aa, Actinobacillus pleuropneumoniae serovar 1 str. 4074
MERFPKSDKLANVRYDIRGAIHKEALRLEEEGNKILKLNIGNPAPFGFEAPDEIVVDVIRNLPKSQGYCDSKGLYSARKAIVQYYQSKGIRNVDVNDVYIGNGVSELITMSMQALLNDGDEMLIPMPDYPLWTAAATLAGGKAVHYLCDENNEWMPDIEDIKAKITPRTKGILVINPNNPTGAVYSRSMLLEIAEIARQHNLMIFADEIYEKIIYDGAVHHHIAALAPDLLCVTYNGLSKAYRVAGFRQGWMVLSGPKNQARGFIEGLDMLASMRLCATTPMQHAIQTALGGYQSINEFVLPGGRLLEQRNKMYELLVQIPGISCVKAKGALYMFPKIDTEMYGIKDDAKFIYDLLQAERVLLVQGSGFNWHKPDHFRVVTLPYAHQIEEALGRLANFLKTYKQS

SEQ ID NO: 7555 - protein, 550 aa, Ustilago maydis
MPMRFAPTFNRLVASSCSPWLAVAAAFVLSGLVQSAASSSSDEATHDGLRKLTAANFTLVNDGAWLIEFFSPVCVHCKKFGATWSELSQLRTRFTQYPQAPFTLAQVDCLAQWDLCTEQGVQFLPRLTIYQDGKQNAEEYKGDRNYPEISAYIDKFAREYRQKKGVADVPLVASTNSDATSTAIESSNPASDNAASISAALPSPSPSSSSEPAAVTPSPASSLSSLEPIQEILPAGPNSKGQLLSYGTAPVQNQQELAAWLAKSSGQGPSFVKFFAPWCPHCKAMAAAFKQLSQSLKGRVNVLEVDCEANHALCASYNIRSYPVLRLYNQGNLKEYTGGRNHDAMLKWVLKAVSSSGLKPVSSSTELVSLSKENEVIFLYLHSPGTPIDEVHAVETASQALFGARAPIFVSSEPSLLDRYSSSLAQDRSTSVPAESGLLVFKDHSIAQPVSVLNPSSLRASDSASVEGVYSELATSKIAAFLSREQYSLVTELTAANFEEIVRNRDDALVVLAALSDTYHGSHQADVSAQGIALKEVECRRCAPFRSNGG

SEQ ID NO: 7556 - protein, 605 aa, Zea mays
MDLLSIILVIASLLPFAASDGQGDALYDMKLKLNATGSQLSDWNQNQVNPCTWNSVICDNNNHVVQVTLASMGFTGVLSPRIGDLEYLNVLSLPGNNISGGIPEEFGNLSRLTSLDLEDNLLVGPIPASLGRLSKLQLLILSQNNLNGSIPDTLASILSLTDIRLAYNKLTGQIPSQLFQVARYNFSGNNLTCGANFLHPCASNMSYQGSSRGSTIGIVLGTVGGLMGLLIIWAVFIICNGRRKSHLREIFVDVSGEDDRRIAFGQLKRFAWRELQLATDNFSEKNVLGQGGFGKVYKGALPDGTKIAVKRLTDYESPGGEAAFLREVELISVAVHRNLLRLIGFCTTQTERLLVYPFMQNLSVAYRLREFKPGEPILDWSARKRVAIGTARGLEYLHEHCNPKIIHRDVKAANVLLDEGFEPVVGDFGLAKLVDVQKTSVTTQVRGTMGHIAPEYLSTGKSSERTDVFGYGIMLLELVTGQRAIDFSRLEEEDDVLLLDHVKKLQREGHLDAIVDRNLNSCYNGLEVEMMIQIALLCTQASPEDRPSMSEVVRMLEGEGLAERWEEWQQVEVTRRQDYERMQQRFDWGEDSIYNQDAIELSAGR

SEQ ID NO: 7557 - protein, 466 aa, Magnaporthe grisea 70-15
MASKASRWAVSQEDVAKAKQEREAKRRAKAAKAAARKAQEDTVAQSQLQSQPPAAENGPPAKRRRVTPAPDAAQNDDDDDGGRGTTNEHRLLRLPGPPFGKCRSVENYDKLNDIEEGAYGWVARAKELATGKIVALKRLKIDPKDRSGLPVTGLREIQILKDCSHRNVVEMHEVVVGDDTSKFENIFLVLEFLEHDLKSVLEDMPEPFLSSEVKTVLLQLAAGVDYLHENFILHRDLKTSNLLLNNRGQLKIADFGMARYVGDPPPKLTQLVVTLWYRAPELLLGTIKYGQAVDMWSVGCIFGELLTREPLLQGKNEVDELTKIFELCGVPTEESWPGFRRLPNARSLRLPKNPQAAGSVIRARFPLLTAAGSGLLSGLLSLDPERRITAKEMLAHDYFKQDPRPKHESMFPTFPSKAGQERRRRRDTPNAPIRGLAADLGDVDFTGIFARREREEKGAGFQLRMI

SEQ ID NO: 7558 - protein, 427 aa, Oryza sativa (japonica cultivar-group)
MEYKRSSHVEEEEEEEEEEDDEEEDEEEQGHHQYTTAAAQQQLHPQVLGSSASSPSSLMDSAAFSRPLLPPNLSLVSPSAAAAAAPGGSYLHAAHHHGQGRRVEAPGGESQHHLQRHHEPARNGVLGGVAGAHAASTLALVGGGGGGPRGGEGAAGEAPTWRYRECLKNHAARMGAHVLDGCGEFMSSPGDGAAALACAACGCHRSFHRREPAVVAPASLSLCPASASASAAAGLVSLSPSATPTGANSSRLMPLLLAPPHMQKRPPVLPVSPASAPAALAESSSEELRPPPLPSSHPHAHAAAVVAASASAPPGPSKKRFRTKFTAEQKERMREFAHRVGWRIHKPDAAAVDAFCAQVGVSRRVLKVWMHNNKHLAKTPPSPTSQPPPPPLHHDPSPPPPPHHHHHHHHHHHPPQHHQQQQQQHDA

SEQ ID NO: 7559 - protein, 775 aa, Schizosaccharomyces pombe
MSTISEVGPWELGLSLGSGGPNSSRLAKHRETGQLAVVKPIVGWSELTSSQQARIEGELVLLRLIEHPNVLQLIDVISAQEQLFVVVEYMPGGELFDCMLRKGSFTEQDTAKFLWQILCGLEYCHKLHICHRDLKPENLYLDAHGSIKIGEFGMASIQQPGKLLQTSCGSPHYASPEIIMGRSYDGCASDIWSCGIIFFALLTGKLPFDDDNIRSLLLKVCQGQFEMPSNISPQAQHLLYRMLDVDSSTRITMEQIREHPFLSCFVHPNISIPIISAPIQPIDPLIVQHLSLVFRCSDDPMPLYEKLASQSPLVEKTLYTLLSRHLHPPSSAAVDRNRAVVDDLLGTAASNGQQMDEEEIEQAINIPTLAPYPISYAAESVPRPATSASPFLTPVTTSGTFNYSFNATNPQSILQRPATTSSAVPQLPKSVTPGLAYPHDSSMLSSNYRPPSALSPRNFNVSINDPEVQLSRRATSLDMSNDFRMNENDPSIVGNLAASNFPTGMGPPRKRVTSRMSEHTGNRVVSFPRGSAFNPRVTRFNVGNEQFSNNIDNNNYNQPYANATMNNSRRLRTPSGERSMRADLSQSPASYDSLNVPKHRRRQSLFSPSSTKKKLSGSPFQPKRSFLRRLFSSEPSCKCVYASLVASELEHEILEVLRRWQLLGIGIADIIYDSVSASISARIKRQNSLNLKPVRFRISVLAEFFGSQAVFVLESGSSTTFDHLATEFQLIFEDKGFLDNLELSYFQASASRPVSRMSVSSSPFAVFRQRQSVQS

SEQ ID NO: 7560 - protein, 179 aa, Chrysanthemum x morifolium
MASISSSAVATVNRTTSAQASMVAPFTGLKSNVAFPVTKKSNDFSSLPSNGGRVQCMKVWPPLGLKKYETLSYLPPLTETQLAKEVEYLLRNKWVPCLEFELEHGFPYRENNRSPGYYDGRYWTMWKLPMFGCNDASQVLKELNECKKEYPQSWVRIIGFDNVRQVQCISFIAHKPDGY

SEQ ID NO: 7561 - protein, 680 aa, Saccharomyces cerevisiae
MYSWKSKFKFGKSKEEKEAKHSGFFHSSKKEEQQNNQATAGEHDASITRSSLDRKGTINPSNSSVVPVRVSYDASSSTSTVRDSNGGNSENTNSSQNLDETANIGSTGTPNDATSSSGMMTIKVYNGDDFILPFPITSSEQILNKLLASGVPPPHKEISKEVDALIAQLSRVQIKNQGPADEDLISSESAAKFIPSTIMLLGSSTLNPLLYFTIEFDNTVATIEAEYGTIAKPGFNKISTFDVTRKLPYLKIDVFARIPSILLPSKTWQQEMGLQDEKLQTIFDKINSNQDIHLDSFHLPINLSFDSAASIRLYNHHWITLDNGLGKINISIDYKPSRNKPLSIDDFDLLKVIGKGSFGKVMQVRKKDTQKVYALKAIRKSYIVSKSEVTHTLAERTVLARVDCPFIVPLKFSFQSPEKLYFVLAFINGGELFYHLQKEGRFDLSRARFYTAELLCALDNLHKLDVVYRDLKPENILLDYQGHIALCDFGLCKLNMKDDDKTDTFCGTPEYLAPELLLGLGYTKAVDWWTLGVLLYEMLTGLPPYYDEDVPKIYKKILQEPLVFPDGFDRDAKDLLIGLLSRDPTRRLGYNGADEIRNHPFFSQLSWKRLLMKGYIPPYKPAVSNSMDTSNFDEEFTREKPIDSVVDEYLSESVQKQFGGWTYVGNEQLGSSMVQGRSIR

SEQ ID NO: 7562 - protein, 318 aa, Bartonella sp.
ITYIDGDKGVLLYRGYPIDQLAEKGDFLESCYLLLYGELPTKQEKNDFDRCIMQHTMVHEQFARFFHGFRRDSHPMAVMVACLGAMSAFYHDSIDITDPQQRMIASVRLISKVPTLAAMAYKYSIGQAFVYPRNDLSYAANFLRMCFSVPCEEYKTNPVLTRAMDRIFILHADHEQNASTSTVRLAGSSGANPFACIAAGVACLWGPAHGGANEACLKMLQEIGSVKRIPEFIARAKDRNDPFRLMGFGHRVYKNYDPRAKIMQKTCHEVLKELNIQDDPLLDIAIELEKIALNDEYFVEKKLYPNVDFYSGITLKAL

SEQ ID NO: 7563 - protein, 571 aa, Geobacter sulfurreducens PCA
MDTFKRILHYSKPYWWRIVISMAASLCVGGTDAAIAWMVEPLLKKIFSERDMTIFILVPVALIIVFLFRGVARFLQGYYVQTAGQLAIQDIRNEVYRKQIGLPLRYFTDNPTGTLMSRIMSDVGQMQQGVANIVTSLLRDGVTAIGLLGVIFYRNWQLALITFIVLPLTAVPAQKIGKRIKNLAKQSLGQMGEITSILQETFSGIKVVKAFRQEKSVVDRFSRTNLGLYRYLRKSIKYESLHTPIMEIITSFGVAGVIWFGGSQVMDGKMTAPEFFSFLTAMVMLYGPIKKVLSAYNTVQQAMGAAERVFEVIDHPADIQDPPDPVEPGMVRGSVELRNVSFRYDDEEVLRDVSFTAGRGEVVALVGPSGAGKTTVMSLIPRFYDVTGGAVLIDGIDVRRLRLDDLLCQIALVDQETILFNETIANNIRLGNPDATLEEVERAARSAFAHDFIMEMPEGYDTNIGDRGVRLSGGQRQRLCIARAILKNAPILLLDEATSALDTESEHMVQQALTNLMKNRTTLVIAHRLSTVLHADRIVVIDKGEVVEVGTNDELLARDGLYRKLYDMQFK

SEQ ID NO: 7564 - protein, 323 aa, Solibacter usitatus Ellin6076
MKPALVTGASGFLGWHVARVLVERGLHVRALVRPGSKVVGIDVECVTGDLRDPASLALAVKGCGLVFHVAADYRLWAKDPTELYRSNVDGTRNLLEAARQAGVERTVYTSTVGCIGMPRDGIGDEAQPVKLAHMAGDYKRSKFLAEKVALEFARAGQPVVIVNPTAPLGDHDVKPTPTGKIVLDFLKGDMPAFIDTGLNVVDVRDTAEGHWQACERGRSGERYILGSENLTLAQILQKLAAITGRKAPTLQLPYALAYCAGACSTAWAAVTGRPPRVPLEAVRMAKKKMWVSHDKAARELGFQPGPAEKALRHAVDWFRQTAA

SEQ ID NO: 7565 - protein, 221 aa, Triticum aestivum
MEWTTVEAADGAKLSVRVFKPAAPVEGAEDVSVVLVHPYTILGGVQGLLRGMAQGLAERGHRAVTFDMRGAGRSTGRASLTGSSEVGDVVAVCRWVAYTLKPRAVLLIGSSAGAPIAGSAVDKVDQVVGYVSIGYPFGLMASILFGRHHDAILKSEKPKLFIMGTKDGFTSVKQLQNKLRSAAGRVDTHLIEGAGHFQMEGPAFDAQMVDLIVNFIKSLPK

SEQ ID NO: 7566 - protein, 316 aa, Triticum aestivum
  misc_feature (99)..(99): Xaa can be any naturally occurring amino acid
  misc_feature (107)..(107): Xaa can be any naturally occurring amino acid
  misc_feature (147)..(147): Xaa can be any naturally occurring amino acid
  misc_feature (157)..(157): Xaa can be any naturally occurring amino acid
  misc_feature (182)..(182): Xaa can be any naturally occurring amino acid
  misc_feature (197)..(197): Xaa can be any naturally occurring amino acid
  unsure (1)..(316): unsure at all Xaa locations
MATLSVPAAVPAVAEDCEQLRKAFAGWGTNERLIVSILAHRDAAQRRAIRRAYAEAYGEELLRAIGDEIHGKFERAVTQWTLDPAERDAELAGEEAKKXSPGGRALXEIACARTPAQLFAAKQAYHERFKRSLEEDVAAHVTGDFRXLLVPSVSAYXYDGPEVNTPLHHFEPKILYGKINEXAYREEEIVRILPTRXSKAQPLATFNSSNDQFSHPITKDLKEDPKNEFLSTLRAIIRCFTCPDRYFEKVVRLALGGVGTDENTLTRVITTRAEVDLKVIKEAYQKRNSVPLEKAVSKETSRDYEDMMLALLGAEY

SEQ ID NO: 7567 - protein, 309 aa, Zea mays
  misc_feature (198)..(198): Xaa can be any naturally occurring amino acid
  unsure (1)..(309): unsure at all Xaa locations
MARHFVLNTGAKVPYVGLGTWQSDPGVVGNAVYAAVKAGYRHIDCARVYGNEKEIGLALKKLFEEGVVKREDMFITSKLWNDHHAPEDVPEALNHSLNDLQLEYLDLYLIHWPFRVKKGANTSPENFVTPDIPATWGAMEKLYDAGKARAIGVSNFSSKKLGDLLAVARVPPAVDQVECHPGWQQTKLHSFCQSTGVXTAYSPLGSPGTTWMNGNVLKEPIIISIAEKLGKTPAQVALRWNIQMGHSVLPKSTNEERIKQNLDVYDWSIPDDLLAKFSEIKQDRLLRGNFIVNPESAYKTHEELWDGEL

SEQ ID NO: 7568 - protein, 368 aa, Haemophilus influenzae R2846
MNKKTIVVKFGTSTLTQGSPKLNSPHMMEIVRQIAQLHNDGFRIVIVTSGAIAAGRHYLNHPQLPPTIASKQLLAAVGQSQLIQAWEKLFAIYDIHIGQLLLTRADIEDRERFLNARDTLHALLDNHIIPVINENDAVATAEIKVGDNDNLSALVAILVQAEQLYLLTDQQGLFDSDPRKNSEAKLIPIVEQITDHIRSIAGGSGTNLGTGGMMTKIIAADVATRSGIETIIAPGNRPNVIADLAYEKNIGTKFIAHQSDRLESRKQWLFAAPSAGIITIDNGAQNAILEQNKSLLPAGIINVEGRFSRGEVVKIRTQSGKDIALGMPRYNSDALQLIKGRKSADIENVLGYEYGAVAMHRDDMIILS

SEQ ID NO: 7569 - protein, 236 aa, Streptococcus suis 89/1591
MNLIGELLGTFILVLLGNGVVASCILSKTKAENSGWLTIVLGWGIAVTIAAYVSGVFGPAHLNPAVTIAMASIGSLPWAEVPGFLLAQFAGAMLASIVLYLHFYPHWQETKDSGTILATFSTGPALRHTASNLLGEALGTAVLVMGILAIGPNNVSAGLGPIIVGLIVFAIGFSLGSTTGYAVNPARDLGPRIMHAILPIPNKGDSDWSYSWIPVAGPILGGVAGAILYNLLLNML

SEQ ID NO: 7570 - protein, 306 aa, Bacteroides fragilis NCTC 9343
MRKVIGIGETILDIIFRNDQPSAAVPGGSVFNGIVSLGRMGVNVCFISETGNDHVGNIILQFMRDNHIPTDHVNVFPDGKSPVSLAFLNEHSDAEYIFYKDYPKQRLDVLFPSINEDDIIVIGSYYALNPVLRDKILELLDIAKEKRAIVYYDPNFRSSHKNEAMKLAPTIIENLEYADIVRGSLEDFYYMYGIKDVEKIYKDKIKFYCPLFLCTAGAERISLRTNAISKEYPVAPLEAVSTIGAGDNFNAGLIYGMLKYDVRYRDLQHLSEETWDKVIQCGQDFAAEVCKSFNNSISGEFAANYR

SEQ ID NO: 7571 - protein, 434 aa, Kluyveromyces lactis NRRL Y-1140
MNTSSRSSEPSKVADDVYVQTRWNNEFKHADYLPESLQKCLDQEKTVLERYSELVEVSKTVANESSQALVKHTTKPGDQLVRRVFQQPHQQISLMERYEKTRSYKPQWHAPWKLSKVINGHTGWVRCVCVDPVDNEWFATGSNDTTIKIWDLAAGKLKITLIGHVMSVRDIAISKRHPYMFSASEDKLVKCWDLERNTAIRDFHGHLSGVHTVDVHPSLDIIATAGRDAVVRLWDIRSRSEIMVLPGHKSPINKVKCLPVDPQIISCSGDATVRLWDIIAGKASKVLTHHSRNIRDLTLHPAEFSFASVSTNDVRSWKLPEGQLLTNFQSQNTGILNTVSINHDNVLLAGGDDGTLCFYDYKTGHKYQSMMTTEVAGSLESERSILCSTFDVTGTRLITGEGDKSIKIWKQVPDATEDTFPGLPWNPTLISQRF

SEQ ID NO: 7572 - protein, 363 aa, Xylella fastidiosa Temecula1
MAAIIATAWQPFKNETPLTTFPFRFPAEWEPQSAILIAWPHANTDWSAHLADVEETYITLVAAITRFQMVIICVLDDDLQTYTEARLRSASVAMQQVRFTVASYNDTWLRDSGPIILIGINGDFRLLDFRFTGWGGKFEAKADDQLVSSLHANGLFKNTQMHSINFALEGGAIETDGAGTLLTTWRCLHERHPQRTRTTLDANLTAWLAQNRVLWLEHGYLEGDDTDAHIDTLARFASTDSIVYQSCDNTTDSHYAELQAMANELTALRTTEGRPYRLFPLPWTKPILDQDRRLPASYANFLIIEGAVLMPTYDDPADTIAQSVLAEAFPTREIVPVPCRPLIWQNGSLHCITMQIPAGLLAT

SEQ ID NO: 7573 - protein, 252 aa, Zea mays
  misc_feature (193)..(193): Xaa can be any naturally occurring amino acid
  unsure (1)..(252): unsure at all Xaa locations
MVRGKTQMKRIENPTSRQVTFSKRRNGLLKKAFELSVLCDAEVALVVFSPRGKLYEFASGSAQKTIERYRTYTKDNVSNKTAHQDIEQVKADAEGLAKKLEALEAYKRKLLGERLEECSFEELHSLEVKLEKSLHCIRGRKTQLLEEQLHKLKEKEMNLRKSNEDLREKVMGAKTFCRRCTAASGMPTTQENXCKKQPPPPPPMLMAPPPPPAPAAIDHTGPKDVGMDVETELYIGLPGRDYRSNNKDMTAQ

SEQ ID NO: 7574 - protein, 326 aa, Gossypium hirsutum
MSTASINGWCLTSSSSTTTTSSFSARRRPTLRPSVVASLNSSPSPPTLIQDRPVFAAPIPLLTPREEMGNKSYDEAIEALKKLLSEKGELKAEAAARVDQITAELNTASADGKPSDSSVERLKEGFVYFKKEKYEKNPALYGELAKGQSPKYMIVACSDSRVCPSHVLDMQPGEAFVVRNVANMVPPYDQIKYAGIGSAIEYAVLHLKVQEIVVIGHSACGGIKGLMSFPFDGNNSTDFIEDWVKIGIPAKTKVLAEHGGEPLGVQCTHCEKEAVNVSLGNLLSYPFVRDGLVKKTLGIKGGYYDFVKGSFELWSLQFQLSSSLSV

SEQ ID NO: 7575 - protein, 224 aa, Rhodobacter sphaeroides 2.4.1
MFLLNRKKSEMVSAAEALPGRPDPIPTAETHFLSGLPLKSPVPAGMAEAVFGMGCFWGVERKFWQVPEGVWLTMVGYAGGYTPNPTYEEVCSGRTGHTEAVRVIYDPSVVSYAMLLKLFWENHDPTQGMRQGNDSGTQYRSAIYTYGPEQAEAARASATAYQGALSAAGRGRITTEILPAPPFYFAEAYHQQYLAKNPAGYCGVGGTGVSCPIGTGVGAASPAR

SEQ ID NO: 7576 - protein, 365 aa, Vanilla planifolia
MATWVEHQQQQNGSKDVDEEACMYAMQLSSMVVLPMTLRVAVELGILEQIQAGGPDSYLTAEDLAARLGNSNPLAPVMIERILRLLTSYSILNFTDTVDGEGRTVRSYGAAHVCKYLTPNQDGVSMAPLVLMNTDKVLMESWYHMKDAVTNGGIPFNLAYGMTAFEYHGKDLRFNKVFNEGMKNNSIIITKKILERYKRFEDVNVLIDVGGGIGGTISMITAKYPHIHGINFDLPHVVSEAPPFQGVEHVGGNMFESVPIGDAIFIKWILHDWSDEHCLKLLRNCAKSLPDKGKVIVVECILPDAPLVTPEAEGVFHLDMIMLAHNPGGKERTKKEFKELAMLSGFSNFKALFSYANVWVMEFNK

SEQ ID NO: 7577 - protein, 572 aa, Chlamydophila pneumoniae J138
MFMNTQNSQATEVSSEEESQKKLEELVALAKEQGFITYEEINEILPMSFDTPEQIDQVLIFLTGMDIQVLNQIDVERQKEKKKEAKELEGLARRTEGTPDDPVRMYLKEMGTVPLLTREEEVEISKRIEKAQVQIERIILRFRYSAKEAISIAHYLISGKERFDKIISEKEVEDKTHFLKLLPKLITLLKEEDTYLENLLLSLKQPDLSKQEAAKLNDSLEKCRIRTQAYLRCFHCRHNVTEDFGEVVFKAYDSFLHLEQQINDLKVRAERNKFAAAKLAAAKRKLYKREVAAGRTLEEFKKDVRMLQRWMDKSQEAKKEMVESNLRLVISIAKKYTNRGLSFLDLIQEGNMGLMKAVEKFEYRRGYKFSTYATWWIRQAVTRAIADQARTIRIPVHMIETINKVLRGAKKLMMETGKEPTPEELAEELGLTPDRVREIYKIAQHPISLQAEVGEGSESSFGDFLEDTAVESPAEATGYSMLKDKMKEVLKTLTDRERFVLIHRFGLLDGKPKTLEEVGSAFNVTRERIRQIEAKALRKMRHPIRSKQLRAFLDLLEEEKTGTSKVKSLKSK

SEQ ID NO: 7578 - protein, 319 aa, Bartonella vinsonii subsp. vinsonii
DGNKGILLYRGYPIEQLAEKGDFLESCYLLLYGELPTQQEKSDFDRCIMQHTMVHEQFARFFHGFRRDSHPMAVMVACLGAMSAFYHDSIDITDPQQRMIASVRLISKVPTLAAMAYKYSIGQAFVYPRNDLSYAANFLRMCFSVPCEEYKTNPVLTRAMDRIFILHADHEQNASTSTVRLAGSSGANPFACIAAGVACLWGPAHGGANEACLKMLQEIGSVKRIPEFIARAKDKNDPFRLMGFGHRVYKNYDPRAKIMQKTCHEVLKELNIQDDPLLDIAIELEKIALNDEYFVEKKLYPNVDFYSGITLKALGFPTE

SEQ ID NO: 7579 - protein, 316 aa, Helicobacter pylori 26695
MQEFSLWCDFIERDFLENDFLKLINKGAICGATSNPSLFCEAITKSAFYKDEIAKLKGKKAKEIYETLALKDILQASSALMPLYEKDPNNGYISLEIDPFLEDDAAKSIDEAKRLFKTLNRPNVMIKVPASESGIEVVSALTQASIPVNVTLVFSPKIAGEIAQILAKEAQKRAVISVFVSRFDKEIDPLVPKNLQAQSGIINATECYYQINQHANKLTSTLFASTGVKSNSLAKDYYIKALCFKNSINTAPLEALNAYLLDPNTECQTPLKTTEIEAFKKELKVHNIDLENTAQKLLKEGLIAFKQSFEKLLSSF

SEQ ID NO: 7580 - protein, 246 aa, Zea mays
MAPSGDTIALVHSGMDSSNKTLLKSEALYKYVLDTSVLPHEPECMRELRLVTDKHEWGFMQSSPDEAQLLRMLIKLTGARRTLEVGVYTGYSLLATALALPDDGKVIAFDVNRDYYDIGRPFIERAGVAGKVDFREGPALGNLDELLADEANLGAFDFAFVDADKPNYVNYHEQLLRLVRVGGTIVYDNTLWCGTVAMPPETPMSDIDRRFSAAIRDLNVRLSADERVEVCQLAIADGVTICRRLV

SEQ ID NO: 7581 - protein, 686 aa, Bacillus circulans
APDTSVSNKQNFSTDVIYQIFNDRFSDGNPANNPTGAAFDGTCTNLRLYCGGDWQGIINKINDGYLTGMGVTAIWISQPVENIYSIINYSGVNNTAYHGYWARDFKKTNPAYGTIADFQNLIAAAHAKNIKVIIDFAPNHTSPASSDQPSFAENGRLYDNGTLLGGYTNDTQNLFHHNGGTDFSSYEDGIYRNLYDLADLNHNNSTVDVYLKDAIKMWLDLGIDGIRMDAVKHMPFGWQKSFMAAVNNYKPVFTFGEWFLGVNEVSPENHKFANESGMSLLDFRFAQKVRQVFRDNTDNMYGLKAMLEGSAADYAQVDDQVTFIDNHDMERFHASNANRRKLEQALAFTLTSRGVPAIYYGTEQYMSGGTDPDNRARIPSFSTSTTAYQVIQKLAPLRKSNPAIAYGSTQERWINNDVLIYERKFGSNVAVVAVNRNLNAPASISGLVTSLPQGSYNDVLGGLLNGNTLSVGSGGAASNFTLAAGGTAVWQYTAATATPTIGHVGPMMAKPGVTITIDGRGFGSSKGTVYFGTTAVSGADITSWEDTQIKVKIPAVAGGNYNIKVANAAGTASNVYDNFEVLSGDQVSVRFVVNNATTALGQNVYLTGSVSELGNWDPAKAIGPMYNQVVYQYPNWYYDVSVPAGKTIEFKFLKKQGSTVTWEGGSNHTFTAPSSGTATINVNWQP

SEQ ID NO: 7582 - protein, 492 aa, Neurospora crassa
MTGKGKSRWADSAEDAALEAQLKKEKEEKKRLKAEKARKAEAEKKKREAEAAAAAQRQQQQQQQTGDDDDANGPPAKRRRLSPDRDAAAAAPTASSNDSSKLLRFEGGRFGKCRSVENYDKLNDIEEGAYGWVARAREIETGKVVALKRLKIDPKDRSGLPVTGLREIQILKDCSHRNIVKLKEVVVGDDTSKIENIFIVLEFLEHDLKSILEDMPEPFLASEVKTLLLQLCSGIAYLHSHYILHRDLKTSNLLLNNRGQLKIADFGMARYVPDPPPPKLTQLVVTLWYRAPELLLGAARYGPEIDMWSVGCIFGELLTREPLLQGKNEVDELTKIFELCGLPTDESWPGFRRLPNARSLRLPSSSSSSSSSSKPPSTGGLIRAKFPLLTAAGVSLLASLLSLNPSRRPTASEMLEHEYFRQDPKPKQEAMFPTFPSKAGQEKRRRRETPNAPQRGQKVQDLGQVDFSSLGGIFGSGREREERGGGFSLRMV

SEQ ID NO: 7583 - protein, 271 aa, Oryza sativa
MPAAAAAAARGPLLHLRRNPAPRLAAARRSFSSSGMRCVSAAAGAGGGGRERRSSPAFGGLLLDAGGTLLQLARPVAQTYASLGRRYGMSKSEESIKEGFKRAFSAPWPKTLRYQGDGRPFWRIVVAEATECTNNDYFEEVYEYYAHGDAWRLPAGAYETLRDLKDAGVKLAVVSNFDTRLRKLLKDLHVSDMFDAIVVSSEVGHEKPAPEIFKRALDQIGVEASKAVHVGDDETADKAGANAIGLECWLWGQDVRTFSEIQDRILTRFPQ

SEQ ID NO: 7584 - protein, 282 aa, Anabaena variabilis ATCC 29413
MSITEHKITVNTLEWFYRESEPVGRSDLLPVLLLHGIPSQSYSWRNIIPALAAQGTRAIAPDWIGSGFSAKPEKHEFAYTTEAYITALAGFIQALEIERFSLVVQGFLGSVGLQYALKHPEQIANIAILNAPISTDAKLPWKIKQMGLPFIGDMMTQDPLLIDRTLEGGSRYRIEDKDLDVYRKPFLKTSAVGRALLNTIRNLQLPAAMTEIESGFKQWQQPILVQWGMIDPWLPVEVAQKFVETAPNAELIKLNNVGHYPQEHYDKTILEDLLPFVRRAES

SEQ ID NO: 7585 - protein, 158 aa, Zea mays
MSLIRRSNVFDPFSLDLWDPFEGFPFGSGSSSSLFPSFPRTGSETAAFAGARIDWKETPEAHVFKADVPGLKKEEVKVEVEDGNVLQISGERNKEQEEKTDTWHRVERSSGRFLRRFRLPENAKTEQIRAAMENGVLTVTVPKEDVKKPEVKSIQISG

SEQ ID NO: 7586 - protein, 375 aa, Arabidopsis lyrata
MALSLQSPPCATLSASIQKGRWKTLAAGFSATPLPAVNFSIRRSIPRILASASSSSSPSSSSLEAGENNELNAVSAFSEIVPDTVVFDDFERFPPTAATVSSSLLLGICGLPDTIFRNAVDMALADSSCAGLETTESRLSCFFNKAIVNVGGDLVKLVPGRVSTEVDARLAYDTNGIIRKVHDLLRLYNEIDVPHDRLLFKIPATWQGIEAARLLESEGIQTHMTFVYSFAQAAAAAQAGASVIQIFVGRLRDWARNHSGDTEIESAIKSGEDPGLALVKRSYNYIHKYGYKSKLMAAAVRNKQDLFSLLGVDYVIAPLKVLQSLKDSPAIPGDEKYSFVRKLTPETATHYHFTNKELIKWDQLSLASAMGPASV

SEQ ID NO: 7587 - protein, 230 aa, Burkholderia fungorum LB400
MADFPFDAVLFDCDGVLVDSEPITNRVLTEMLGELGWQLSVAETMRIFVGKAVRDEAALIEARTGFAITTDWLMQFRARRNAALDLELRAISGAPSAVRELHAALDGRIAVASGADRIKVELQLVKAGILDCFEGRIFSGHEMPRSKPYPDVYLAAAAGLGVDPTRCAVVEDTVTGATAGVAAGATVFGYCPVELGHSSATALHGAGAAHVFRDMAELPALLAGWRGGSR

SEQ ID NO: 7588 - protein, 843 aa, Kluyveromyces lactis NRRL Y-1140
MFTTRAEQNNIKATIAASYDKLYSQFSSDELSEIGNYKISKFIGEGSFGKVYLATHRLTHQKVVLKTGNKRDPNVVREVFYHRQFDFPYITKLYEVIVTESRVWMVLEYCSGHELYEHLLKEQRLSLEESKKLFSQIASAVYYAHELKCVHRDLKLENVLLDGNGHAKLTDFGFTREMATRSQLETICGTTVYMAPELIERKCYDGFKVDIWSLGIILYTMINGYMPFDEDDDIKTKLKIVNDELDFNQEWISDDAIDLIQGMLRKNPNERISLAQVLSHPFLQPWGVVAKEKTDKVLLKQRGGHVHFHSKHEKRLLKRLKQCGFDTGSIKNSVNKRKCDSLSGLWFLLLERYELSDAKVPKRSKSVMSVRKVFESSVNMVMDDILVTSPECVKINSLKKILSRKSVDQDVELPQTIEDVKVRTQPKDRKAAEPESIHPADTTNKKKGFLQRVSSLFKPKKHNNHVDDNQSIKFSSQGIHPLLGKKRHKNGSNDSEAPSISQSTKPPPEQEDLNVQFEDITNKANHSFKKLKSHSSSEISKNINEPQLNHLHIDGGTEDSLKISNNRGIRRSSIASQHSAISNDTFNSDYSTDAQSGFRSNNTQSSSRINANSETSAATRKNVRRTLSVLSSASSNSEMSSRTDSFYDITTASSPMNMDIRSNYNIRSDSQFPKINGNSPWLIKRGKSPIGRRSRISNRSLNRKFRQPTPNRADSVIQEESSFDENERASNLPEVSEYDSGEIAIHSDSETPSKGNTPLYAIGINHPESRPVLFNVGRSVSDGSSWSHPQSDFHEPLSAPVIRKSSRRHVEDDDYESNIAADDEDNSLEDEEQEHVRSIAESV

SEQ ID NO: 7589 - protein, 449 aa, Agrobacterium tumefaciens str. C58
MQLNKFLTLGKLGAAATALMAPAIAFAQDAAPAVAAAAPVPEKADTAFMYIATILVLFMIIPGLALFYGGLVRTKNMLSVLMQCTVIGAVMMLVWVIYGYSFAFGGGTGPYFGGFGKLFLSGVSLDSTSATFSQGVVIYEYTFIAFQMTFAAITPALIIGAFAERVKFSAVILFTILWATFVYFPIAHMVWDANGLIFGMGALDFAGGTVVHINAGIAGLIGAIMVGKRTGFGKDMMAPHSMTLTLVGAAMLWFGWFGFNAGSNLEASGGAVLATMNTFLATAAAIVSWSLVESFTRGKASMLGAASGMIAGLVAVTPAAGSVGPMGAIVLGLIVSPICYFFVSVVKNKFGYDDTADVFGVHGIGGIIGALGTGIFTSPLLGGTGKADFSISSQLWTQFVAVAITIVWCAVVSAILYKIVDVIVGLRVPVEAEREGLDLATHGEAAYHS

SEQ ID NO: 7590 - protein, 127 aa, Bacillus anthracis
VAVAAYVVGSISGAHLNPALTIGLAFKGAFPWGDVPGYIAAQMIGAIIGAVIVYLHYLPHWKETEDPGTKLGVFATGPAIPNTFANLLSEMIGTFVLVFGILAIGANKFADGLNPFIVGFLIVSIGL

SEQ ID NO: 7591 - protein, 417 aa, Gossypium raimondii
MKESDKSLDPQLWHACAGPMVQIPPLNSKVFYFPQGHAEHSLAAVDFPSSPPVPALVLCRVASLKFMADTETDEVYAKILLMPLPNTELDLEHVAVFGSDNAEKPASFAKTLTQSDANNGGGFSVPRYCAETIFPPLDYTEDPPVQTVVAVDVHGETWKFRHIYRGTPRRHLLTTGWSTFVNHKKLVAGDSIVFLRSENGGLCVGIRRAKRGTGNGPEAGSPFLSFLREDESKMMMMNRNGDWRGKGKLKAEAVLQAATLAASGQPFEVVYYPRASTPEFCVKASSVKAAMRVPWCCGMRFKMAFETEDSSRISWFMGTVSSVQVVDPIRWPNSPWRLFQLEELSTQVPQGLAWDNIGGPSIPPYNRLTAAQFEAFFHPPGANCSSQIGYSNDVVSDEMNGAVHSQNVNGYFPGWML

SEQ ID NO: 7592 - protein, 127 aa, Bacillus anthracis
VAVAAYVVGSISGAHLNPALTIGLAFKGAFPWGDVPGYIAAQMIGAIIGAVIVYLHYLPHWKETEDPGTKLGVFATGPAIPTTFANLLSEMIGTFVLVFGILAIGANKFADGLNPFIVGFLIVSIGL

SEQ ID NO: 7593 - protein, 469 aa, Xylella fastidiosa Temecula1
MFLPRPDFRIALSICFMAVSFVISRFGSEVRPTLLLALPLVLGHVSTGLIGFVLNVIAGHHSTVTLAASTIGTALLWLPMLVPMGTLISLTVLVSQLHGAERERDIGPLFRQALWLAMLLGLVMFTFLSVVPALLPLFGIVPDIVPGAAKFLHVVRWGSLAFPLYFCMRYFCEGMHCTFPTMLLGFGGLLVLVPLSYALTYGRFGFAEYGVEGLGIATVTVMWLQAVVFALYLWRSRRFAHLQLFAHLELPCWARIRDLLNIGLPIGISILMEGGLFIVTTLLIGRFGTDEIAAHQIALSVAQLCFMIPMGVAEATTVRIGHAVGRCDLLVMRRVAWAGYAIVIGTQTLSASVLLLGYDVIVAAYTDDLVVASLASKLLLFAAIFQFPDGLQMLSSGVLRGMKDTRVPMLLAMISYWGLGMPLGLGLGFALEWNSRGMWIGLIIGLTAAALLLGWRFRVVSERMFAGIP

SEQ ID NO: 7594 - protein, 290 aa, Zea mays
LLNHTNIFQRTIYIPQPTWGNHPKVFTLSGLNVRSYRYYDPATCSLHFEGLLEDLGSAPSGSIVLLHACAHNPTGVDPTIEQWEQIRQLMRSKSLLPFFDSAYQGFASGSLDKDAQSVRMFVADGGELLMAQSYAKNMGLYGERVGALSIVCKSADVAVRVESQLKLVIRPMYSNPPLHGASIVATILRDSEMFNEWTLELKAMADRIINMRQQLFNALKSRGTPGDWSHIIKQIGMFTFTGLNSEQVAFMRQEYHIYMTSDGRISMAGLSMRTVPHLADAIHAAVTQLK

SEQ ID NO: 7595 - protein, 219 aa, Rhodobacter sphaeroides 2.4.1
MKFFVDSADVAAIAELNALGMVDGVTTNPSLILKSGRNILEVTKEICNLVSGPVSAEVVAAKAEDMIEEGRHLAEIAPNIAVKVPLTWDGLRACKVLSDEGRMVNVTLCFSVNQALLAAKAGATFISPFIGRLDDINLDGMELIADIRQVYDNYDFKTEVLAASVRTPNHVADCARIGADVITAPPAVIKALANHVLTDKGLDMFNADWAKTGQSILLK

SEQ ID NO: 7596 - protein, 547 aa, Triticum aestivum
  misc_feature (105)..(105): Xaa can be any naturally occurring amino acid
  unsure (1)..(547): unsure at all Xaa locations
GWKQEHEHSGSLDDTDRNRLTNNDNEYASSANDGAEDSWKSQKKKRDKEEDDSELESGDPSNNSKKPRVVWSVELHQQFVNAVNHLGIDKAVPKKILELMNVPGXTRENVASHLQKFRLYLKRIAQHHAGMTNPYGVPASSAQVASLGGLDFQALAASGQIPPQALAALQDELLGRPTNSLVLPGRDQSSLRLAAVKGNKPHGEQIAFGQPIYKVQNNSYAALPQNNPAAGRMPSFSAWPNNKLGMSDSMSALGNVNNSQNSNMVLHELQQQPDTMLSGTLHTLDVKPSGIVMPSQSLNTFPASEGLSPNQNSLIIPSQSSGFLTGIPPSMKPELVLPTSQSSNSLLGGIDLINQASTSQPFISSHGGNLPGLMNRNSNVMPSQGISSFQTGNTPYLVNQNSMGMGSKPPGVLKTESTDSLNQNYAYANHMDSGLLSSQSKNAQFGFLQSPNDVTGGWSSFQNMDGYRNTVGPSQPVSSSSSFQSSNAALGKLPDQGRGKNLGFVGKGTCIPNRFAVDEIESPTNSLSHSIGSSGDIPDMFGFSGQM

SEQ ID NO: 7597 - protein, 466 aa, Brassica napus
MTSINVKLLYHYVITNLFNLCFFPLTAIVAGKAYRLTIDDLHHLYYSYLQHNLITIAPLFAFTVFGSVLYIATRPKPVYLVEYSCYLPPTHCRSSISKVMDIFYQVRKADPSRNGTCDDSSWLDFLRKIQERSGLGDETHGPEGLLQVPPRKTFAAAREETEQVIIGALENLFKNTNVNPKDIGILVVNSSMFNPTPSLSAMVVNTFKLRSNVRSFNLGGMGCSAGVIAIDLAKDLLHVHKNTYALVVSTENITYNIYAGDNRSMMVSNCLFRVGGAAILLSNKPRDRRRSKYELVHTVRTHTGADDKSFRCVQQGDDENGKTGVSLSKDITDVAGRTVKKNIATLGPLILPLSEKLLFFVTFMGKKLFKDKIKHYYVPDFKLAIDHFCIHAGGKAVIDVLEKNLGLAPIDVEASRSTLHRFGNTSSSSIWYELAYIEAKGRMKKGNKVWQIALGALSVTVQFGWL

SEQ ID NO: 7598 - protein, 154 aa, Lycopersicon peruvianum
MSLIPRIFGDRRSSSMFDPFSIDVFDPFRELGFPGTNSGETSAFANTRIDWKETPEAHVFKADLPGLKLEEVKVEVEEDRVLQISGERNMEKEDKNDKWQRVERSSGKFMRRFRLPENAKMDQVKASMENGVLTVTVPKEEMKKPDVKSIEISG

SEQ ID NO: 7599 - protein, 507 aa, Isatis tinctoria
MTSVNVKLLYHYVITNFFNLCFFPLTAIVAGKASRLTTNDLHYFYYSHLQHNLLTITLLFAFTAFGSVLYILTRPKPVYLVDYSCYLPPPHLKSSVSKVMDIFYQVRKADPLPNVACDDSSWLDFLRKIQERSGLGDETYGPEGLLQVPPRKTFAAAREETEQVIIGALENLFENTKVNPKEIGILVVNSSMFNPTPSLSAMVVNTFKLRSNIRSFNLGGMGCSAGVIAIDLAKDLLHVHKNTYALVVSTENITYNIYAGDNRSMMVSNCLFRVGGAAILLSNKPGDRRRSKYELVHTVRTHTGADDKSFRCVQQEDDESGKTGVSLSKDITGVAGRTVKKNIATLGPLVLPLSEKFLFFVTFMAKNLLKDKIKHYYVPDFKLAIDHFCIHAGGRAVIDVLESNLGLAPIDVEASRSTLHRFGNTSSSSIWYELAYIEAKGRMKKGNKVWQIALGSGFKCNSAVWVALRNVKASTNSPWEHCIDRYPVKIDSDSAKTSETRVQNGRS

SEQ ID NO: 7600 - protein, 182 aa, Glycine max
MVAILKRQRETEAEESIIRLAESLMQLSRVQQKSKPLLKTFSPTEFECKTCNRKFPSFQALGGHRASHKKPKFEGEELKEEAKKGLSLGNKPKMHECSICGMEFSLGQALGGHMRKHRGATSENNNEAFSSSIKQAISKVPVLKRSNSKRVMCLEMDLNLTPLENDLKLLFGNKAPRVDLSL

SEQ ID NO: 7601 - protein, 212 aa, Brassica napus
  misc_feature (206)..(206): Xaa can be any naturally occurring amino acid
  unsure (1)..(212): unsure at all Xaa locations
MAKEPVRVLVTGAAGQIGYALVPMIARGIMLGADQPVILHMLDIPPAAEALNGVKMELIDAAFPLLKGVVATTDAVEGCTGVNVAVMVGGFPRKEGMERKDVMSKNVSIYKSQAAALEKHAAPNCKVLVVANPANTNALILKEFAPSIPEKNITCLTRLDHNRALGQVSERLSVPVSDVKNVIIWGNHSSSQYPDVNHASVKTSSXEKPVRE

SEQ ID NO: 7602 - protein, 506 aa, Sinapis alba
MTSVNVKLLYHYVITNLFNLCFFPLTAIVAGKASRLTIDDLHHLYYSYLQHNLITIAPLFAFTVFGSVLYIVTRPKPVYLVEYSCYLPPTHCRSSISKVMDIFYQVRKADPSRNGTCDDSSWLEFLRKIQERSGLGDETHGPEGLLQVPPLKTFAAAREETEQVIIGALENLFENTKVNPKEIGILVVNSSMFNPTPSLSAMVVNTFKLRSNVRSFNLGGMGCSAGVIAIDLAKDLLHVHKNTYALVVSTENITYNIYAGDNKSMMVSNCLFRVGGAAILLSNKPRDRRRSKYELVHTVRTHTGADDKSFRCVQQGDDESGKTGVSLSKDITDVAGRTVKKNIATLGPLILPLSEKLLFFVTFIAKKLFKDKVKHYYVPDFKLAIDHFCIHAGGRAVIDVLEKNLALAPIDVEASRSTLHRFGNTSSSSIWYELAYIEAKGRMKKGNKVWQIALGSGFKCNSAVWVALSNVKASTNSPWEHCIDRYPVQIDSDSAKSETRVQNGRS

SEQ ID NO: 7603 - protein, 504 aa, Zea mays
MTATPAVIGLSAGHRLLATSFGSPDLASPDAHSSLQFAAAAPKLTVVAHRAPASSSSSSPPNVGRGSSAAGHARARAIRALRNHSAPALATPPPPPLPADPTPDLDSEFESSLEAIVLLQRSMLEKQWELPFEDDIISTDDEQDDRVSKATVVAARSGVSARQRRMSGRRRGAGRKSVAISPELMQSRNRIYLRGTVSKDLLTHKQVIQLSRKIKDGIWLQHQRSKLKEKLGNEPSYKQLAQSLRISAPELRARMRESFLAREMLTMSNIRLVISIAHKYDNLGVDLADLIQGGLIGLLRGIEKFDASRGFRISTYVYWWIRQGVSRALADNSKTFRLPTYLHERLLAIRGAKYALEDQGIAPTIENIAESLNISVKKVHNATEAVHKVLSLDQQAFPSLNGLPGDTLHSYIEDQNVANDPWHGFEEMYLKEEVNNLINSNLNERERDIIRLYHGIGKQCHTWEDISRQFGLSRERVRQVRLVAMEKLKHAARRKHLNALLEDY

SEQ ID NO: 7604 - protein, 560 aa, Zea mays
MGISRDSMHKRRATGGKQKAWRKKRKYELGRQPANTKLSSNKTVRRVRVRGGNVKWRALRLDTGNYSWGSEAVTRKTRILDVVYNASNNELVRTQTLVKSAIVQVDAAPFKQWYLTHYGVDIGRKKKTPAAKKDNAEGQEVEAAAEETKKSNHVTRKLEKRKEGRTLDPHIEEQFGSGRLLACISSRPGQCGRADGYILEGKELEFYMKKLQRIVTEYYTSNAYSPVQDVADSCRTGAATNVIFGLALGYKSVIIPIFAIAFSIFLSFSLAAMYGVAVAALGMLSTIATGLAIDAYGPISDNAGGIAEMAGMSHRIRERTDALDAAGNTTAAIGKGFAIGSAALVSLALFGAFVSRAEISTVDVLTPKVFIGLIVGAMLPYWFSAMTMKSVGSAALKMVEEVRRQFNTIPGLMEGITKPDYATCVKISTDASIKEMIPPGALVMLTPLIVGIFFGVETLSGVLAGALVSGVQIAISASNTGGAWDNAKKYIEAGASEHARTLGPKGSDPHKAAVIGDTIGDPLKDTSGPSLNILIKLMAVESLVFAPFFATHGGILFKWL

SEQ ID NO: 7605 - protein, 209 aa, Colocasia esculenta
MEFVLLLVSSLLLTARAAVASNPVLDVDGNELRRGNRYYAISLRSPNSGLTLAVRSNAPCPLNVDQAPSKDYGRPLAFFPENVDDDTVQEGSTLYIMFPEPSECRESTVWTLGRETDVVTTGGTSSSAIGPRNSRFTIRRTGDASSKGEYQIEVCPCSIGVSRAPCRLACVGSLGLTEDEANLLLNINNERPHTVRFVKVKEELAASRR

SEQ ID NO: 7606 - protein, 506 aa, Sinapis arvensis
MTSVNVKLLYHYVITNFFNLCFFPLTAIVAGKASRLTIDDLHHLYYSYLQHNLITIVPLFAFTVFGSVLYIATRPKPVYLVEYSCYLPPTHCRSSISKVMDTFYQVRKADPFRNGTCDDSSWLDFLKKIQERSGLGDETHGPEGLLQVPPRKTFAAAREETEQVIIGAVENLFKNTKVNPKDIGILVVNSSMFNPTPSLSAMVVNTFKLRSNVRSFNLGGMGCSAGVIAIDLAKDLLHVHKNTYALVVSTENITSSIYAGDNRSMMVSNCLFRVGGAAILLSNKPRDRRRSKYELVHTVRTHTGADDKSYRCVQQGDDENGKTGVSLSKDITDVAGRTVKKNIATLGPLILPLSEKLLFFITFMAKKLFKDKVKHYYVPDFKLAVDHFCIHAGGRVVIDVLEKNLGLAQIDVEASRSTLHRFGNTSSSSIWYELAYIEAKGRMKKGNKVWQIALGSGFKCNSAVWVALSNVKASTNSPWEHCIDRYPVKIDYDSAKSEVRVQNGRS

SEQ ID NO: 7607 - protein, 304 aa, Xanthomonas oryzae pv. oryzae KACC10331
MSCVVKTSERPSSPSTNHMHCAPRTAAPAIPHSQRNTMTVPTFGLGTFRLKDQVVIDSVRNALEVGYRAVDTAQIYDNQAQVGEAIAASGIVRDQLYLTTKIWVDKFGDGALLPSLQESLRKLGTAYVDLTLIHWPSPNDQVPMREYLEALAQAKQQGMTRAIGVSNFTIALTKQAIGILGADAIATNQIEVHPYLQNRALTDFLREQGIHVTSYMTLAVGEVLKYPVIQAIAARHAATPAQVALAWALQQGHSVIPSSTKRENLESNLKAQTLQLSEQDMGEIAALDRGHRLANPKAIAPDWD

SEQ ID NO: 7608 - protein, 411 aa, Zea mays
MNALAATTRNFRRASKLLGLDSKLEQSLLIPFREIKVECTIPKDDGSLATFVGFRVQHDNARGPMKGGIRYHNEVDPDEVNALAQLMTWKTAVAAVPYGGAKGGIGCSPGELSRSELERLTRVFTQKIHDLIGTHTDVPAPDMGTNAQTMAWMLDEYSKFHGHSPAVVTGKPIDLGGSLGRDAATGRGVMYATEALLAEYGKCISGSTFVIQGFGNVGSWAARLIHEKGGKIIAIGDVTGSIRNTAGIDIPALVKHRNEGHAMKDFDGAEVLDSTELLVHDCDVLVPCALGGVLNKDNAPDVKAKFVIEAANHPTDPEADEILAKKGVVVLPDIYANSGGVVVSYFEWVQNIQGFMWDEEKVNDELEKYMSSAFQHMKAMCKSLDCDLRMGAFTLGVNRVARATLLRGWEA

SEQ ID NO: 7609 - protein, 141 aa, Haemophilus influenzae R2846
MMTERTFSIIKPDAVKRNLIGAILTRFEQNGFKIIASKMVRLTREQAEGFYAEHQGKEFFAPLVEYMMSSPIVVSVLEKENAVKDYRTLIGTTNPETAAEGTIRKEFALSQRENSVHGSDSIENANREIAYFFTDCEIFER

SEQ ID NO: 7610 - protein, 130 aa, Haemophilus ducreyi 35000HP
MKAISDLTKEQREILINHGTELPFTGKFLNEARTGTYRCVRCHHSLFRSDTKFDAGCGWPSFYEAISAEALRYVDDYRLSRPRTEIRCAHCDSHLGHVFNDGPPPTGLRFCLNSVALNFKWDQTGEEIDG

SEQ ID NO: 7611 - protein, 334 aa, Haemophilus ducreyi 35000HP
MAIKIGINGFGRIGRIVFRAAQLRDDIEVVGINDLIDVDYMAYMLKYDSTHGRFDGTVEVKDGQLVVNGKTIRVTSERDPANLKWDEIGVNIAVEATGLFLTDETARKHITAGAKKVVLTGPSKDATPMFVNGVNFDTYAGQDIVSNASCTTNCLAPLAKVIHNKFGIKEGLMTTVHATTATQKTVDGPSAKDWRGGRGAAQNIIPSSTGAAKAVGKVLPALNGKLTGMAFRVPTTNVSVVDLTVNLEKAASYQEICAEIKRASENEMKGVLGYTEDAVVSTDFNGATETSVFDAAAGIALTDTFVKLVSWYDNETGYSHKVLDLVAHVYNYRG

SEQ ID NO: 7612 - protein, 472 aa, Triticum aestivum
GGSGKTLDKTFGFVENHRAKYELGEEVGRGHFGYVCSAVVKEGEYKGQTAAVKVIPKAKMTTAISIEDVRGEVKILKALSGHKNLVKFYDAYEDDENVYIVMELCEGGELLDRILARGGRYIEEDAKAIVVQILSAVAFCHLQGVVHRDLKPENFLFTTRDENAPMKLIDFGLSDFIRPDERLNDIVGSAYYVAPEVLHRSYSMEADIWSIGVITYILLCGSRPFWARTESGIFRSVLRADPNLDDSPWPSVSAEAKDFVKRFLNKDYRKRMTAVQALTHPWLRDDQRQIPLDILVYRLIKQYLRATPLKRLALKALSKALKDDELLYLRLQFDLLEPRDGVVSLDNFRTALTRYLTDAMKESRILEFLHALEPLAYRSMDFEEFCAAAISPYQLEALDRWEEIAGTAFQHFEQEGNRVISVEELAQELNLAPTHYSIVQDGIRKTDGKLNFLGFTKFLHGVTIRGANTRRH

SEQ ID NO: 7613 - protein, 537 aa, Emericella nidulans
MSYIEEEDQRYWDEVAVKNWWKDSRWRYTKRPFTAEQIVAKRGNLKIEYPSNVQAKKLWGILERNFKNKEASFTYGCLDPTMVTQMAKYLDTVYVSGWQSSSTASSTDEPSPDLADYPMNTVPNKVNHLWMAQLFHDRKQREERMTTPKDQRHKVTNVDYLRPIIADADTGHGGLTAVMKLTKLFVERGAAGIHIEDQAPGTKKCGHMAGKVLVPISEHINRLVAIRAQADIMGTDLLAIARTDSEAATLITSTIDHRDHPFIIGSTNPDIQPLNDLMVMAEQAGKNGAELQAIEDEWLAKAGLKLFNDAVVDAINNSPLPNKKAAIEKYLTQSKGKSNLEARAIAKEIAGTDIYFDWEAPRTREGYYRYQGGTQCAINRAVAYAPFADLIWMESKLPDYKQAKEFADGVHAVWPEQKLAYNLSPSFNWKKAMPRDEQETYIKRLGALGYAWQFITLAGLHTTALISDTFAKAYAKQGMRAYGELVQEPEMANGVDVVTHQKWSGANYVDNMLKMITGGVSSTAAMGKGVTEDQFKS

SEQ ID NO: 7614 - protein, 226 aa, Arabidopsis thaliana
  misc_feature (73)..(73): Xaa can be any naturally occurring amino acid
  misc_feature (213)..(213): Xaa can be any naturally occurring amino acid
  unsure (1)..(226): unsure at all Xaa locations
HASVFVKTLTGKTITLEVESSDTIDNVKAKIQDKEGIPPDQQRLIFAGKQLEDGRTLADYNIQKESTLHLVLXLRGGMQIFVKTLTGKTITLEVESSDTIDNVKAKIQDKEGIPPDQQRLIFAGKQLEDGRTLADYNIQKESTLHLVLRLRGGMQIFVKTLTGKTITLEVESSDTIDNVKAKIQDKEGIPPDQQRLIFAGKQLEDGRTLADYXIQKESTLHLVLRL

SEQ ID NO: 7615 - protein, 127 aa, Bacillus thuringiensis serovar sotto
VAVAAYAVGSISGAHLNPALTIGLAFKGAFPWSDVPGYIVAQMIGAIIGAVIVYLHYLPHWKETEDPGTKLGVFATGPAIPNTFANLLSEMIGTFVLVFGILAIGANKFADGLNPFIVGFLIVSIGL

SEQ ID NO: 7616 - protein, 475 aa, Arabidopsis thaliana
MLEKKLAAAEVSEEEQNNLLKDLEMKETEYMRRQRHKMGADDFEPLTMIGKGAFGEVRICREKGTGNVYAMKKLKKSEMLRRGQVEHVKAERNLLAEVDSNCIVKLYCSFQDEEYLYLIMEYLPGGDMMTLLMRKDTLTEDEARFYIGETVLAIESIHKHNYIHRDIKPDNLLLDKDGHMKLSDFGLCKPLDCSNLQEKDFTVARNVSGALQSDGRPVATRRTQQEQLLNWQRNRRMLAYSTVGTPDYIAPEVLLKKGYGMECDWWSLGAIMYEMLVGFPPFYSDDPMTTCRKIVNWRNYLKFPDEVRLSPEAKDLICRLLCNVEQRLGTKGADEIKGHPWFRGTEWGKLYQMKAAFIPQVNDELDTQNFEKFEETDKQVPKSAKSGPWRKMLSSKDINFVGYTYKNVEIVNDDQIPGIAELKKKSNKPKRPSIKSLFEDETSGGTTTHQGSFLNLLPTQIEDPEKEGSKSSSSG

SEQ ID NO: 7617 - protein, 234 aa, Arabidopsis thaliana
MNLKETELCLGLPGGTETVESPAKSGVGNKRGFSETVDLKLNLQSNKQGHVDLNTNGAPKEKTFLKDPSKPPAKAQVVGWPPVRNYRKNVMANQKSGEAEEAMSSGGGTVAFVKVSMDGAPYLRKVDLKMYTSYKDLSDALAKMFSSFTMGSYGAQGMIDFMNESKVMDLLNSSEYVPSYEDKDGDWMLVGDVPWPMFVESCKRLRIMKGSEAIGLGKFSFLFVSISGSFLFFQ

SEQ ID NO: 7618 - protein, 125 aa, Glycine max
PKVDVPSRFVGLVLENCPCANHSHLILGDPSPVVFYPISSSEVRCLVDVPGQKVPSISNGEMAKYLKTVIAPQIPLELHDAFIAAVDKGNIRTMRNRSKPAASYPTPGAQLDGDAFNMGWNDRGI

SEQ ID NO: 7619 - protein, 338 aa, Yersinia pestis KIM
MKYDGYNWLECVMKPSIVLYKSIPTDLHQRLAQHFTVNSFDGLTPDNQPELLAALQQAEGLIGSGGKIDQDFLQLAPNLRAASTISVGYDNFDVEALSQRGIALMHTPTVLTETVADTMMALMLSTARRVVELAERVKAGEWQESIGDDWFGVDVHHKTIGILGMGRIGMALAQRAHFGFSMPVLYTSRRPHEAAEQRFGARHCSLDTLLAEADFLCITLPMTEQTYHMIGREQLAKMKSSAILINAGRGPVVDEQTLIAALQDGTIHAAGLDVFEQEPLPVDSPLLTLRNVVAVPHIGSATHETRYNMAACAVDNLINALTGTVKENCVNPQVLITH

SEQ ID NO: 7620 - protein, 127 aa, Bacillus weihenstephanensis
VAMAAYAVGSISGAHLNPALTIGLAFKGAFPWSDVPMYIAAQMIGAIIGAVLVYLHYLPHWKETEDPGTKLGVFATGPAIPNTFTNLLSEMIGTFVLVFGILAIGANKFADGLNPFIVGFLIVSIGL

SEQ ID NO: 7621 - protein, 477 aa, Glycine max
  misc_feature (111)..(111): Xaa can be any naturally occurring amino acid
  misc_feature (124)..(124): Xaa can be any naturally occurring amino acid
  unsure (1)..(477): unsure at all Xaa locations
METPSACWDKWVGEALATLHSLKVLRSVRPICLRNSQPLQFGVDDGAFQVFDEMQQWDRSSVEVEIAETTFSRWMHDTPSSGDEIVCSAAVGGDEAGASYEKFKKLILSSXNDYLGLSSHPTMXKAVAKAAQEHGMGPRGSALICGYTNYHRLLESSLADLKKKEDCLLCPTGFAANMALMTAIGSIGTLLAGNSIPSEDEKIAVFSDALNHASIIDGIRLTERQKSVKVYVYRHCDMSHLNMLLSNCRMRKKVVVTDSLFSMDGDYAPMVELADLRKRHGFLLVIDDAHGTFVCGKNGGGVAEEFNCEKDVDICIGTLSKAAGCHGGFIACSKKWKLLIQSRGRSFIFSTAALVPVAAAGHAAVKVAKLEKWRREAIWNRVKDFHLLTGIPVTSHIISLVVGSEDKALQASRHLLQSGFHVTAIRPPTVPPNSCRLRVTLSAVHTREDLENLAAALSRCINFQDTRIYDSNAYARL

SEQ ID NO: 7622 - protein, 445 aa, Solibacter usitatus Ellin6076
MIPGFRKEIRPMLRLGVPLALAELGWMAMGFVDTVMAGRLGAAAIGAGALGGMLFFPIAVCGTGLLLGMDTLVSQAFGAGDDDACRRTFINGLWIALLVAPAVAVLLALTIPALRVTGTNPEVLSLLAPFVHALLWGVLPLLFYTAFRRYLQAQNIVRPITFAVISANLVNFAGNWLLMYGHWGLPRMGLEGSGISTSFSRLYIALVLLIAVLRHERLHRNRLFHMDWRPEFPCIRGLLALGFPSAMQILFEGAVFAVVTVLASHLDEFSLAAHGIAVNVISITYMVPLGISSAAAVRVGQAIGRKDPRGIAVAGWTALLLAALFMGSAGLGFSIAPRWIARLYTPDVAVIAASVTLLRIAALFQIFDGLQVVATGALRGLGDTRTPAYAHLVGYWIFGMPVAGLLCFHYGWGVSGIWVGLTIALIMIGLILIFVWRRALLDRLL

SEQ ID NO: 7623 - protein, 506 aa, Orychophragmus violaceus
MTSVNVKLLYHYIITNFFTLCFFPLTAIVAGKASRLTTNDLHHFYYSHLQHSLITITLLFAFTVFGSVLYIITRPKPVYLVDYSCYLPPPHQKASVSKVMDIFYHLRKADPLRNVACDDSSWLEFLRKIQERSGMGDETYVPAGLLEVPPRKTFSASREESEQVINGAIENLFKNTKVNPKEIGLLVVNSSIFNPTPSLSAMVVNTFKLRSNIRSFNLGGMGCSAGAIAIDLAKDLLHVHKNTYALVVSTENITDHIYAGDNRSMMVSNCLFRVGGAAILLSNKPRDRRRSKYELVHTVRTHTGADDKCYRCVQQGDDESGKNGVSLSKDITAVAGKAIKINISTLGPLVLPLSEKILVFVSFIGKKLLKDKIKNLYVPDFKLVIDHFCIHAGGRAVIDVLEKNLGLEPVDVEPSRSTLHRFGNTSSSSIWYELAYIEAKGRMKKGNKVWQIALGSGFKCNSAVWVALRNVKASTNSPWEHCIDRYPVNIDSDSAESVTRVQNGRS

SEQ ID NO: 7624 - protein, 340 aa, Solibacter usitatus Ellin6076
MSAVEATGAATHNASSAAGSLQAELAHKCLYYMLLMREVEDRIERKLYRQGKILGGVYVGRGQEAIPVGSALVAVPEDVMFPSHRDMAVFFIRGVSARRVLAQYMGRLGGLTRGRDGNMHMGDMSVNVVSIISALAATVPVATGAALAMRYKGIPGVAFSYFGDGSTSRGDWHEGVNFASVQKLPVVFICNNNQYAYSTPLHLQMACANVADRGPAYNMPAEIVDGNDVLAVYEATQRAVTHARGGLGPYLLECKTFRMTGHSAHDAATYVPKGLFEEWGKLDPIVRLEKRMLEERWSLQEEIDELHAAVIREVDDAVAWAEQSPYPDAASLLDDVYENQ

SEQ ID NO: 7625 - protein, 506 aa, Brassica napus
MTSVNVKLLYHYVITNLFNLCFFPLTAIVAGKAYRLTIDDLHHLYYSYLQHNLITIAPLFAFTVFGSVLYIATRPKPVYLVEYSCYLPPTHCRSSISKVMDIFYQVRKADPSRNGTCDDSSWLDFLRKIQERSGLGDETHGPEGLLQVPPRKTFAAAREETEQVIIGALENLFKNTNVNPKDIGILVVNSSMFNPTPSLSAMVVNTFKLRSNVRSFNLGGMGCSAGVIAIDLAKDLLHVHKNTYALVVSTENITYNIYAGDNRSMMVSNCLFRVGGAAILLFNKPGDRRRSKYELVHTVRTHTGADDKSFRCVQQGDDENGKIGVSLSKDITDVAGRTVKKNIATLGPLILPLSEKLLFFVTFMGKKLFKDKIKHYYVPDFKLAIDHFCIHAGGRAVIDVLEKNLALAPIDVEASRSTLHRFGNTSSSSIWYELAYIEAKGRMKKGNKVWQIALGSGFKCNSAVWVALNNVKASTNSPWEHCIDRYPVKIDSDSGKSETRVQNGRS

SEQ ID NO: 7626 - protein, 330 aa, Chlorobium tepidum TLS
MNIYYEQDADLAVLQNKNIAILGYGSQGHAHALNLKDSGMNVCVGLKTDSASCAKAREAGLKVDTVAEAVKWADIVMILLPDQTQKSVYDNEIAPNLKSGATLAFGHGFNIHYKQIVPPADVNVIMIAPKSPGHLVRRTYTEGNGVPCLIAVHQDATGDAKAIALAWAKGIGGTKAGVIETSFKDETETDLFGEQAVLCGGSAELIKAGFETLTEAGYPAELAYFECMHELKLIVDLYYEGGLSRMNYSVSDTAEYGGMTRGPRVVTSAAKAEMKKILEEIQDGRFAKEFIDECNSGYKKMNELRESNRNHPIEVVGAKLRGMMSWLKKK

SEQ ID NO: 7627 - protein, 466 aa, Brassica napus
MTSVNVKLLYHYVITNLFNLCFFPLTAIVAGKAYRLTIDDLHHLYYSYLQHNLITIAPLFAFTVFGSVLYIATRPKPVYLVEYSCYLPPTHCRSSISKVMDIFYQVRKADPSRNGTCDDSSWLDFLRKIQERSGLGDETHGPEGLLQVPPRKTFAAAREETEQVIIGALENLFKNTNVNPKDIGILVVNSSMFNPTPSLSAMVVNTFKLRSNVRSFNLGGMGCSAGVIAIDLAKDLLHVHKNTYALVVSTENITYNIYAGDNRSMMVSNCLFRVGGAAILLFNKPGDRRRSKYELVHTVRTHTGADDKSFRCVQQGDDENGKIGVSLSKDITDVAGRTVKKNIATLGPLILPLSEKLLFFVTFMGKKLFKDKIKHYYVPDFKLAIDHFCIHAGGRAVIDVLEKNLALAPIDVEASRSTLHRFGNTSSSSIWYELAYIEAKGRMKKGNKVWQIALGALSVTVQFGWL

SEQ ID NO: 7628 - protein, 121 aa, Arabidopsis thaliana
  misc_feature (32)..(32): Xaa can be any naturally occurring amino acid
  misc_feature (80)..(80): Xaa can be any naturally occurring amino acid
  unsure (1)..(121): unsure at all Xaa locations
DISISKDKSLVDNATPFIGIDLSTIVLFTIVXPRTSKRTLSDTIHITVNYIVDAAIRGAQLLLFLEGFIGGYPRSVMLGXAVGVHNDNGRDNFLTYHDSALHIPRPDLARLTDVATKNDVY

SEQ ID NO: 7629 - protein, 492 aa, Thermotoga maritima MSB8
MNLYVGLDVGTTGVKGILVNEKGEILATANERLTMFTPQPAWAEQDPLSWWEAVKKILKNLSERSKEMGGKIRAISTSGQMHSLVAIDDNGKVLRNAILWCDQRTYKECEEATQILGGEENVLKLVGNPILPGFTLPKILWIRKHEPEIYGKISKIMLPKDFINYMLTGEVKTEHSDASGTVMYSVSKMEWNKDVLKELNIPESVLPEIIPSNGVVGNVKPEVASDLGLSEDTLVIGGGADNACAALGIAVVEPGDVMVSLGTSGTVLAPTKGNQPDPKGRVHFFAHTVPETRYHMGVMLSATYSLEWFKEKFLSEDYETINEEVDKIPAGSNGIIFLPYLNGERTPHRDPFARGVFFGISSYNTKWDMVRAIFEGVAFGIKDSFDILRELKVVLNSVRITGGGSKSRVWNKMLADMTGLRIQKPAVDEGASYGAAILAVSGSMGENPAKISKEWFRVKSYTDPAVENTETYEKLHEKFKKLYTSLKEMFRS

SEQ ID NO: 7630 - protein, 120 aa, Brassica napus
RTRGLICAVFAIGIPHLSALGTWLAVSTILSLIYIVVAIVLSVRDGVKAPPRDYEIQGSSLSKLFTITGAAANLVFAFNTGMLPEIQATVRQPVVKNMMKALYVQFTAGVLPMYAVTFIG

SEQ ID NO: 7631 - protein, 857 aa, Solanum tuberosum
MMSRSYTNLLDLASGNFPVMGRERDRRRMSRVMTVPGSICELDDDQAVSVSSDNQSSLAGDRMIVVANQLPLKAKRRPDNKGWSFSWNEDSLLLRLKDGLPEDMEVLFVGSLSVDVDPIEQDDVSSYLLDKFRCVPTFLPPNIVEKYYEGFCKRHLWPLFHYMLPFSPDHGGRFDRSMWEAYVSANKMFSQKVVEVLNPEDDFVWIHDYHLMVLPTFLRRRFNRLRIGFFLHSPFPSSEIYRTLPVREEILKALLCSDLVGFHTFDYARHFLSCCSRMLGLEYQSKRGYIGLEYYGRTVGIKIMPVGIHMGHIESMKKIADKELKFKELKQQFEGKTVLLGVDDLDIFKGINLKLLAMEHMLKQHPSWQGQAVLVQIANPMRGKGIDLEEIQAEIQESCKRINKQFGKPGYEPIVYIDRSVSSSERMAYYSVAECVVVTAVRDGMNLTPYEYIVCRQGVSGAETDSGVGEPDKSMLVVSEFIGCSPSLSGAIRINPWNVEATAEAMNEAVSMAEQEKQLRHEKHYRYVSTHDVAYWSRSFLQDMERTCADHFRKRCYGIGLGFGFRVVSLDPNFRKLSIDDIVNAYIKSKSRAIFLDYDGTVMPQNSIIKSPSANVISILNKLSGDPNNTVFIVSGRGRESLTKWFSPCRKLGLAAEHGYFLRWEREQKWEVCSQTSDFGWMQLAEPVMQSYTDATDGSCIERKESAIVWQYRDADSGFGFSQAKEMLDHLESVLANEPVAVKSGQHIVEVKPQGVTKGLVAEKVFTSLAVKGKLADFVLCIGDDRSDEDMFEIIGDALSRNIISYDAKVFACTVGQKPSKAKYYLDDTSEVVLMLDSLADATDTPVTSDDEPVDSD

SEQ ID NO: 7632 - protein, 197 aa, Zea mays
MSVPEAGQSAGRDEQEMDNYEQHQTRVLMALMQGLCAARYRKADNTPCLVDQGLYLGSVGAALNNEALKSLNITHILVVARSLNPAFPAEFTYKKIEVLDSPDTDLGKHFGECFTFIDEGICTGGNVLVHCFAGRSRSVTVVLAYLMKKHQMSLQSAMSLVRSKRPQIAPNAGFISQLVNFEKSLQVEQGQRTLQSN

SEQ ID NO: 7633 - protein, 138 aa, Zea mays
MRRNRKDSGYPTAAPGEEDEAEELTEEGDEEEEEQTEEGCGEEDEVEAETPAQEAVEPPKLAEGYFEIEAIRRRRLRKGQLQYLVKWRGWPESANTWEPLENLKACSDIVDAFNKRSRSPRSCGKRKRKTPTTPTSDP

SEQ ID NO: 7634 - protein, 1063 aa, Neurospora crassa
MSEGPLYLGFDLSTQQLKAIVIQSDLSVVSSAKVDFDGDFGAKYGIKKGVQVNEVDGEVFAPVAMWLEALDLVLQRLQEAKTPLNRIRGISGSCQQHGSVYWSREAEKLLAELQADKQRGDLVDQLKGAFSHPYAPNWQDHSTQAECDKFDEALGTAERLAHATGSAAHHRFTGPQIMRLRRKLPGMYASTSRISLVSSFLASLFIGSVAPMDISDVCGMNLWDIPSNTWSETLLALAAGGSTEGAADLKAKLGEVRLDGGGSMGKISPYFVGKYGFSPDCEIAPFTGDNPATILALPLRPLDAIVSLGTSTTFLMITPVYKPDPSYHFFNHPTTPGQYMFMLCYKNGGLAREKVRDALPAPSNSSKDPWETFNQHALSTPPLDVSSPATDQAKLGLYFYLPEIVPNISAGTWRYECSATDGSNLQPVNQPWPVEKDARIIVESQALSMRLRSQNLVSTPPSTPSGTSSSSSSSALPAQPRRIYLVGGGSLNPAIARIMGDVLGGVDGVYKLDVGGNACALGGAYKAVWAFERRDETETFDELIGKRWKEEGAIRKVDEGYKKGVFEGYGNVLGAFGEMEGKVLEVARNNLNAPATTEPNLTPSSTHNFDPNNNVVEKKVIAEMLRTTFGGIRNLIGRLFVHSMPGHRRNRDNGGGGGGGMILGPVSYLDCIVFCIFLAPQLIWNVGLLPTIKCMLEALPFVVFKIPVQFIHERWLSSSHDKSPFVRKASPFEDFVIRCVRYAFANIPPKIGRVFFSKQVALPFLKFRMLRHGYLRSPMHWREHVTANFRGIWVIKDPLATPDFVLYYAHGGGFSMGSAYFYLEFLLSWASVLSSSGFKNPAIFALDYTLVPDASYPTQIQEAIEGYRYVLKVARDPAIVCVSGDSAGATLILSLLLHLSCKDASAKRYGVGLPMPGLAVLISPWTTLVSSRHTNTTSDYLNAEQLSTYGKQFAGNKMSWSDPLVSPGCCNDAAWWRRASPSNGIFITYGEEEVFSPEIHGLIARLNEAGLRVESEVEEGGIHAWPVASLFLSTAREKRLKGVKGLTMEIRKRLSTSDAAKPM

SEQ ID NO: 7635 - protein, 381 aa, Anabaena variabilis ATCC 29413
MTQIISINDNQRLQLEPLEVPSRLLLGPGPSNAHPAVLQAMNVSPVGHLDPAFLALMDEIQSLLRYVWQTENPLTIAVSGTGTAAMEATIANAVEPGDVVLIGVAGYFGNRLVDMAGRYGADVRTISKPWGQVFSLEELRTALENNRPAILALVHAETSTGARQPLEGVGELCREFGTLLLVDTVTSLGGVPIFLDGWGVDLAYSCSQKGLGCSPGASPFTMSSRAIEKLQRRRTKVANWYLDMNLLGKYWGSERVYHHTAPINLYYALREALRLIAQEGLANCWQRHQKNVEYLWERLEDIGLSLHVEKEYRLPTLTTVRIPDGVDGKAVARQLLNEHNIEVGGGLGELAGKVWRVGLMGFNSRKESVDQLIPALEQVLR

SEQ ID NO: 7636 - protein, 127 aa, Bacillus pseudomycoides
VAVAAYAVGSISGAHLNPALTIGLAFKGAFPWSDVPGYIAAQMIGAIIGAVIVYLHYLPHWKETEDPGTKLGVFATGPAIPNTFANLLSEMIGTFVLVFGILAIGANKFADGLNPFIVGFLIVSIGL

SEQ ID NO: 7637 - protein, 271 aa, Anabaena variabilis ATCC 29413
MKSYLAAAIQMTSVPDLHKNLAQAEELIDLAVRRGAELVGLPENFSFMGEEQDKLAQAEAIARESEIFIKTMAQRYQVTLLGGSFPVPVSDTGRVYNTTILVSPSGEELARYNKVHLFDVNVPDGNTYRESSTVVAGQQLPPVHFSENLGNIGVSICYDVRFPELYRHLSDKGTDIIFIPAAFTAFTGKDHWQVLLQARAIENTAYVIAPAQTGNNYGRRLTHGHAVVIDPWGTILADAGDKPGIAIAEINPSRLEQVRRQMPSLQHRVFS

SEQ ID NO: 7638 - protein, 93 aa, Brassica rapa subsp. pekinensis
MAAAHGLVVQKTEEEWRAILSPEQFRILRQKGTEIPGTGEYDKFFEDGIFSCVGCKTPLYKSSTKFDSGCGWPAFFEGLPGAINRTPDPDGIS

SEQ ID NO: 7639 - protein, 265 aa, Oryza sativa
MRNSTSSAAAQPAPASAAMYGSYASPSSGAGGYAKIPTYPPPPSAYPAAPPPPVMGQPVPPPPAQLHDPTAPPSPIAKAAELVTRFREQGQALIAARRPWGEVFRAPAFSRPPSVGEAVARARRNAAYFRANYALAVLAVVAASLLWHPGTLFALLALCAAWFFLYFARPASSAGQPLRLLGMEFEDGTVLAALTGVTVIALLFTNVGWNVIGSVMIGAALVAAHATLRSTDDLFLTEQEAAGDGLVAAGMSAAGPILPTYVRIA

SEQ ID NO: 7640 - protein, 431 aa, Daucus carota
MFGSEQEESSPQNIINMHFDHQHHQTTITSPSVHMRQLLISCAEHISRCDFYGAHRLINILSANSSPCGDSTERLVHQFSKALSLRLHSFAATSTITSGSTSNLVIPSLLTPKISPALPSSAGSGSGSQQVFDDESVVQSAYLSLNQITPFIRFTHLTANQAILESVEGHHAIHILDFNIMHGVQWPPLMQAMAEKFPPPMLRITGTGDNLTILRRTGDRLAKFAHTLGLRFQFHPVLLLENEESSITSFFASFAAYLQPDQTLAVNCVLYLHRLSLERLSLCLHQIKALNPRVLTLSEREANHNLPIFLQRFVEALDHYTALFDSLEATLPPNSRQRIEVEQIWFGREIADIIASEGETRRERHERFRAWELMLRGSGFHNLALSPFALSQAKLLLRLYYPSEGYKLHILNDSFFWGWQNQHLFSVSSWH

SEQ ID NO: 7641 - protein, 219 aa, ASPERGILLUS NIDULANS FGSC A4
MSSTSPSKEPEVEQEPQSGEEHEQMDKEQDNQTQGQGEFEVKEQDRWLPIANVARIMKLALPENAKIAKEAKECMQECVSEFISFITSEASEKCQQEKRKTVNGEDILFAMTSLGFENYAEALKIYLSKYRETQSARGEHQNRPPSSGYAGGGPVGGAASGPSVVRAGGAAAGGAFPEASDNAGSIMNQGLDPSEQDASAYGYPPMVGQGHNGAGGESY

SEQ ID NO: 7642 - protein, 435 aa, Agrobacterium tumefaciens str. C58 [sequence omitted]

SEQ ID NO: 7643 - protein, 389 aa, Agrobacterium tumefaciens str. C58
MSLTRKPLASHHRIVIKIGSALLVDRKSGLKKDWLDAICEDIAALKKNGADVQVVSSGAIALGRTVLGLPSGALKLEESQAAAAVGQIALARAWSESLSRHEIVAGQILLTLSDTEERRRYLNARATINQLLKIGAIPIINENDTVATTEIRYGDNDRLAARVATMTGADLLVLLSDIDGLYTAPPHLDPDAKFLETIADITPEIEAMAGGAASELSRGGMRTKIDAGKIATAAGCGMIIASGKTLNPLKAIENGARSSWFAPSGTPVTARKTWIAGQLQPAGEIHVDAGAEKALYAGKSLLPAGVRQVKGNFGRGDAIAIIGVEGREVARGLAGYDAEEARLIIGHKSNEIETILGYVGRAAMIHRDDLVMTGAAVKVKHAKKDEVHA

SEQ ID NO: 7644 - protein, 219 aa, Sulfolobus tokodaii str. 7
MRKIIFVDMGETLVSFSPKFHQPIYYFLVKKGYNVSEKKVFRTVYKLLGKDHFPDPILGGLSVLDYKELLSELNITPRKCLLEELKNIPLLSDKWELFEDSEPFLKKLKDENFKIVMITNSTRSVYRIVSDLGLDKYLDDIIASCDYGIMKPHPRIFRIAIEKHGKPILHVGDVYEIDYLGAIRAGISPVLLDRFNFYEDLKVNKVKNLFQLLGLIKNH

SEQ ID NO: 7645 - protein, 729 aa, Glycine max
EDDRWGKHLVRVRAIAKTAISSSFPKPKNKISCHSIPLTFAISSSPMAATDESLRKSLAEKHAAVEAQGNAVRALKAAKAAKPEIDAAIEALNALKLEKSSIEHSLLGGSDSREAFRQSVVNTLERRLFYIPSFKIYRGVAGLFDYGPPGCSVKSNVLSFWRQHFVLEENMLEVDCPCVTPEIVLKASGHVDKFTDLMVKDEKTGTCYRADHLLKDFCNDKLQRDLALSSDKVAELKHVLAMLDDFSAEELGAKIKDYGIVSPETKNSLSDPYPFNLMFQTSIGPSGFSPGFMRPETAQGIFVNFKDLYYYNGNKLPFAAAQIGQAFRNEISPRQGLLRVREFTLAEIEHFVDPLDKSHPKYPEVADLEFLMFPREEQMSGQSAKRIPLRDAVSKGIVNNETLGYFIGRVYLFLTRLGIDKDRLRFRQHLANEMAHYAADCWDAEIECSYGWIECVGIADRSAYDLRAHSDKSGVPLVAHEKFAEPKEVEKLVITPVKKELGLAFKGNQRMVVEALEAMAEKEALDMKAALESKGEVEFQVCTLGKNVTIKKSMLTIQKEIKKEHQRVFTPSVIEPSFGIGRIIYCLFEHTFYTRPSKAGDEQLNVFRFPSLVAPIKCTVFPLVQNQKYEEVAKLISKSLTAVGISHKIDTTGTSIGKRYARTDELGVPFAITVDSTSSVTIRERDSKDQVRVDVDKAASVVREVTEGQRTWEDVWSTFPHHSSTSADE

SEQ ID NO: 7646 - protein, 450 aa, Zea mays
MREIISIHIGQAGIQVGNACWELYCLEHGIEHDGTMPSDSSVGVAHDAFNTFFSETGSGKHVPRAIFVDLEPTVIDEVRTGSYRQLFHPEQLISGKEDAANNFARGHYTVGKEIVDLCLDRVRKLADNCTGLQGFLVFNAVGGGTGSGLGSLLLERLSVDYGKKSKLGFTIYPSPQVSTAVVEPYNSVLSTHSLLEHTDVAVLLDNEAIYDICRRSLDIERPTYTNLNRLISQIISSLTTSLRFDGAINVDVTEFQTNLVPYPRIHFMLSSYAPVISAEKAYHEQLSVPEITNAVFEPSSMMAKCDPRHGKYMACCLMYRGDVVPKDVNAAVATIKTKRTVQFVDWCPTGFKCGINYQPPSVVPGGDLAKVQRAVCMISNNTAVAEVFSRIDHKFDLMYAKRAFVHWYVGEGMEEGEFSEAREDLAALEKDYEEVGAEGADDEGDEGDDY

SEQ ID NO: 7647 - protein, 106 aa, Zea mays
ADTHRPPKRRMANRETARRTRLRKQQHQDELEQEVARLQADNAREAARAADRATQNTRVEQENTGLRARAAELGDRRRSDNEVLPPREEFSGVAMDKQEEMPADDP

SEQ ID NO: 7648 - protein, 529 aa, Arabidopsis thaliana
  misc_feature (125)..(125): Xaa can be any naturally occurring amino acid
  misc_feature (139)..(139): Xaa can be any naturally occurring amino acid
  misc_feature (187)..(187): Xaa can be any naturally occurring amino acid
  misc_feature (196)..(196): Xaa can be any naturally occurring amino acid
  misc_feature (217)..(217): Xaa can be any naturally occurring amino acid
  misc_feature (246)..(246): Xaa can be any naturally occurring amino acid
  misc_feature (327)..(327): Xaa can be any naturally occurring amino acid
  unsure (1)..(529): unsure at all Xaa locations
MAFTNVCLWTLLAFMLTWTVFYVTNRGKKATQLADAVVEEREDGATDVIIVGAGVGGSALAYALAKDGRRVHVIERDLREPERIMGEFMQPGGRLMLSKLGLEDCLEGIDAQKATGMTVYKDGKXEAVASFPVDNNNFXPFDPSCSILFTMAGLRPNGLRQKASFSCQRLREGKGTVKSLVEEKGVXKGVTYKNSXEETTALAPLTVVCDGCYSNLXRRSLNDNNAEVLSYQVAYISKNCQLDEPXNLHLIMSKPSYIMLYQISSTDVRCVFEVFAANFPSISKGEMATFAKNTLAPQVPSKLRKIFLKGLDEGAHIKAGPANILKXMPTKKMTATLSEKKGVILLGDAFNMRHPAIASGMMVLLSDILILRRLLQPLSNLGNAQKISQVIKSFYDIRKPMSATVNTLGNAFSQVLVASTDEAKEAMRQGCYDYLSSGGFRTSGMMALLGGMNPRPISLIYHLCAITLSSIGHLLSPFPSPLRIWHSLRLFGLAMKMLVPHLKAEGVSQMLFPVNAAAYSKSYMAATAL

SEQ ID NO: 7649 - protein, 428 aa, Pasteurella multocida subsp. multocida str. Pm70
MSELTAKLTLSDGREYDLPVHKGSLGYDAIDVQSLVKNKLFTFDPGFMSTACCRSEITYIDGDNGVLLHRGYPIAELAKNADYLEVAHLLLFGERPSPEEYKNFTQLVRRHTLVHEQISRFFHGFRRDSHPMAIMCGVSGALAAFYHDSLDINDITHREITAIRLLAKMPTLAAMCYKYSIGQPFMFPQNHLSYSGNFLYMMFATPCEPYIVNPVLERAMDRIFILHADHEQNASTSTVRTAASSGANPFACIAAGIASLWGPAHGGANEACINMLEEIGTVDRIPEFIARAKDKNDPFRLMGFGHRVYKNYDPRAKVMRQTCHEVLKELNIQNPLFDVAMELERIALSDPYFIDHKLYPNVDFYSGIILKAIGIPTSMFTVMFALARTVGWIAHWKEMFKPGNMKIVRPRQLYMGEKERSFEAMDKS

SEQ ID NO: 7650 - protein, 360 aa, Dianthus caryophyllus
MVSSTINETLDGKHDINKVGQGETVCVTGASGFIGSWLIMRLLERGYTVRATVRDPDNTKKVQHLLDLPNAKTNLTLWKADLHEEGSFDAAVDGCTGVFHIATPMDFESKDPENEMIKPTINGMLDILKSCVKAKLRRVVFTSSGGTVNVEATQKPVYDETCWSALDFIRSVKMTGWMYFVSKILAEQAAWKYAAENNLEFISIIPPLVVGPFIMPSMPPSLITALSPITRTESHYTIIKQGQFVHLDDLCMSHIFLYENPKANGRYIASACAATIYDIAKMLREEYPEYNVPTKFKDYKEDMGQVQFSSKKLTDLGFEFKYGLKDMYTAAVESCRAKGLLPLSLEHHLCVFRVTLIFFK

SEQ ID NO: 7651 - protein, 480 aa, Ehrlichia ruminantium str. Welgevonden
MLNVFSHIFSILGIFSVLVRYNVLPYTYLLAKRSVRKRPKGEKITMALQKLGPIFIKFGQSISSRGDIIGEEIANHLLFLCDKLPAFSYSDVVRTIEEDFKCAISEIFCEFDEVPIAAASISQVHKAKDIDGNIRAVKILRPKIDQIFEKNIKLMFWIAKIAQHFQSLRRFQLLELVQTFHEICKMEIDLRFEAANADELRGNMQDDSACYIPQVDWNRTTRRVLTLEWVDAIPIYNFYNLENNEALVKNLIFCFCNQVYRDRLFHADMHPGNLMVDTNGKIVIIDFGIVGRLDKATCMYVTEILVGFIKRDYQYVADVHYRAGYVDAKYSSFITACRAIGEPIVGKNTDNISIAALLSQLFKVTADFDMKLQPQLFLLQKTTVLVEGVCRQLSPSINMWKVAELWMEKYAVDKNKYLKKLRKSCLYQTMYDVTSFMKKVDRSLDIINNYDEINHSKYSISRDLMWAIIVIVLVIKIIIG

SEQ ID NO: 7652 - protein, 789 aa, Oryza sativa (japonica cultivar-group)
MGSACEAGTDEPSRDDVKGTGNGILENGHSHKPEEEEWRNGMGEDLPNGHSTPPEPQQTDEQKEHQVQIVRWERFLPVKTLRVLLVENDDSTRQVVSALLRKCCYEVIPAENGLHAWQCLEDLQNHIDLVLTEVVMPRLSGIGLLSKITSHKICKDIPVIMMSSNDSMGTVFKCLSKGAVDFLVKPIRKNELKNLWQHVWRRCHSSSGSGSESGIRTQKCTKPKVDDEYENNSGSNNDNEDDDDNDEDDDDLSVGHNARDGSDNGSGTQFSLNVGQLCQCILMPSACFKTQSSWTKRAVEIDSPQQMSPDQPSDLPDSTCAQVIHPTSEICSNRWLPTANKRSGKKHKENNDDSMGKYLEIGAPRNSSMEYQSSPREMSVNPTEKQHETLMPQSKTTRETDSRNTQNEPTTQTVDLISSIARSTDDKQVVRINNAPDCSSKVPDGNDKNRDSLIDMTSEELGLKRLKTTGSATEIHDERNILKRSDLSAFTRYHTTVASNQGGAGFGGSCSPQDNSSEALKTDSNCKVKSNSDAAEIKQGSNGSSNNNDMGSSTKNAITKPSSNRGKVISPSAVKATQHTSAFHPVQRQTSPANVVGKDKVDEGIANGVNVGHPVDVQNSFMQHHHHVHYYVHVMTQQQQQPSIERGSSDAQCGSSNVFDPPIEGHAANYSVNGSFSGGHNGNNGQRGPSTAPNVGRPNMETVNGIVDENGAGGGNGSGSGSGNDLYQNGVCYREAALNKFRQKRKVRNFGKKVRYQSRKRLAEQRPRIRGQFVRQSGQEDQAGQDEDR

SEQ ID NO: 7653 - protein, 478 aa, Acinetobacter sp. ADP1
MSRLIILSNRVSLPQTECVAGGLAVAMQDALSQLGGVWVGWNGKKIEQPFEQHFDILYKSKITYMTCALTQQQYQDYYCGFSNNTLWPAMHDREDLIEYNPKEFKTYQDVNRLFATKIAEFAQPDDLIWVQDYHFLSVARHCRELGMQNKIGFFLHIPFASLEIWRKIPCAEQLMDDLCHYNLIGLQTAQDQENCISVCSVLLKAQKIQNNMISLNQRVTQIQDYPIGVDVKGIQKTLSNLSDQDQYLTNPSAIKTIIGVDRIDYSKGLFERFNAFAEFLDRNTAFHQKVQHVQIASPCRLEVATYKRLFERFKLKVELINSEFSQDNWLPIVCHYDSKPHHELMQFYRNADICWVTSLKDGMNLVAKEYIAAQNPDNPGVLILSEFAGAAEQMQDALIVNPKNRDAMIKALKLALNMSLEERQYRYHKLIKQLIEYDINQWRDDFLKDLNSSQYIQNFDYNHRLSTVLFYPNYSSRI

SEQ ID NO: 7654 - protein, 287 aa, Acinetobacter sp. ADP1
MNKMNNNILKKNDLSSQEESTHEIQDVLDQLDFYTYKIALFLDIDGTLADFKIDPLACFISKKILKSIQDIQSKGCLVSVITGRDYNSAQKLLADVSLPIAALHGLDIHINEKTQLNAINQNNQIFIQNFLCRLKEEIKYQPDLSIENKHHSIALHYRKNPDLYDIAKHIMNTVKKDNDEFKVIEGKYVFELIPKNSNKGSAIKTLLSYFDAEHYLSIFIGDDITDEDGFNMVNQLEGISIKVGSGKTVARFRLKNIEHVEEFLNLLSHHFPDSSTQITKKYGEQHV

SEQ ID NO: 7655 - protein, 354 aa, Bacillus subtilis
MKKQRIVVKIGSSSLTNSKGSIDEQNQRACSAISVLKKAGHEMILITSGAVAAGFSSLGYPSRPVTIKGKQAAAAVGQTLLMQQYMNQFKQYSLTPGQILLTRNDFSKRERYRNAYATIMELLERGVIPIINENDSTSVEELTFGDNDMLSALVSGLIHADQLMILTDINGLYDANPNEILSERFDYLPEITPELLGYAGSAGSKVGTGGMKSKLLATQTALSLGVKVFIGTGSGEQKLADILDGRGDGTYIGDKELSSVNNTRQWIQFHSPISGEIIIDAGAEEAMIHNGSSLLPAGVVGVNGSFPKGAVVEVRGPGGVIGKGQTHYSSEEIMEAKGKRSDELDFEKTFEVIH

SEQ ID NO: 7656 - protein, 553 aa, Zea mays
EAHTHNQISPKSTRRHLRFKMQIFVKTLTGKTITLEVESSDTIDNVKAKIQDKEGIPPDQQRLIFAGKQLEDGRTLADYNIQKESTLHLVLRLRGGMQIFVKTLTGKTITLEVESSDTIDNVKAKIQDKEGIPPDQQRLIFAGKQLEDGRTLADYNIQKESTLHLVLRLRGGMQIFVKTLTGKTITLEVESSDTIDNVKAKIQDKEGIPPDQQRLIFAGKQLEDGRTLADYNIQKESTLHLVLRLRGGMQIFVKTLTGKTITLEVESSDTIDNVKAKIQDKEGIPPDQQRLIFAGKQLEDGRTLADYNIQKESTLHLVLRLRGGMQIFVKTLTGKTITLEVESSDTIDNVKAKIQDKEGIPPDQQRLIFAGKQLEDGRTLADYNIQKESTLHLVLRLRGGMQIFVKTLTGKTITLEVESSDTIDNVKAKIQDKEGIPPDQQRLIFAGKQLEDGRTLADYNIQKESTLHLVLRLRGGMQIFVKTLTGKTITLEVESSDTIDNVKAKIQDKEGIPPDQQRLIFAGKQLEDGRTLADYNIQKESTLHLVLRLRGGQ

SEQ ID NO: 7657 - protein, 407 aa, Bacillus subtilis
MSEVSVKAKLAKEAAAEMIMKTTAEKDEALSLIANGLRKELDFLLAENAKDIVNGKENGLTPDIIDRLSLDEKRIRDIADAVELLIDLADPIGDSLETIEKENGLFIQKIRVPLGVVGMIYEARPNVTVDAATLCLKTGNAVVLRGSSSAIHSNKALVSVIYRALEQSALPIHTVQLIEDTSRETAKELFTLNDGLDVLIPRGGKKLIDLVVRESTVPVLETGAGNCHIFIDETAKPQMAEKVVVNAKTQRPSVCNAIESLLIHKAWARQNGKELLDQLENAGVEIRGDELVCELHPSSKQASKEDWETEFLAPVLSVKTVENVQEAVKHIQQYGTNHSEAILTENDKNAVYFQTAVDAAAVYHNASTRFTDGFGIRLRSRNRHQHAKASCKRTDGASCTDFYKIHH

SEQ ID NO: 7658 - protein, 464 aa, Brucella suis 1330
MTGFDYDLFVIGGGSGGVRAGRLAGAIGKKVGLAEEYRMGGTCVIRGCVPKKLFVYASQFPEHFEDSAGYGWSMGEAAFDWKKLIAAKDKEISRLEGLYRKGLENSHVDIFASRAELIDEHTIELKADGRRVTADKILIATGGRPNTHESLPGHEYCISSNEAFHLEELPKSIVIAGGGYIAVEFANIFHGLGVETTLVYRGKEILSRFDHDIRSLLHETMEAKGIRILCGAIFEKVEKKADGKLSVELSNGETLETDQAMLALGRIPNTDGLGLEKAGVKIDKSGAIEVDDYSRTNVENIWAVGDVTNRVQLTPVAIHEAMCFLETAFKDNPTKPDHELIATAVFSQPEIGTVGLSEDEAAKKYPELEIYRALFRPMKNTLSGRSEKTLMKLVVESKSRKVLGAHIMGPDAGEMAQLLGISLKAGATKDDFDRTMAVHPTATEELVTMYKPTYRVVDGKKIEG

SEQ ID NO: 7659 - protein, 665 aa, Pseudomonas aeruginosa PAO1
MPSRRERANAIRALSMDAVQKANSGHPGAPMGMADIAEVLWRDYMQHNPSNPQWANRDRFVLSNGHGSMLIYSLLHLTGYDLGIEDLKNFRQLNSRTPGHPEYGYTAGVETTTGPLGQGIANAVGMALAEKVLAAQFNRDGHAVVDHYTYAFLGDGCMMEGISHEVASLAGTLRLNKLIAFYDDNGISIDGEVHGWFTDDTPKRFEAYGWQVIRNVDGHDADEIKTAIDTARKSDQPTLICCKTVIGFGSPNKQGKEECHGAPLGADEIAATRAALGWEHAPFEIPAQIYAEWDAKETGAAQEAEWNKRFAAYQAAHPELAAELLRRLKGELPADFAEKAAAYVADVANKGETIASRKASQNALNAFGPLLPELLGGSADLAGSNLTLWKGCKGVSADDAAGNYVFYGVREFGMSAIMNGVALHGGFIPYGATFLIFMEYARNAVRMSALMKQRVLYVFTHDSIGLGEDGPTHQPIEQLASLRLTPNLDTWRPADAVESAVAWKHAIERADGPSALIFSRQNLPHQARDVAQVADIARGGYVLKDCEGEPELILIATGSEVGLAVQAYDKLSEQGRKVRVVSMPCTSVYEQQDESYKQSVLPVEVGARIAIEAAHADYWYKYVGLDGRIIGMTSFGESAPAPALFEHFGFTLDNVLAVAEELLED

SEQ ID NO: 7660 - protein, 371 aa, Bordetella pertussis Tohama I
MNTARSLDKMVPVTILTGFLGAGKTTLLKRILTEYHGRRVAVIENEFGPESIDNDLLVQDRDEEIIELSNGCVCCTVRGDLMRTLSDLRARREAGELSFERVIIETTGMANPGPVCQTFFMDDDIAEYYRLDAVVTVVDAKHGMATLDAQEEAQKQVGFADRILVSKKDLVNDVDYAALHQRLVRINPRAPITPVHFGEADLKSIIDISGFNLNSILDIDPAFLADEHPDAAHDHHDHDHGHGHDHDHDHDHEGECGAHCNHHHHHHHAHHDDEIGAFVFRSNKPFDPARLEEFLGGVVQVYGPDLLRYKGILYMKGINRRMLFQGVHMMMGAEPGKAWTAAEKPSTKMVFIGRKLPQEIFTRGLEQCLVG

SEQ ID NO: 7661 - protein, 243 aa, Arabidopsis thaliana
  misc_feature (36)..(36): Xaa can be any naturally occurring amino acid
  unsure (1)..(243): unsure at all Xaa locations
MCALVPPLYPNFGWPCGDHSFYETDDVSNTFLDFPXLPDLTVTHENVSSENNRTLLDNPVVMKKLNHNASERERRKKINTMFSSLRSCLPPTNQTKKLSVSATVSQALKYIPELQEQVKKLMKKKEELSFQISGQRDLVYTDQNSKSEEGVTSYASTVSSTRLSETEVMVQISSLQTEKCSFGNVLSGVEEDGLVLVGASSSRSHGERLFYSMHLQIKNGQVNSEELGDRLLYLYEKCGHSFT

SEQ ID NO: 7662 - protein, 474 aa, Zea mays
MDMALASKASPPPWNATAAEQPIPKRDKAAANDSTYLNPQAHDSVLGIILGGGAGTRLYPLTKKRAKPAVPLGANYRLIDIPVSNCLNSNISKIYVLTQFNSASLNRHLSRAYGSNIGGYKNEGFVEVLAAQQSPDNPNWFQGTADAVRQYLWLFEEHNVMEFLILAGDHLYRMDYEKFIQAHRETNADITVAALPMDEKRATAFGLMKIDEEGRIIEFAEKPKGEQLKAMMVDTTILGLDDVRAKEMPYIASMGIYVFSKDVMLQLLREQFPEANDFGSEVIPGATSIGKRVQAYLYDGYWEDIGTIAAFYNANLGITKKPMPDFSFYDRFAPIYTQPRHLPPSKVLDADVTDSVIGEGCVIKNCKINHSVVGLRSCISEGAIIEDSLLMGADYYETEADKKLLAEKGGIPIGIGKNSCIRRAIIDKNARIGDNVKVFQTDVPTVKNINLDFSLGYYIILDMPFCPLIFNIYF

SEQ ID NO: 7663 - protein, 470 aa, Escherichia coli O157:H7 EDL933
MTRYQHLATLLAERIEQGLYRHGEKLPSVRSLSQEHGVSISTVQQAYQTLETMKLITPQPRSGYFVAQRKAQPPVPPMTRPVQRPVEITQWDLVLDMLVAHSDSSIVPLSKSTPDVETPSLKPLWRELSRVVQHNLQTVLGYDLLAGQRVLREQVARLMLDSGSVVTADDIIITSGCHNSMSLALMAVCKPGDIVAVESPCYYGSMQMLRGMGVKVIEIPTDPETGISVEALELALEQWPIKGIILVPNCNNPLGFIMPDARKRAVLSLAQRHDIVIFEDDVYGELATEYPRPRTIHSWDIDGRVLLCSSFSKSIAPGLRVGWVAPGRYHDKLMHMKYAISSFNVPSTQMAAATFVLEGHYHRHIRRMRQIYQRNLALYTCWIREYFPCEICITRPKGGFLLWIELPEQVDMVCVTRQLCRMKIQVAAGSIFSASGKYRNCLRINCALPLSETYREALKQIGEAVYRAME

SEQ ID NO: 7664 - protein, 122 aa, Oryza sativa (japonica cultivar-group)
MGGTMDYLSDLLGGGGSSSRRRYKKRKQYKVTVQGFVEPHKVVKRVQATGKKAEIWPYVPYTLVAHPYAAPAYDKRAPPGHVRRVDAVMPVASYGSAAAAAAPEERLTTMFSDENPNACSIM

SEQ ID NO: 7665 - protein, 493 aa, Nocardioides sp. JS614
MAVETGRITTDIPARLDRLPWARWHWLVVIGLGTVWILDGLEVTIVGSMSDALKPDGTGLGMNNFDIGLAGSMYVAGACLGAPFFGQLTDRLGRKKLFIVTLAVYTVATVLTAFSMNPMWYFACRFLTGCGIGGEYAAINSAIDELIPAKYRGRVDIAINGSFWVGAAGGALLTIPLLDPTMIDQSWGWRLAFGLGAILAVGILVVRRNVPESPRWLFIHGREDEAEQIVRDIERTVSEESHHQLHDVHDTITVRQRTSIGIGLIARTVFTLYPKRTILCFSLFVGQAFLYNAFFFTYGDTLTTFLGVEQTGYYIAVFAASNFAGALLLSPLFDTLGRVKMITATYIGSGVLLAVTGFYLGSFDATTLTLMGAIIFFMASAGASAAYLTASEVFPMETRALCIAFFYAIGTAAGGISGPLFFGWLIEQASADKDITQIAVGYFLGAALMIIGGIVEAFLGVKAEGKSLESIAQPLTAEDTDTGSTGSTQPQHA

SEQ ID NO: 7666 - protein, 573 aa, Aegilops tauschii
MVVVVDERMVVVMMVMMGVAMCMAVPLSCSPRLHLGRATTILLPPTFRGLASPPPDGAATSKAQQRQLCPGPPSHESSSRTTAASPRNWPTRNRPDRAPAQRALCRHCPTHSAVTRRHRPAGRAAPHRHRLRATRRARAPRSADVPEEEPPAAPDTGEGEEIPPPPAPLRLCLAAPADGGGGRGRGWGLDVCWEKAVAEHGVAGVKCARSGSWRCDRRRCVQLVGSMGWVTAVAVRISERERARLGSAPTMAASRRVLVLVRLSPASLAVLGARFHLLDLHASPLPMDAFLAAAAADNDDPPRAALIPGHGSVRVDAAFLDAVPSLRCVLFNSAGLDHVDLLECERRGVAVANATGVYSADVADYAVGLLIDVLRRVSASDRHVRRGHWPERGGHGFTLGRKRVGIIGLGSIGSAIATRLEAFNCAVSYHSRRQKSNVPYCYYPTARDLAECSDVLVVTCPLTAETRHIVDRRVLDALGSGGVVVNVARGANVDEVELVRALAEGRIAGAGLDVFEHEPNVPPELLAMENVVLTHHQAAFTPESVADLDRLFVDNLEAFFRGSPLLTPVVVYD

SEQ ID NO: 7667 - protein, 217 aa, Triticum aestivum
  misc_feature (181)..(181): Xaa can be any naturally occurring amino acid
  unsure (1)..(217): unsure at all Xaa locations
MARMAVLGLAILLAASCALAAASFDKEFDITWGDGRGKILNNGQLLTLGLDKVSGSGFQSKHEYLFGKIDMQLKLVPGNSAGTVTAYYLSSQGPTHDEIDFEFLGNVTGEPYTLHTNVFTQGQGQREQQFRLWFDPTNDFHTYSILWNPKHIIFMVDDMPIRDFRNLEGKGIAFPKNQPMXRLYSSLWNADDWATQGGPASRVSLEGPQAYAYPAFL

SEQ ID NO: 7668 - protein, 250 aa, Nicotiana tabacum
MGKCYPTVSEEYLKAVDKCKRKLRGLIAEKNCAPLMLRLAWHSAGTYDVCSKTGGPFGTMRFKAEQGHGANNGIDIAIRLLEPIKEQFPILSYGDFYQLAGVVAVEVTGGPDVPFHPGREDKTEPPVEGRLPDATKGSDHLRDVFVKQMGLSDKDIVALSGGHTLGRCHKERSGFEGPWTTNPLIFDNSYFTELLSGEKEGLLQLPSDKALLSDPAFRPLVEKYAADEDAFFADYAEAHLKLSELGFAEV

SEQ ID NO: 7669 - protein, 411 aa, Xylella fastidiosa Temecula1
MNRRVVVTGMGMVSPLGNDLTTSWDGIVHGRSGIAPIVQIDASKFPTQIAGEIKGFDPTKFVSAKDAKKMDSFIYYGIGAAFMALDDAGLEINEINAERVGALIGSGIGGVFGIEEQTIKLYEGGARKISPFYVPATIINMLPGQLSVLKGLKGPTFSAVSACATSNHSIGMAMRMIQYGDADVMLAGGSERASSPTAIGGFCAMRAMSTRNDDPTGASRPWDKGRDGFVLGDGAGILVLEEYEYAKARGARIYAELAGFGATSDAFHMTMPVEDGEGAARCMRIALQDARVTPEQIDYLNAHGTSTPLGDLCETNAIKTVLGGHAYKVMVSSTKSMTGHLLGAAGGVEAIFSVMALHTGIVPPTINLEEPDEGCDLDYVPHVAREAKLDVVISNGFGFGGTNGTLVFKRI

SEQ ID NO: 7670 - protein, 724 aa, Novosphingobium aromaticivorans DSM 12444
MATPTKGKAPARAAKERSPALDNALRDHQPGAGQTDEATALGNAGEIHQEAAAENDAAAFLTDNFGHRLSDNQNSLRAGMRGPTLIEDFILREKIFHFDHERIPERIVHARGSGAHGVFEVTRAIPDLTRAGLFQKKGQTCPVFVRFSTVAGGAGSIDTPRDVRGFAVKFYTDEGNWDLVGNNIPVFFIQDAMKFPDLVHSVKMEADRGYPQAASAHDTFWDFIGLMPESMHMIMWAMSDRAIPRTLRMMEGFGVHTFRFVNAAGEGRFVKFHWKPVLGMESLIWDEAVKVAGADPDFHRRDLFESIAAGHFPAWDLGVQVFDEEFAASQPYDVLDATKLIPEEDVPVEIVGRMTLNRNVDNFFAETEQVAFLPSNVIPGIDFSNDPLLQGRLFSYLDTQKSRLGTTNFHQIPVNAPKCPFHNMQRDGLMQTLVPTGRANYEPNSLDEAGEDSGPRACPETGFTSFRENGERHDPTEKVRVRADLFADHYSQAALFFHSQTESEQAHIASALVFELSKVALEHVRARVVSRLRNIDETLAQRVADGLAMDLPEKAPAARQPVKMKPSDALSIQKQAKKTFAGRKVGILFAEGSDKATIDKLKAGVEEAGGTVFLVAPKVGGIPVKGGTLKADGKLDGSPSVLFDAVASVLMPEAAAKLAMQGAAVQWFMDAYGHCKTIAHCNGTRIILEKAGVEPDEGVVPNEKLLEVGPVRHFAREPKVRDLA

SEQ ID NO: 7671 - protein, 901 aa, Magnaporthe grisea 70-15
MPPSSAEPPAASAANAARHVSIDEPRRDGRKDPNQNEQSPLLSPQDDEVDSLMARRESAIEDDDDEIDPFETTKSVWYLILLTISIGGLQIAWSVELSNGSPYLLSLGLSKSLMALVWIAGPLSGTLVQPYVGMLSDNCRISWGKRKPFMLVGAAATITSLLFLAWTREIVSGILGLFGAPADSDGVKTTIIVVAVLWVYILDFAINTEAANSMASRITGVGNIVGYVAGFVNLPKIAWWLGKTQFQDLCAIASIALGVTVIITCILIPERDPRLEGPPPRDQPGVLSFFTKIFTSIKRLPPVTKRVCQVQFCAWVGFFPMLFYTSAYIGEIYVQPFLRNNPNMTPKELDELYERATRVGTFALLIYSITSLSTNVFLPFFIQPTYDAAPVVSADAPGEGPSVLANAKNANGSSRSWLDRLVIPGFTLRRAWMFSHILFAFSMGCTVLVESVEAATVLIGLVGITWALTLWAPWSLISSEISRRDAVLRAQQRRRGLTLDQPYDEDETPSSETSSGQLEVERDEQVADQAGIILGIHNMAIAAPQIIATVGSSIIFKFFQKPRGTPGDRSISIVMALGGITVLGAAWLVHRIDDDVAVPADELSGIMEAGASDGILTGGPPRPSLSQRTSFSSTRPSFSRSRNQSTESLSRYSQERAALICKGEPAAPGFTQAKVPLLRAAGKPMSSITDATVLIGTQTEHVLPIRSPPARNNAHQQSSYPRPRRPPILSSRAVGRAVQRPKTAQDLNKWSWANQAGPYQYYIHGSGSVDKYISLSPGYKNPNETASARGARFALDGAVFWIGQNMRRTELISQTTAGIHFTEMTYGWISGEQGTSNKNLQWMVGQRSLWKTEWKPDVWHNVAYEIDFGARTVGFWHSEGGTPLERKFAPVSESTSSNGAD

SEQ ID NO: 7672 - protein, 728 aa, Aspergillus fumigatus
MRLTFIPSLIGVANAVCPYMTGELNRRDEISDGDRAAATEEFLSQYYLNDNDAFMTSDVGGPIEDQNSLSAGERGPTLLEDFIFRQKIQRFDHERVPERAVHARGAGAHGVFTSYGDFSNITAASFLAKEGKQTPVFVRFSTVAGSRGSSDLARDVHGFATRFYTDEGNFDIVGNNIPVFFIQDAILFPDLIHAVKPRGDNEIPQAATAHDSAWDFFSQQPSTMHTLLWAMSGHGIPRSFRHVDGFGVHTFRFVTDDGASKLVKFHWKSLQGKASMVWEEAQQTSGKNPDFMRQDLHDAIEAGRYPERELGVQIMDEEDQLRFGFDLLDPTKIVPEEFVPITKLGKMQLNRNPRNYFAETEQVMFQPGHIVRGVDFTEDPLLQGRLFSYLDTQLNRHGGPNFEQLPINQPRVPVHNNNRDGAGQMFIPLNPHAYSPKTSVNGSPKQANQTVGDGFFTAPGRTTSGKLVRAVSSSFEDVWSQPRLFYNSLVPAEKQFVIDAIRFENANVKSPVVKNNVIIQLNRIDNDLARRVARAIGVAEPEPDPTFYHNNKTADVGTFGTKLKKLDGLKVGVLGSVQHPGSVEGASTLRDRLKEHGVDVVLVAEALADGVDQTYSTSDAIQFDAVVVAAGAESLFAASSFTGGSANSASGASSLYPTGRPLQILIDGFRFGKTVGALGSGTAALRNAGIATSRDGVYVAQSVTDDFANDLKEGLRTFKFLDRFPVDH

SEQ ID NO: 7673 - protein, 500 aa, Crocosphaera watsonii WH 8501
MCGIAGIWGQTEQTNVEAMMKSIIHRGPDAKGIFTVPNGSGILGHQRLSIMDVDGGDQPIYSKANTQAIIGNGEIYNYPKLQPELAKKYKFLTKSDTEAVLHLYEEKNTTAVGELDGMFAFAIIDDNKFIAARDPIGIKPLYYSEKDGNFWFASELKAITQFCENVEEFPPGHFFSSETGFSQYYSLPDIPPELDANVDELLQEIRETVEASVVKRLMSDVPLGAFLSGGLDSSIIAAIAKKHKSELHTFSVGIAGSKDINAARLVSDYLGTIHHEYIITPEEAIAKLPEIIYYLESFDQDLVRSGIPCYFTSRLASEYVKVILTGEGADELFAGYTYYKDIPSDDTLHRELRRSVNSLHNINLQRVDRLTMAHSIEGRVPFLDLKMIELGQKVPAHLKLKGTPPVEKWILRKAFEDILPEEIVWRKKEQFDEGSGTVDLLTETLKDVMNEQQAQQYQKEHPDIKLRSAEECYYHQIFMKAFDNPDALLTNVARWAETRF

SEQ ID NO: 7674 - protein, 339 aa, Debaryomyces hansenii CBS767
MPKPLVVHLEPVRYSHHLWIELEEIAEIELVGDYSREEFIKDLHGKYANVVAIGRGYLTGQKVGMFDEELISHFPSSLKYIAHQGTGYDQIDVDELNKRGIQLSNCPDIVTKSTADMNIFLMLGAMRNFEAGRRNLIAGKWPAGGLGAGVEAGWAPSRKVLGIIGMGNIGRAVRDRAVSFGFEKIVYYSRSKLTPELEKDCEYVASLEELVAASDVLSINCPLNKSTYHLINDSLISKMKDGVIIVNTARGAVIDEQDMIKHLKTGKIGAAGLDVFENEPVPRKDLLDLPNVMALPHMGTHTVQAFSDFENWTIENIRSGLSTGKVRTIVQEQQNTTFN

SEQ ID NO: 7675 - protein, 391 aa, Arabidopsis thaliana
MASLDSHVLMKLGSLFLSTLFVSIVSSESQCRNFESIISFGDSIADTGNLLGLSDHNNLPMSAFPPYGETFFHHPTGRFSDGRLIIDFIAEFLGLPYVPPYFGSTNGNFEKGVNFAVASATALESSFLEEKGYHCPHNFSLGVQLKIFKQSLPNLCGLPSDMIGNALILMGEIGANDYNFPFFQLRPLDEVKELVPLVISTISSAITELIGMGGRTFLVPGGFPLGCSVAFLTLHQTSNMEEYDPLTGCLKWLNKFGEYHSEQLQEELNRLRKLNPHVNIIYADYYNASLRLGREPSKYGFINRHLSACCGVGGPYNFNLSRSCGSVGVEACSDPSKYVAWDGLHMTEAAHKSMADGLVKGPYAIPPFDWSCLSSMIKKKEVVGNTIFFDE

SEQ ID NO: 7676 - protein, 442 aa, Pseudomonas fluorescens
RERIHERVVHARGTGAHGTFTVTDNLSDLTKAKVFAAGETTPVFVRFSAVVHGNHSPETLRDPRGFATKFYTAEGNWDLVGNNFPTFFIRDAIKFPDMVHAFKPDPRTNLDDDSRRFDFFSHVPESTRTLTELYSDSGTPASYREMDGNGVHAYKLINAKGEVHYVKFHWKSLQGIKNLDPKQVTEVQGRDYSHMTNDLVAHINKGDFPKWDLYVQVLKPEDLAKFDFEPLDATKIWPDFTERKVGQMVLNRNLDNVFQETEQVPWPPANLVPGIEPSEIRLLQARLCSYAETQIYRLGAKRLQLRIQRPTVTVNNGNQDGAMNFGKDTTGVNYQPKSSDAREEPATARYSESALAGNTQQAKIQREQNFKQAGDLYRSYSKKERQDLIDNFGGSLATTDDESKHIILSFLYKADPEYGTGVAKVAKGDLARVKALAEKLTD

SEQ ID NO: 7677 - protein, 346 aa, Glycine max
MAHPTSSSGQSHDLKKEDCKETRSLVVCFGEMLIDFVPTVGGVSLAEAPAFKKAPGGAPANVAVGISRLGGSSAFIGKVGADEFGYMLGNILKQNNVETSGMRFDSNARTALAFVTLRADGEREFLFFRNPSADMLLQESELDKDILKQARIFHYGSISLIDEPCKSAHLAAMSIAKNSGCILSYDPNLRLALWPSADSARKGIMDIWDQADVIKISEDEITFLTGGDDPYDDNVVLKKLFHPNLKLLIVTEGSQGCRYYTKAFKGRVAGVKVKPVDTTGAGDAFVSGILYCIASDQTIFQDEKRLRKALYFANVCGALTVTERGAIPALPTKEAILQFLLEAAVI

SEQ ID NO: 7678 - protein, 381 aa, Streptomyces coelicolor A3(2)
MITVTEATATAGALQRLADQGVSVWLDDLSRRRIESGNLAELIRTKNVVGVTTNPSIFQAAIGSGEGYEEQLADLATRGVTVDEAVRMMTTADVRAAADVLRGVYDASGGRDGRVSIEVDPRLAHDTAATVAEARQLSWLVDRPNVMIKIPATKAGLPAITEVIGAGISVNVTLIFSLERYREVMDAYLAGLEKAQAAGIDLAGIHSVASFFVSRVDSEIDKRLSLLGTEEALGLRGRAALANARLAYEAYENVFAGDRFTALAGARANAQRPLWASTGVKDPAFRDTLYVEELVAPGTVNTMPEATLDAAADHGDVRGDTVTGGYAQARADLAAVERLGVSYDEVVEQLEQEGVAKFEAAWQELLAAVTKSLDSKGVDGE

SEQ ID NO: 7679 - protein, 508 aa, Glycine max
MGSVDCYPSRTDDAAVVSLDSLPLGFRFRPTDEELVNYYLRQKINGNGRQVWVIREIDVCKWEPWDMPGLSVVQTKDPEWFFFCPQDRKYPNGHRLNRATNNGYWKATGKDRRIKSGKDLIGMKKTLVFYTGRAPKGNRTNWVMHEYRPTLKELDGTNPGQNPYVLCRLFKKHDESLEVSHCDEAEQTASTPVAYSTEEIQSDLAVVAGSPSQVTEDDKHQAMIPAHSEEAISNVVTPVVCRSDRYDACHAPNQIVLPTAEEFQPLNYYDPRNELLDDKLFSPVLAHIQPEFHYQANIESDDWYGLQYGTNETNMSDFLNSVVNWDQVSFEDLNCQQQSYPLFNVKDSVLSSDLDSELAIMTCMHAGSAEGPNNGRKPLVITSEFRSTTGIPVDCGGDEQKSNVGLFQNNSQRAFTDVNIGQVYNVVDDYEQRGIYSAVASGNTGIIRRHREVQNEQLSSNSTQGTAQRRIRLSMATHGSNKMVKSGSCAQEELNLKSVIAMVRILFF

SEQ ID NO: 7680 - protein, 211 aa, Geobacter sulfurreducens PCA
MKDIERFIAGFRRFREDYFGSEYSPFEHLKQGQSPKTMIIGCSDSRVDPAILTDCAPGDIFTVRNVANLVPPFEENGGLHGVSAALEFAVCHLGVEHIIVLGHSQCGGINALMKGTCGCKGGGFISRWMSIATPARERVLAELPEKDTALQQRAAEQAAILLSLENLHSFPWIDERVVRGELTLHGWYFDISAGELLEYRSETGLFEKVSK

SEQ ID NO: 7681 - protein, 664 aa, Synechococcus elongatus PCC 7942
MLALWQQLRDTLTRWWADFTLQTKLMAIATLVVSLIMSGLTFWAVNSIQEDARLNDTRFGRDLGLLLAANATPLIADEDIAGLTRFSYRFYRSTSSVRYLLYADTEGEIYLGIPFSQSEVRNSLTIQRRIQLPPDYLRQGDRPYVRQHLTPAGLVTDVFVPLFQNDRYLGVLAIGTNPSPAVVASSGLTRDVTIAVFITIWVMVIVGAVFNALIITRPIRELVEGVRSIASGNFKQRIDLPPSGELGELIASFNDMAEQLEGYAAQNIDELTSEKAKLETLVSTIADGALLLDADLNLVLVNPAAIRIFGWEGRSLKGDDVIDHLPSPLAQELHDPLKAIANGDREAVELRLTLPERSNRTVRILVSNVLDTARANVKGIAVTVQDITREVELNEAKSQFISNVSHELRTPLFNIKSFIETLHDYGDDLSEEERREFLSTANHETDRLTRLVNDVLDLSRLESNRRYNFEGIDLVQPIEQTLRTYQLNAREKGIELRSEIARDLPAVRANYDLLLQVFANLVGNALKFTASGGCVAMRAYLVGQPLRTEAVNHSEIVSSLPNIRIEINDTGIGIDAEDQEAIFDRFFRVENRVHTLEGTGLGLSIVRNIVEKHQSRIHLISEVGIGTTFWFDLPIYQPEEAIAAPAKPEAITATNGTEVSVSTG

SEQ ID NO: 7682 - protein, 338 aa, Pasteurella multocida subsp. multocida str. Pm70
MAILVTGGAGYIGSHTVVELLNANKDVVVLDNLCNSSPKSLERVAQITGKQVKFYQGDILDTALLQKIFAENQIQSVIHFAGLKAVGESVQKPAEYYMNNVTGSLVLIQEMKKAGVWNFVFSSSATVYGDPEIIPITESCKVGGTTNPYGTSKFMVEQILKDIAKATPEFSITILRYFNPVGAHESGLIGEDPNGIPNNLLPYISQVAIGKLPQLSVFGSDYETHDGTGVRDYIHVVDLAIGHLKALDRHEGDAGLHIYNLGTGSGYSVLDMVKAFEKVNDIKIPYKLVDRRPGDIATCYSDPSLAKTELNWTAARGLEQMMKDTWHWQKKNPKGYRD

SEQ ID NO: 7683 - protein, 507 aa, Candida albicans
MRSYKSSITDENELTKQRLRAKSIANLSSNHATAGQTSTSSQHREALTDLTSQENKNHPRVKLTQTNTNHHRNSSSSSNKIQIYQQIEQKKTDIHQFKKPRLEKVLLNDDDDETDDEFDDEEDKENRYHDLELNDDDSKHQLISEAFETIDDRGISEGENDTAQEARERLEEETQSHTQDMRSIYGVHVPMQPMWNNAIINELKYVIQKYSRNTLDENDEDTYDTTMVAEYSPEIFNYLHELENKFTPDPNYMDFQDDLKWEMRAVLIDWVVQVHARFNLFSETLYLTVNYIDRFLSKRRVSLSRFQLVGAVALFIAAKYEEINCPTVQEIAYMADNAYSIDEFLKAERFMIDVLEFDLGWPGPMSFLRRISKADDYDYETRTLAKYFLEITIMDSKFVASPPSWLAAGAHYISRILLGRGEWTELHVFYSGYTEKQLQPLADVLLENCRHAEINHKAIFEKYKERRYRKSSLFVQEYFRHIMSRVDLKTSFQQCGTLHFIQSSQNH

SEQ ID NO: 7684 - protein, 175 aa, Triticum aestivum
MAPTVMASSATSVAPFQGLKSTAGLPVSRRSNGASLGSVSNGGRIRCMQVWPIEGIKKFETLSYLPPVSTEALLKQVDYLIRSKWVPCLEFSKVGFIFREHNASPGYYDGRYWTMWKLPMYGCTDATQVINEVEEVKKEYPDAYVRIIGFDNMRQVQCVSFIAFKPPGCEESGKD

SEQ ID NO: 7685 - protein, 698 aa, Streptomyces coelicolor A3(2)
MSTQSSKQTVDGADRFEWTELDRRAVDTARILAADAVQKVGNGHPGTAMALAPAAYTIFQKVMRHDPADPEWTGRDRFVLSPGHTSLTLYTQLFLAGYEVELDDLKAFRTHGSRTPGHPEYGHTAGVETTTGPLGQGVANAVGMAMAARYERGLFDPEAPEGESPFDHTIWAIVSDGDLQEGVSAEASSLAGHQKLGNLVFLYDDNHISIEGDTVTAFSEDVLKRYEAYGWHTQRVEPAESGDVDVRALHAAMTAAKAETGRPSIIAMRTIIAWPAPNAQNTEASHGSALGADEIAATKRVLGFDPERSFEVADEVLAHTRRALDRGAEAHAAWDKRIAAWRDAAPERAALFDRVVAGRLPEGWENALPVFETGKAVATRAASGKVLQALGPVLPELWGGSADLAGSNNTTIDKTSSFLPGGNPLPGADPYGRTVHFGIREFSMAAEMNGIALHGNTRIYGGTFLVFSDYMRNAVRMSALMQLPVTYVWTHDSIGLGEDGPTHQPVEHLASLRAIPGLNVVRPADANETATVWAEILRRHSTHPAPHGLALTRQGVPTYAPNPDAARGGYVLADASTGAPDVVLIATGSEVQLAMAARETLEAEGTATRVVSMPSVEWFEEQPRAYRESVLPPSVRARVAVEAGIGLTWHRFVGDAGRIVSLEHFGASADAKTLFSEFGFTAGHVAAAARDSLAAARG

SEQ ID NO: 7686 - protein, 727 aa, Magnaporthe grisea 70-15
MPRSSMLGLWASLVWIAQAGCPYADPAALRPREEHTDDYLAQFSVDDQDKFLTSDVGGPIGDQRSLKAGARGSTLLEDFVFRQKITHFDHERVPERAVHARGAGAHGTFTSYGDFSNITSASFLNSAGKRTPVFVRFSTVAGSRGSADSARDVHGFATRFYTDEGNFDIVGNNVPVFFIQDAIQFPDLVHAVKPSPDKEIPTAATGKRPDYKPNPDATHDSAWDFFSQQSSSLHALFWAMSGYGIPRSYRHMDGFGVHTFRMVADNGESRLVKFHFKTKQGKASLIWEEAQVLSGKNPDFHRQDLWDAIEAGHGPEWEFGVQVVNEEDALRFGFDMLDPTKILPEDLVPVHPLGLLKLDRNPINYFAETEQIMFQPGHLVRGIDFTEDPLLQGRVFSYLDTQLNRHNGPNFEQLPINRPRVTVHNNNRDGSGQNFIHKNIHPYTPSALNEFPKQADDDQGRGFMTAPRRRTQDAALVRELSETFDDHWTQPRLFWNSITPAEQQILVNAIRFETSNIVNTHVRQKVLQQLNRISDELAGRVAQALGMEAPAPEPAFYHENTTIGLSIFGIKLPTIKTLRVGVLASTGNVASLSQAADLKARFMGDGVAVAVLGETQVEGVDVTYSQSDATVFDGIIIAAGAEGLVAKDAPASALFPIGRPQQLVVDSFRWGKPIGLAAASDDSANIFSSLGTTGPGVFSGDDLGVLVTDFKEGLSTYKFVERFPMDS

SEQ ID NO: 7687 - protein, 278 aa, Corynebacterium diphtheriae NCTC 13129
MTRYTKLFSALSAKNEGAFVPFIMLGAPTPEASLAIIRTVVAAGADALELGVPFSDPVADGPTIQRSHLRALDNGATVDSSLELIRQIRKEFPELPIGMLIYGNVAFTRGITQFYQEFADAGVDSILLPDVPVREGEPFIAAAKQAGIDPIFIAPAQASEATLEGVAQHSSGYIYAISRDGVTGTERQSSTRGLDKVVANVKRFGGAPILLGFGISTPEHVRDAIAAGASGAITGSALTSIIERHTTGTHPEPAQVTDLEALTEEIFAFVKDMKAATR

SEQ ID NO: 7688 - protein, 474 aa, Zea mays
MDMALASKASPPPWNATAAEQPIPKRDKAAANDSTYLNPQAHDSVLGIILGGGAGTRLYPLTKKRAKPAVPLGANYRLIDIPVSNCLNSNISKIYVLTQFNSASLNRHLSRAYGSNIGGYKNEGFVEVLAAQQSPDNPNWFQGTADAVRQYLWLFEEHNVMEFLILAGDHLYRMDYEKFIQAHRETNADITVAALPMDEKRATAFGLMKIDEEGRIIEFAEKPKGEQLKAMMVDTTILGLDDVRAKEMPYIASMGIYVFSKDVMLQLLREQFPEANDFGSEVIPGATSIGKRVQAYLYDGYWEDIGTIAAFYNANLGITKKPIPDFSFYDRFAPIYTQPRHLPPSKVLDADVTDSVIGEGCVIKNCKINHSVVGLRSCISEGAIIEDSLLMGADYYETEADKKLLAEKGGIPIGIGKNSCIRRAIIDKNARIGDNVKVFQTDVPTVKNINLDFSLGYYIILDMPFCPLIFNIYF

SEQ ID NO: 7689 - protein, 608 aa, Ustilago maydis
MSQAAHLQQQQIAASQQQGLQAPNSGYMQRAPGASPINRSPSPSARPLNAAPRSPQPHGQAQTYSQQQQQQQQQQQQQQFYQQQQQQQQQQQQQQQQQYTQSGGSTSPNPANEKPADYVYFERSTNGMQKSTIEAATGAKLKLENFYKVYVEQAVERIKRAAELEDRLTNPPDGVHLSDERKARQLAQLGRRESNFLRLRRTRLGLDDFRTVKVIGKGAFGEVRLVQKTDTGKIYAMKTLRKSEMFKKDQLAHVRAERDVLAESNSPWVVQLYYSFQDTAYLYLLMEFLPGGDLMTMLIKYDTFSEDVTRFYMAECVLALEGIHKLGFIHRDIKPDNILIDAKGHIKLSDFGLSTGFHKQHDSAYYQRLFEGTAAQNPAQTGRNSVAVNSINLTLSSKDTIATWKANRRKLAYSTVGTPDYIAPEIFLQQGYGNECDWWSLGAIMFECLCGYPPFCSENAHDTYRKILAWRETLQFPDDIHLSPEAEDMIRRLISAPENRLGRNSASEIKGHAFFAGVDWATIRQIDAPFIPQLKSITDTSYFPTEDYQDVPETPAALMSGSEARTSPCSATRIAGTRATRLSSSGTPRAHFNLPFVCHRKCELNPSS

SEQ ID NO: 7690 - protein, 132 aa, Chlorobium tepidum TLS
MLMKIAKDPMRLFDDIWSGSQMAVAPSFKVDISEDENAYHLDAELPGIAKEQIALNIEDDVLTIKAERTHKEEEKKKNYHRVERTYGSFSRSFNIGEIIDQEHIGATYDNGVLHVTLPKTQPAKKTKEIPIN

SEQ ID NO: 7691 - protein, 647 aa, Glycine max
  misc_feature (14)..(14): Xaa can be any naturally occurring amino acid
  unsure (1)..(647): unsure at all Xaa locations
PPPKTRIGSASLHXGAKDGKLNLVESSHVNQALNLEKEPLPEKHDLDEGITTVKENKDENRGAVFTLLQEVPCSSVSSANKSSITMSVPLGNPCAFKEITPSVKEVIPRDEKTESFVTIELENGTLEINDRKQTNGTSKDSTLENSDALHMKLVQNEKTDGLDCALTIDGMQGNQNYPRHVTVHVVDGNLGTNTQNPSQDMLFRDSMFQPIGGVNGQQNVFTNSAPSNTSESQNNTARSSVHQSFLPYPPFTQHNQDDYQSFLHMSSTFSNLIVSTLMQNPAAHAAASFAATFWPYANPETSANSPRCSQGGFTNRQIGSPPSVAAIAAATVAAATAWWAAHGLLPLCAPLHTSFACSPASVTTVPSMNTGEAPALKAEQEKTTLQNPPLQDQMLDPEYSEAQQAQHSASKSPAAILSDSESGDAKLNTSSKATDHETNKTIPEHLDSNKTKGRKPVDRSSCGSHTASSSDVETDALEKGEKGKEEPETPDANQLAIDFSNRRRSVSNLTDSWKEVSEEGRLAFQALFSREVLPQSFSPPHALKNKNQQMDNANNNKQNIDDKDEDPDSKKCSSNYEAMQKNLPFVENNEGLLTIGLGQGKLKTRRTGFKPYKRCSMEAKENRVGASNNQGEEQGCKRIRLEGETST

SEQ ID NO: 7692 - protein, 239 aa, Thermotoga maritima MSB8
MKGFIAYIPAGFPDLETTRKILIALNELGITGVEIGVPFSDPVADGPVIQLAHSVALRNGVTIKKILEMLSEISVDYDLYLMSYLNPIVNYPEGKEKLLDELKKLGVKGLIIPDLPLREVKNVDIAYPIVPFVAPNTKDEEIDLINSVQAPFVYYISRYGVTGEREDLPFADHIKRVKERIKLPLFVGFGISRHEQVKKVWEIADGVIVGSALVRIMEENPKDEIPRKVVEKVKELLGK

SEQ ID NO: 7693 - protein, 342 aa, Solanum tuberosum
MTRRCSHCSTNGHNSRTCPNRGVKLFGVRLTDGLIRKSASMGNLTHFASGSGGGSTPLNGVVHDSPGDTPDHPAVGGGSADGYASEDFVAGSSSSRERKKGVPWTEEEHRMFLLGLQKLGKGDWRGIARNYVISRTPTQVASHAQKYFIRQSNMSRRKRRSSLFDIVADESGDTPMVSRDFLADDPAQAEMQSNNLLPPTPAVDEECESMGSAASANSIDGEHALPIPESSQYQHPLVYPAYVAPFYPMPYPCWPGYTAEPAIAETHEVLKPIAVHSKSPINVDELVGMSKLSLGESIGDAAKPPSLSLKLVEGSSRQSAFHANPSSGSSGMNSSHNPIHAV

SEQ ID NO: 7694 - protein, 74 aa, Vicia faba var. minor
KDPNKPKRPPSAFFVFMADFREQYKKDHPNNKSVAAVGKACGEEWKSLSEEEKAPYVDRALKKKEEYEITLQAY

SEQ ID NO: 7695 - protein, 294 aa, Bordetella pertussis Tohama I
MMPGNAAPRPVHYRHEQVGDVKIFYREAGDPASPAVLLLHGFAASSYMYRDVIAALADGYRVVAPDLPSFGFTESPARDAYAYTFDNITRTMDRFTEQLKLDRYALMVHDYGAPVGWRLASAHPDRVTALVSQNGNAYEEGLAQGWDAIRRYWASPTAENRAALHGFPTPASIKWQYLEGVPDPSLVAPDGYTLEGLQVSRPGNAEIQLDLLLDYASNVQRYPQFQAYFRDRQPPLLAVWGRNDPYFLPAGAEAWKRDIPAAEVRFYDTGHFALETHGAEIIPAIRAFLDAKVR

SEQ ID NO: 7696 - protein, 284 aa, Escherichia coli O157:H7 EDL933
MIENEFGEVSVDDQLIGDRATQIKTLTNGCICCSRSNELEDALLDLLDNLDKGNIQFDRLVIECTGMADPGPIIQTFFSHEILCQRYLLDGVIALVDAVHADEQMNQFTIAQSQVGYADRILLTKTDVAGEAEKLRERLARINARAPVYTVTHGDIDLGLLFNTNGFMLEENVVSTKPRFHFIADKQNDISSIVVELDYPVDISEVSRVMENLLLESADKLLRYKGMLWIDGEPNRLLFQGVQRLYSADWDRPWGDEKPHSTMVFIGIQLPEEEIRAAFAGLRK

SEQ ID NO: 7697 - protein, 474 aa, Zea mays
  misc_feature (22)..(22): Xaa can be any naturally occurring amino acid
  misc_feature (26)..(43): Xaa can be any naturally occurring amino acid
  unsure (1)..(474): unsure at all Xaa locations
MDMALASKASPPPSNATAAEQXIPKXXXXXXXXXXXXXXXXXXSVLGIILGGGAGTRLYPLTKKRAKPAVPLGANYRLIDIPVSNCLNSNISKIYVLTQFNSASLNRHLSRAYGSNIGGYKNEGFVEVLAAQQSPDNPNWFQGTADAVRQYLWLFEEHNVMEFLILAGDHLYRMDYEKFIQAHRETNADITVAALPMDEKRATAFGLMKIDEEGRIIEFAEKPKGEQLKAMMVDTTILGLDDVRAKEMPYIASMGIYVFSKDVMLQLLREQFPEANDFGSEVIPGATSIGKRVQAYLYDGYWEDIGTIAAFYNANLGITKKPMPDFSFYDRFAPIYTQPRHLPPSKVLDADVTDSVIGEGCVIKNCKINHSVVGLRSCISEGAIIEDSLLMGADYYETEADKKLLAEKGGIPIGIGKNSCIRRAIIDKNARIGDNVKVFQTDVPTVKNINLDFSLGYYIILDMPFCPLIFNIYF

SEQ ID NO: 7698 - protein, 347 aa, Sinorhizobium meliloti
MKAVRLESVGNISVRNVGIPEPGPDDLLVKVEACGICGTDRHLLHGEFPSTPPVTLGHEFCGIVVEAGSAVRDIAPGARITGDPNISCGRCPQCQAGRVNLCRNLRAIGIHRDGGFAEYVLVPRKQAFEIPLTLDPVHGAFCEPLACCLHGVDLSGIKAGSTVAILGGGVIGLLTVQLARLAGATTVILSTRQATKRRLAEEVGATATVDPSAGDVVEAIAGPVGLVPGGVDVVIECAGVAETVKQSTRLAKAGGTVVILGVLPQGEKVEIEPFDILFRELRVLGSFINPFVHRRAADLVATGAIEIDRMISRRISLDEAPDVISNPAAAGEVKVLVIPSAERVAQQ

SEQ ID NO: 7699 - protein, 474 aa, Zea mays
MDMALASKASPPPWNATTAEQLIPKRDKAAANDSTYLNPQAHDSVLGIILGGGAGTRLYPLTKKRAKPAVPLGANYRLIDIPVSNCLNSNISKIYVLTQFNSASLNRHLSRAYGSNIGGYKNEGFVEVLAAQQSPDNPNWFQGTADAVRQYLWLFEEHNVMEFLILAGDHLYRMDYEKFIQAHRETNADITVAALPMDEKRATAFGLMKIDEEGRIIEFAEKPKGEQLKAMMVDTTILGLDDVRAKEMPYIASMGIYVFSKDVMLQLLREQFPEANDFGSEVIPGATSIGKRVQAYLYDGYWEDIGTIAAFYNANLGITKKPMPDFSFYDRFAPIYTQPRHLPPSKVLDADVTDSVIGEGCVIKNCKINHSVVGLRSCISEGAIIEDSLLMGADYYETEADKKLLAEKGGIPIGIGKNSCIRRAIIDKNARIGDNVKVFQTDVPTVKNINLDFSLGYYIILDMPFCPLIFNIYF

SEQ ID NO: 7700 - protein, 467 aa, Sinorhizobium meliloti
MLTATKDLVLAQSDNSWPTHFRASLYLGVPFIGAQLAQLAINTTDVLMVGQLGATQLAAIILATQVFFTIFIFGSGFANAVVPMVAQAQGRGDQVSVRRSVRMGMWVVLLYGVLTAPVLWMAEPILLFAGQKPEVAALAGEYLHIAQWAIFPSLIFMVLRAFLSGLERAGVILYVTLVTLVLNAALCYVLIFGHFGFPELGIFGAAVAALGVALLGAALTIGYIRRQPELHRFELFVRFWRPDWPAFGEVVHLGIPISVTILAEVSLFTVASLLMGTIGTIELAAHGIALQFASIAFMIPLGLAQAGTVRIGLAYGSGDMVGVKRAAIAVLTLGVGFAAVGSTIFALFPHELAGLYLDTRRPDAAEVLAFAGPLIVIAGAFQLVDGLQAIAAGMLRGLKDTTIPMILAMIAYWPIGFFCAWAFAFPLGFGGVGVWFGFVLGLASAALLLNWRFFRLLRRVSAAPAAS

SEQ ID NO: 7701 - protein, 228 aa, Arabidopsis thaliana
MNLKETELCLGLPGGTETVESPAKSGVGNKRGFSETVDLKLNLQSNKQGHVDLNTNGAPKEKTFLKDPSKPPAKAQVVGWPPVRNYRKNVMANQKSGEAEEAMSSGGGTVAFVKVSMDGAPYLRKVDLKMYTSYKDLSDALAKMFSSFTMGSYGAQGMIDFMNESKVMDLLNSSEYVPSYEDKDGDWMLVGDVPWPMFVESCKRLRIMKGSEAIGLAPRAMEKFKNRS

SEQ ID NO: 7702 - protein, 458 aa, Listeria innocua Clip11262
MEEQKEELQRGLKNRHIQLIAIGGAIGTGLFLGAGKSIHLAGPSIMLVYLIIGAILFFVMRALGELLIHNPTTGSFTEFAEQFIGPWAGFITGWTYWFCWIVTGIAEITAVGMYVKFWVPDLPQWIPALGCVLILLLFNLATVKAFGEIEFWFAIIKVVVIIALIVIGFVLVFIGYKHGTSTASFSNLIDYGGFFPNGVAGFLLAFQMATFSFVGIELVGVTAGEADDPERTLPKAINNIPIRILIFYIGALLVLMSIYPWSNIDPDTSPFVSVFTMIGIPAAAGIINFVVLTAAMSSCNSGIFSTSRMLYTLSAEGKAPKKMHHLSSNGVPATALITSTACLLIGVFLNYILPEQVFILVTSIATICFIWVWGIILVAHLRFRHKHPEISAKSKFKMPLSPFMNWVSLIFFAGLLIILGFAADTRIALFVTPVWFLILAIAYQILKASNRKTKIRHN

SEQ ID NO: 7703 - protein, 637 aa, Shewanella sp. MR-7
MNDWSIDAARAGYNVTHWSQGFYGISDQGEVTVSPDPKNPDHKIGLNELAKDMVKAGVALPVLVRFPQILHHRVNSLCQAFDQAIQKYEYQADYLLVYPIKVNQQKTVVEEILASQASKEVPQLGLEAGSKPELMAVLAMAQKASSVIVCNGYKDNEYIRLALIGEKLGHKVYIVLEKLSELKMVLAESKRLGVKPRLGLRARLAFQGKGKWQASGGEKSKFGLSAAQILTVVDQLKENDMLDSLQLLHFHLGSQIANIRDIRQGVSEAARFYCELRELGASINCFDVGGGLAVDYDGTRSQSNNSMNYGLSEYANNIVNVLTDICNEYEQPMPRIISESGRHLTAHHAVLITDVIGTEAYQVEDIQPPAEESPQLLHNMWQSWTELSGRADQRALIEIYHDSQSDLQEAQSLFALGQLSLAERAWAEQANLRVCHEVQGLLSTKNRYHRPIIDELNEKLADKFFVNFSLFQSLPDAWGIDQVFPVLPLSGLDKAPERRAVMLDITCDSDGIVDQYVDGQGIETTLPVPAWSAESPYLMGFFMVGAYQEILGDMHNLFGDTNSAVVSIEENGMTNIESVLAGDTVADVLRYVNLDAVDFMRTYEELVNQHIVEEERAQILEELQVGLKGYTYLEDFS

SEQ ID NO: 7704 - protein, 603 aa, Haemophilus influenzae R2846
MEDIVQTVNVDIAIVGAGGGGLRAAIAAAEANPNLKIALVSKVYPMRSHTVAAEGGAAAVIKEEDSYDKHFQDTVAGGDWLCEQDVVEYFVQHSPVEMTQLERWGCPWSRKADGDVNVRRFGGMKIERTWFAADKTGFHLLHTLFQTSIQYPQIQRFDEHFVLDILVDDGHARGMVAMNMMEGSLVQINANAVVIATGGGCRAFKFNTNGGIVTGDGLSMAYRHGVPLRDMEFVQYHPTGLPNTGILMTEGCRGEGGILVNKDGYRYLQDYGLGPETPIGKPQNKYMELGPRDKVSQAFWQEWKKGNTLKTAKGVDVVHLDLRHLGEKYLHERLPFICELASAYEGVNPVNEPIPVRPVVHYTMGGIEVDFNSETRIKGLFAVGECASSGLHGANRLGSNSLAELVVLGRVAGEYAAQRAVEAQSVNQSAVDAQAKDVVARLEALHKQEGNESWSEIRDEMGTVMEEGCGIYRDQASMQKAVDKIAELKERYKRIRVSDNSSVFNTDVLYTVELGYILDVAQSIANSAIERKESRGAHQRLDYTERDDVNYLKHTLAFYNENGAPRIEYSPVKITKSQPAKRVYGAEAEAQEAAAKAKEQANG

SEQ ID NO: 7705 - protein, 154 aa, Glycine max; identical to SEQ ID NO: 1059

SEQ ID NO: 7706 - protein, 531 aa, Oryza sativa (japonica cultivar-group)
MAMAASPFLILPSLFPKPTILAARIHPSIFRGRHIRCSPNGAAVPESPEPAPRRGRRKSPSPSPPKAKTTRRRTKKNTQESDSEGEEEPPKRRGRRTRKSKQEAEQEAAEKEDEVRAASPGTEDSKRAVQDEDGEAEATGSDSEDGEDSPYDWPPLVCCFGAPRWEFVPTVRVSDRQMHPDIYSTWLHLQWEPPEFARAPGSAASNVAIALTRLGGRAAVLGKVGDDDFGRELVYRMNCERVQTRAIRFDDGAATATARMKVGFRDREDGSGGTRLVAETVKSAAEDSLSKAEINVDVLKEARVFHFNSEVLLTPSMESTLFRAIELSKKFGSKIFFDLNLPLPLWRSRDETKELINKAWNEADIIEVSRDELEFLLDHEYYQYKRANPPQYYLDGFHLTRNWPQYYHYTPEEIAPIWHDGIKLLLVTYGTLRIHYYTPKFHGCVIGTEDALITPYTTDRTGSGDAVVAAAIRKLTSCPEMYEDQDTLERNLRFAVAAGIISQWTIGAVRGFPTESAAQNLKEQVYVPSMW

SEQ ID NO: 7707 - protein, 344 aa, Zea mays
MASASHQSEPLDSAATSDTDAPSDNIPELPCPPCHIVTKPGQLPVEFLEPSAAQKLVIGFDCEGVDLCRNGALCIMQLAFPDAVYLVDAIEGGKELIQACKPALESDHITKVIHDCKRDSEALYFQFGIKQHNVMDTQIAYSLIQEQEQKGKKKTSDDYNYISFVSLLADKRYCGIPYPEKEEVRILLRQDPNFWTIRPLSDMMVRAATDDVRFLLNIYEKMMEKLNKVSLWRLAVRSELYCRCFCLNDNQFADWSPLPPVPDGIEADVYVPEIDILSVLDVPHGKMGRVIGRKGSTIMVVKESCNVEIHIGGAKGPPDRVFIIGSVNEVRKAEAIFRGRMLEF

SEQ ID NO: 7708 - protein, 596 aa, Magnaporthe grisea 70-15
MDAVLRQSKALCPFLKKASPATLRQLSTASAPARPRVSPCGGTISKLQLLAHRCPVMGQAMAVQSAKAGTKLPVGLAKIHTSRSQDARAVDGPVVASRENVPFPPKAASGRSAASSNPAANASPAAGHPGKKFSYERFYESELQKKHKDKSYRYFNNINRLAKEFPRAHMSDKEDKVTVWCANDYLGMGRNPRVLSKMHETLDEYGAGAGGTRNISGHNRHAVELEGTIAKLHAKDSALVFSSCYVANDATLATLGSKMPDCVILSDSLNHASMIQGIRHSGTKKIVFKHNDVADLEAKLASLPLHVPKIIAFESVYSMCGSIGPIEEICDLADKYGAITFLDEVHAVGMYGPHGAGVAEHLDFEAHKAGRPRGTIMDRIDIITGTLGKAYGCVGGYIAGSAKLIDMIRSLAPGFIFTTSLPPATMAGARAAIEYQMEHDGDRRLQQLHTRAVKEALQHRDIPVIPNPSHIIPILVGNAELAKRASDMLLSDYQIYVQSINYPTVPVGQERLRVTPTPGHVKEFRDDLVVAVDAIWTKLGIKRTSEWAAEGGFIGVGEEGSEAQAQPLWTDAQLGIEQAAKEIMALGTAPTGCFTE

SEQ ID NO: 7709 - protein, 556 aa, Oryza sativa
MDSARSWFQKFQPRDKSKSPAVAASHGKDPGKPPIDDAPSSATKQRVAAAKQYIENHYKTQMKSLQDRKERRWMLERKLQDAEVPVEEQNNILKHLEKKETEYMRLQRHKMGVEDFELLTIIGRGAFGEVRLCREKASKNVYAMKKLKKSEMLRRGQVEHVKAERNLLAEVDSAFIVKLYYSFQDEEYLYLIMEYLPGGDMMTLLMRKDTLTEDEARFYIAETVLAIESIHKHSYIHRDIKPDNLLLDRSGHLKLSDFGLCKPLDSSNFPNLNEPDYTSTKGTKPLPDSSSRLSSSALKRTQQEQLSHWQKNRRMLAYSTVGTPDYIAPEVLLKKGYGMECDWWSLGAIMYEMLVGYPPFYSEDPMSTCRKIVNWRSHLKFPEEAKLSPEAKDLISKLLCNVEQRLGTKGAHEIKAHPWFRGLPWERLYQMKAAFIPEVNSELDTQNFEKFEETGAQIQSSSKSGPWRKMLPSKDANFVGYTYKNFEIVNDDEVAGIAELKKKSSKSKRPTIKTLFESMDEDEPVQGSFLNMLPHKEGQPSSHSTIPPEQYQPRHK

SEQ ID NO: 7710 - protein, 57 aa, Glycine max
MADDSTATCIDILLAIILPPLGVFLKYGCKVEFWICLVLTLFGYIPGIIYAVYAITK

SEQ ID NO: 7711 - protein, 1050 aa, Thiobacillus denitrificans ATCC 25259
MRDAGDASGRYEAHQQLALLETSVARLNDIVLITEADHGGAAGPAIVFVNDAFEHITGYRRDEVLGKSVRLLHGPLTDRAEVRRIGEALENQRPVRSELVNYSKHGEPFWLELDVVPVTDANGYYTHCVAVERDVTRRKEADLELARLNRALRVRSACNKALTRATDEGELLHEICRVAVELGGYQTAWVGFAQDAAERSIRPVACAGDGADAFNDSAATWSDEQLIGNGPFGRALRGRQVVIVEDLRNAPDREPWAAAASARGYRSLVVLPLHDAERTYGIFALFGSDVARVASDEMRLLQELTDDLAFGIATLRSRCEQRRTQEAVYRIAAGVSASTGTAFFDELVRNMTAALGAEAGFIARIRADDPGSATTVVAYVEGERIENFEYTLVGTPCEQLAKTATHVIPRRVSELFPCTAHLSKRRAHAYVGHRLVDSRGQAIGQLFVLFSRPLHETAFITSTLQIFASRVAAELERQSADAHIRRQASLLDKAQDAIMVRGLDDAIRYWNKGAERLYGWKADEVTGRSTEMLLYGDPTAFRENTRKVIAHSEWNGEITQLRKDGTALVVEAHWTLLRDENDQPDAILAINTNVTERKAAEHKVHQLAFYDPLTGLPNRELLGDRLQHAMQVRHGQVGALLLIDLDNFKTLNDTLGHAMGDLLLQQIAQRLQTCLRKGDTLARVGGDEFVIVLEGLSASPGDAGSLATRVGEKILASFARPFQLADYVHHCTASIGITLFNDRPTTLDELRKRADLAMYQAKAHGRNALRFFDPAMQAVVAARAELEVDLREALRLGAFELHYQAQVDARGCVSGAEALLRWQHPQRGWIAPASFIPLAEETGLILPLGLWVLDVACAQLVAWSKMPHMARLSLAVNVSARQFRQADFAAQVLAAIERSGADPRRLKLELTESLMLDNLDDTILKMSALKAHGIGFSLDDFGTGYSSLAYLKRLPLDEIKIDQSFVRDVLIDANDASIARSILALGQSLNLEVVAEGVETDAQHAFLAEHGCQAYQGYLFNRPQPARQFEAWGAGHPCPDGGEETGRARL

SEQ ID NO: 7712 - protein, 362 aa, Citrullus lanatus
MQPIPDVNQRIARISAHLHPPKSQMEESSALRRANCRAKGGAPGFKVAILGAAGGIGQPLAMLMKMNPLVSVLHLYDVVNAPGVTADISHMDTGAVVRGFLGQQQLEAALTGMDLIIVPAGVPRKPGMTRDDLFKINAGIVKTLCEGIAKCCPRAIVNLISNPVNSTVPIAAEVFKKAGTYDPKRLLGVTMLDVVRANTFVAEVLGLDPRDVDVPVVGGHAGVTILPLLSQVKPPSSFTQEEISYLTDRIQNGGTEVVEAKAGAGSATLSMAYAAVKFADACLRGLRGDAGVIECAFVSSQVTELPFFASKVRLGRNGIEEVYSLGPLNEYERIGLEKAKKELAGSIEKGVSFIRSHHHHHH

SEQ ID NO: 7713 - protein, 541 aa, Ustilago maydis 521
MAEPQIAYAQDEYGRPFIVVREQGKKTRANGIQAIKNHISAAKTVANILKTSLGPRGLDKILISPDGDIQVTNDGATIMNNMELDHQIAKLLVELSKSQDDEIGDGTTGVVVLAGALLEQSEALLDRGIHPIRIADGFERACNLAVQELEKVADLVEFDKDNIDELMKVAKTCLGSKIVSKASDKFAKIAVDSVLSVADLKRRDVDFELIKVDGKVGGALEDTQLVQGVVIDKDMSHPQMPRVVKDAKIAILTCPFEPPRPKTKHKLDITSVDEYRKLQDYERQKFEEMIKRVKDCGANLVVCQWGFDDEANHLLLQHQLPAVRWVGGPELELIAIATNGRIVPRFEDLSPEKLGRAGIVREVGFGTTRDRMLIIEECANTRAVTVFVRGSNKMIIDEAKRALHDAICVVRNLVVDNRVVYGGGAAEICASVAISKAADEIASLEQYAMRAFASALDAIPLALAENSGYSPIETLAEVKSRQVTEKNPKLGIDCMGAGDNDMKNCRVFDPLVSKRQQLLLATQLVRAVLKIDDVIEQHNIE

SEQ ID NO: 7714 - protein, 498 aa, Datisca glomerata
MVIPEADRHRARARPPVQARVSLRKLLRVSSVACGIQFGWALQLSLLTPYVQELGIPHAWASVIWLCGPLSGLFVQPLVGHMSDRCTSRFGRRRPFIVVGALSITVAVLIIGYSADIGSLIGDRGTVKPGAIATFVVGFWILDVANNMTQGPCRALLADLTGKDHRRTRVANAYFSLFMAVGNVLGYATGSYSGWFKIFPLTLTSACNVNCANLKSAFLLDIVFIAITTYLSISAAQESPLDPTDRSANITEEGPGPSSHTEEAFLWELFGAFRYFSASIWVIFFVTALTWIGWFPFLLFDTDWMGREIYGGKPNEGQNYSTGVRMGALGLMLNSVVLGITSVLMEKLCRYWGAGFVWGVSNILMSLCFLAMLVVTFVAKRIDYIGHKLPPDVIVVAALVIFAILGIPLAITYSVPYALISTRIESLGLGQGLSMGVLNLAIVIPQVVVSLGSGPWDQLFGGGNSPAFAVAAVAAFASGLVAILAIPRSRAQKPRALT

SEQ ID NO: 7715 - protein, 285 aa, Ustilago maydis 521
MSNDRNAQELLKWGLANSGSTGVASFASQSVEQISADIEAGRRPDLADPNLYNAIMGKSEAQMMAEELSVAIDTSRTLPDRMTALDNFEMLIEQIDNANNMTSMKMWSPIISLLSAPEAEIQTAAAWIIGTAVQNNDKAQMAVLDFHPVAALLDLLHSHVDEVRAKAMYALSGLLKHNPAAMHQFDQLDGWNMLNMALVDPNLGLRRKTAFLINALLLQDPNSPTSSTPSSPRSSLRTPYPTHSHPLPPAPTATQTRASTSTLPKNPPPPSSPSPPNSHLPPHTP

SEQ ID NO: 7716 - protein, 522 aa, Ceratopteris richardii
MGNCCGTDGFKHERPLPAHPNRQGEDKTGAPKVISHTKLSSCGEQSVNEKYHLGRELGRGEFGITYLCTDRETDEVLACKSISKGKLRTPIDIEDVRREVDIMRHLPKHPNIVTLEGVYEDENAVHLVMELCEGGELFDRIVARGHYSERAAAAVMRTILEVVQVCHRHGVMHRDLKPENFLFANKKENSPLKAIDFGLSIFFKPGEKFTEIVGSPYYMAPEVLKRSYGPEVDIWSAGVILYILLCGSPPFWAETEQLVAQAILRGNVDFNRDPWPNVSENAKALVRQMLEPDPSKRLTAQQVLDHSWLVNARKAPDVPLGDAVCARLKQFSAMNKLKKRALRVIAELLTGEEVEGIRAMFNMMDVERTGSLTFGQLKAGLYKLGSQLPESEIQQLMEAADVNGNGTLDYGEFVAITVHLQRMDNDECLRKAFNFFDLNGDGFIDRSELHEMLEADLGEVGTDIIDDIIQEVDIDKDGRISYDEFASMMRTGTDWRKVSRNFSRERYASLSIKLMQEGSLKL

SEQ ID NO: 7717 - protein, 474 aa, Zea mays
MDMALASKASPPPSNATTAEQLIPKRDKAAANDSTYLNPQAHDSVLGIILGGGAGTRLYPLTKKRAKPAVPLGANYRLIDIPVSNCLNSNISKIYVLTQFNSASLNRHLSRAYGSNIGGYKNEGFVEVLAAQQSPDNPNWFQGTADAVRQYLWLFEEHNVMEFLILAGDHLYRMDYEKFIQAHRETNADITVAALPMDEKRATAFGLMKIDEEGRIIEFAEKPKGEQLKAMMVDTTILGLDDVRAKEMPYIASMGIYVFSKDVMLQLLREQFPEANDFGSEVIPGATSIGKRVQAYLYDGYWEDIGTIAAFYNANLGITKKPMPDFSFYDRFAPIYTQPRHLPPSKVLDADVTDSVIGEGCVIKNCKINHSVVGLRSCISEGAIIEDSLLMGADYYETEADKKLLAEKGGIPIGIGKNSCIRRAIIDKNARIGDNVKVFQTDVPTVKNINLDFSLGYYIILDMPFCPLIFNIYF

SEQ ID NO: 7718 - protein, 321 aa, Rhodococcus sp. X309
AAAGGKIDATADANKLALDVIGLAGFGYDFASFDGDEHPFVGAMSRVLEHVNRTSNDIPFLRKLRGNGADLQYEKDIAFVRTVVDDVITERQAKPGEHQDDLLDLMLNNIDDETGEKLDPVNIRNQVLTFLVAGNETTAGAIAFALYFLSRHPEIADAARAEVADITGGETPAFEDVARMRYLRRVVDETLRLWPSAPGYFRKVRTDTTLGGRYAMPKGSWVFVLLPQLHRDPVWGENPDSFDPDRFKPENVKKRPAHAYRPFGTGPRSCIGRQFALHEAVLSLATILQRYSFQSDPEYKLDVREALTLKPVGLELSLQRL

SEQ ID NO: 7719 - protein, 345 aa, Escherichia coli O157:H7 EDL933
MESRIMSTMNVLICQQPKELVWKQREIPIPGDNEALIKIKSVGICGTDIHAWGGNQPFFSYPRVLGHEICGEIVGLGKNIADLKNGQQVAVIPYVACQQCPACKSGRTNCCEKISVIGVHQDGGFSEYLSVPVANILPADGIDPQAAALIEPFAISAHAVRRAAIAPGEQVLVVGAGPIGLGAAAIAKADGAQVVVADTSPARREHVATRLELPVLDPSAEDFDAQLRAQFGGSLAQKVIDATGNQHAMNNTVNLIRHGGTVVFVGLFKGELQFSDPEFHKKETTMMGSRNATPEDFAKVGRLMAEGKITAGMMLTHRYPFATLAETYERDVINNRELIKGVITF

SEQ ID NO: 7720 - protein, 589 aa, Pseudomonas syringae pv. syringae B728a
MISRITRRHRQALRLAASFIAPYRWQALGALLALVITAGITLSIGQGIKLMVDQGFMTRSPQLLERSIGFFMLLTVGLAVGTFARFYLVSWIGERVVADLRKKVFDHLIELHPGFYENNRSSEIQSRLTADTTLLQSVIGSSLSMFLRNALMVIGGIVLLFITNPKLTSIVVVALPLIIAPILMFGRRVRNLSRESQDRVANVGSYVAEALGQIKTVQAYNHQQQDKQRFSHTVEQAFETARKRILQRSWLITLVIVLVLGAVAVMLWVGGMDVISGRISSGELAAFVFYALMVGMAFGTLSEVIGDLQRAAGAAERIGELLQARSEISVPTTDLQSLPPRISGRLALENVTFAYPSRPERNALDNLTLSIEPGETLALVGPSGAGKSTILDLLLRFYDPIQGRILIEGVPIAQLDHHDLRRCFALVSQSPALFFGTVEDNIRYGNATASLEQVQAAARIAHAHEFILDMADGYRTHLGEGGVGLSGGQRQRLAIARALLVDAPILLLDEATSALDAQSEHLIQQALPSLMQGRTTLVIAHRLATVQNADRIAVMDQGRLVAVGTHQQLIASNPLYARLAALQFNAGVE

SEQ ID NO: 7721 - protein, 486 aa, Listeria innocua Clip11262
MKKETHGEIRRDLKTRHLSMIAIGGSIGTGLFLASGNAIHTAGPGGALVAYIAIGIMVYFLMTSLGEMATYMPVSGSFSTYASRFVDPAFGFALGWNYWFNWAITLAVDISTAAIIVQFWLPNTPAWLWSAIFLLLIFGLNALSVKAYGESEYWFSIIKVATVIIFLIVGVLTIVGILGGEVIGFSNFTAGDAPFKGGFFAILGTFLIAGFSFQGTEMVGIAAGESATPEKSVPKAIKQVFWRILLFYIFAIFIIGMIIPYTNPNLLSAEATDVAISPFTLVFEKAGLAFAASVMNAVILTSVLSAGNSGLYASTRMLWAMARDKKAPKFLGKVNRRGIPMAALIVTTIVGAMTFITTLTENGTVIYTWLLSASGLTGFIAWVGIAISHYRFRKAFIKQGHDLNELKYKAKFFPFGPILALILCILVIVGQDYAAFLKPEFTNPAWWQKIGISYIGLPIFLIFWLSFKFTNKTKVIPLEDCKFDQK

SEQ ID NO: 7722 - protein, 362 aa, Oryza sativa
  misc_feature (116)..(116): Xaa can be any naturally occurring amino acid
  misc_feature (225)..(225): Xaa can be any naturally occurring amino acid
  unsure (1)..(362): unsure at all Xaa locations
LLPVGGAAAVAVPRRLRSGEASSTSLSGPVSDGARLVRRMQLRPAPLLGSSTCALPSLRGKRLIRTPAASSSSSSLDSTGEAKPVGFAERYPALVTGFFFFMWYAYSPERTLEFTXQIFDYFPYPYFVSVSHLLVGVLYCLVGWSFGLPKRAPINSTVLKLLFPVAVCHAIGHVTSTVSFAAVAVSFAHTIKALEPFFNAAASQFILGQQVPLTLWLSLAPVVIXTDMDSTDLYAYISIIALLVCIPPAIIIEGPQLVQHGFEDAIAKVGLAKLVSNLLVVGLFYHLYNQVATNTLERVTPLTHAVGNVLKRVFVIGFSIIAFGNKITTQTGIGTCIAIAGVALYSYIKAKIEEEKTQMKSA

SEQ ID NO: 7723 - protein, 253 aa, Listeria innocua Clip11262
MSAYPKFDVILKALNLSSVGVIITDPEQKNNPIIFVNTGFENITGYTKEEAIGSNCHFLQGDDTDKEEVAKIRHAINEKSTANVLLKNYRKNGTSFMNELTIEPIYDDNDHLYFVGIQKDVTTEHNYQLELEKSLWEIEKLSTPIVPIKENICVLPLIGSLTHDRFQHMSDYVSEYMDNGKEDYLIMDLSGLADFNEDAVMNLVKFHGFMKLTGVELIITGISPKFAMTLMRYQENLSSLTTYSTIKEALQFY

SEQ ID NO: 7724 - protein, 387 aa, Rhizopus microsporus var. oligosporus
IGQQFWETISQEHGIDTNGNYIGDNDLQLERINVFYNEGSEGKYVPRAVLVDLEPATMDGIRNSAYGKIYRPDNFVNAQSGAGNSWAKGYYTEGAELVESIMDVVRKEAENTDCLQGFQLAHSLGGGTGSGLGSLLLSKIREEYPDRILSTYSVVPSPKVSDTVVEPYNAVLSVHQLVENCDATYCIDNEALYDICFRTLKLTNPDYPDLNQLVSAVMSGVSTSLRFPGQLNSDLRKLCVNMVPFPRLHFFMVGFAPLTAFGSQQYRNLSVPELTAQMFDARNMMAASDPRHGRYLTAGTIFRGRLSTKEVENQMLAVQQKNSSYFVEWIPNSVKTSLCDIPPVGLKMSGTFIGNSTAIQELFKRVNEQFTAMFRRKAFLHWYTGEG

SEQ ID NO: 7725 - protein, 353 aa, Frankia sp. CcI3
MSYQAEYIWIDGTEPEPLMRSKTRIIRDGKEPEIWGFDGSSTNQAPGSNSDCVLRPVFVTPDPLRGGDNLLVLCEVELTDFTPHPTNTRAAARTVAEKYADMTPMFGIEQEYTFFKDGRPYGWPEVGYPAPQGPYYCGVGGSKMPGRQIVERHAQACLDAGLAIEGTNAEVMMGQWEFQIGVLPAPAIGDQIWLGRWLLHRIAEDYGVEVSFAAKPIPGDWNGAGAHTNFSTRQTMEGWDAIVACCEALGTRVLEHVTHYGHGIQDRLTGKHETAPWNKFSWGASDRGASIRIPWAVEKAKKGWLEDRRPNANMDPYLVSALMIDTCCSALAGDKPTLFVPSQTTPTPAEATV

SEQ ID NO: 7726 - protein, 387 aa, Spiromyces minutus
VGGKFWETISAEHGIQADGQYTGTDSKQIERIDVYYNEAKQGKYVPRAVLVDLEPGTMDVIRNGTLGKLFRPDNFVFGQSGAGNNWAKGHYTEGAELVDSVLDVVRKEAENSDSLQGFQITHSLGGGTGSGMGTLLISKIREEYPDRMMCTFSVVPSVKVSDTVVEPYNATLSVHQLVENSDMTFCIDNQALYDICYNTLKLPEPGYDDLNGLVSKVMSGVTTSLRFPGQLNSDLRKTAVNLVPFPRLHFFMVGFAPLGDAKSDSFKNVTVAELTQQMFDSKNMMAASDPRHGRYLAVAAIYRGKVSTNEIDKTMLNVQNKNSSYFVEWIPNNVKTAVCDVPPIGLDMSATFIGNSTSIQELFNRVNEQFQLMFRRKAFLHWYTEEG

SEQ ID NO: 7727 - protein, 387 aa, Spiromyces minutus
IGHKFWETISAEHGIDGQGNYVGDSDLQLERINVYYNEAAAGKYVPRAVLVDLEPGTMDTIRSSSLGQLFRPDNMVFGRNGAGNNWAKGHYTEGAELVDSVLDVVRKEVENCDCLQGFQITHSLGGGTGSGMGTLLISKIREEYPDRMMCTFSVVPSPKVSDTVVEPYNATLSVHQLVENSDMTFCIDNEALYDICFRTLKLTNPTYGDLNHLVSYVMSGTTTSLRFPGQLNSDLRKLAVNMVPSPRLHFFMVGFAPLTPRGSQEFRALSVPELTQQMFDAKNMMAASDPRHGRYLTVAAMFRGRMSMREVDDQMINVQNKNSSYFVEWIPNNIKTSLCDIPPKDLKMAVTFLGNSTAIQELFKRVNEQFTAMFRRKAFLHWYTGEG

SEQ ID NO: 7728 - protein, 687 aa, Neurospora crassa
MLRQSIIAASHCPNAPVAGITIPPTRAATRSLVRTRTSRTAWSHATTAPGPSSGPFEPLTPPSPSKLGAPYPARSYTRTRRWSRRLLILSSLIGVAYLTDKYVYASGLARSLRTFGVGLVVAADYKLNFRPEPLSIPWIGIPEGIPELHRRNAERLSDLLRHNGGLYLKIGQAIAMQSAVLPPEFQAMFSRMFDDAPQDSWEEVEQVIREDFGGRSVEEVFGVSFSGAEGRGVMERTARASASVAQVHWARLPDGREVAIKIQKPEIERQIGWDLWAFKVVTWVYTWWFDLPLYSLVPFISERLRLETDFENEAKNSEIMRQLVENEPSLRGRVYIPPVYPELSSKRVLTTEWIEGIRLWDKDAMTRPWLDGYGKGSAGVHGAQLDPPDMPAIRRELRKNTQGYTFMIKPERTEWKGRRGKGGLGLSTKDVMTTMVDLFSAQIFKWGVVHCDPHPGNVFIRRLPNGRAELVLIDHGLYVYMSDKFRHEYGEFWKALMTFDNNKIKEITDEWGIKAVDLFASATLLRPYEGGDDGGFQAKLMKHLDGNKTASERSYEMQARMKQGIRDVLADEDKWPKELIFIGRNMRIVQGNNQYLGSPVNRIKMMGEWASRSSFQDPNLPLGQRLVNYWHHFLFKCVLALTDVAFYFFRVRQLLHRGGGMEDELEARMRDVAKEFGVELQHNVFEG

SEQ ID NO: 7729 - protein, 387 aa, Smittium culisetae
IGVKFWETISAEHGIQNNGVYAGGNDLQLDRIDVYYNEAAQGKYVPRAVLVDLEPGVMEAVRSGPFGQLFRPDNFVFGQNGAGNNWAKGHYTEGAELVDQVLDVVRKEAENSDSLQGFQITHSLGGGTGAGMGTLLISRIREEYPDRMMSTFSVVPSPKVSDTVVEPYNATLSVHQLVENSDMTFCIDNEALYDICFKTLKLKDPGYDDLNALVSMVMSGVTTSLRFPGQLNSDLRKTAVNLVPFPRLHFFMVGFAPLGDTKNASFRNITVPELTQQLFDSRNMMAASDPRHGRYLAVAAMFRGRVSTNEVEHQMLQVQNKNASMFVEWIPNNVKTAVCDIPPVGMSMAATFVGNSTAIQELFQRVNEQFSLMFRRKAFLHWYTDEG

SEQ ID NO: 7730 - protein, 387 aa, Syncephalis depressa
IGAKFWEVISEEHRINGDGAYFGDNDQQLERITVYYNEANGGKYVPRAVLVDLEPGTMDTIRQGPCGKLFRPDNFVFGQSGAGNNWAKGHYTEGAELVDQVLDIARKEAEGCDSLQGFQFTHSLGGGTGSGMGTLLISKIREEFPDRMMCTFSVLPSPKVSDTVVEPYNATLSVHQLVENSDMTFCIDNEALYDICFKTLKLTSPTYGDLNHLVSVVMSGVTTCLRFPGQLNSDLRKTAVNLVPFPRLHFFMVGFAPLTSRGSQGYRALSVPELTQQMFSADNMMAASDPRHGRYLAVAAIFRGRISMKEVDEQMLLIQNKNSSYFVEWIPNNVKTAVCDIPPTGLKMSSTFIGNSTAIQEMFKRVNDQFTAMFKRKAFLHWYTGEG

SEQ ID NO: 7731 - protein, 387 aa, UMBELOPSIS RAMANNIANA
IGQKFWETISTEHGIGTDGRYAGDNDLQLERINVYYNEGHNGQYVPRAVLVDLEPATMDSIRASPHGKLFRPDNFIFAQSGAGNSWAKGYYTEGAELVESILDVVRKEAEHTDCLQGFQLCHSLGGGTGSGLGSLLLSKIREEYPDRMLCTYSVVPSPKVSDTVVEPYNAVLSVHQLVENCDATFCIDNEALYDICFRTLKLTNPGYGELNQLVSAVMSGVSTSLRFPGQLNSDLRKLCVNMVPFPRLHFFMVGFAPLNSFGSQQYRNMSVSELTAQMFDARNMMAASDPRHGRYLTVATIFRGRLSTKEVENQMLAVQQKNSSYFVEWIPNSVKTSLCDIPPVGLKMSGTFIGNSTAIQELFKRVNEQFTAMFRRKAFLHWYTGEG

SEQ ID NO: 7732 - protein, 648 aa, Capsicum annuum
MFRSWGDDSQHIFGAASGVTDTADDENVTVSYPEGMPSYIAPLDVYKTARSMGPTAQVNLQYNLSWVFSVDPGFSYLVRLHFCEITRNISKVNQRVFVIFMNNQTAEPAADVIAWAGSNGVPFHKDYVVSVPSGASQQDLWLALHPNVASKSNWYDAILNGIEIFKVSDTNGNLAGPNPVPVAEPDHIDPLPSKKGQSKNNTSAIGGGIGGGIAAAILIGLIVCLVTRLRKRGKVQSPSDGPSGWLPLSLYGNSHTSGSAKTNTTGSYASSLPSNLCRHFSFAEIKAATNNFDEALLLGVGGFGKVYQGEIDGGTKVAIKRGNPLSEQGVHEFQTEIEMLSKLRHRHLVSLIGYCEENCEMILVYDYMAHGTLREHLYKTQKPPLPWKQRLEICIGAARGLHYLHTGAKHTIIHRDVKTTNILLDEKWVAKVSDFGLSKTGPTLDHTHVSTVVKGSFGYLDPEYFRRQQLTDKSDVYSFGVVLFEILCARPALNPTLPKEQVSLAEWAFHCYKKGTFDQIIDPYLNGKLAPECLKKFTETAVKCVSDVGADRPSMGDVLWNLEFALQLQESVEECCKGFGKMDIEEGFDVTCKGKKDLNAFPGYDESMTDSRSSGISMSIGGHSLASENSDGLTPSAVFSQIMNPKGR

SEQ ID NO: 7733 - protein, 399 aa, Chlorobium tepidum TLS
MFLSRPLVRIASAADRFLHGETEVKIPVKHDDEIGRLARAFNYLSEEIVRLTRKEEWLREVLSSIREAIIVTNASGEIVLANPAASRLFMIEAARKRSIPVTNIEDAAMRELFERVQKRQSGIYNEELTAMTSKGKRTLKVTAVPVMRRGALFDGTVLVINDVTRLRNLERTRRDFVSSVSHELRTPLASIKGYTETLLEGAMNDPENATAFLNIIHQEAEQLTALVNDVLDLSRIESGKIAYSFEPVDVKPQLEKTAALFEPAAARKGVRIELNAPEGLPAVLADRSYFDIVVRNLIDNAIKYVDAESGRVRVSAYATGDSVSIEVADNGIGIPQADLDRIFERFYRVDKARSRELGGTGLGLSIVKHIVLAHKGKVEVRSRINRGTTFTVTLPVAGA

SEQ ID NO: 7734 - protein, 482 aa, Arabidopsis thaliana
MDVSKVTTSDGGGDSMETKPSPQPQPAAILSSNAPPPFLSKTYDMVDDHNTDSIVSWSANNNSFIVWKPPEFARDLLPKNFKHNNFSSFVRQLNTYGFRKVDPDRWEFANEGFLRGQKHLLQSITRRKPAHGQGQGHQRSQHSNGQNSSVSACVEVGKFGLEEEVERLKRDKNVLMQELVRLRQQQQSTDNQLQTMVQRLQGMENRQQQLMSFLAKAVQSPHFLSQFLQQQNQQNESNRRISDTSKKRRFKRDGIVRNNDSATPDGQIVKYQPPMHEQAKAMFKQLMKMEPYKTGDDGFLLGNGTSTTEGTEMETSSNQVSGITLKEMPTASEIQSSSPIETTPENVSAASEATENCIPSPDDLTLPDFTHMLPENNSEKPPESFMEPNLGGSSPLLDPDLLIDDSLSFDIDDFPMDSDIDPVDYGLLERLLMSSPVPDNMDSTPVDNETEQEQNGWDKTKHMDNLTQQMGLLSPETLDLSR

SEQ ID NO: 7735 - protein, 364 aa, Vibrio vulnificus CMCP6
MNIQALPMHRFLDYEGNVQSPLPSWASEERLVQFYRDMLITRAYDNKAVALQRTGKLGTYPSHLGSEAFGVGIGHALKPSDVFIPYYRDMPAMWVRGIGMEKNLQYWGGDERGSDFCPEESHLRCSDLPFCVPIATQCTHAVGVASALKIQGNHDAALVTCGDGATSKGDFLESINCAGVWHLPLVFVVNNNQWAISVPRQLQCAADLLSEKAKGAGIPGITVDGNDVVAVYDAVNNALDRARKGKGATLIEAISYRLSDHTTADDASRYRSADELKQAWQYEPIKRLQAYLTAQGLWNEELEQQWLAHCKQQVEQAVAHYLSLPPQAPESAFDYLYASLPVELHAQRDMLINKAMRMQGGKHG

SEQ ID NO: 7736 - protein, 608 aa, Arabidopsis thaliana
METNSSGEDLVIKTRKPYTITKQRERWTEEEHNRFIEALRLYGRAWQKIEEHVATKTAVQIRSHAQKFFSKVEKEAEAKGVAMGQALDIAIPPPRPKRKPNNPYPRKTGSGTILMSKTGVNDGKESLGSEKVSHPEMANEDRQQSKPEEKTLQEDNCSDCFTHQYLSAASSMNKSCIETSNASTFREFLPSREEGSQNNRVRKESNSDLNAKSLENGNEQGPQTYPMHIPVLVPLGSSITSSLSHPPSEPDSHPHTVAGDYQSFPNHIMSTLLQTPALYTAATFASSFWPPDSSGGSPVPGNSPPNLAAMAAATVAAASAWWAANGLLPLCAPLSSGGFTSHPPSTFGPSCDVEYTKASTLQHGSVQSREQEHSEASKARSSLDSEDVENKSKPVCHEQPSATPESDAKGSDGAGDRKQVDRSSCGSNTPSSSDDVEADASERQEDGTNGEVKETNEDTNKPQTSESNARRSRISSNITDPWKSVSDEGRIAFQALFSREVLPQSFTYREEPREEDHHHQEQRYPMALDLNFTAQLTPVDDQEEKRNTGFLGIGLDASKLMSRGRTGFKPYKRCSMEAKESRILNNNPIIHVEQKDPKRMRLETQAST

SEQ ID NO: 7737 - protein, 205 aa, Xanthomonas oryzae pv. oryzae KACC10331
MNQTLYDIPVTRIEGGPATLADYRGKVLLVVNVASKCGLTPQYEGLEALYRDKRAQGLEVLAFPANDFNGQEPGSEAEIAQFCRLTYDVTFPMFAKIAVTGEQAHPLYQALTSTHPHTTGDGPMREKLAGYGIAPNPRARRVVELRKIPDRPRRQDHRPLRPGYPRRRCTPASGNRHGVGGLNLAILLGVSSACIAGEIALRCLS

SEQ ID NO: 7738 - protein, 457 aa, Panicum miliaceum
MASAAFALTSPAAPAIAARSKVLGWGKNQGRNGCRVGITRKNFGRVLMALAVDVSRFEGVPMAPPDPILGVSEAFKADKNDLKLNLGVGAYRTEELQPYVLNVVKKAENLMLEKGENKEYLPIEGLAAFNKATAELLLGADNPVIKQGLVATLQSLSGTGSLRLAAAFIQRYFPEAKVLISSPTWGNHKNIFNDARVPWSEYRYYDPKTVGLDFEGMIADIEAAPEGSFVLLHGCAHNPTGIDPTPEQWEKIADVIQEKKHMPFFDVAYQGFASGSLDEDAFSVRLFVKRGMEVFVAQSYSKNLGLYAERIGAINVVCSAPEVADRVKSQLKRLARPMYSNPPIHGARIVANIVGDPTMFGEWKQEMEQMAGRIKNVRQKLYDSLSAKDKSGKDWSFILRQIGMFSYTGLNKAQSDNMTDKWHVYMTKDGRISLAGLSLAKCDYLADAIIDSFHNVS

SEQ ID NO: 7739 - protein, 659 aa, Neisseria gonorrhoeae FA 1090
MSQLANVIRFLSADAVQKANSGHPGAPMGMAEMAETLWTKFLNHNPANPKFYNRDRFVLSNGHASMLLYSLLHLTGYNLSIEDLKNFRQLHSKTPGHPEYGYTDGVETTTGPLGQGIANAVGMALAEKILAAEFNKDGLNIVDHYTYVFMGDGCLMEGVSHEACSLAGTLGLGKLIVLYDDNNISIDGKVDGWFTENIPQRFESYGWHVVPNVNGHDTAAIQTAIEAARAETGKPSIICCKTLIGKGSANKEGSHKTHGAPLGADEIEATRKHLGWAYPAFEIPQEIYDAWNAKEKGAKLEAGWNELFAQYQAKYPAEAAEFVRRMDKKLPENFDEYVQTALKEVCAKAETVATRKASQNSIEILAKELPELVGGSADLTPSNLTDWSNSVSVTRDKGGNYIHYGVREFGMGAIMNGLVLHGGVKPFGATFLMFSEYERNALRMAALMKINPVFVFTHDSIGLGEDGPTHQPIEQTATLRLIPNMDVWRPCDTAESLVAWAEAAKAEDHPSCLIFSRQNLKFQARSEQQLNDIKRGAYVISEAQGNAQAVIIATGSEVGLAVEAQKVLAGQGIAVRVVSMPSTSVFDRQDAAYQAAVLPEGLPRIAVEAGHTNGWYKYVGLNGAVVGINRFGESAPADLLFKAFGFTVDNVVDTVKSVL

SEQ ID NO: 7740 - protein, 557 aa, Ralstonia solanacearum
MRPIISTPAGTSSLAIPDTPGADEAQRADPFQPASRPRSRHPQFERLPSPPVRTRSQELRAARLRRCASDVSATPEARPRLVVVSNRLIDPQRPAAGGLAVALGDMMRDTDGLWFGWSGKTVDEPDTACVRTEPFGRTTLAQVDLGRTDYEGYYAGFSNSVLWPIFHERVKWADLNPAYFKAYEAVNRILASHLRPMLRDSDILWVHDYHLIPFAQALRALGCTQRMGFFNHIPLPSPDVIRRIPQHRQLMRALASYDLVGMQSPRDVLNLQRYWDAENIAAQSERRHDSVHAFPIGIDVESLRALVPSPASQAVIDEVRGAAGRCVLMIGVDRLDYSKGIPTRLKAFRQLLQTHARMRSKVTLVQIAAPTRQSIPAYARLRDKTEQLVREINRRFGTGDWTPVMYFSESVDRTALPQLYRMSRVGVVTPVADGMNLVAKEYVAAQAARDPGVLVLSRGAGAASQLRDALLVPSKNRAATADAYAQALSMPLEERKARHAGLMRNIETEDLRWWRDNYLKALACAPWPAGPEGAEDTRPDAGGASVSGASDGGLTQA

SEQ ID NO: 7741 - protein, 273 aa, Lactobacillus gasseri
MKQLTLNNDVKIPIFGFGTYEISPDQTKQAVLSAFEEGYRLIDTAQYYQNEQQVGEAVKASGLNRDEVFITTKTMTDGYEDTKIGLDESLRRIGLDYFDLVLIHWPMGHDIDTWHALEAAYKAGKTRAIGISNFNSRQTLDLIHQSSVRPMVDQIETHLFLQQWKMHEFLEKENIVHESYSPLGNGQQNLISNPVLKEISEKYGKSPIQVILRYLVQNDVVTIPRSTNPAHIKSNIDIFDFELDNDDLKRLRVLDERKPIDGWPAEMREDEDY

SEQ ID NO: 7742 - protein, 326 aa, Mesorhizobium loti MAFF303099
MKAVQFSRFGGPEVLEIVELPAPVPQAGEVLVRVHAAGINFFEVLMRADRYAVTPQLPMFPGVEVAGIVEAVGEGVDAAFLGRRVAAPLFASQRPYGGYAEQVTISADLTVPLPDDVSFEAATALMVQGLTALHLLRQSPPEGRTVLVPAAAGGVGSLLVQLAKAKGAAKVIAAAGGAGKIELALSLGADAAVDYIGSDWPARVRALTGGEGADIIYDTVGGALTALSLQALAPGGELVFAALGRYGLEPSDLEAMIGRNQSLRGFALLPLLSPQVLRASLSELFQLAASGRLRVAIGGRFPLGQAGEAHRLLDERRSTGKVVLVP

SEQ ID NO: 7743 - protein, 198 aa, Bradyrhizobium genosp. alpha bv. genistearum
PTPNLRGKTQIKEFASFPTLEQLPLWGFDGSSTQQAEGHSSDCVLKPVAVFPDGARTNGVLVMCEVMMPDGKTPHASNKRATILDDSGAWFGFEQEYFFYKDGRPLGFPTSGYPAPQGPYYTGVGFSNVGDVARKIVEEHLDLCLAAGINHEGINAEVAKGQWEFQIFGKGSKKAADEMWMARYLMLRLTEKYGIDIE

SEQ ID NO: 7744 - protein, 607 aa, Sinorhizobium meliloti 1021
MRGRDYLNVKDRKEREVDNETIAGILRRVIAENGRDHIGGYAFAIACLMVVAATTAFTAWISETVINEAFAHKRGDVVLLVCFSIFAAFVLRGLATYGQAVALSKIGNSIVASYKRRLYTHLMALSIGFFQEKRSAHLTAKINQNISGIRDVLNMTVTSVARDVLTLVGLVGVMISKDWLLSLITFVGAPPLLLGLRYISRRLRLATREAVEANSRVLGAMQETIQGISIVKAFTMEDELGRKVEGIIKGAENRANRIARLSERTAPLTETFAGLAISGVLAYAAFRTIYSNVAPGALFAFVTALLLAYDPVRRLARLQVSLERAAVNARMLYEILDTVPHQRDLPGARQLAFSEATVEFRDVRFSYGNGEEVLKGVSFLAEGGKTTALVGPSGAGKSTIISLIPRFYDPQSGVILIDGQDIAAVTKQSLRNGLAYVSQQAYLFEGSIRDNIRYGRPEATDAEVEEAARLAYAHDFILAQPQGYDTPVGEQGMTLSGGQRQRLSIARALVRNAPILLLDEATSALDTESEAAVQKALDQAMSGRTVIVIAHRLSTVVNADKIVVMNEGLVVEEGTHEELARRPDGVYARLHNIQGGFLELTVGAAAT

SEQ ID NO: 7745 - protein, 204 aa, Glycine max
  misc_feature (27)..(27): Xaa can be any naturally occurring amino acid
  misc_feature (134)..(134): Xaa can be any naturally occurring amino acid
  misc_feature (146)..(146): Xaa can be any naturally occurring amino acid
  unsure (1)..(204): unsure at all Xaa locations
LIAVVVAVTVEGSDGVKLRTRVFKPQXEADGNLGIVLLHPYSILGGCQALLNGYTAFTFDMRGVAKSTGFSQVKDVVAVCNCLSNTFSLPRILLLGSSAGAPIAGSAVDQIEQVIGYVSIGYPLGMTASILFGXHHKAILQSPKPXIMGTQDGFTSVKQLRNKLNSAAGRVETHLIDGVGHFQMEGPGYDAEMVDLIIKFIASL

SEQ ID NO: 7746 - protein, 515 aa, Shewanella sp. MR-7
MTTPADAPKWPRQIPYIIASEACERFSFYGMRNILTPFLMTALLLSIPEDLRGAVAKDVFHSFVIGVYFFPLLGGWIADRFFGKYNTILWLSLLYCVGHAFLAIFEHSVQGFYTGLFLIALGSGGIKPLVSSFMGDQFDQSNKSLAQKAFDMFYFTINFGSFFASLSMPLLLKNFGAAVAFGIPGVLMFIATVFFWLGRKRYVHMPPEPKDPHGFLPVIRSALLTKIEGKTNIGLVLALIGGVSAAYALVNIPTLGIVAGLCSAMVLLMGFVGLGASLQLERARGIHPDAAVDGVRSVLRILVLFALVTPFWSLFDQKASTWILQANDMVKPSWFEPAMMQALNPLLVMLLIPFNNFVLYPAIERMGVKLTALRKMGAGIAITGLSWIVVGTIQLMMDGGSALSIFWQILPYALLTFGEVLVSATGLEFAYSQAPKAMKGTIMSFWTLSVTVGNLWVLLANVSVKSPAVTEQIVQTGMSVTAFQMFFFAGFAILAAVIFALYARSYQMQDHYRQV

SEQ ID NO: 7747 - protein, 253 aa, Oryza sativa
MGFLEDFQASVEALPAMLQRNYSLMRELDKSLQGVQTGNEQRCQQEIEDIKHGLESGSITYDPAKLKFSDEAIEEQKHCVRIADEKVALASQTYDLVDAHIQQLDQFMRKLEELRQEKEAATTAAAAAAAAAASVATGTPVAATVTASAGTSTADNTPKGGRSSERGRGGRKKTAKVPTEQPAPAIDLELPVDPNEPTYCLCNQVSYGEMVACDNNDCKIEWYHFGCVGVKEHPKGKWYCPSCIGFQKKRKGK

SEQ ID NO: 7748 - protein, 452 aa, Ashbya gossypii ATCC 10895
MSTLAESIAKKARVAGNVLKTLSNEQRTGVLRRIHDGLLAKKEDIRKANEADLETAAQNNLAPALVQRLNLFKGDKFEAMLQGILDVAALEDPVGKLQMVRELDEGLTLYKVTAPVGVMLIIFESRPEVIANISALCIKSGNAGILKGGKETVNTFRELAAVINLVLAESEPETGVPVHAVQLVESRSEVSDLLQQDEYIDLVVPRGSNALVKQIKASTKIPVLGHADGICSIYLDADADLAKAKRIVLDSKTNYCAACNAAESLLINPRCSGWEEVLAHLIIAGNVKLHVTSDVKEAFFAYAGDDAALKGNVVDAEEGDFSREFLSLDIAVKFIDSVQEAVIHINEHSSKHTDAIVTECKQTADFFLKGIDSAGVYWNASTRFADGFRYGFGTEVGISTSKIHARGPVGLDGLVTYQYQVRGTGQVASDYIGAGGDRAFVHKDLDPKNVAF

SEQ ID NO: 7749 - protein, 608 aa, Frankia sp. CcI3
MGQAHITKHIFVTGGVASSLGKGLTASSLGRLLKARGLRVTMQKLDPYLNVDPGTMNPFQHGEVFVTDDGAETDLDIGHYERFLDVSLDGSANVTTGQVYSAVIARERRGGYLGQTVQVVPHITDEIKDRIRRLADDSVDVVITEVGGTVGDIESLPYLEAIRQVRHEVGRDNALTVHVSLVPYLAPSGELKTKPTQHSVAALRSIGLQPDAVVCRSDRPLPDSLKKKIAMMCDVDDEAVVGAPDASSIYDIPRVLHREGLDAYVVRRLGLSFRDVDWTEWDTLLRRVHHPANTATIAIVGKYVDLPDAYLSVTEALRAGAFATDTRVDLRWVTSDECSSPDATATLLDGIDGVIVPGGFGVRGIEGKLTALRHARENGIPTLGICLGLQCMVIEAARSLAGLEAANSTEFVPETPHPVISTMADQHEVVAGTRDMGGTMRLGLYSCVLAPGTLAQREYGAAEVAERHRHRYEVNNDYRHRLAAAGLVFSGTSPDGRLVEVVELPADVHPYYVGTQAHPEFRSRPTRAHPLFRGLVAAAVAHADRRRGMLPVDLPSEDAPTPENGVPENGAAQTRGVTAGRSGGSIRRGASASRPSVSSNGTAALVSP

SEQ ID NO: 7750 - protein, 573 aa, Neurospora crassa
MSNPPHGGVLKDLIARDLPRHAELEAEAETLPALLLSERQLCDLELILNGGFSPLEGFMNQEDYNDVVKENRLASGLLFSMPITLDVSEETISELGLKAGARITLRDFRDDRNLAILTVDDVYKPDKALEAKEVFGGDEEHPAVKFLYETAKEYYVGGKLEAVNKLQHYDFVDLRYSPAEIRTHFDKLGWSRVVAFQTRNPMHRAHRELTVRAARSHHANVLIHPVVGLTKPGDIDHFTRVRVYKALLPRYPNGMAVLGLLPLAMRMGGPREAIWHAIIRKNHGATHFIVGRDHAGPGKNSKGVDFYGPYDAQYAVEKYRDELGIEVVPFQMMTYLPDSDEYAPVDQIPKGVRTLNISGTELRARLRSGREIPEWFSYPEVVKVLRESHPPRSQQGFTVLFTGYPNSGKDQIARALQVTLNQQGGRSVSLFLGENIRHELSSELGYNREDRDKNIARIAFVASELTRSGAAVIAAPIAPFEKARQNARELVEKYGDFYLVHVATPLEYCEKTDKRGIYAKARAGEIENFTGVNDPYETPAKPDLVVDCEKQSVRSIVHQIILLLESQGLLDRF

SEQ ID NO: 7751 - protein, 268 aa, Zea mays
  misc_feature (195)..(195): Xaa can be any naturally occurring amino acid
  unsure (1)..(268): unsure at all Xaa locations
MVRGKTQMKRIENPASRQVTFSKRRNGLLKKAFELSVLCDAEVALVVFSPRGKLYEFASGSAQKTIERYRTYTKDNVSNKTAHQDIEQVKADAEGLAKKLEALEAYKRKLLGERLEECSFEELHSLEVKLEKSLHCIRGRKTQLLEEQLHKLKEKEMNLRKSNEDLREKVMGAKTFCRRCTAASGMPTTQENRLXILPLTSTSCAVISYCKKQPPPPPPMLMAPPPPPAPAAIDHTGPKDVGMDVETELYIGLPGRDYRSNNKDMTAQ

SEQ ID NO: 7752 - protein, 232 aa, Zea mays
MVRGKTQMKRIENPASRQVTFSKRRNGRRVGAFELSVLCDAEVALVVFSPRGKLYEFASGSAQKTIERYRTYTKDNVSNKTAQQDIERVKADAEGLAKRLEALEAYKRKLLGERLEDCSFEELHSLEVKLEKSLHCIRGRKTQLLEEQLRKLKQKEMSLRKSNEDLREKCKKQPPVPMASAPPRAPAVDNVEDGHREPKDDGMDVETELYIGLPGRDYRSSKDKAAVAVRSG

SEQ ID NO: 7753 - protein, 541 aa, Crocosphaera watsonii WH 8501
MDRTVKLWTFDGEPLRTLNTNKPVYDVTFSPDDQILIAATGNDLQIWTVEGKLLKTLEEHDAEVYDVEFSNNGQFFLSSSKDKTIKLWNKNGQLLKTFRDHNNTVWEVEWGEDDSYFLSASEDGTIRKWNLDGTVIKTIVAHNSAVMDIEIVPQSKVFFSVGEDKTIKFWSPQGELIDSFDGHQDGILDLAIHPKREFWVSASWDKTVKLWKPNKPLWINYLEHQGEIRGIAFSPDQNRIVTASRDHTLKLWNPQQDSIISLEDHEDGVSTVVYSPDGQFFASGSRDETVRLWNNQGENFRTLEGHTDWVLTVAISPNNQLIASGGLDRTIKLWRKDGTLITTITEHERGVLDLAFSPDGKYLVSSSRDQTIKIWRLDGSLVRNIEGHQAPVRTIAISPDGSKIVSGSRDNTVKVWSWDGELLHTLQEHQERVWDVAFSPNGEMIASGSDDGTVRFWNLDGQLIKTLYSYSSMVRSLAFSPDGQQLAVGSRESMLILWDLNEVLALDELRYGCAWIKDYLEFNASLSESDRRLCDGIKVVH

SEQ ID NO: 7754 - protein, 585 aa, Crocosphaera watsonii WH 8501
MGKRYQWLGYWGLDQAQEFAKTLQILFPHIQNNYQLQILNNNENISGTIAYFGETLLETKAGNPRVINFAASGVNNTADSWIKIDEDYLILGRDTFGRVLSYWTQINQGIWFSSHCQLLLPLLSSPRVNLTALHNYTCFSYFPTPLTPIKEISAINAGEEVVFSCLNNQLTHSKKIIHQWQSLPKTFNEEKEAIPQLQTLLKRSVENQLQGINNEPVGICLSGGLDSSIIAALLVKLGVKVRAYTLEFEKDNLSEYPYAEMVAKHLNIPLVKVSITPEKIKKHLIKAVRALDLPFGDGVTLPLYLLYQTASQETEMIFNGENGDQLFAGWTNKPIIAANIYQFQHPEYQKDFTEQYLQTFHHLYGYEKRIFTSEIYNQLLLNEPREAIQSSLDKEFSTDLLDRLRRATLMLKGAQNIQPRATYLSNENGLWVRSPFCDIDLTQWTFQTSENLFLQQSCEKYILKKSVESWLPSEIVWRKKRGMGVPLTSWCLNSLWLTLGSWLNPTVLKAEGRFLDHLPLQVILGQISGHLRGRRIGEILWLLLIWEVWRVKVLGEDKAKVSLLNPFYIPRPVWQKYANIRANYF

SEQ ID NO: 7755 - protein, 450 aa, Acinetobacter sp. ADP1
MSTMSLNINDLLNQAKFSKFHLSVVFWCTLINICDGYDLVIYGVVLPRLMEQWSLTSVQAGMLASTAMCGMLVGALSCGILADKFGRKRVLLLCVFFLSTFTLLGSFASTPTEFAILRFLAGLGIGGAMPNVVALTSEYSPKKSRVTMVSIMSCGYAVGAIISALVGSILVERFGWQIMFILAGIPLLFIPIIWKYLPESLVFNVKKNNTEKAHALIAKVDPTVLVSQHTKLVLNESLEKAYGSRRVLFQEGRAAGTLKFWIAFFMCLLVVYALSSWLPKLMYNAGYPLGKSILFLLAMNVGGIIGGTTSGMLADKFKIKPVVISLFCIAALSLIALGFNTSAIILYTLVAVAGASIQGASILLYSYVAQFYPLVANSTGIGWASAIGRTGAIMGPILAGMLLVLNLPHLMNFVLISVPALIAAISIGFLTTSKKKVEQPVALVTQQSLE

SEQ ID NO: 7756 - protein, 326 aa, Citrullus lanatus var. lanatus
RAKGGAPGFKVAILGAAGGIGQPLAMLMKMNPLVSVLHLYDVVNAPGVTADISHMDTGAVVRGFLGQQQLEAALTGMDLIIVPAGVPRKPGMTRDDLFKINAGIVKTLCEGIAKCCPRAIVNLISNPVNSTVPIAAEVFKKAGTYDPKRLLGVTMLDVVRANTFVAEVLGLDPRDVDVPVVGGHAGVTILPLLSQVKPPSSFTQEEISYLTDRIQNGGTEVVEAKAGAGSATLSMAYAAVKFADACLRGLRGDAGVIECAFVSSQVTELPFFASKVRLGRNGIEEVYSLGPLNEYERIGLEKAKKELAGSIEKGVSFIRSHHHHHH

SEQ ID NO: 7757 - protein, 1450 aa, Anabaena variabilis ATCC 29413
MTHEINSNTSENLFIGDSEMAALMRSRDWSQTSLGAVETWSQSLKTAVRIMLTCRQAMFVWWGNNLINLYNDAYRAILGGKHPEALGQRAAVVWQEIWDQVGPRAETALFQNQGTYDEALLLIMERNGYPEETYYTFSYSPVPNDDGGIGGIICANTEDTSRIIGERQLALLKDLAAKTADAQTFDEACIFSTKCLATNPYDLPFAMIYLVDPKQQCVTLAGTCGIERGHQAVPETVALEENSFWRFAEVLTTHKPYLISDLQLQFPDLPTGAWNRPPHQAAVVPIAPSGRMGKAGVLVAALNPFRLFDDNYQGFLNLVSAQIAASIGNAQAYEEERKRAEKLAELDRAKTTFFSNVSHEFRTPLTLMLSPLEELLTADDLSQEQRQEMTLIHRNGLRLLKLVNTLLDFSRIEAGRVQAVYEPTDLSTFTAELASIFRSAIEQAGLQFSVTCEPLPELVYVDRQMWEKIILNLLSNAFKFTFSGAIALTLRQVQHQVEITVTDTGIGIPQAELPHLFERFHRVEGARGRTQEGSGIGLALVQELVRLHGGQVQVDSLEGLGTTFTITVPMGIAHLPPERIQATRTLVSTALGAAPYIEEALSLLPAIKNSEASYLSPLTHNLSSSARILLVDDNADMREYVKRLLSRHYVVETATDGLAALEALADHLPDLVLTDVMMPRLDGFGLLSALRSNNRTREIPIILLSARAGEEAKVEGLEAGADDYLIKPFSARELLARVEATLKLAQLRRDAMEQQQTLRQEAETAKQNVETILSSINDGFYVLDRDWRFTYVNDRLCKIISMEREDILNHSIWDLFADTIGTDIDLQFQRAFNEQTSVQFEYLYVTWNRWYEHRVYPSPDGLTVFAADITERKQAELEREQLLALERHYINQLQGLTRAALAINSALSVEQVLQVITDQAASIIGSHQSVTSMTIGQNWSQAISAIFLSDKYTQWQNYDVKPDRSGIYGCVGHLNRPMRMTQAELEAHPQWRGFGKEAKNHPPLRGWLAAPLVGRNGQNIGLIQLSDKYDGEFTAADEAVLVQLAQMASVSVENVRLYEAEKQARSAAEASREEAEAANRIKDEFLAVLSHELRSPLNPILGWSRLLQNGKLDEAKAKQAVNIIERNAKLQVELIEDLLDISRILQGKLSLTSSPINLASVIKGAIETVRLAAEANSIRIEVNLDGEIGLVSGDSTRLQQVMWNLLSNAVKFTPTGGLVEIRLEQVGNQAQISVSDTGKGISPDFIPYVFDYFRQADSATTRKFGGLGLGLAIVRHLVELHGGTIHAESQGEGMGATFTLKLPLLPTQLTVNPDSPLLELSLGLHGIQVLVVDDDTDTREFVAFLLEQAGARVITAVSALEALQVFTQSPPDILLSDIGMPDMDGYMLMRQIRALPPDQGGKIPAIALTAYAGEIDEKRALKVGFQRHISKPVDPDNLIRAIVNLIDIKI

SEQ ID NO: 7758 - protein, 341 aa, Zea mays
  misc_feature (20)..(20): Xaa can be any naturally occurring amino acid
  misc_feature (46)..(46): Xaa can be any naturally occurring amino acid
  misc_feature (190)..(190): Xaa can be any naturally occurring amino acid
  misc_feature (244)..(244): Xaa can be any naturally occurring amino acid
  unsure (1)..(341): unsure at all Xaa locations
GRSGAVMGFLLAASGLLVLXYIAINLFEIYYGDDWEGLFEAITGYXLVALFGRVGGGIYTKAADVGADLVGKVERNIPEDDPRNPAVIADNVGDNVGDIVGMGSYLFGSYAESSCAALVVASISSFGINHQFTPMVYPLLVSSVGIIACLITTLFATDFFEIKAVSEIEPALKKQLIISTVVMTIGIALXWLGLPYTFTIYNFGAQKTVQSWQLFLCVAVGLWAGLVIGFITEYYTSNAYSPVXDVADSCRTGAATNVIFGLALGYKSVIIPIFAIAFSIFLSFSLAAMYGVVVAALGMLSTIATGLAIDAYGPISDNAGSLSLYGCILSYICISESLSIF

SEQ ID NO: 7759 - protein, 291 aa, Rhodobacter sphaeroides 2.4.1
MKIAAAAYPLDWFDSFAEVEAKLTDWVSRAAGQGADLLVFPEYGAMELASLGGRAVAADLEAALHEVARHGPAVGALLTRLAAAHGVHILGPSAPVFEGPRPVNRAVLYGPAGVIGHQDKLIMTRFEREIWDVVPGSEARVFETALGRIGIVICYDSEFPLLARAMVEQGAEILLAPSCTDSLAGFTRVRVGAMARALENQCVVVHAPTVGLCDFCPAVDENVGRAAIYGPPDHGWPATGILVETDLDVPGWAIAEVDMAAVALVRREGGVLNHAHWPEQAERLAGGVSLG

SEQ ID NO: 7760 - protein, 225 aa, Petunia x hybrida
MGRGKIEIKRIENNTNRQVTFCKRRNGLLKKAYELSVLCEAEIALIVFSTRGRVYEYSNNNIRAIIDRYKKATVETSNAFTTQELNAQFYQQESKKLRQQIQLIQNSNRHLVGEGLSSLNVRELKQLENRLERGIARIRSKKHEMILAESEDLQKREIQLEQENAFLRSKIAENERLQELSMMPAGGQEYNAIQQYLARNMLQLNMMEGVPSYPLPSDKKSLDLE

SEQ ID NO: 7761 - protein, 475 aa, Arabidopsis thaliana
  misc_feature (88)..(88): Xaa can be any naturally occurring amino acid
  misc_feature (136)..(136): Xaa can be any naturally occurring amino acid
  unsure (1)..(475): unsure at all Xaa locations
MSATLTGSGTALGFSCSSKISKRVSSSPASNRCCIKMSVSVDEKKKSFSLQKSEEAFNAAKNLMPGGVNSPVRAFKSVGGQPVLIDSXVKGSKMWDIDGNEYIDYVGSWGPAIIGHADDEVLAALAEAMKKGTSFXAPCLFENVLAEMVISAVPSIEMGRFVNSGTEACMGVLRLARAFTKKESLTWNAVSLYKQAVALLALGANVTPPGGPPSSSFIYYKATIHTLTAPYNDLEAVEKLFAAHKGEISAVILEPVVGNSGFIPPTPEFINGLRQLTKDNGVLLIFDEVMTGFRLAYGGAQEYFGITPDLTTLGKIMGGGLPVGAYGGRRDIMEMVAPAGPMYQAGTLSGNPLAMTAGIHTLKRLKQAGTYEYLDKITKELTNGILEAGKKTGHPMCGGYISGMFGFFFAEGPVYNFADSKKSDTEKFGRFFRGMLEEGVYFAPSQFEAGFTSLAHTPEDIQLTIAAAERVLSRI

SEQ ID NO: 7762 - protein, 631 aa, Yersinia pestis biovar Medievalis str. 91001
MAVSPTDTNPNTLKCGYCLMEQNPQSQLKLLVTRGKEQGYLTYAEVNDHLPEDIVDSDQIEDIIQMINDMGIQVLEEAPDADDLMLAENTTDTDDDAAEAAAQVLSSVESEIGRTTDPVRMYMREMGTVELLTREGEIDIAKRIEDGINQVQCSVAEYPEAITYLLEQYDRVEAGESRLSDLITGFVDPNAEEDIAPTATHVGSELSTEEMDDEDEDEDEDDDAEDDNSIDPELARQKFSDLREQYENARMEIKKNGRNHANAAAEILKLSEVFKQFRLVPKQFDYLVNNMRAMMDRVRTQERIIMKLCVEQCKMPKKNFVTLFSSNETSDTWFNAAVAMGKPWSEKLKDVSEDVQRSLQKLRQIEEETGLTIEQVKDINRRMSIGEAKARRAKKEMVEANLRLVISIAKKYTNRGLQFLDLIQEGNIGLMKAVDKFEYRRGYKFSTYATWWIRQAITRSIADQARTIRIPVHMIETINKLNGISRQMLQEMGREPTPEELAERMLMPEDKIRKVLKIAKEPISMETPIGDDEDSHLGDFIEDTTLELPLDSATSESLRSATHDVLAGLTAREAKVLRMRFGIDMNTDHTLEEVGKQFDVTRERIRQIEAKALRKLRHPSRSEVLRSFLDD

SEQ ID NO: 7763 - protein, 250 aa, Triticum aestivum
MAKTYPVVSAEYQEAVEKARQKLRALIAEKNCSPLMLRLAWHSAGTFDVSSKTGGPFGTMKKPAEQAHAANAGLDIAVRMLEPMKEEIPTISYADLYQLAGVVAVEVSGGPVIPFHPGREDKPQPPPEGRLPDATKGSDHLRQVFGKQMGLSDQDIVALSGGHTLGRCHKERSGFEGPWTRNPLKFDNSYFTELLSGDKEGLLQLPSDKTLLTDPVFRPLVEKYAADEKAFFEDYKEAHLRLSELGYAEA

SEQ ID NO: 7764 - protein, 132 aa, Kluyveromyces lactis
  misc_feature (78)..(78): Xaa can be any naturally occurring amino acid
  unsure (1)..(132): unsure at all Xaa locations
LEQIVGEASAFSGSSVKYIAGARPWVHVGKVDVALPCATQNEVSGAEAEHLVSNGVKFVAEGSNMGSTQEAIDVFEGXRLQTASTSAPAVWYAPGKASNMGGVAVSGLEMAQNSARVSWTRETVDAELKKIM

SEQ ID NO: 7765 - protein, 404 aa, Neisseria gonorrhoeae FA 1090
MDKFPKSAKLDHVCYDIRGPVHKKALQLEEEGNKILKLNIGNPAPFGFEAPDEILVDVIRNLPTSQGYCDSKGLYSARKAIVHYYQNKGLRDITVNDVYIGNGVSELIAMSMQALLNDGDEILIPAPDYPLWTAAATLAGGTVRHYLCDEENGWFPNLADMEAKITSKTKAIVVINPNNPTGAVYSKEILLEIAELARKHGLIIFADEIYDKILYDGAVHYHIAALAPDLLTVTFNGLSKAYRVAGFRQGWMVLNGPKHHAKGYIEGLDMLSSMRLCANTPMQHAIQTALGGYQSINEFILPGGRLLEQRNRAWELVNQIPGVSCVKPMGAMYMFPKIDTEMYRIRDDMKFVYDLLVREKVLLVQGTGFNWIKPDHFRIVTLPYVHQIEEAMGRLARFLQTYHQ

SEQ ID NO: 7766 - protein, 509 aa, Ustilago maydis 521
MGALCCKPEVIDFDGPVDLYHFYLLRAVGKGAFGKVRVVQHKQTKNLYALKYINKAKCIKMRAVSNIIQERRLLEEIDSPFVCNLRYAFQDDENMFMVLDLMLGGDLRFHLDRTGNMSEDVVRFYVAELALGLDYLHRLQIVHRDLKPDNVLLDEKGHAHLTDFNIAVHFSPRRPLTSIAGSMAYMAPEVLTKRGYLSSVDWWSLGVVAYELLFGRRPFRGKTNSALTHSILNDRCTFPENVETIVSRETVSCIKSLLERDPRKRLGCRSGIDEFKAHAWFAGIDWPAMEAKTVAPPFEPDSKKANFDATHELEELLLEDNPLKAKKRNGNADFDALPPEMRQMEEHFLPFDHLKQRRKSYFRGPRGNAPATAVTTVAGGVGVGAGAGAGAAEHGRNSQLSSMTHTLQDQPLSETAQAGAIEAARLTPIPIEMRSRAISESGSQRSARADAFSEKASLALPSTSTWAGMHLSLPESSMASNQHLQSESSLARTSAYRTAEYDEKTGVAQ

SEQ ID NO: 7767 - protein, 57 aa, Phytophthora infestans
MPITCGDIPRLICSVIIPPVGVFFQVGCTKDLAINCLLTVLGYIPGVIHAVYILIKE

SEQ ID NO: 7768 - protein, 541 aa, Escherichia coli CFT073
MAQPLMLTLQKLQCDVVNISISAINFLSYSEFNLANANRTIRSTTSRGITMANYFNTLNLRQQLAQLGKCRFMGRDEFADGASYLQGKKVVIVGCGAQGLNQGLNMRDSGLDISYALRKEAIAEKRASWRKATENGFKVGTYEELIPQADLVVNLTPDKQHSDVVRTVQPLMKDGAALGYSHGFNIVEVGEQIRKDITVVMVAPKCPGTEVREEYKRGFGVPTLIAVHPENDPKGEGMAIAKAWAAATGGHRAGVLESSFVAEVKSDLMGEQTILCGMLQAGSLLCFDKLVEEGTDPAYAEKLIQFGWETITEALKQGGITLMMDRLSNPAKLRAYALSEQLKEIMAPLFQKHMDDIISGEFSSGMMADWANDDKKLLTWREETGKTAFETAPQYEGKIGEQEYFDKGVLMIAMVKAGVELAFETMVDSGIIEESAYYESLHELPLIANTIARKRLYEMNVVISDTAEYGNYLFSYACVPLLKPFMAELQPGDLGKAIPEGAVDNAQLRDVNEAIRSHAIEQVGKKLRGYMTDMKRIAVAG

SEQ ID NO: 7769 - protein, 731 aa, Leptospira interrogans serovar lai str. 56601
MEPNRTNFEHSQEIYEILVNQISDSMLVTDTQLEPPGPKILFVNPAFCKMTGYTKEDLIGKTPRMLQGPLTNRKIMRDLKRSLTQGKDFSGETINYKKDGSPYHVEWRISAIRDLSGNILCFISIQRDITEKVKKGESVTRHLRLEMGITSATQILLSTSVELKILKYAMEQFLVFLDSERLYLFKNSENAESAELYLEVKDPSLETSEIPVLQSIVYNQDYSRWKKIFSSGGYLQGNLSEFSENEKKFFDQREICSVTLIPLFVSDEWFGFAGFENFKTTNIVKEEIFTIRTFVDLISVFLERKNILEELKVHREKLEVLVSQRTEELNLQKEMAEKANKAKSEFLANMSHELRTPLNSIIGFSRLMQFPEGMERENRYLDLIFHSGVHLLNIINDILDLSRIEADKLVLNESDFDLKELISTSVEMILGEAITKKLEMTFEFFPKNANFEIRADPKRIRQVILNLLGNAIKFTDSTGKILITLNKLENNFQLAVQDSGIGIPTEEISKIFETFYQVKGEDRAAYEGSGLGLPIVKKIVEAHHGSIQVESALGKGSKFVVIFPFFTRLEHLNVSNSFSQEAEESPYPFHLKSVPILLSIQDRIYDRAIEKYFIHNSQEFISFRTVKDFSKIPQKSLDLHKILLYDTRLLLEETEVVKFLRSLLNEDSNFKHLILLETADIPLPFQEDLLPFFPNYTIQNPFSLDKLKSILIEIEKEIYLGNRTEKEEYSS

SEQ ID NO: 7770 - protein, 423 aa, Ashbya gossypii ATCC 10895
MLRWIPTRICPRLCTRGFASSCARLAQGPAFFVKPITPNDLFVSCTVFNEKGAVTGVSERYPKLSFLRDRGLYPRDLRKLDTSSIEVIPSIVVKPTCILVNLLHIKAVIEKNRVYVFDTTSKEAAARLGVLMYDLESKLASHSSQPAQHYEHRALESILVNVMTCLETEFKHLSKQCGLVLNELEDQIDRDKLRDLLIHSKDLTSFYQKSLLIRDMLDELLESDEDLAAMCLSPAPGTVEADAAEVEMLLETYYKQCDEYVQQSGSLLQNIKSTEDVVNIILDANRNSLMLFELKVTIYTLGFTVATLLPAFCGMNLKNFIEESVWGFGGVLAVSAVAGLAVTASNFKALRNVARLTVMNSHSTSPGAKNISSARLHLDRDVPTLWMRLKTAFRTIWFGKSRPSRDGRQRDMIWKWLLDDTSK

SEQ ID NO: 7771 - protein, 373 aa, Spizellomyces punctatus
ISDEHGIDPTGTYHGDSDLQLERINVYYNEATGGKYVPRAVLVDLEPGTMDSVRAGPFGQLFRPDNFVFGQSGAGNNWAKGHYTEGAELVDSVLDVVRKEAESCDCLQGFQITHSLGGGTGAGMGTLLISKIREEYPDRMMCTFSVVPSPKVSDTVVEPYNATLSVHQLVENSDETFCIDNEALYDICFRTLKLTTPTYGDLNHLVSAVMSGITTCLRFPGQLNADLRKLAVNMVPFPRLHFFMVGFAPLTSRGSQQYRALTVPELTQQMFDAKNMMAASDPRHGRYLTVAAMFRGRMSMKEVDEQMLNVQNKNSSYFVEWIPNNVKTAVCDIPPKGLKMSVTFIGNSTAIQELFKRISDQFTAMFRRKAFLH

SEQ ID NO: 7772 - protein, 486 aa, Arabidopsis thaliana
MPAPTTEIEPIEAQSLKKLSLKSLKRSLELFSPVHGQFPPPDPEAKQIRLSHKMKVAFGGVEPVVSQPPRQPDRINEQPGPSNALSLAAPEGSKSTQKGATESAIVVGPTLLRPILPKGLNYTGSSGKSTTIIPANVSSYQRNLSTAALMERIPSRWPRPEWHAPWKNYRVIQGHLGWVRSVAFDPSNEWFCTGSADRTIKIWDVATGVLKLTLTGHIEQVRGLAVSNRHTYMFSAGDDKQVKCWDLEQNKVIRSYHGHLSGVYCLALHPTLDVLLTGGRDSVCRVWDIRTKMQIFALSGHDNTVCSVFTRPTDPQVVTGSHDTTIKFWDLRYGKTMSTLTHHKKSVRAMTLHPKENAFASASADNTKKFSLPKGEFCHNMLSQQKTIINAMAVNEDGVMVTGGDNGSIWFWDWKSGHSFQQSETIVQPGSLESEAGIYAACYDNTGSRLVTCEADKTIKMWKEDENATPETHPINFKPPKEIRRF

SEQ ID NO: 7773 - protein, 373 aa, Spizellomyces punctatus
ISDEHCILPNGQYNGDTDLQLERISVYFNEANGGRYVPRSVMVDLEPGTMDSARAGPFGELFRPDNFVFGQSGAGNNWAKGYYTEGAELVESVLDIVRKESEGCDSLQGFQMVHSLGGGTGSGLGSLLVSKIREEYPDRMMCTFSVVPSPKVSDTVVEPYNATLSVHQLVENSDLTFCIDNEALYDICLRTLKITAPNYGDLNHLVSAVMSGITTCLRFPGQLNADLRKLAVNMVPFPRLHFFTVGFAPLTARGSQAFRALTVPELTAQLFDAKNMMAACDPRHGRYLTVSTIFRGKVSTKEVEQQMYNMQSRNSSYFVEWIPNNIKTAICDIPPRGMKMSATFIGNTTSIQELFKRIHTQFSAMFKRKAFLH

SEQ ID NO: 7774 - protein, 387 aa, Rhizophlyctis rosea
IGAKFWEVISDEHGIDPTGTYHGDSDLQLERINVYFNEATGGKYVPRAVLVDLEPGTMDSVRAGPFGQLFRPDNFVFGQSGAGNNWAKGHYTEGAELVDSVLDVVRKEAESCDCLQGFQITHSLGGGTGAGMGTLLISKIREEYPDRMMCTFSVVPSPKVSDTVVEPYNATLSVHQLVENSDETFCIDNEALYDICFRTLKLTTPTYGDLNHLVSAVMSGITTCLRFPGQLNADLRKLAVNMVPFPRLHFFMVGFAPLTSRGSQQYRALTVPELTQQMFDAKNMMAASDPRHGRYLTVAAMFRGRMSMKEVDEQMLNVQNKNSSYFVEWIPNNVKTAVCDIPPKGLKMSVTLIGNSTAIQELFKRISDKFTAMFRRKAFLNWYTGEG

SEQ ID NO: 7775 - protein, 166 aa, Glycine max
MNALAATNRNFRLASRLLGLDSKLEKSLLIPFREIKVECTIPKDDGSLATFVGFRVQHDNARGPMKGGIRYHPEVEPDEVNALAQLMTWKTAVANIPYGGAKGGIGCDPAKLSVSELERLTRVFTQKIHDLIGVQTDVPAPDMGTGPQTMAWILDEYSKFHGHSPA

SEQ ID NO: 7776 - protein, 387 aa, Harpochytrium sp. JEL94
IGAKFWEVISDEHGVDPTGSYHGDSDLQLERINVYFNEATGGKYVPRAVLVDLEPGTMDSVRAGPFGQLFRPDNFVFGQSGAGYNWAKGHYTEGAELVDSVLDVVRKEAESCDCLQGFQITHSLGGGTGAGMGTLLISKIREEYPDRMMCTFSVVPSPKVSDTVVEPYNATLSVHQLVENSDETFCIDNEALYDICFRTLKLTTPTYGDLNHLVSAVMSGITTCLRFPGQLNADLRKLAVNMVPFPRLHFFMVGFAPLTSRGSQQYRALTVPELTQQMFDAKNMMAASDPRHGRYLTVAAMFRGRMSMKEVDEQMLNVQNKNSSYFVEWIPNNVKTAVCDIPPKGLKMSVTFVGNSTAIQELFKRISDQFTSMFRRKAFLHWYTGEG

SEQ ID NO: 7777 - protein, 351 aa, Neisseria meningitidis MC58
MTILSDVKALGQQIWLDNLSRSLVQSGELAQMLKQGVCGVTSNPAIFQKAFAGDALYADEIAALKQQNLSPKQRYETMAVADVRAACDVCLAEHESTGGKTGFVSLEVSPELSKDAQGTVEEARRLYAAIGCKNAMIKVPATDAGIDALETLVSDGISVNLTLLFSRAQTLKAYAAYARGIAKRLAAGQSVAHIQVVASFFISRVDGALDTTLPDHLKGKIAIALAKAAYQDWAQYFGSPEFAALETKGANRVQLLWASTGVKNPAYPDTLYVDSLIGAHTVNTVPDATLKAFIDHGTAKATLTEGVEEAQAQLAETAALGIDVETLATRLQEDGLKQFEEAFEKLLAPLA

SEQ ID NO: 7778 - protein, 321 aa, Bacillus cereus E33L
MVVNEKVELATFAGGCFWCMVSPFEEMEGIIKVVSGYTGGHKENPTYKEVCSETTGHYEAVQITFDANKMPYEELLNIYWRQIDPTDVGGQFHDRGQSYETVIFYHNEEQHKKAEASKEELAKSERFSKPIATKILPAATFYPAEEYHQGYHKKNTFRYELYRKGSGRDAFIKQHWPKDNAHLKEKLNEMQFYVTQENGTEPPFRNEYWNHKEEGLYVDIVSGEPLFTSIDKFDSGCGWPSFTKPVMSASVKEKMDVSHNMTRTEVRSKEGDSHLGHVFPDGPGPNGLRYCINSAALRFIPKEELEKEGYGDFLMLFGNKK

SEQ ID NO: 7779 - protein, 476 aa, Nanoarchaeum equitans Kin4-M
MWAIVEKVVQKLPTIKKPKYLTNLDRLKWSAIAVILYLLLSYTPLIGVSQTGAGVFEELVVLLGASFGSIVSLGIGPIIIGYLLAELFIGSGELNIDITTEEGKRKFENLARFFMIVFGLFESIVMATIGWFKPSQFLISLFAMPFSFLGSNAFLIGYILAVLFIVAQLMLGVILAYLLDDLSQKWGFTSGINLFILATVSRELFVQLFNPLTQIPGTPTPPIGKIPQIFYFISQGLYTEAIVVGLQLLVIVLVILLSVYFYMVKIPIPTSFGKIPEKSLRYEVRLIYTGNIPVIFAFAFLHQILLIAWVLQQLGIPLLGTIENGHPINGLVAYIYPDTGFLISLILGNLTLDNLIRTITSSLFFLGSSILFSIYFVLATGQDSEGLAKQLSKMFGRIGLKRDYRIIKHYLDKIIPCVTVLGGFIVGFLALLSYWVSIPIGGTSILLATMISYMVYEQLKETGILKELTQIISKLE

SEQ ID NO: 7780 - protein, 432 aa, Bacillus cereus E33L
MNVTTDVQSTTEETKEKRYKTLFGSALGYAAEGLDMLLLSFVLVYILKEFHLSPVEGGNLTLATTIGMLIGSYLFGFIADLFGRIRTMAFTILLFSLATALIYFATDYWQLLILRFLVGMGVGGEFGIGMAIVTETWSKEMRAKATSVVALGWQFGVLVASLLPAFIVPHFGWRAVFLFGLIPALLAVYVRKSLSEPKIWEQKQRYKKELLQKEAEGNLTTTEAEQLKQMKKFPLRKLFANKKVTITTIGLIIMSFIQNFGYYGIFTWMPTILANKYNYTLAKASGWMFISTIGMLIGIATFGILADKIGRRKTFTIYYVGGTIYCLIYFFLFTDSTLLLWGSALLGFFANGMMGGFGAVLAENYPAEARSTAENFIFGTGRGLAGFGPVIIGLLAAGGNLMGALSLIFIIYPIGLVTMLLCVPETKDKVLE

SEQ ID NO: 7781 - protein, 537 aa, Streptococcus bovis
MAKDIKFSADARASMMRGVDILADTVKVTLGPKGRNVVLEKSFGSPLITNDGVTIAKEIELEDHFENMGAKLVSEVASKTNDIAGDGTTTATVLTQAIVREGLKNVTAGANPIGIRRGIESAVAVAVDELKAIAQPVANKEAIAQVAAVSSRSEKVGEYISEAMEKVGNDGVITIEESRGMETELDVVEGMQFDRGYLSQYMVTDNEKMVADLENPYILITDKKISNIQDILPLLEEVLKTSRPLLIIADDVDGEALPTLVLNKIRGTFNVVAVKAPGFGDRRKAMLEDIAVLTGGTVITEDLGLDLKDANMTALGQAAKVTVDKDSTVIVEGAGEASSIANRVNVIKSQLEATTSEFDREKLQERLAKLAGGVAVIKVGAATETELKEMKLRIEDALNATRAAVEEGIVAGGGTALVNVISKVAELELDGDEATGRNIVLRALEEPVRQIAFNAGYEGSVIIEHLKNSEVGTGFNAANGEWVNMVEAGIIDPVKVTRSALQNAASVASLILTTEAVVANHPEPAAPAPAAPGMDPS

SEQ ID NO: 7782 - protein, 128 aa, Pasteurella multocida subsp. multocida str. Pm70
MAYSNKVIDHYENPRNVGSLDKKDANVGTGMVGAPACGDVMQLQIKVSEEGIIEDAKFKTYGCGSAIASSSLITEWVKGKSLDEAQAIKNSQIAEELELPPVKVHCSILAEDAIKAAIADYKAKKEAK

SEQ ID NO: 7783 - protein, 457 aa, Porphyra purpurea
MREIVHIQAGQCGNQIGAKFWEVISEEHGIDSSGAYNGTSDLQLDRAEVYYNEGSGGRYVPRAVLVDLEPGVLDTIKAGPHGGLYRPDNFVAGQSGAGNNWAKGHYTEGAELVDSVLDVVRREAEGCDCLQGFQVTHSLGGGTGSGMGTLLVSKIREEFPDRMMCTYSVMPSPKVSDTVVEPYNCTLSVHQLVENADAVFCIDNEALYNICYNTLKKPEPAYPDLNKLVSGVMSGITSSLRFPGQLNSDLRKLAVNLVPFPRLHFFMIGYAPLSADGVTAYRAKTVADLTKQMFDPKNMMADCDPRNGRYLTASAYFRGHVSTKEVEEQMDAIQTKNSGQFIDWIPNAIKASVCDVAPTGETMSAAFIGNSTAIQDIFKRVGSHFSAMFKRKAFLHWYTGEGMDEMEFTEAESNMNDLVSELQQYEAATVEGEEEEDAYAEGAVVNGDQSYEDQYAA

SEQ ID NO: 7784 - protein, 93 aa, Streptococcus intermedius
MLKPLGDRVVLEVEEKEQKVGGFVIAGAGQDATKTAKVVAVGEGIRTLNGELVAPSVKAGDTVLVESHVGTEVKDGEEKYLVVNEVNILAIVE

SEQ ID NO: 7785 - protein, 534 aa, Streptococcus intermedius
MAKDIKFSADARSAMVRGVDILADTVKVTLGPKGRNVVLEKSFGSPLITNDGVTIAKEIELEDHFENMGAKLVSEVASKTNDIAGDGTTTATVLTQAIVREGIKNVTAGANPIGIRRGIETAVATAVEALKANSVPVSNKEAIAQVAAVSSRSEKVGEYISEAMEKVGNDGVITIEESKGMDTELDVVEGMQFDRGYLSQYMVTDNEKMVADLDNPYILITDKKISNIQEILPLLENILKTSRPLLIIADDVDGEALPTLVLNKIRGTFNVVAVKAPGFGDRRKAMLEDIAILTGGTVITEDLGLELKDATIEALGQASKVTVDKDSTVIVEGSGDAEAIANRVAVIKSQIESVTSEFDKEKLQERLAKLSGGVAVIKVGAATETELKEMKLRIEDALNATRAAVEEGIVSGGGTAFVNVLDAVAALELEADEATGRNIVLRALEEPVRQIALNAGFEGSIVIDRLKNSEVGTGFNAATGEWVNMIEAGIIDPVKVTRSALQNAASVASLILTTEAVVASQPEPASPAPAMDPS

SEQ ID NO: 7786 - protein, 177 aa, Streptomyces sp. AM-7161
MTGATIWLTGLPSAGKTTIAYELAGRLRDEGHAVEILDGDEIREFLSAGLGFTREDRHTNVQRIGFVAELLASHGVKVLVPVIAPYNDSREAVRKRHQAEGTAFVEVHVATPVDVCSVRDVKGLYAKQAAGEISGLTGVDDPYEAPENPDLRIESQNQTVQESAAQLHALLTERGLL

SEQ ID NO: 7787 - protein, 236 aa, Neisseria gonorrhoeae FA 1090
MNAAIEHVQAVAFDLDGTLCDSVPDLAAAAEAMLEQLGMKPLPAKVVESYVGDGIGKLVHRVLTNDRDREADSELWEKGFVSYMKYYRDHLSVFTRPYPETEAGLALLKSLGIPLVIITNKNEILAAELLKQLGLADYFSLILGGDSLPEKKPSPLPLRHAAEVLGIDAANMLMVGDSRNDIIAAKAAGCLSVGVTFGYGDMTLLSQDDTTRPDRIIGALPEIYENLQPQKNKDEE

SEQ ID NO: 7788 - protein, 95 aa, Streptococcus mutans
MLKPLGDRVVVQLKEEKEQTVGGFVLAGASQEKTKKAQVVAVGEGVRTLTGELVASSLAQGDTILIENHVGTPVKDDGKDYLIIREADVLAVVND

SEQ ID NO: 7789 - protein, 536 aa, Streptococcus mutans
MAKDIKFSADARSSMVRGVDILADTVKVTLGPKGRNVVLEKSFGSPLITNDGVTIAKEIELEDHFENMGAKLVSEVASKTNDIAGDGTTTATVLTQAIVREGLKNVTAGANPIGIRRGIETAVATAVDELKAIAQPVSGKEAIAQVAAVSSRSEKVGEYVSEAMEKVGNDGVITIEESRGMETELDVVEGMQFDRGYLSQYMVTDNEKMVADLENPYLLITDKKISNIQDVLPLLEEVLKTNRPLLIIADDVDGEALPTLVLNKIRGTFNVVAVKAPGFGDRRKAMLEDIAVLTGGTVITEDLGLELKDTTIDALGQAARVTVDKDSTVIVEGSGGKEAVANRVNLIKSQIETATSDFDREKLQERLAKLSGGVAVIKVGAATETELKEMKLRIEDALNATRAAVEEGIVAGGGTALINVIEKVAALDLTDDAATGRNLVLRALEEPVRQIAKNAGYEGSVIIDKLKNSSAGTGFNAANGEWVDMIDAGIIDPVKVTRSALQNAASVASLILTTEAVVADHPAPEAPAAAPAMDPS

SEQ ID NO: 7790 - protein, 95 aa, Streptococcus salivarius
MALKPLGDRIVVHFEETEEKTASGFVLAGASHEATKTAEVLAVGEGIRTLTGELIALSVAAGDKVLVENGAGVNVKDGDDSVSIIREADILAVLA

SEQ ID NO: 7791 - protein, 368 aa, Bacillus halodurans C-125
MKSLMGVVNLDHDQDLLHELTYFRSVAGVPFGGRYRMIDFVLSNMVNSGIQDIAVFARNKYRSLMDHLGTGAPWDLNRKRGGLFILPPDWNDPTDISKGDLRHFHNHRDFFHRGNADHVLVSGSQFISKVDYEDAFKRHQETKADVTVLYKKVDQLEPEDRYRMKLEFDSFGNVKSITNDEMNSNLYMQMYIIRKELLLELLNHCIGYHKQDLFVDGIMSNLNELAIRAYEYKGYLSIISSVASYYKHSMDLLKPEIYQSLFLAGSPIYTKIKDEPPAKYVNGSEVSNSLVANGCVIEGHVENSILFRGVYVAKGVSIKNSIIMQRCYIHEDTHLDHVILDKDILISPNRQFAGAPEQPFVIAKRKAM

SEQ ID NO: 7792 - protein, 726 aa, Thermotoga maritima MSB8
MYVAALFFLIPLVALGFAAANFAAVVRKPEGTERMKEISSYIRSGADSFLAHETKAIFKVAIVIAILLMIFTTWQTGVAFLLGAVMSASAGIVGMKMATRANVRVAEAARTTKKIGPALKVAYQGGSVMGLSVGGFALLGLVLVYLIFGKWMGQVDNLNIYTNWLGINFVPFAMTVSGYALGCSIIAMFDRVGGGVYTKAADMAADLVGKTELNLPEDDPRNPATIADNVGDNVGDVAGLGADLLESFVGAIVSSIILASYMFPIYVQKIGENLVHQVPKETIQALISYPIFFALVGLGCSMLGILYVIVKKPSDNPQRELNISLWTSALLTVVLTAFLTYFYLKDLQGLDVVGFRFGAISPWFSAIIGIFSGILIGFWAEYYTSYRYKPTQFLSKSSIEGTGMVISNGLSLGMKSVFPPTLTLVLGILFADYFAGLYGVAIAALGMLSFVATSVSVDSYGPIADNAGGISEMCELDPEVRKITDHLDAVGNTTAAIGKGFAIGSAIFAALSLFASYMFSQISPSDIGKPPSLVLLLNMLDARVIAGALLGAAITYYFSGYLISAVTKAAMKMVDEIRRQAREIPGLLEGKAKPDYNRCIEITSDNALKQMGYPAFIAILTPLVTGFLLGAEFVGGVLIGTVLSGAMLAILTANSGGAWDNAKKYLEAGNLEGYGKGSEPHKALVIGDTVGDPLKDTVGPSLDILIKIMSVVSVIAVSIFKHVHLF

SEQ ID NO: 7793 - protein, 383 aa, Bacillus halodurans C-125
MKKEIVGMLLAGGEGKRLGQLTRKLAKPAVYFGGKYRIIDFPLSNCTNSGIDTVGVLTQYEPLALNGHIGIGSPWDLDRRHGGVTVLPPYIEKQGGSWYKGTADAIYQNRYYIEQYDPEYVLILSGDHIYKMDYDRMISHHKKLGADATISVIEVPWEEASRFGIMNTNEEMTITQFEEKPTTPISNLASMGIYIFNWSVLKSYLIQDAKQANSSHDFGKDIIPKMLAKDLKLVAYPFEGYWKDVGTIKSYWEANMDLLDEHSSLMLNDPSWRIYSVNRNQPPQYISTRAYVRCSLVNEGCVVHGNVEQSILFPGVHIGANSSVFESVLMPNVKVGENVVLRRTIIMEGACIPSGTHLAPSDPDDILVIDKDTEFSPSIAANQ

SEQ ID NO: 7794 - protein, 447 aa, Oceanobacillus iheyensis HTE831
MYQTTTLKDKIKLFIIILLPILITQVSINLMSFFDTMMSGQFSARDLAGVAIGSSLWVPILTGINGIVLSITPIIAHLIGAKNKKDIPQVIQQGIYLSFVLSIIIIVIGGIALDPILQAMSLEKEVQRIAKYYLITLGTGIVPLFLFHTIRSFMDGLGQTRSSMIIILISLPINAVLNYILIFGKFGIPAFGGIGAGIATSLTYWIISGISIFMIHRVYPFHSYKVFQKILPPTLSYWADQLKIGLPIGLAIFFETSIFSAVTLLMSEYNTNTIAAHQAAMNFASLLYMLPLSVGMALTIAVGFEVGAKRLHDAKRYTYLGIMGGLFIAIFAGIILYTFDDVVARLYNSNPEVIELTKQFIIFAIFYQLADAIGAPIQGALRGYKDVNMTLVIALISYWIIGLPTGYLLANYTALEPFGYWVGIIVGLSTGAIALLARLLFIQKKSV

SEQ ID NO: 7795 - protein, 341 aa, Streptomyces sp. AM-7161
MLSVVMEEFGGPEVLRARQVEDPEPGPGQVLVDVAYASVTFVETQVRSGNGPFGRPALPRVPGNGVGGRVVALGPGADPALLGTVVVTTTGGEGGYAERALARADEVVPVPPGLALKDAVALLADGRTALLLFRQAEVKPGEKVLVEAAAGGVGSLLVQLAVHAGARVVGAARGDRKAELVVSLGASYVDYSREAWLRQVRETAGGGDLDVVFDGVGGAIGTAAAGALRPGGRISLYGMASGADATLDEDDLAARGIRTLGLFAAPGPAETHPLIGEALRLAADGVLAPVVGQVFPLAAAAEAHAAIEARATVGKTLLAVGAQEGDTYGTGAAGGATNGDR

SEQ ID NO: 7796 - protein, 731 aa, Neurospora crassa
MRLTSVWTSVVQVFSFLTFSSPEDGNDLSSQRPQFPIPLENVHHHPPASHHPIPPSSNNAAEDVVPLYTSGSERSYMLKDHPVVGTPKSPQEGGPARRLDCHYPDMQDWEPCYGPENRTCWLKHKYEDKRIDIMTDYENEWEIPKGKVRKFYLEVSEQPIAPDGTTMEHGKVFNRTYPGPWLEVTVKNNLRWNGTSVHWHGFRQFESFHMDGVNGITECPIAPGDTFTYRFRAMQYGSAWYHSHYSLQYGDGLLGPITIYGPSTANFEADEAFRPLLLTDWNHRSVFEDWPLMLKSGVAPSMTNILINGVGQFGSGGKQKEKYTLYLDEGKKHLLILINTAVDTTFVFSIDNHTMEVIEMDFVPIVPYNTTNLKIGIGQRYHVLVHGLENPYEAERYGNYWMRVIPARKCSKFPYGPDEQMGIFRYNTTYQTMASAPDPMSEPPLYETNCADEPLDKLVPKIPWTVGNPVNIDPNIDPKKLPANESYIFNVGLTMSGGPNTSTPYIPDDQPYARWDMHIAPFRINFSDPTLLSLSSLDSLITKPHLDIVTLPTSNPDDDKWIWMVITAPDKVPTEGARIFFPAAHPIHLHGHDFAVLRQSSKNWYDDPEIGHIGEGKRWFTPDKLNCENERLDCENPTRRDVVLLPASGYVVIAFKADNPGAWILHCHIAFHASSGLAMQIIENKDLIPAIMEKDKPVIEEKCRKWREWYGEPKNLWDWHEPKHFQDDSGV

SEQ ID NO: 7797 - protein, 276 aa, Bacillus halodurans C-125
MSPFLGEVIGTMILIILGGGVVAGVVLKGTKSENGGWIVITAAWGLAVATAVYCVGQISGAHLNPAVTIGLALVGAFEWSQVAGYIVAQMLGAMIGATLVFLHYYPHFKATEDQGAKLAVFSTDPAIKHLPANFFSEVLGTFVLVLGILAIGANEFTEGLNPLIVGLLIVVIGLSLGGTTGYAINPARDLGPRIAHFLLPIPGKGSSNWSYAWIPIVGPIIGGGIGALTYAALFEGIVYSALWLFLAAFALVLLYASFIEKKHEAKGKDQPVAMAK

SEQ ID NO: 7798 - protein, 501 aa, Ashbya gossypii ATCC 10895
MESRLGWLTRLNYDTGSALRRTSIIGTIGPKTNNPETLVELRKAGLNIVRMNFSHGSYEYHQSVIDNARKSEELYPGRPLAIALDTKGPEIRTGTTVDNVDYPIPPNHEMIFTTDDQYAKSCDDKVMFVDYKNITKVIEKGRVIYVDDGVLSFEVLEVVDDKTLKVKSLNAGKICSHKGVNLPGTDVDLPALSEKDKSDLRFGVKNGVHMVFASFIRTAGDILTIREILGEDGKDIKIIAKIENQQGVNNFDEILKVTDGVMVARGDLGIEIPAPQVFAVQKMLIAKCNLAGKPVICATQMLESMTYNPRPTRAEVSDVGNAVLDGADCVMLSGETAKGIYPINAVKTMAETALIAEQAIPYVPTYDDLRNLTPKPTPTSETIAAAAVAATFEQKAKAIVVLSTSGDTTRLVSKYKPNVPIVMVTRNPRAARYCHLHRGVFPFVYEQEAADEWTDDVEARLNFGVEKSKELGILSEGDTIVTIQGFASGVGHSNTLRVLTV

SEQ ID NO: 7799 - protein, 641 aa, Bordetella pertussis Tohama I
MCGIVGIWGPLRDKANVLAESCRRIRHRGPDSNGYWEDAEADLALAHVRLAILDLTEAGHQPMVSACGRYVIVLNGEIYNHMELRERLQQDGLAPAWRGHSDTETVLACFAGWGIEQTLQAAVGMFAIVLWDRAERKLALMRDRMGEKPLYYGYSQANLLFGSELKAFMPVPGFGRELDRNALASFMRHNYIPAPQSIYAGIRKLPPGAWVEIDAAQMRRGELPEPQVYWSARRAADQGLGDRRRFESDAQAIDALEQVVSQAVRGQMLSDVSLGAFLSGGIDSSTVVALMQAQSAQPVRTFAIGFHEKGYNEAEHAKAVAAHLGTEHTELYVTAEDGLAVVPSLADMYDEPFADSSQIPTSLVTRMARQHVTVALSGDGGDELFGGYSRYFRVDNWWRKCAAMPGPLRHLAGAALRGSAALPGAGAWRGKVGKLGELLGADTRGEFYRLFVSYWADPGRVVIGGTEPLSPFEQPMEGSTFDAMMKLDTVTYLPDDILVKVDRAAMAVSLETRVPLIDHRVYEFAWQLPFEYKVRGGTGKWLLRQLLYRHVPQAMVDRPKRGFAVPLAAWLRGPLRDWAEALLDPARLRQEGWFEPEPILRKWREHLSGHRNWDSHLWGVLMMQAWLDRYRAGAGDEAGRR

SEQ ID NO: 7800 - protein, 581 aa, Glycine max
MCGILAVLGCSDDSRAKRVRVLELSRRLKHRGPDWSGLHQHGDCFLAHQRLAIVDPASGDQPLFNEDKSVIVTVNGEIYNHEELRKQLPNHNFRTGSDCDVIAHLYEEHGEDFVDMLDGIFSFVLLDTRDNSFIVARDAIGVTSLYIGWGLDGSVWISSEMKGLNDDCEHFECFPPGHLYSSKERGFRRWYNPPWFSEAIPSAPYDPLVLRHAFEQAVIKRLMTDVPFGVLLSGGLDSSLVASITSRYLANTKAAEQWGSKLHSFCVGLEGSPDLKAAKEVADYLGTVHHEFTFTVQDGIDSIEDVIYHIETYDVTTIRASTPMFLMSRKIKSLGVKWVISGEGSDEIFGGYLYFHKAPNKEEFHRETCRKIKALHQYDCLRANKSTFAWGLEARVPFLDKAFINAAMSIDPEWKMIKRDEGRIEKWILRRAFDDEEHPYLPKHILYRQKEQFSDGVGYSWIDALKAHPPKHVTEKMMLNAGNIYPHNTPKTKEAYYYRMIFERFFPQNSARLTVPGGASAACSTAKAVEWDAAWSNNLDPSGRAALGVHISAYENQNNKGVEIEKIIPMDAAPLGVAIQG

SEQ ID NO: 7801 - protein, 198 aa, Bradyrhizobium japonicum bv. genistearum
PTPNLRGKTQIKEFASFPTLEQLPLWGFDGSSTQQAEGHSSDCVLKPVAVFPDAARTNGVLVMCEVMMPDGKTPHASNKRATILDDAGAWFGFEQEYFFYKDGRPLGFPASGYPAPQGPYYTGVGFSNVGDVARKIVEEHLDLCLAAGINHEGINAEVAKGQWEFQIFGKGSKKAADEMWMARYLMLRLTEKYGIDIE

SEQ ID NO: 7802 - protein, 198 aa, Bradyrhizobium liaoningense bv. glycinearum
PTPNLRGKTQIKEFASFPTLEQLPLWGFDGSSTQQAEGHSSDCVLKPVAVFPDAARTNGVLVMCEVMMPDGKTPHPSNKRATILDDAGAWFGFEQEYFFYKDGRPLGFPASGYPAPQGPYYTGVGYSNVGDVARKIVEEHLDLCLAAGINHEGINAEVAKGQWEFQIFGKGSKKAADEMWMARYLMLRLTEKYGIDIE

SEQ ID NO: 7803 - protein, 406 aa, Pisum sativum
MDASGKSRLETCNELRNKPTLPEKSEGYIQVFLDGGLNQQRMGYVIAVVVAKILNATLVIPYLELNPVWKDSSSFEDYIDVDHFIDVLKDDVTIVKELPEEYAWSSREYYTLAIRDTRIKAAPVHATANWYLENVLPVLQSYGIAAISPFSHRLTFDNLPMDIQHLRCKVNFQALVFVPHIRTLGDALISRLRNPQHSTDEMGSNYLQEVTDADDSKNAGKFVVLHLRFDKDMAAHSACDFGGGKAEKLALAKYRQVIWQGRVLNSQFTDEELRSQGRCPMTPEEVGLLLAALGFDNSTRLYLASHKVYGGGARIATLKQLFPLMEDKKSLTSPFERAQIKGKASLLAALDYYISIHSDIFISASPGNMHNALVGHRTYLNLKTIRPNMALMGQLFLNKTMGVVRV

SEQ ID NO: 7804 - protein, 338 aa, Bacillus cereus E33L
MAILITGGAGYIGSHTCVELLNNNYKIIVVDNLSNSSIESLNRVKEITGKQFEFYKENVLNREKMNEIFLENNIEAVIHFAGFKAVGESTTIPLTYYYNNIISAIVLCDVMQKHNVKNFIFSSSATVYGIPKTSPITEEFPLSVTNPYGQTKLMIEQIMRDVAKADDEWSIALLRYFNPFGAHQSGRIGEDPNGIPNNLMPYVTQVAVGKLKELNIFGNDYPTKDGTGVRDYIHVVDLAKGHVKALEKVLKTKGIEAYNLGTGKGYSVLEMVKAFEKVSGKKIPYKVIGRRPGDVAICFADVSKAKRELGWEAEYGLEEMCVDSWRWQVNNKNGYQMI

SEQ ID NO: 7805 - protein, 451 aa, oomycete-like MacKay2000
MREIVHIQGGQCGDQIGAKFWEVISDEHGIDPTGTYNGDSDLQLERVNVYYNEATGGRYVPRAVLMDLEPGTMDSVRAGPYGQLFRPDNFVFGQTGAGNNWAKGHYTEGAELIDSVLDVVRKEAEQCDCLQGFQVTHSLGGGTGSGMGTLLISKIREEYPDRVMMTFSVCPSPKVSDTVVEPYNATLSVHQLVENADEVMVLDNEALYDICFRTLKLTTPTYGDLNHLVCVCMSGVTSSLRFPGQLNADLRKLAVNLIPFPRLHFFMLGFAPLTSRGSQQYRALTVPELTSQCFDAKNMMCAADPRHGRYLTASCMFRGRMSTKEVDEQMLNVQNKNSSYFVEWIPNNIKSSVCDIPPKGLKMSATFVGNSTAIQEMFKRVGEQFTAMFRRKAFLHWYTGEGMDEMEFTEAESNMNDLVSEYQQYQDATAEEEGEYDEDDGGYGDEDDGMM

SEQ ID NO: 7806 - protein, 477 aa, Neisseria gonorrhoeae FA 1090
MNEYSQLIKHPDISLSPISDGIGVGNPATGEILAYVRNTGSDKLKNLIQKAAAAQKLWAAKTALERADILWRWYFLVKENKEALARLMTMEQGKSLTEARGEIDYAASFVRWFAEEARRIDGDVLTSVKASQKLVVLKQPVGVTAAITPWNFPSAMIARKAAPALAVGCAMIVKPASLTPLSAYALAVLAYEAGVPQDLLPVVSGRASEISHEFATNPTVRKISFTGSTEVGAKIFAGSAADIKKLSLELGGNAPFIVFDDADLDKAVEGALASKFRNSGQTCVCTNRVYVQSGIYDVFCRKLSEKAAALKLGDGLDEGVNQGPLIEEKAVEKVEQHIADALSKGAVCLTGGKRSALGGTFFEPTVLSGVTAQMAVAREETFGPLCPVFRFETEAEVIEAANNTEYGLAAYLFTSDTARQWRVGEVLEYGMVGINTGLISNEAAPFGGVKRSGLGREGSKYGADEYLELKYLCIDAG

SEQ ID NO: 7807 - protein, 750 aa, Zea mays
MGSACQAGTDGPSRKDVLGIGNAALENGHHQAEADADEWREKEEDLANNGHSAPPPGMQQVDEHKEEQRQSIHWERFLPVKTLRVLLVENDDSTRQVVSALLRKCCYEVIPAENGLHAWRYLEDLQNNIDLVLTEVFMPCLSGIGLLSKITSHKICKDIPVIMMSTNDSMSMVFKCLSKGAVDFLVKPLRKNELKNLWQHVWRRCHSSSGSESGIQTQKCAKLNTGDEYENGSDSNHDDEENDDGDDDDFSVGLNARDGSDNGSGTQSSWTKRAVEIDSPQPISPDQLVDPPDSTCAQVIHPRSEICSNKWLPTANKRNVKKQKENKDESMGRYLGIGAPRNSSAEYQSSLNDVSVNPIEKGHENHMSKCKSKKETMAEDDCTNMPSATNAETADLISSIARNTEGQQAVQAVDAPDGPSKMANGNDKNHDSHIEVTPHELGLKRSRTNGATAEIHDERNILKRSDQSAFTRYHTSVASNQGGARYGESSSPQDNSSEAMKTDSTCKMKSNSDAAPIKQGSNGSSNNDVGSSTKNVAARPSGDRERVASPLAIKSTQHASAFHTIQNQTSPANLIGEDKADEGISNTVKMSHPTEVPQGCVQHHHHVHYYLHVMTQKQPSTDRGSSDVHCGSSNVFDPPVEGHAANYSVNGGVSVGHNGCNGQNGSSAVPNIARPNIESINGTMSQNIAGGGIVSGSGSGNDMYQNRFLQREAALNKFRLKRKDRNFGKKVACFQLHACCSYDLKSVIVI

SEQ ID NO: 7808 - protein, 450 aa, Glycine max
MGNMSCSFNQTDSVECCEAEIQKADSQESGPPLKKSKTEILASQNVDNCEMEESEDRLSDMPDCIIHHILSFMETKDAIQTCVLSKRWRYLWASVPCLNFSSKSFMRLVDFKKFVLWVLNHRDSSHVKLLVYYRFGVDYATDQGLLNKVIEYAASHGVEEIKINLRAKTAGRTSGSPPVEIPFSLFTCQSLKKLELKDCHPTNGSSSLLGCKSLDILHLEQFSMHPVAADFSNPFASLAELFGFTTLTTLHLNNFILCYTGTDCLDPFANCVHLKNLHLSEMSFKSDLNPKDFVISAPKLSNLNLMCNRFKCKIVVAAPQLSNFIYLYSTPCAFFEFRLPSMDGLVIDIHEPHDRLEKCRRRKKEETLHGLINMLQGHHNAEAVKLSFCTVKVTCGASALVKPACLPSTKLKSLNFGVGSTYKIFINNLDHITAYFRNCSQHADFEIVTV

SEQ ID NO: 7809 - protein, 634 aa, Carica papaya
MESCDCIDTPCPGEELLVKYQYISDVLIALAYFSIPLELIYFVQKSAFFPYRWVLMQFGAFIVLCGATHFINLWTFSMHSKAVAVVMTIAKVACAAVSCVTALMLVHIIPDLLSVKTRELFLKNKAEELDREMGLILTQEETGRHVRMLTHEIRSTIDRHTILKTTLVELGRTLGLEECALWMPSRSGLNMQLSHTLNYHIQVGSTLPTNLPIVNEVFNNARAMRIPYTCPLARIRPLVGRYVPPEVVAVRVPLLHLSNFQINDWPDHSAKSYAIMVLILPTDSARKWRDHELELVEVVADQVAVALSHAAILEESMRARDQLMEQNVALNLARQEAEMAIHARNDFLAVMNHEMRTPMHAIIALSSLLLETELTPEQRVMIETVLKSSNLLATLINDVLDLSRLEDGSLKLDSETFNLQGIFREVINLIKPITSVKKLSMTLIMAPDLPACAVGDEKRLMQAILNVVGNAVKFTKEGYVTIVASVAKPDASRDWPECYPVSSEGHFHLCVQVKDSGCGIHPQDIPHLFTKFAQPRSGSSRKNGSAGLGLAICKRFVNLMGGHIWIESEGADKGCTATFIVKLGICNSPTDPSERKVGTKGQTTHGSGDLTRHKPLYRDNNGSTSSNPRYQRSF

SEQ ID NO: 7810 - protein, 462 aa, Bacillus cereus ATCC 14579
MTINSKTIEKSSYTYEELAEKNKAYVWHPFTQMKDYLEEDPVIIERGEGRKLYDVNGNEYWDGVSSIWLNVHGHQVPELDEAIREQLNKIAHSTMLGLANVPSILLAEKISEVVPDGLKKVFYSDSGSTAVEIAIKMAFQYWQHKGKPKKQRFVTLKEAYHGDTIGAVSVGAIDLFHQVYSSLLFDAIKMPYPYTYRSPYGNNKEEIVKSHLEEMEELLKEKHEEVAAIIVEPLMQGAGGMITMPKGYLKGLRDLCTKYNVLFITDEVATGFGRTGKMFACEHENVTPDILTAGKGLTGGYLPIAVTVTTDEIYNAFLGEYEEQKTFFHGHSYTGNPLGCAVAIANLELYEKTNLIEEVARKTDYVAAQLEKLFAYKHVGDIRQCGLMVGIELVKNKETKEAFDWTERVGVQVCKRSRELGMILRPLGNTIVFMPPLASTFEEIDDMLRILYKAISDVTEGE

SEQ ID NO: 7811 - protein, 461 aa, Escherichia coli CFT073
MADNKPELQRGLEARHIELIALGGTIGVGLFMGAASTLKWAGPSVLLAYIIAGLFVFFIMRSMGEMLFLEPVTGSFAVYAHRYMSPFFGYLTAWSYWFMWMAVGISEITAIGVYVQFWFPEMAQWIPALIAVALVALANLAAVRLYGEIEFWFAMIKVTTIIVMIVIGLGVIFFGFGNGGQSIGFSNLTEHGGFFAGGWKGFLTALCIVVASYQGVELIGITAGEAKNPQVTLRSAVGKVLWRILIFYVGAIFVIVTIFPWNEIGSNGSPFVLTFAKIGITAAAGIINFVVLTAALSGCNSGMYSCGRMLYALAKNRQLPAAMAKVSRHGVPVAGVAVSIAILLIGSCLNYIIPNPQRVFVYVYSASVLPGMVPWFVILISQLRFRRAHKAAIASHPFRSILFPWANYVTMAFLICVLIGMYFNEDTRMSLFVGIIFMLVVTAIYKVFGLNRHGKAHKLEE

SEQ ID NO: 7812 - protein, 189 aa, Triticum aestivum
MSEVAAMAGQAYMRQLSKHPLRTKAITSGVLAGCSDAVAQKISGVKRLQLRRLLLIMLYGFAYAGPFGHFFHKLMDKIFKGQKKGKETTAKKVIVEQLTVSPWNNMMFMMYYGLVVEGRPFGQVKSKVKKDFANIQLTAWKFWPIVSWINYEYMPLQLRVLFASSVASCWAVFLNLKAARSIAGASKNA

SEQ ID NO: 7813 - protein, 198 aa, Bradyrhizobium japonicum bv. glycinearum
PTPNLRGKTQIKEFASFPTLEQLPLWGFDGSSTQQAEGHSSDCVLKPVAVFPDAARTNGVLVMCEVMMPDGKTPHASNKRATILDDAGAWFGFEQEYFFYKDGRPLGFPTSGYPAPQGPYYTGVGFSNVGDVARKIVEEHLDLCLAAGINHEGINAEVAKGQWEFQIFGKGSKKAADEMWMARYLMLRLTEKYGIDIE

SEQ ID NO: 7814 - protein, 321 aa, Fusobacterium nucleatum subsp. nucleatum ATCC 25586
MEKNKLKILFLDRNAVGPYELKGIFSKYGEYTELNLTNNDDIASYLKDYDVVILNRIRLGKKEFEKTPHLKLVLLTGTGYNHIDLVAAKEYGVTIANVANYSTNSVSQLTMTLLLNELTRAEKLSQEVKQNKWEEISNKMDRYYHVDTEGKVLGILGHGNIGKKVESYAKSFGMEVMIAKIPGREYTDNLENRFELDEVLEKCDIFSIHAPLTDLTRDLINLDRMKKMKKSAIILNLGRGPIINEEDLYYVLKNKIISSAATDVMTTEPPQNDCKLLELDNFTVTPHLAWKSLKSVERLFAAIENNLNLFLENKLIGLESK

SEQ ID NO: 7815 - protein, 329 aa, Frankia sp. CcI3
MVEIYYDDDASLDVLADRKVAVIGYGSQGHAHALNLRDSGVDVRVGLPADSRSRARAEEEGLRVLTPAEASAEADIIMLLTPDTTHRTIYAESIAPHLTAGKALAFGHGFNIRYGLIEPPAGVDVFMVAPKGPGHLVRRVFEEGKGVPVLVAVEADASGNALAVALAYAKGIGGTRAGALRTTFTEETETDLFGEQAVLCGGASALVQAGFETLVEAGYTPEVAYFECLHELKLIVDLMYEGGISQMRYSISDTAEYGDVTRGPRVITPAVKAEMRKILDEIRDGAFAREWVAEDDNGRPNFTKLVAEGKQHPIEQVGAKLRPMMSWIA

SEQ ID NO: 7816 - protein, 339 aa, Idiomarina loihiensis L2TR
MTEKIKALRLNKPFGLDNIQVTEMEDPGQPGPGEIRVKVKASSLNFHDYGVASGFIPTEDGRIPMSDGAGVVEAVGEGVEEFAVGDNVVSTFFPYWQSGPAPVGDFHNTPGDGIDGYAREVVVRPTQFFTHQPKGYSHTESATLTTAGLTAWRALVVDGGIKPGNTVLVLGSGGVSVFACQLAKSLGATVFATSSSNDKLQQYKELGADHLINYKEDPEWGKTVRKLTGGRGVDHVIEVGGPGTLPQSINAVAIAGHIALIGVLTGSEGEVPTAKLMAKQARLQGLIVGSCDNQKDFVRALEANGVKPVIDKIFALEELADAFRYEESGKHFGKICVEF

SEQ ID NO: 7817 - protein, 548 aa, Pseudomonas fluorescens
MQDWQHSVIYQIYPKSFHSHAGNATGDLLGIVDKLDYLQWLGVDCLWITPFLRSPQRDNGYDISDYYAIDPSYGTMADCDLLIGEAAKRGIKLMLDIVVNHTSIEHEWFQQARSSLDNPYRDFYIWRDQPNNWESKFGGSAWEYEAQTGQYFLHLFDHTQADLNWDNPKVRAEVYKLMCFWRDKGVGGFRLDVINLISKPADFPEDNSDGRRFYTDGPHVHEYLQEMHREVFEGHDLINVGEMSSTSLEHCIRYSRPESKELSMTFNFHHLKVDYPNLQKWVRADFDFLQLKQILSDWQLGMQAGGGWNALFWCNHDQPRVVSRFGDDGEYRVVSAKMLATALHFLQGTPFVYQGEELGMTNPGFDQIGQYRDVETLNIYRLKRDAGESQASSMAAIMQKSRDNGRTPMQWNGQANAGFSSGEPWIGIPANAAQINVQSQLDDPDSVLHHYRALIALRRLEPLIQQGVYRQLLCDHAKVWAYLREGHGERLLVLNNFYGQPCEIQLPGQVISAASAQRLLISNYPDCPVRTDSITLRPYESFVLHLTD

SEQ ID NO: 7818 - protein, 1177 aa, Magnetococcus sp. MC-1
MLMDIKRILLSAWLLASLLLLLIVGLLFHRFIQHEFNRRAEQHLQFAQQFLLDELGQRRKDLQQRAASLAQSPNISGPMHLINRYEDPTRRETLVFDQEKEQLIHEVLKHIHDLNNILVVLYDTKQRPIVWINREQTKTSVGYRGFGPDGAINLTLQRPEQPSPPPQRDLAGLSHWLSKHPLYHLIHFDQEIAQAELSPMLWQSKGGEPKQAGTLLLISRLDEHFTNHIQLRTHTQVQLLHHNSTLNQKQTGTHPFQKLDLQQALTKSLDLSQLSSVPASGHSHWIDHADARLSLLHAPLDNGDLALFGFALPKEQISTSFMAFQGAAALGGGLTALMLIPLGWWFIRRQLVSPLHTLLHEIQQFHQEGRIPPRQIRYGASEFRTLTLEFRTLAHSIIEREKRLRTLSTGLEQAPISVLISDTQGNIEYVNPYFEQLTGYYSHEVLGKNPNLLKSDLNPPELFRDLWRTISAGAPWRGEFINRKKNGALHWQMAHIAPVLDNDGQITHFIALSEEITARKQADAALNESNERFRTLAQVSPVGIFQTDHDGEYIYVNTTWESITGTTSPQALSSQWDIHLHPDDQPRVQQRWQETVLHGNAFHEEYRFLRGDGTIRWVIGSAAPQRDPDRVIQGFVGTLTDITERKQMELELGKERALLRSLIDSIPDLIFYKRADGTYMGCNRAFELFCKRPEAALIGHTDQALFSPELAQLLKSGDELVINKNSCFSHEATGLFGDGHQVPFLIQKSPMHGYQGELLGLIGVARDITQRLRVEQELQQAKEDAEAANRSKSEFLAAMSHEIRTPMNVVIGMGEILLETPLNAEQTRYINSMQHAGDALLELIDNILDLSKIEAGRMTLEERAFRLDTMVISITDFFRLQALNHNLSLVVEIAPELEQQYVLGDAGRVRQVLYNLLGNALKFTEEGGVSLHLSLDANQHIHTRVSDTGIGIAPQQLERIFDNFTQEDSSVTRRFGGTGLGLAICRRFTELMGGRIWVESIEGQGSTFHMTLPLVLSHTPLHETPTTAVITPYNQGIVEAPCAFTPEHPQRPLSILLVEDSEDNRTLFKAFLQHTPHALVMVENGADALERVIVERFDLIFMDMQMPIMDGYSATRAIRQWEQQRGVPPHIIYALTAHALSGDRERSLQAGCDDHLTKPIKKRKLLEIIQQHAQPVE

SEQ ID NO: 7819 - protein, 198 aa, Bradyrhizobium yuanmingense
PTPNLRGKTQIKEFASFPTLEQLPLWGFDGSSTQQAEGHSSDCVLKPVAVFPDGARTNGVLVMCEVMMPDGKTPHPSNKRATILDDSGAWFGFEQEYFFYKDGRPLGFPTAGYPAPQGPYYTGVGYSNVGDVARKIVEEHLDLCLAAGINHEGINAEVAKGQWEFQIFGKGSKTAADQMWMARYLMLRLTEKYGIDIE

SEQ ID NO: 7820 - protein, 686 aa, Desulfurococcus mucosus [sequence omitted]

SEQ ID NO: 7821 - protein, 454 aa, Malus sylvestris
FNSHGEDSSYFLGWQEYEKNPYHEVLNTNGIIQMGLAENQLCFDLLESWLAKNPEAAAFKKNGESIFAELALFQDYHGLPAFKKAMVDFMAKIRGNKVTFDPNHLVLTAGATSANETFIFCLADPGEAVLIPTPYYPGFDRDLKWRTGVEIVPIHCTSSNGFQITETALEEAYQEAEKRNLRVKGVLVTNPSNPLGTTMTRNELYLLLSFVEDKGIHLISDEIYSGTAFSSPSFISVMEVLKDRNCDENSEVWQRVHVVYSLSKDLGLPGFRVGAIYSNDDMVVAAATKMSSFGLVSSQTQHLLSAMLSDKKLTKNYIAENHKRLKQRQKKLVSGLQKSGISCLNGNAGLFCWVDMRHLLRSNTFEAEMELWKKIVYEVHLNISPGSSCHCTEPGWFRVCFANLPERTLDLAMQRLKAFVGEYYNVPEVNGGKQPFKPLKKTVAHKVGFPAILR

SEQ ID NO: 7822 - protein, 1064 aa, Dechloromonas aromatica RCB
MKFDSISRGNRLWLVIGLTLLPLFLLTVKDYLSERQKALEKIEFEARLTLKGAEYAEAASVREIEIILKAMANADNMASLEPADCDGLARRLKSVHGDLLNLGAATPNGDVFCSTSPRTNVISVKDRAWFAEAQQKPGITQGHFQVGRISGKPGITFGYSVPGADGAPRTILFASTKNGWFDRFTNVAALPAGWSSQIRTRDGTTISRYPDPELGRDKELSPESRQRFIDAIADKRTTVVMRGVDDLEHIFVMAPLHVANDDLILSVGIPTASSLDLVEQEFRRRLIVLLLISLASVGLARLFLHEMLDRKFGATIKELTRLKKALDNVPAYIYLKDAAHHYRYANAKTLSLFGTDAESLKGKGDEHFFPPETVSRLRQVDAQVLAGKNTDEIITITDEHGQRAIYHEIKAPLWELDEKTPWGLCGISIDITQYRLAEEAVARLSRAVEQSPESIVFTDLEGNIEYVNAAFLAITGYLREEVIGRNPRILQSGNTPRERYDEMWATLKAGKVWRGELINKRKDGSEYLELATISPIRQPDGKISNYIAIKADITEQRKNQEELEKYRTGLERLVQQRTQELAVAKEAAEVASRAKSTFLANMSHEIRTPMNAIMGLGYLLEQSPLNTEQQDKVRKIHGAAKHLLSILNDVLDLSKIEAGKMTLDRCAYSPAEELTAVASMIGEDAQRKGLTVITETDDLPPFTIGDPTRLRQAILNFAGNAVKFTEHGSIRLRGEIAETQPDNYLLRFSVSDTGPGIAPELQARLFTAFEQADSSSTRRLGGTGLGLAISRHLSHLMGGDAGVDSTLGQGSTFWLTVRVDKTTETRSPVNATDNDGESLRHEPPWRVLVVEDSEINREIVAEILMEVGIVVDTAEDGVKAVEKAAQTHYNLILMDIQMPNMDGLEATRQIRRHAVNPNIPIIALTANAFDSTRRETRLAGMNDFVTKPMEPATLYTALLRWLPAARTPQAAAIPEQALSDAELTAQLHTLTEALSTGDIAANHRYQVLHPNIRRQMANNDLIELDLAMARYAYDDALAILERWRHNAPPPRPDSETRQDEATHE

SEQ ID NO: 7823 - protein, 178 aa, Leuconostoc mesenteroides subsp. mesenteroides ATCC 8293
  misc_feature (99)..(99): Xaa can be any naturally occurring amino acid
  unsure (1)..(178): unsure at all Xaa locations
DEAIRVIHNAKTQKPAVCNAAEKLLIHEAIAGEFLPKIVDDLLAAGVKLRGDQKARSIDSRVIGASAEDWDTEYNDLIMAIKIVHNNDEAITWINDHTXHHSETIISEDLNHVTDFMNTVDAAVVYQNVSSRFTDGFEFGFGAEIGISTQKLHARGPMGLSALTTIKYEVFGEGQIRE

SEQ ID NO: 7824 - protein, 508 aa, Oryza sativa (japonica cultivar-group)
MGRVGLGVAVGCAAVTCAIAAALVARRASARARWRRAVALLREFEEGCATPPARLRQVVDAMVVEMHAGLASDGGSKLKMLLTFVDALPSGSEEGVYYSIDLGGTNFRVLRVQVGAGSVIVNQKVEQQPIPEELTKGTTEGLFNFVALALKNFLEGEDDQDGKMALGFTFSFPVRQISVSSGSLIRWTKGFSIRDTVGRDVAQCLNEALANCGLNVRVTALVNDTVGTLALGHYYDEDTVAAVIIGSGTNACYIERTDAIIKCQGLLTNSGGMVVNMEWGNFWSSHLPRTPYDILLDDETHNRNDQGFEKMISGMYLGEIARLVFHRMAQESDVFGDAADSLSNPFILSTPFLAAIREDDSPDLSEVRRILREHLKLSDDSLFQIPDAPLKTRRLVVKVCDIVTRRAARLAAAGIVGILKKLGRDGSGAASSGRGRGQPRRTVVAIEGGLYQGYPVFREYLDEALVEILGEEVARNVTLRVTEDGSGVGAALLAAVHSSNRQQQGGPI

SEQ ID NO: 7825 - protein, 315 aa, Idiomarina loihiensis L2TR
MNKKSIPATVLAASLTAGASGGEVVKVPSEVAFKYEQVDNVRVFYREAGNENDPTVLMLHGFAASSFMWRDVIDALADDYHVVALDLPAFGFTEVSGDDEYSYTFANLTETVEKFIEQKELTKFALAVHDYGAPVGWRLAVDNPEKITAIVSQNGNAYEEGLADGWKPIKKYWNNPTQENREALSDFPTPESIKWQYEEGVSDLSKVSPDGYTLEGFHISKPGMADIQLDLLLDYASNVEQYPEYQAYFRKHQPPLLAVWGKNDPFFLQEGAKAWKRDIPDAEIHLYDTGHFALETHHSVIIPVIKQFLDKNLKL

SEQ ID NO: 7826 - protein, 183 aa, Eucalyptus grandis
MGRGRVELKRIENKINRQVTFAKRRNGLLKKAYELSVLCDAEVGLIIFSNRGKLYEFCSSSSMLKTLERYQKCNYGALEPNVSARESLELSCQQEYLRLKARYEGLQRTQRNLLGEELGQLCSKELESLERQLDGSLKQIRSRRTQYMLDQVTDLQHREQVVHEANRTLNQRLMEGYQVMRSS

SEQ ID NO: 7827 - protein, 338 aa, Acinetobacter lwoffii
MAKILVTGGAGYIGSHTCIELLNAGHEVIVFDNLSNSSEEALRRVQKLTNKSLVFIQGDIRNQSELDLVFQDHQIDAVIHFAGLKAVGESQQIPLTYFDNNIAGSIQLTKSMEKAGVFKLVFSSSATVYDEVNTSPLNEDMSTGIPNNNYGYTKLIVEQLLQKLAHADRRWSIALLRYFNPVGAHKSGQIGEDPQGIPNNLMPYVTQVAVGRREKLSIYGNDYDTVDGTGVRDYIHVVDLANAHLCALSNRLSAQGCRVWNIGTGNGSSVLQVKNTFEQVNGVSIAFEFVSRRAGDVATSFADNTRAQLELGWKPQYSLEDMLTDSWNWQKQNPNGYN

SEQ ID NO: 7828 - protein, 468 aa, Synechocystis sp. PCC 6803
MNPSSSPSQSTANVKFVLLISGVAALGGFLFGFDTAVINGAVAALQKHFQTDSLLTGLSVSLALLGSALGAFGAGPIADRHGRIKTMILAAVLFTLSSIGSGLPFTIWDFIFWRVLGGIGVGAASVIAPAYIAEVSPAHLRGRLGSLQQLAIVSGIFIALLSNWFIALMAGGSAQNPWLFGAAAWRWMFWTELIPALLYGVCAFLIPESPRYLVAQGQGEKAAAILWKVEGGDVPSRIEEIQATVSLDHKPRFSDLLSRRGGLLPIVWIGMGLSALQQFVGINVIFYYSSVLWRSVGFTEEKSLLITVITGFINILTTIVAIAFVDKFGRKPLLLMGSIGMTITLGILSVVFGGATVVNGQPTLTGAAGIIALVTANLYVFSFGFSWGPIVWVLLGEMFNNKIRAAALSVAAGVQWIANFIISTTFPPLLDTVGLGPAYGLYATSAAISIFFIWFFVKETKGKTLEQM

SEQ ID NO: 7829 - protein, 556 aa, Oryza sativa
MGEMNQPPPPPVAVPPPMVMQPIMHPPVGTGAVFPPHEQFHHLAYCVHSNPSWVQVAALAFLHYLVMLGSTVMLASTIVPAMGGTPGDKARVIQSFLFMSGINTLLQTLVGTRLPTVMNASFAFVVPVLSIAKDFEQNNYASSHQRFTHTMRATQGALIVASILNMILGFSTIWGAFARKFSPVIMTPVVCVVGLGLFALGFPQVGKCVEIGLPMLILAVVVQQYVPYYFHHYHERITFLFERYSLLLCIGIVWAFAAILTAAGAYNHVSLKTQQHCRTDKSYLISSAPWIKIPYPFQWGTPIFTAGHSFGMMGAVLVSAFESTGAHFATARLAGATPPPASVLSRSVGLQGIGMFLEGIFGAPAGSSVSVENIGLLGLTKVGSRRVIQISTGFMIFFSIFGKFGAFFASIPLPIFAAIFCILFGIVAAVGVSYMQFVNKNSMRNIYIIGLSLFLGISVPQYFHEYTASASTGPARTNAGWFNDIINTVFASGPTVSLIVASILDNTLEFRGYENDRGLPWFMPFLHRRKGYSDPRNDEFYSFPIRVHDVIPSRFL

SEQ ID NO: 7830 - protein, 299 aa, Candida albicans SC5314
MIFNYLLALFQILVLASARAQADEYASDPNIFELTPSNFDKVVHKSNYTTLVKFYAPWCGYCQKLQPVYHKLGKYINKDAKYSINIASVNCDKDYNKQLCSQYQVRGFPTLMVFRPPKYEKGKQVKLQKHASEVYQGERTVKSITKFLTSRLKNYVKKFHNIRSDGIAEWLAEDIPSVLLISNANSVSPLLKSIAIDFLDRVNVGMISKFNDESHKFVIGDKEIEVPATSKSSLFYFNKEKGELVAYTKSDKLNDKIKITEWIIEQTQQQPIEGPLSKKEKKYYYKYRTGKKKIEHDEL

SEQ ID NO: 7831 - protein, 286 aa, Arabidopsis thaliana
MQLKVPEHQVAGHIAKDGKPGPLVDDKGRFFKPLQGDSRGEIEVKFYESFSSNTEVPEHIHRYFPVYHGTQAVEGSDGAAMMVLENLLAEYSKPSVMDVKMGSRTWYPDASEEYIQKCLKKDTGTTTVSSGFRISGFEVYDHKESSFWKPERKLLRGLDVDGARLTLRKFVSSNSLSDTGSKPDSAFASSVYGGSHGILTQLLELKTWFENQTLYHFNSCSILMVYENESILKGNDDDARPQVKLVDFAHVLDGNGVIDHNFLGGLCSFINFIREILQSPDESADS

SEQ ID NO: 7832 - protein, 675 aa, Glomerella lindemuthiana
MADRLPTSTSSGRRRRDGDASIGEFVIGGEIGKGSFAQVYSGHHKNSKAAVAIKSVEMGRLNNKLRENLYGEIQILKTLRHPHIVALHDCVESATHINLVMEYCELGDLSFFIKKRDRHGTNAATEDMARKYPVTPGSGLHEVVTRHFLQQLASALKFLREKNYVHRDVKPQNLLLLPSPGFRKENSRPILTASNDSLIPNAGLASLPMLKLADFGFARVLPSTSLADTLCGSPLYMAPEILRYERYDAKADLWSVGTVLYEMITGRPPFRARNHVELLRKIEATEDKVKYPKDAVVSKDLVKLIGKLLTRNPVERMRFEDFFNDPVVVGPIPGVVEDDIPKVEQKPSRDLRSLEADPQREQSELAKSPRERPLRSPQLPSPDEVRVPQANVSARTGQSPGREIGEGLGIRRPPMPQPSTSAPSRPHRLSNASLNRPPIRASASPPTSYLNERKLRPVTERSMTEQDKAAQDVAFERDYVVVEKKHVEVNAFADEMAANPRLTSLSPKNGQMVRRATQQGPPTSTTGAGRMQPSSAVQIAQGKGRPGHDHPCVSLASRSLNTSSAARAPLRPCTTRSPRIRHRHPLLLLDSSVTADRAHHLTKMHGSSSSSKTSHIVVIVYMALPKSSLSNFSLWHLPWITPWVAPLPTKSMRMVLLSRQRWLCLRRLSCFTSRL

SEQ ID NO: 7833 - protein, 251 aa, Nocardioides sp. JS614
MNRLQGKVAIVTGGAQGQGAGISRAFVAEGARVVIADIAKEQGQELAAELGDTAHFIDHDVSDQASWTALVEDTGQRFGPVNVLANNAGILRFGEIEKMPVDEVELLWRVNQLGCFLGMNAVSRTMREHGGGSIINASSVEGLAGMAGCTAYAATKWAIRGMTKCAAMELGPQGIRVNSVHPGMIDTPMTRVHGGDAAMEYGAAKVPLRRVGYPDDIAPLYVYLASDESAYVNGAEIAIDGGVTATHAFGG

SEQ ID NO: 7834 - protein, 245 aa, Eucalyptus grandis
  misc_feature (151)..(151): Xaa can be any naturally occurring amino acid
  unsure (1)..(245): unsure at all Xaa locations
MGRGKVELKRIENKINRQVTFAKRRNGLLKKAYELSVLCDAEVALIIFSNRGKLYEFCSSSSMMKTIEKYQKCSYGSLETNCSINEMQNSYQDYLKLKARVEVLQRSQRNPPWEELGPLNSKELEQLEHQLENSLKQIRSAKTQFMFDQLXHLQHKEQMLVEANRELWKKLEESNTRIPLRLGWEAEDHNNISYSRLPTQSQGLIFQPLGGNPTLQIGYNPAGSNELNVSAADQHPNGFIPGWML

SEQ ID NO: 7835 - protein, 499 aa, Cryptococcus neoformans var. neoformans B-3501A
MDSEGRNTAPLQPSPASPSRHQSPLAENQGSSSSISKGKKKSLLDGVAHNGESPSSPGPISIKRRLVRPKKIRQSHGDVSPPASVDPQIRQETLAVAEPEPLKPARSPSLRQSSRSPSRHPSPAASTPSFADAPLPPPPRSRFAPPRSAHPPLVSCRSVYNYTRLNHIEEGTYGVVFRARCNDTGEIYALKKLKLDEEKQGFPITSLREVMALMISGGHENVVGIREIVVGDTLNQVFIVMPFIEHDLKTLLADMPHPFLQSEVKTIMLQLLSAVAHCHANWILHRDLKTSNLLMNNRGQIKVADFGLARKFGDPLGEMTQLVVTLWYRSPELLLGGKEYTTAVDIWSIGCIFAELMQGEPLFPGRGEIDQINRIFQLLGRPNDESWPGYSTLPLVQKINPIGPMFSTLRQKFKHLTYEGHNLLSSLLCYDPERRITAEEALKHPYFSEHPLPKHPDLFSSFPSQAAGERKHKSLISPSAPVREDRMAKDSLADLDSFV

SEQ ID NO: 7836 - protein, 391 aa, Bacillus cereus E33L
MSFIDGENYRMKRARKKKHKGIVISSIAGTIVGASLFAFGAPLFSNDADAFPQAEASGSNMAEAQGIKQISFVDAVDRASEAVVGVINIQRDNFSEADSEAGTGSGVIYKKTDGQAYIVTNNHVVAGANRIEVSLSDGKKVPGKVLGTDVVTDLAVLEIDAKHVKKVIEIGDSNTVRRGEPVIAIGNPLGLQFSGTVTQGIISANERIVPVDLDQDGHYDWQVEVLQTDAAINPGNSGGALVNAAGQLIGINSMKIAAKEVEGIGLAIPVTRAVPIMNELEKYGKVRRPYVGIELRSLNEIPNYYWSKTLHLPGNVTEGVCILDVKSPSPGTDAGLREHDVIVAVDGKPVRDIIGFRTALYDKKINDKMTLTFYRGTKRATTTVKLGIQKY

SEQ ID NO: 7837 - protein, 309 aa, Arabidopsis thaliana
MEITLNSGFKMPIVGLGVWRMEKEGIRDLILNAIKIGYRHLDCAADYRNETEVGDALTEAFKTGLVKREDLFITTKLWNSDHGHVIEACKDSLKKLQLDYLDLFLVHFPVATKHTGVGTTDSALGDDGVLDIDTTISLETTWHDMEKLVSMGLVRSIGISNYDVFLTRDCLAYSKIKPAVNQIETHPYFQRDSLVKFCQKHGICVTAHTPLGGATANAEWFGTVSCLDDPVLKDVAEKYKETVAQVVLRWGIQRKTVVIPKTSKPARLEENFQVFDFELSKEDMEVIKSMERKYHANQPAKFWNIDLYA

SEQ ID NO: 7838 - protein, 368 aa, Thermotoga maritima MSB8
MTVLIVEDDDITREAMGQYLKLSGFNVIEAENGEKAVELSENVDVALVDVMLPGMSGIEVVNKIKAKNPSCVVFVVTAYDDTEIVKKCVEAGADDFIKKPVNLELLRLKITHALRNRVFHMYRNSYLKSLKKKLFLLEKTAEEFFTEYEDFLFEVLEILNMLSEYRDMETHRHTERVGWLSGRIAEEMGMSEVFVTEIQFAAPLHDIGKIGIPDRILLKPGILTPEEFEIMKQHTTIGFRILSRSNSPILQLGAEIALTHHERWDGSGYPRGLKEREIPISGLIVAVADSFDAMVSRRPYKNPKPLEEAFREIESLSGKLYSPEVVEAFLKLEKEITDVYRREKDEDTSHNGGRSHQSSPGEGVEGIR

SEQ ID NO: 7839 - protein, 140 aa, Onion yellows phytoplasma OY-M
MIKMLFSLINQNQDLLENLFEDFKTNSLTNNNNIMKTDIQEQDNQYFITIELPGFKKEDVKVALEEGYLVVEAKNSKKNQIKEANFIRKERFQGFLRRSFYLGDDFLLEDIKGSLEQGLLKLSVPKKEVKPKEKHYIKLN

SEQ ID NO: 7840 - protein, 272 aa, Pseudomonas aeruginosa PAO1
MSAAEPFFATRLPRLVMFDLDGTLVDSVPDLTAAVDSMLASFGRPPAGIEKVRQWIGNGARVLVRRALAGSIEHDGIGEEETEAALALFMEAYADSHALTEVYPGVVDTLKWLKRNGVEMALITNKPERFVAPLLDEMKLGRYFRWIIGGDTLPQQKPDPAALLFVMKMAGIEPEDALFVGDSRNDVLAAKAAGVRCAALTYGYNHGRPIAEEAPTLVIDNLRDLLPCADQAAEIVLPDDSLSPSDQRDQAVAVSKLWMKVIKALARWRWRA

SEQ ID NO: 7841 - protein, 239 aa, Yarrowia lipolytica CLIB122
MENTEGYIEEREGDLEYDRMMEYEQGQEGDHEHDPHGEHGGAADNGLDQMTGTFNNVAQGLSGHYRSIMLAYWQEIISSIEHDEHEFKVHQLPLARIKKVMKADEDVKMISAEAPILFAKGCDIFITELSMRAWIHAEEHKRRTLQRSDIASALQRSDMFDFLIDIVPREEATLPPGARSRQTQSAAAAAAAAAAMYMGDEEEEYLQESLEEGHQMEGGVPGVIPTHPLQEQMGMFQQE

SEQ ID NO: 7842 - protein, 600 aa, Pseudomonas syringae pv. syringae B728a
MTTSESSATSSVKIYFRLLSYVRPYVGIFLLSIIGFVIFASTQPMLAGILKYFVDGLTNPEAVLFPNVPYLRELQLLQAVPLLIVLIAAWQGLGSFLGNYFLAKVSLGLVHDLRVELFNKLLVLPNRYFDTTNSGHLISRITFNVTMVTGAATDAIKVVIREGLTVVFLFIYLLMMNWKLTLVMLAILPLIAVMVGTASKKFRKQSKKIQVAMGDVTHVASETIQGYRVVRSFGGEAYEQARFAQASNSNTQKQLRMTKTGAIYTPMLQLVIYSAMAVLMFLVLFLRGEATAGDLVAYITAAGLLPKPIRQLSEVSSTIQKGVAGAESIFEQLDVEEEVDTGTIERERVTGHLEVKNLSFFYPQTARQVLNDISFSAAPGQMIALVGRSGSGKSTLANLIPRFYGHDIGNILLDGVEINDYRLRNLRRHIAQVNQNVTLFNDTIANNIAYGDLAGAPRADIEAAAADAYAREFIDQLPQGFDTQVGENGVLLSGGQRQRLAIARALLKNAPLLILDEATSALDTESERHIQAALDHVMKGRTTLVIAHRLSTIEKADLILVMDAGQIVERGTHTELLAQNGYYARLHAMGLDEPAPVGAV

SEQ ID NO: 7843 - protein, 157 aa, Glycine max
  misc_feature (63)..(63): Xaa can be any naturally occurring amino acid
  misc_feature (149)..(150): Xaa can be any naturally occurring amino acid
  unsure (1)..(157): unsure at all Xaa locations
MASALRLSSAFRAAAPLRTTAFNGLRCYSSKTQSLKETFANKLPGEIEKIKKLRKEHGNTVVXEVTLDQVYGGARGIKSLVWEGSVLDSEEGIRSRGKTIPECQELLPKAPGGQEPLPEGLFWLLLTGEVPSEQQVRDLSAEWAGRSDXXKFVEELI

SEQ ID NO: 7844 - protein, 334 aa, Bacillus halodurans C-125
MAILVTGGAGYIGSHTVLFLLEQGEQVIVLDNLQKGHAGALSDVTFYHGDIRDDQLLDTIFTTHSIDTVIHFAANSLVGESVKQPIEYYENNVIGTHTLLKKMLEHDVKKIVFSSTAATYGEPVQIPIQESDPTIPTNPYGETKLAIEKMFHWCQEAYGLQYVCLRYFNAAGADPNGRIGEDHSPESHLIPIVLQVALGQRERVAIFGDDYQTEDGSCIRDYIHVMDLANAHYLACEHLRKDGQSGSFNLGNGKGFSVKEVIEVCRQVTGHPIPAEIAPRRSGDPASLIASSEKAQTILGWEPKYPSLETMVEHAWNWHKEHPHGYSTENKDKQ

SEQ ID NO: 7845 - protein, 547 aa, Lactococcus lactis
MYTVGDYLLDRLHELGIEEIFGVPGDYNLQFLDQIISREDMKWIGNANELNASYMADGYARTKKAAAFLTTFGVGELSAINGLAGSYAENLPVVEIVGSPTSKVQNDGKFVHHTLADGDFKHFMKMHEPVTAARTLLTAENATYEIDRVLSQLLKERKPVYINLPVDVAAAKAEKPALSLEKESSTTNTTEQVILSKIEESLKNAQKPVVIAGHEVISFGLEKTVTQFVSETKLPITTLNFGKSAVDESLPSFLGIYNGKLSEISLKNFVESADFILMLGVKLTDSSTGAFTHHLDENKMISLNIDEGIIFNKVVEDFDFRAVVSSLSELKGIEYEGQYIDKQYEEFIPSSAPLSQDRLWQAVESLTQSNETIVAEQGTSFFGASTIFLKSNSRFIGQPLWGSIGYTFPAALGSQIADKESRHLLFIGDGSLQLTVQELGLSIREKLNPICFIINNDGYTVEREIHGPTQSYNDIPMWNYSKLPETFGATEDRVVSKIVRTENEFVSVMKEAQADVNRMYWIELVLEKEDAPKLLKKMGKLFAEQNK

SEQ ID NO: 7846 - protein, 559 aa, Escherichia coli O157:H7 EDL933
  misc_feature (112)..(112): Xaa can be any naturally occurring amino acid
  unsure (1)..(559): unsure at all Xaa locations
MKQKITDYLDEIYGGTFTATHLQKLVTRLESAKRLITQRRKKHWDESDVVLITYADQFHSNDLKPLPTFNQFYHQWLQSIFSHVHLLPFYPWSSDDGFSVIDYHQVASESGXWQDIQQLGECSHLMFDFVCNHMSAKSEWFKNYLQQQPGFEDFFIAVDPQTDLSAVTRPRALPLLTPFQMDDNSTRHLWTTFSDDQIDLNYRSPDVLLAMVDVLLCYLEKGAEYVRLDAVGFMWKEPGTSCIHLEKTHLIIKLLRSIIDDIAPGTVIITETNVPHKDNIAYFGEGDDEAHMVYQFSLPPLVLHAVQKQNVEALCQWAQSLSLPSGKTTWFNFLASHDGIGLNPLRGLLPESEILALVEALQQEGALVNWKNNPDGTRSPYEINVTYMDALSRRESSDEERCARFILAHAILLSFPGVPAIYIQSILGSRNDYAGVEKLGYNRAINRKKYHSEEITRELNDEATLRHAVYHELSRLITLRRSHNEFHPDNNFTIDTVNSSVMRIQRSNAEGNCLTGLFNVSKNIQHVNITGLHGRDLISEVDILGNKITLRPWQVMWIK

SEQ ID NO: 7847 - protein, 330 aa, Escherichia coli
  misc_feature (40)..(40): Xaa can be any naturally occurring amino acid
  misc_feature (43)..(43): Xaa can be any naturally occurring amino acid
  misc_feature (118)..(118): Xaa can be any naturally occurring amino acid
  misc_feature (128)..(128): Xaa can be any naturally occurring amino acid
  misc_feature (172)..(172): Xaa can be any naturally occurring amino acid
  misc_feature (228)..(228): Xaa can be any naturally occurring amino acid
  misc_feature (267)..(267): Xaa can be any naturally occurring amino acid
  unsure (1)..(330): unsure at all Xaa locations
TIKVGINGFGRIGRIVFRAAQKRSDIEIVAINDLLDADYXAYXLKYDSTHGRFDGTVEVKDGHLIVNGKKIRVTAERDPANLKWDEVGVDVVAEATGLFLTDETARKHITAGAKKVVXTGPSKDNTPXFVKGANFDKYAGQDIVSNASCTTNCLAPLAKVINDNFGIIEGLXTTVHATTATQKTVDGPSHKDWRGGRGASQNIIPSSTGAAKAVGKVLPELNGKLTGXAFRVPTPNVSVVDLTVRLEKAATYEQIKAAVKAAAEGEXKGVLGYTEDDVVSTDFNGEVCTSVFDAKAGIALNDNFVKLVSWYDNETGYSNKVLDLIAHISK

SEQ ID NO: 7848 - protein, 269 aa, Triticum aestivum
MQILNEQLAAPSTGLMVKESASPGSGSGSPGGAAEKMGRGRIEIKRIENTTNRQVTFCKRRNGLLKKAYELSVLCDAEVALIVFSGRGRLYEYSNNSVKATIERYKKATSDTSSAGTVAEINAQHYQQESAKLKQQITTLQNSNRTLIGDTMATMSHRDLKQLEGRLDKGLGKIRARKNELLCAEIEYMQRREMELQNNNFFLREKVAETERGQQQTLNMMGAASTSNEYEQNMIHCDPRTFLQFNFMQQQPQYYSQQEDRKSLNSVGR

SEQ ID NO: 7849 - protein, 474 aa, Wolinella succinogenes
MNLRLFCLGSLFMTYALAFSVSEAPAIERRVAPDVSSGVVYSYYDSIKDAKRGVVNISTQKKVKGASGIDPSHPLFNDPFFKQFFGDMFGQVIPKDRIERSLGSGVIISKDGYILTNNHVIDGADKVIVSLPDNSKEYEAKVIGKDPRSDLAVIKIEGKDFPFVIFGSSNDLRVGDVVFAIGNPFGVGETVTQGIVSALNKSGIGINDYENFIQTDASINPGNSGGALVDSRGALVGINTAILSRTGGNHGVGFAIPSDMAKKIAITLIDKGVIERGYMGVSIQDVTQDLRDLYGDKEGAVIISTESSSPAAKAGLKVWDLITKIDEKPVKNAADLKNIIGSYSPNDKVKVTYIRDKKESTATLKLIEAPSNAKTSGAGVSNSAIDGLMLSAIDDRIRQRYRLAIDTSGVLVIGVQAGSYAEEIGFSEGDIILQIENYPIKDIASFNEAMKQHKGKAKRLLVSRGGTIFSVVVK

SEQ ID NO: 7850 - protein, 218 aa, Magnetococcus sp. MC-1
MCKTPISNFLTQLKQGHQQFLRDELPNHLALFQRLSAEGQNPRAAVVACSDSRIHPNMITQSSPGELFIIRNVANLVPPHDPDGGYHGTSAALEYAVRVLNVEAIIILGHSCCGGVRALSQDCCEKVGADGSDFIGKWMEIAWNDAHVQQLALTAAKTGQHRPLEERMVTLSIHNLRGFPFIHQRETAGTLELIGLYFNIAEGRLYRYEPSIDAFEPL

SEQ ID NO: 7851 - protein, 330 aa, Escherichia coli
TIKVGINGFGRIGRIVFRAAQKRSDIEIVAINDLLDADYMAYMLKYDSTHGRFDGTVEVKDGHLIVNGKKIRVTAERDPANLKWDEVGVDVVAEATGLFLTDETARKHITAGAKKVVMTGPSKDNTPMFVKGANFDKYAGQDIVSNASCTTNCLAPLAKVINDNFGIIEGLMTTVHATTATQKTVDGPSHKDWRGGRGASQNIIPSSTGAAKAVGKVLPELNGKLTGMAFRVPTPNVSVVDLTVRLEKAATYEQIKAAVKAAAEGEMKGVLGYTEDDVVSTDFNGEVCTSVFDAKAGIALNDNFVKLVSWYDNETGYSNKVLDLIAHISK

SEQ ID NO: 7852 - protein, 258 aa, Arabidopsis thaliana
MCALVPPLFPNFGWPSTGEYDSYYLAGDILNNGGFLDFPVPEETYGAVTAVTQHQNSFGVSVSSEGNEIDNNPVVVKKLNHNASERDRRRKINSLFSSLRSCLPASGQSKKLSIPATVSRSLKYIPELQEQVKKLIKKKEELLVQISGQRNTECYVKQPPKAVANYISTVSATRLGDNEVMVQISSSKIHNFSISNVLSGLEEDRFVLVDMSSSRSQGERLFYTLHLQVEKIENYKLNCEELSQRMLYLYEECGNSYI

SEQ ID NO: 7853 - protein, 441 aa, Ralstonia eutropha JMP134
MTHVFHRNPRQTLPVAVAGSGVELVDSEGRRYLDASGGAAVSSLGHGHPRVIAAIKAQLDTIAYAHTSFFTTEVSETLAQTLAQAAPGDLEHVYFVSGGSEAVEAALKLARQYFVELGQGSRRHFIARRQSYHGNTLGALAIGGNAWRREPFLPLLVPAHHVSPCYAYRDQVAGETDAQYAQRLADELEAKIQELGAENVAAFVAETVVGATAGAVPPVGDYLKRIRAVCDKYGVLLILDEVMSGMGRTGYLFACEEDGVVPDIVTIAKGLGGGYQPIGAMISTRRIYDTIVAGSGFFQHGHTYIGHATACAAALAVQRTIAEDNLLANVRQRGEQLRARLRESLGNHPNLGDIRGRGLFVGVEFVADRDSKATLDPKLKTHARLKSTAMQHGLLVYPMGGTVDGVHGDHVLFAPPFICTAQDIDKIVERFTAAVAAVLPA

SEQ ID NO: 7854 - protein, 613 aa, Bacillus cereus E33L
MKKVGFFQSIHLKFVLIYMLLILIAMQVIGVYFVRELEKSLVQGFRDSLTQQTNLLSYNLKQEFKKSHTKAETESTDETIKTSIRKFASDRKKDIQEVSVFDSNRKLLAISDESKQNKVNRTSTDIAVQRVLVQKKPEVKIEKDGRTGHRVQVMITPIMDDNNKDALGAIYVVASMEDVYKQMKDINQIFATGTVIALLVTAVLGILLAQTITRPISDMRRQAIEMAKGNYSRKVKVHSHDEIGQLALSFNNLSKKLQQARSSTESERRKLSSVLSHMTDGVIATDRKGDIILLNDPAEKMLNVSRETALDQSVLEVLGIQEEFTLDHLYEEPDSVLLDFSTRNEPYILRASFSVIQKETGKANGLIAVLYDVTEQERIERERREFVANVSHELRTPLTTMRSYLEALTDGAWQDPNIAPQFLTVTQEETERMIRLVNALLQLSKLDSTEHRLMKEWVDFTDFFNNIIDRFEMSKEQNVSFKRSFSKKSRFIDMDTDKITQVLYNIISNALKYSPEGGTVTYRLRDRGELLEISVSDQGMGIPKENVDKIFERFYRVDKARSRQMGGTGLGLAIAKEMIEAHGGSIWAKSEEGKGTTIYFTLPMAADEEDDWE

SEQ ID NO: 7855 - protein, 317 aa, Arabidopsis thaliana
MGESKRTEKTRVLVVGATGYIGKRIVRACLAEGHETYVLQRPEIGLEIEKVQLFLSFKKLGARIVEGSFSDHQSLVSAVKLVDVVVSAMSGVHFRSHNILVQLKLVEAIKEAGNVKRFLPSEFGMDPPRMGHALPPGRETFDQKMEVRQAIEAAGIPYTYVVGACFAAYFAGNLSQMVTLLPPKEKVNIYGDGNVKVVFADEDDIAKYTAKTLNDPRTLNKTVNIRPPDNVLTQLELVQIWEKLTGKELEKTNIAAQDFLAHIEQMEIPHQAGIGHFYHIFYEGCLTDHEVGEDEEASSLYPDVKYKRMDDYLRMFL

SEQ ID NO: 7856 - protein, 406 aa, Pasteurella multocida subsp. multocida str. Pm70
MKRAVITGFGIISSIGNNKDEVLASLKAGKSGIEVMPEFVEIGMRSHVAGTVKLNPSELIDRKIYRFMGDAAAYAYLSMKEAIEDAGLTEDQVSNDRTGLVIGAGTGSAHNQLIACDAVRGPRGVKAVGPYAVTKTMASSVSACLATPYKIRGVNYSISSACATSAHCIGHALELIQLGKQDIVFAGGAEELSWECATEFDAMGAVSTKYNDTPEKASRAYDANRDGFVIAGGGAVVVVEELEHALARGAKIYAEIVGYGATSDGYDMVAPSGEGAERCMRQAMATVDTPIDYINVHGTSTPVGDVKELGAIKNVFGDKVPAISSTKSMTGHSLGAAGAHEAIYTLLMLDNDFIAPSINIETLDENAKGCNIVTETVENAGLKTVMSNSFGFGGTNAALIFKKYQA

SEQ ID NO: 7857 - protein, 377 aa, Zea mays
  misc_feature (357)..(357): Xaa can be any naturally occurring amino acid
  unsure (1)..(377): unsure at all Xaa locations
MASEWEMAMGVELGMGMGGTYHHNASSITTAPMMMSSHPHSHSGGAASYSTPHHHHYYGGMPPMGDAMRVDDLLDLSTPGAGAHEFFPTAAPATDKGHHSSGAMGEPSPTANSSDHRTSALSFADEFYIPTEEAAELEWLSKFVDDSYSDMPNYSSATHAAMAAAAAAAANAAGNGGGTTSAGQDSGVAAAPGRGARSRRSRATAAAAAAWHSLVPRPPSQSSPSSSSCSSSDFPSSNKPARPNGGGGSRGKKVPGPPGGGPAGGEAGLEGGGVRRCTHCASEKTPQWRTGPLGPKTLCNACGVRFKSGRLMPEYRPAASPTFVLTQHSNSHRKVMELRRQKELILIRGSHRDAAAXAGSPAGGPRPELMFRDYGVC

SEQ ID NO: 7858 - protein, 149 aa, Nostoc punctiforme PCC 73102
MLFRYNSAQDFNTLESYINGLLGDTRVPSTQFEKGSVKVPAAELQETDDAIYLKLELPGLEAKDLDIQVTEDAVHISGERKSETQIQNNGTTKSEFYYGKFQRVIPLSARVQNTNVTADYKNGILNLTLPKSEREKNKVVKVNLEQTTA

SEQ ID NO: 7859 - protein, 422 aa, Streptomyces sp. AM-7161
MTRRVVVTGLGVRAPGGSGARQFWDLLSSGRTATRSITSFDASACRSQVAGEIDFDPVAEGLSPREIRRMDRAAQFAVVCSREAVADSGLSFEGVRPERIGVSVGSAVAAAMSLEKEYRVLSDQGREWEVDPTYLTPHMFDHMVPSVLGAEVAWTVGAEGPVTVVSDGCTSGLDSVGYACRLIQEGSVDVMLAGATDTPLTPIVAACFDAIKATTPRNDDAEHASRPFDLSRNGFVLAEGAAMFVLEEYESAVRRGARIYAEVTGYATRLNAHHMTGLKTDGREMAEAIRVALDESRIDPTAIDYVNAHGSGTKQNDRHETAAFKRSLGDHAYAVPVSSIKSMVGHSLGAIGSIEIAASLLALTHQVVPPTANLHTADPECDLRYVPLTAREAPVRSVLTVGSGFGGFQSAMVLRRPEEAAA

SEQ ID NO: 7860 - protein, 408 aa, Streptomyces sp. AM-7161
MSDRALITGIGVVAPNGLGVKEYWNATLEGRGGIAPLTRFDASRYPSRLAGQILGFDPAEHLPNRLLPQTDVSTRLALVAAEQALADGGVDPAELVDFDLGVITSNASGGFAFTHREFANLWSKGPEYVSVYESFAWFYAVNTGQVSIRHNVRGPGAALVAEQAGGLDALGHARRSLRLGTPLVVTGGVDSALDPWGWASHLSSGLISDSDDPDRAYLPFDARARGHVPGEGGAFLVMEDEQGALRRGAGQVYGELAGYAATFDPHPDSGRPPALRRAAELAIADAGLEPSDIGVVFADAAGSADLDRTEAEAIAAVFGPRGVPVAAPKALTGRLLAGGGPLDVVAASVRLRDGLLPAVPYEGETPDAYGIDLVRGTPRPTSARAALVLARGRWGFNSAVVVKAADRG

SEQ ID NO: 7861 - protein, 483 aa, Brassica napus
  misc_feature (381)..(381): Xaa can be any naturally occurring amino acid
  misc_feature (405)..(405): Xaa can be any naturally occurring amino acid
  misc_feature (423)..(423): Xaa can be any naturally occurring amino acid
  unsure (1)..(483): unsure at all Xaa locations
KHNKQISLKPVVFVCYTFSSPTHFLALPNFCNCEAVLSEKEQNKVSKLPGQNFNVNFAHYSGFVTTNEKLGRALFYWLIEAAEDPASKPLVLGVHWRPGFFTSWFSSNTITHHLMTLYMKIYSWNQTRYHLFCYALRDAGFTYYYKLTNFHKKKKKRTAQDSLKFLLKWVERYPEYKGREFYSRPTRPAGHYIPQLSQAIVRHNKASGDNTINLKGYMVGNGLMDDFHDRLGLFQYIWSLGFISDQTYSLLKLQCGFESFIHSSKACDKIQEIADKEIGNIDQYSVFTPACIANASQTKMLLKKRPRTSRVSEQYDPCTEKHSKVYFNLPEVQEALHVPPGLAPSKWDTCSDVVNEHWKDCSSSVLNIYHELIAAGLRIWXVFSGDADAVVPVTATRYSIDALNXLRPLSPYGPWYIDGQVGXGWTQQYAGLNFVTVRGAGHEVPLHRPKEALALFKAFISGTPLSTPESNISKDMSDLVSDS

SEQ ID NO: 7862 - protein, 304 aa, Synechocystis sp. PCC 6803
MVAIIYSAEFLRHETGPTHPECPARLTAIATALRKMPGANYLHWQKPSPVTWNLDPYILRCHSQEYLNKLAKLAELGGGSLDADTPVSPQSYDVARLAVRAWLDGVDHVLNQREAVFVLARPPGHHAIRNTGMGFCLLNNVAIAAHYALTRPGVERVAILDWDVHHGNGTEALVDHNPRIFYCSLHQFPCYPGTGAAGDRGQHDNVLNIPLKPGGDGKVYREAFEHKVLPFLRQVKPDLLLVSAGYDANHSDPLAYMNLIPEDYGMMTHYLMEISPYPVLGLEGGYHLPSLAKSVVETLKPLLF

SEQ ID NO: 7863 - protein, 216 aa, Oryza sativa (japonica cultivar-group)
MANSFLKRSKQTWTKISTLHPCCHTIVERDRVLVKLGAAEEKTVGGILLPSTAQSKPQGGEVVAVGEGRTIGDKKVEVSLQIGAEVVYSKYAGTEVQFNDTKHLILKEDDIIGVLETDDVKDMKPLNDRVLIKVAEAEDKTAGGLILTETTKEKPSIGTVVAVGPGPLDDEGKRQPLSVSAGSTVMYSKYAGSEFKGADGTNYIVLRVSDVMAVLS

SEQ ID NO: 7864 - protein, 175 aa, Triticum aestivum
MGPTVMASSATSVAPFQGLKSTAGLPVSRRSNGASLGSVSNGGRIRCMQVWPIDVIKKWETLSYLPPLSTEALLKQVDYLIRSKWVPCLEFSKVGFIFREHNASPGYYDGRYWTMWKLPMFGCTDATQVINEVEEVKKEYPDAYVRIIGYDNMRQVQCVSFIAFKPPGCDESGKA

SEQ ID NO: 7865 - protein, 285 aa, Brassica napus
RPTRPADMSIYFPYTEEKRRLTKFHPEIEELLYSNVENEEHLCVLKDKKKPILFTMARLDRVKNLSGLVEWYGKNKRLRELVNLVVVGGDRRKESKDNEEKAEMKKMYDLIEEYKLNGQFRWISSQMNRVRNGELYRYICDTKGAFVQPALYEAFGLTVVEAMTCGLPTFATCKGGPAEIIVHGKSGFHIDPYHGDQAADTLADFFAKCKEDPSHWDQISKGGLQRIEEKYTWQIYSQRLLTLTGVYGFWKHVSNLDRLESRRYLEMFYALKYRPLAQAVPLAQE

SEQ ID NO: 7866 - protein, 229 aa, Nicotiana tabacum
MVEISPGFRFYPTEEELISFYLLNKLEGKRPELDRVIPVVTIYNLDPWHLPNLPGELCMGDTEQWFFFVPRQEREARGGRPCRTTTSGYWKATGSPTYVYSSESKVIGVKKSMVFYKGKAPTGRKTKWKMNEYRAIEQETSTSSSFSIPKLRHEMSLCRVYVISGSFRAFDRRPVATVTRDTAAVKIQELAGDRDNISSAISVKNESKSYNIVESDFENLNGWEQINWM

SEQ ID NO: 7867 - protein, 202 aa, Glycine max
AKIQDKEGIPPDQQRLIFAGKQLEDGRTLADYNIQKESTLHLVLRLRGGMQIFVKTLTGKTITLEVESSDTIDNVKAKIQDKEGIPPDQQRLIFAGKQLEDGRTLADYNIQKESTLHLVLRLRGGMQIFVKTLTGKTVTLEVESSDTIDNVKAKIQDKEGIPPDQQRLIFAGKQLEDGRTLADYNIQKESTLHLVLRLRGGF

SEQ ID NO: 7868 - protein, 316 aa, Rhodobacter sphaeroides 2.4.1
MPTYDVSSIGFYVCDILGRPVTRIPDGGRADYIQEIRMTVAGTAGATAADCAILGLKTLAVTTVGEDEMGDFMVAKLTRFGVDCAMVARDGSVQTSATILPVRPNGERPALHVPGTAATFRIPEGRLDAALDARIVHVGGTGLLKSFDGAPTVEALRRAKELGRITTFDLIQATPETFELVRPCLPYIDYFVPSIEEASEMAGTTDPAEVARFFKGLGVKNAILTMGGEGVYVSPEAGEDFRLPAHAIEVVDTTGCGDSFTAGVIVGLARGWDLRDCCRFASAVAARVAMGLGSDGKLVSFEDTIEAMNTLPLRAN

SEQ ID NO: 7869 - protein, 282 aa, Oryza sativa
GEFEDVKLLNNLLTEKNKETGWDVPIHVDAASGGFIAPFLYPELEWDFRLPLVKSINVSGHKYGLVYPGVGWVIWRSKEDLPEELIFHINYLGTDQPTFTLNFSKGSSQIIAQYYQLIRLGFEGYKNIMQNCMETPAILREGIEATGRFEILSKEAGVPLVAFSLKASGRYTVFDISEHLRRFGWIVPAYTMPANAEHVAILRVVIREDFSRSLAERLVSDIVKILHELDAHSAQVLKISSAIAKQQSGDDGAVTKKSVLETEREIFAYWRDQVKKKQTGIC

SEQ ID NO: 7870 - protein, 438 aa, Bacillus sphaericus
MRKTKIVCTIGPASESSETLEKLIEAGMNVARLNFSHGSHEEHAGRIHLIREVAQKLNKPVGILLDTKGPEIRTHNMKNGELHLTAGQVIDISMTEVEGTETSFSVTYEQLVEDVEQNSIILLDDGLIQLRVLATDVEKGLIHTIVENAGVLKNKKGVNVPGVSVQLPGITEKDAQDILFGIEQGVDFIAASFVRRAKDVLEIRELLEQNGGGHIQIIPKIENQEGVDNIDEIILVSDGLMVARGDLGVEIPAEEVPLVQKKLILKCNQVGKPVITATQMLDSMQRNPRPTRAEASDVANAIIDGTDAIMLSGETGAGLYPVESVQTMNKIAQRTENSLDYKSIVSTRSREKEANMTEAISQAVAYTSINLGVKAVLAPTESGNTARMIAKYRPGVPIVAVTGSTNTAQTLTLVWGVHPIVCQRVTTTDEILELAVDE

SEQ ID NO: 7871 - protein, 232 aa, Glycine max
WLLGRKQARRRVQKWCHSNNFVPFQSLCPFSYIHIFILPHLKTKHPAIFQFLFWLVVMKREREVDSLTMANCLMLLSRGSEFEATYSSTSMSNRVFECKTCNRQFPSFQALGGHRASHKKPRLMAGDIEGQLLHDSPPKPKTHECSICGLEFAIGQALGGHMRRHRAANLNGNVHNSTATSSSSGGSSFDSSPKKKADNKRVLVLDLNLTPFENDLEFLKIGKPTTFVDYLY

SEQ ID NO: 7872 - protein, 112 aa, Brassica napus
  misc_feature (91)..(91): Xaa can be any naturally occurring amino acid
  unsure (1)..(112): unsure at all Xaa locations
RLGSYHVGNSLFRIPVHFRKGGLKNRFFINFSSLAQRFAFSTPKVIAAIFQSWVGRCRIGSLSGLSAEGTKPRGYLFGSPPRLRRLHKRVXASSKKEPKFPYTWIHDTPILF

SEQ ID NO: 7873 - protein, 377 aa, Arabidopsis thaliana
MESVDQSCSVPPGFRFHPTDEELVGYYLRKKVASQKIDLDVIRDIDLYRIEPWDLQESCRIGYEERNEWYFFSHKDKKYPTGTRTNRATMAGFWKATGRDKAVYDKSKLIGMRKTLVFYKGRAPNGQKTDWIMHEYRLESDENAPPQEEGWVVCRAFKKKPMTGQAKNTETWSSSYFYDELPSGVRSVTEPLNYVSKQKQNVFAQDLMFKQELEGSDIGLNFIHCDQFIQLPQLESPSLPLTKRPVSLTSITSLEKNKNIYKRHLIEEDVSFNALISSGNKDKKKKKTSVMTTDWRALDKFVASQLMSQEDGVSGFGGHHEEDNNKIGHYNNEESNNKGSVETASSTLLSDREEENRFISGLLCSNLDYDLYRDLHV

SEQ ID NO: 7874 - protein, 151 aa, Hordeum vulgare subsp. vulgare
MGVLDHLSDLCSMTDTKAALKLRKRRPLQTVNIKVKMDCEGCERKVKNAVKSIRGVTAVSVNPKMSKVTVTGFVEPSKVLARVKSTGKVAEMWPYVPYSLTTYPYVGGAYDKKAPAGFVRGAPQAMADPGAPEVRYMNMFDDEDVNSCTIM

SEQ ID NO: 7875 - protein, 335 aa, Medicago sativa
TPYTYTLRNTGPDDVYIKIHYCGVCHSDLHQIKNDLGMSNYPMVPGHEVVGEVLEVGSNVTRFKVGEIVGVGLLVGCCKSCRACDSEIEQYCNKKIWSYNDVYTDGKITQGGFAESTVVEQKFVVKIPEGLAPEQVAPLLCAGVTVYSPLSHFGLKTPGLRGGILGLGGVGHMGVKVAKALGHHVTVISSSDKKKKEALEDLGADNYLVSSDTVGMQEAADSLDYIIDTVPVGHPLEPYLSLLKIDGKLILMGVINTPLQFVTPMVMLGRKSITGSFVGSVKETEEMLEFWKEKGLTSMIEIVTMDYINKAFERLEKNDVRYRFVVDVKGSKFEE

SEQ ID NO: 7876 - protein, 151 aa, Hordeum vulgare subsp. vulgare
MGALDHLSDLCSMTETKESLKLRKKRPQQTVNIKVKMDCEGCERRVKNAVKSIRGVTSVAVNPKMSKVTVTGHVEPRKVLERVKSTGKAAEMWPYVPYTLATYPYVGGAYDKKAPAGFVRSAPQAMADPAAPEIHYMNMFNDEDVNACTVM

SEQ ID NO: 7877 - protein, 134 aa, Arabidopsis thaliana
MSSNFIVESCSVDSEEGVKLHTRIFKPRNEGEEVSDDENLVIVLVHPFSLLGGCQALLKGIASELASKGFKSVTFDTRGAGKSTGRATLTGFAEVKDVVAVCRWLCQNVDAHRILLVGSSAGKVHQSQDQRWSK

SEQ ID NO: 7878 - protein, 581 aa, Bacillus halodurans C-125
MDTFKRLAQFYWPYRRYFYWSLFAMGVMTLMTVLYPIILQFTIDNAVIGGRYDLIPWLALALIIVMGFKGVMVYIHQYLGDLFGVTAVYRLRNSLYEKLQYLPFRYYDNAKTGDLMSRLTGDVETFRFFLSFGFAQFIQFILLVSFSMGVMLYYSVPLTLATMCTLPFLAIVVAKFDRRVHPGFRDIRKSLAKLNTKVQENVSGMNTVKALSQEDEEVSRFEDRNVDYRQKHLDIARVWGNYFPLMEFIGNLSAVFLLSFGGYLVITGSMQTGQLVAFFSLVWYIIGPIMNLGFIINTFSQSKASGERLLEILDEENRVDEGKDERTSLQGSVTFRDVCLNYRGAETPALQNVSFEAPAGKTIGLVGATGSGKTSIVQLVNRFYERTSGEILIDGKPIESYPLETLRSQIGVVLQESFLFSSTIRDNIAYGRPDVSMKEIIAAARRAQAHDFIAELPDGYDTVLGERGLGLSGGQKQRIAIARAILMNPSILILDDATSAVDMKTEHKIQAAFREVMKGRTTFIIAHRISSVKQADEILVLDGGKVCERGTHHTLLQNKKGLYRRIYDIQSKDQEYVLQHA

SEQ ID NO: 7879 - protein, 195 aa, Pyrobaculum aerophilum str. IM2
MHAINIAFFALIMPVEKTLLILKPDAVARGLVGEIISRFEKAGLKIVALKMVKASPEEIERFYPSSEEWLRSAGQKLLKAYQELGIDPRAKIGTDDPVEVGRIIKRSLVKYMTSGPIVVMVLKGNRAVEIVRKLVGPTSPHSAPPGTIRGDYSIDSPDLAAEEGRVVFNLVHASDSPSEAEREIRFWFREEEVLE

SEQ ID NO: 7880 - protein, 400 aa, Bacillus halodurans C-125
MKYAFAKRVRHLHSSAVRDILKVVNQQGVISFAGGLPDDELFPLEAMEDAFSRVFATGKKSMQYSETEGFLPLRELILERMGRKGIRSYSERNVLITTGSQQAIDLFSRVMFNPGDVVLTEDPTYLAALQVFESYEAEIVPVASDDEGMIPEDLEQKMKQHKPKCVYVVPTFSNPAGRVWSLERRKHLLNMAHKHHVLIFEDDPYGDIQFNQEETYVPLAAMDTGSHVLYTSTFSKTAVPALRTGWITGPFQVVRMMAQAKQANDLHSNSLSQQALYQLFTHHDMDGHIQRLIEVYRSRKDVMIKTLQGADIPGLRFVEPKGGMFLWAELDEAINTSLLIKEAVAKGMAYVPGEPFYAGVPKYNTLRLNFTHSTPEKIEKGIGIFADVVHKEMESVAMYT

SEQ ID NO: 7881 - protein, 98 aa, Ficus carica
DEIDFEFWGNRSGQPYTVQTNIYAHGKGDREQRVNLWFDPAADFHSYTIMWNHHHVVFYVDEVPIRVYKNNEAKGIPYLLHQPMGVYSTLRNGDDWAT

SEQ ID NO: 7882 - protein, 285 aa, Uncultured crenarchaeote
MNPMKKKFRAAIVQMKSSEEKEHNLAYSVKLINEAAKRKARLICFPEFQMAYSPAEQKTESLHRIAEKICGNFVSTLSNSARQNKINVIATMYEIINANEKSQKVFDTGIIINELGKVQSIYRKVHLYDALGFKESKKLLAGSIIEKPSKTSVGNLGLLICYDMRFPEISRILTVNGANILVSPSAWVAGFMKKVHWEVMVRARAIENGVYVLAPNQVGNIYCGHSMAIDPFGATVLDMKNRQGIEYVDIDTAKIDTTRRTLPLLMNRRTDVYRNHIDVFGSKLR

SEQ ID NO: 7883 - protein, 708 aa, Candida glabrata CBS138
MLYSYLWSFMWLLAIACARPPPKVDERNDKPPRGFPLPLNKKNFEVELSNGFHLVEFYSPYCSHCKNLAPIWEDTWVSFREEGKKLNMKLSQVNCVESGDICHKEDIRAYPTIRLYGPDGFLEEYHGKRTKEEFLKFARKSIMEYGDTDDLILPSLSKLLSGKDFSQLISGKSTKPMLVSFWPTSDMQEDSSVETKFNNCPKCEIYQRKWNLINNAVDGLGVDSGHLNCGSEQNLCERLGFADLASSAKSGGNVKPRLALIIPKKVTNNLFIYPEGQDVSNQADVLDFIKRISVNSEAAEISESEIIDYSRNSMPLFSEFVHTNAKKVHSGQNIYIIFCYNHKTVVPEDFTILEHLVEPLASRPNTYLRKFNGTIPELTKKVYDPFYQVVNYNDSEPRKELNEEFQTMAAVTEYPTFLIIKEGELQTHVFNGFSTTEMRNLDTILDWIDDTIVPSLPKLTWDNFEEMLNVNPSKYRTMAILLMSTKWEYDDKVNAAQKFFTSFLDYEHVRMQKMFEIVQQERLKKANAIEKMREKQENTKNILAKMRQEISHPNDRKVQYMYLDLAKDERLLKRLGVHNANIAPNQVLLIDKARKTLYAENHFEERLTGKDTYGIREALLSINIPEKCQLSTILRAQHLKIKLQKKIKIPHVKVSNGSNSNILYFFAILLLLVLLRKSPVYRMVSRKWHSHRASYQANTSYSKLEAQD

SEQ ID NO: 7884 - protein, 581 aa, Desulfotalea psychrophila LSv54
MNKTKIIATLGPQSQSVEEIYSLIQAGMNVARINLSHGDAESYKHLISNVKEARKLAEKDTAILLDNRGPEIRVSEMEEDIHLVDGEELVITNRAETVSPSRITTNYPQLAGDVQVGSRILLDDGKLALEVLAIEDEEVITKVIAGGILSSRKRVALPDNEVNLPSLSEKDKEDIAFGVEQDVDFIAASFVRQAGDVWAVRKIIEDNGGDQEIIAKIENRQGVNNLDEILQAANGIMVARGDLGVEVPAEEVPIIQKSIIKAANRLGKPVITATQMLESMITCPTPTRAEANDVTNAIFDGTDAVMLSGETAIGKYPVQAVAFLVRCATIAENALDYDHILANGLQNRRPTITDSISYASCATAADLKATAIITATSSGSTARMVARYRPKAPVIAVSPSPSTIRHLQLIRGVTPLLCNFGSSMDEQLDRVIHAATLAELIHNGDLVIITAGMPLGPTGTTNMLKVHTVADICVTGQGIGVKHAQGAVRIIQAEDDWQDLPEHTIAVVSSTNESMLKHLGKVRGIIAEAPGLTSHAAIVGRELGIPVICNVTNALMLFENDQVITIDGTTGHICYGSTQNT

SEQ ID NO: 7885 - protein, 155 aa, Arabidopsis thaliana
MSLIPSFFGNNRRINNNIFDPFSLDVWDPFKELQFPSSSSSAIANARVDWKETAEAHVFKADLPGMKKEEVKVEIEDDSVLKISGERHVEKEEKQDTWHRVERSSGGFSRKFRLPENVKMDQVKASMENGVLTVTVPKVETNKKKAQVKSIDISG

SEQ ID NO: 7886 - protein, 587 aa, Streptococcus pyogenes SSI-1
MAVEIIMPKLGVDMQEGEIIEWKKQEGDTVNEGDILLEIMSDKTNMELEAEDSGVLLKITRQAGETVPVTEVIGYIGAEGESVEVSSPAASDVNVARTTEDLEAAGLEVPKAPAQAASAAPKAALADDEYDIIVVGGGPAGYYAAIRGAQLGGKIAIVEKSEFGGTCLNVGCIPTKTYLKNAEILDGIKIAAGRGINLASTNYTIDMDKTVDFKNTVVKTLTGGVQGLLKANKVTIFNGLGQVNPDKTVTIGSQTIKGRNVILATGSKVSRINIPGIDSKLVLTSDDILDLREMPKSLAVMGGGVVGIELGLVWASYGVDVTVIEMADRIIPAMDKEVSLELQKILSKKGMKIKTSVGVSEIVEANNQLTLKLNNGEEVVAEKALLSIGRVPQMNGLENLNLEMDRNRIKVNDYQETSIPGIYAPGDVNGTKMLAHAAYRMGEVAAENAIHGNTTRKANLKYTPAAVYTHPEVAMVGLTEEQAREQYGDVLIGKNSFTGNGRAIASNEAHGFVKVIADAKYHEILGVHIIGPAAAEMINEAATIMESELTVDELLLSIHGHPTFSEVMYEAFADVLGEAIHNPPKRK

SEQ ID NO: 7887 - protein, 447 aa, Nicotiana tabacum
MGKEKFHINIVVIGHVDSGKSTTTGHLIYKLGGIDKRVIERFEKEAAEMNKRSFKYAWVLDKLKAERERGITIDIALWKFETTKYYCTVIDAPGHRDFIKNMITGTSQADCAVLIIDSTTGGFEAGISKDGQTREHALLAFTLGVKQMICCCNKMDATTPKYSKARYDEIVKEVSSYLKKVGYNPDKIPFVPISGFEGDNMIERSTNLDWYKGPTLLEALDQINDAKRPSDKPLRLPLQDVYKIGGIGTVPVGRVETGVLKPGMVVTFGPTGLTTEVKSVEMHHEALQEALPGDNVGFNVKNVAVKDLKRGFVASNSKDDPAKGAASFTSQVIIMNHPGQIGNGYAPVLDCHTSHIAVKFAEILTKIDRRSGKEIEKEPKFLKNGDAGMVKMIPTKPMVVETFSEYPPLGRFAVRDMRQTVAVGVIKNVDKKDPTGAKVTKAAQKKK

SEQ ID NO: 7888 - protein, 201 aa, Glycine max
EMLKNDAVKLCLEHNFNTGFFEGSDNNTVVDAYELKVRLEHILERIALISEAANTERPSAVTNSLFIGGALAARSTYTLQRLGITHILCLCTNEIGQSDSQFPDLFTYKNFSVCDDEDSNISSIFEEACDFIDYVEQAGHSVLVHCFEGKSRSATLVLAYLMLRKKFTLLEAWNALKRVHRRSQPNDGFAKILLDLDQKLH

SEQ ID NO: 7889 - protein, 215 aa, Triticum aestivum
MEDERSTQSYQGGEAAEQVEVTDRGLLGNLLGKKKAEEDKEKEEELVTGMEKVSVEEPEVKKEEHEDGEKKETLFSKLHRSSSSSSSSSDEEEEEVIDDNGEVIKRKKKKGLKEKLQGKLPGHKDTEGEHVTGLPAPAAPASVQTHGGHHDTDVVVEKIDGDVKTEAAPAVPEEEKKGFLEKIKENLPGRPLEITSAAACRSTIWESSQRVGAIA

SEQ ID NO: 7890 - protein, 265 aa, Ralstonia eutropha JMP134
MPPLPLIEPNTALFLDFDGTLADLAPRPELVQVEPELVGTLRRLYDRLDGALAIVSGRPIIELDHFLQPLLLPAAGVHGAELRTAGAQIEMKPAPGLEPLIPPLEALVRRHPGLRLERKSVAVAIHYREAPELEGLVRAAVTDVLRHANGLEGMPGKMVVEIKPAGINKGDAIAAFMNMPPFAGRGPLFAGDDVTDEAGFAVVRKLGGVGVLVGQRETMATVSVTGPAALRCWLHRSARAFDGTPAPDERPAVSDPQRDLEGDSL

SEQ ID NO: 7891 - protein, 274 aa, Klebsiella pneumoniae
MWNYCEKVKDHFFNPRNARVVDNANAVGDVGSLSCGDALRLMLRVDPQSEIIEEAGFQTFGCGSAIASSSALTELIIGHTLAEAGQITNQQIADYLDGLPPEKMHCSVMGQEALRAAIANFRGESLEEEHDEGKLICKCFGVDEGHIRRAVQNNGLTTLAEVINYTKAGGGCTSCHEKIELALAEILAQQPQTTPAVASGKDPHWQSVVDTIAELRPHIQADGGDMALLSVTNHQVTVSLSGSCSGCMMTDMTLAWLQQKLMERTGCYMEVVAA

SEQ ID NO: 7892 - protein, 463 aa, Ralstonia eutropha JMP134
MPRLVAVSNRVADPRNVAAGGLAVALSEALRQTGGMWFGWSGKALETNHGGTPGEGELHLQQAGNVTLATVDMCREDHDAYYLGYSNGVLWPAFHYRLDLADFDSNYLNGYRRVNQLFARKLAPLLKPDDIIWIHDYHLIPLAAELRAIGCGQRIGFFLHIPLPPPLILAAIPQHDWLMRALFAYDLIGFQSHTDLEHFSRYVQNEAFAEPMGEHRYRAFHRTVRAEAFPIGIDVEEFRELGRGAEAQETFEMMRAQYASRRLLLGIDRLDYSKGLPQRLKAFYRLLAEYPENRMSATLVQIAAPSRESVDAYADLRSEMERLSGAINGEFGELDWMPVRYIHRTTARKRLPGLCRASRVALVTPLRDGMNLVAKEFIAAQDREDPGVLVLSRFAGAAEQLKEALLVNPYDTHATAQAIQQALHMPLAERQARHEKLLERIRTQDVHWWSQEFLRALTETDGG

SEQ ID NO: 7893 - protein, 384 aa, Synechococcus sp.
MQDKAMLMIPGPTPVPESVLLSLGKHPIGHRSGEFSQIMAAMTAGIKWLHQTQNEVLILAASGTGAMEAGIINFLSAGDRVVVGCNGKFGDRWGEVCDAYGLTTERISAPWGQPLNPDDFKAVLDGHRQKPSKAVIVTHSETSTGVINDLEAINRHVKAHGQALIIVDAVTSLGAVSVPIDEWGLDVVGSGSQKGYMIPPGLAFVSVSPKAWEAYKTATLPKFYLDLGKYRKDAAKHTTPFTPPVNLFFALKTALEMMQAEGLEAIFQRHQRLMQATRAAMKALNLPLYAADSCASPAITAVAPQGVEAENIRSLMKKRFDIALAGGQDHLKGQIFRIGHLGFVGDRDILAAVSALEAVLAELGYTNFTPGAGVAAASRVLSTA

SEQ ID NO: 7894 - protein, 396 aa, Rhodobacter sphaeroides 2.4.1
MSGRDAFLAGMRELLEGIEAEGLTKRERPILSAQGTHVRVGDRDLLNLCANNYLGLANHPALIEAARRGMDEHGYGMASVRFICGTQDIHRALEGRIARFLGMEDAILFAACFDANGGLFEPLLGPEDAVISDALNHASIIDGIRLCKARRYRYANSDMEDLRRQLAEARAEGARHILIATDGVFSMDGYLARLPEIVALAEEFGALVMVDDCHATGFMGPKGQGTPAHHGVTVDILTGTLGKALGGALGGYVAGPQPVIDLLRQRARPYLFSNALPPAVVAAGLAALDLVEAADDLRAALFENTAYWRAGLTEAGFRLLPGAHPIVPVMLGEARLAQEMAAALYDRGVYVSGFFFPVVPRGQARIRTQMNAALTRDDLDLALAAFREAGRAVGAI

SEQ ID NO: 7895 - protein, 416 aa, Mycobacterium leprae TN
MTMPSTANGGFPSVVVTAVTATTSISPDIESTWKGLLAGESGIHVLEDEYITKWDLPVKIGGHLKEPVDSHMSRLDLRRMSYVQRMSKLLSGRLWESTGSPEVDPDRFTVVVGTGLGGAERIVESYDLMNAGGPRKVSPLAVQMIMPNGAAATVGLQLGACAGVMTPVSACSSGSEAIAHAWRQIIMGDADVAVCGGVEGPIEALPIAAFSMMRAMSTRNDDPEGASRPFDKNRDGFVFGEAGALMLIETEEHAKARGAKPLARLLGAGITSDAFHMVAPAADGVRAGRAMTRSLELAGLSAKDVDHVNAHGTATPIGDSAEANAIRVAGCEQAAVYAPKSALGHSIGAVGALESVLTVLALRDGVIPPTLNYQTPDPEIDLDIVAGEPRYGDYRYAINNSFGFGGHNVALAFGRY

SEQ ID NO: 7896 - protein, 341 aa, Rhodobacter sphaeroides 2.4.1
MRALVKAKAEPGLWMEERPVPEIGPDEVLIRVRKTGICGTDVHIWNWDDWAAKTVPVPLVTGHEFAGEIVEVGRDVRDLSPGQRCSGEGHLIGHHSRQVRAGRFHLDPETRGIGVNVPGAFADYLRLPAFNVVPLPDAIDDEVGAILDPLGNAVHTALSFDLVGEDVLVTGAGPIGIMAAAVARHVGARHVVITDVNADRLRLSTEVADVVPVNVATEDLRSVMGRLKIVQGFDVGMEMSGAPAGFDQMVEAMVMGGRIAMLGIPPGRSPVDWSRIVFKALTIKGVYGREIFETWYKMIAMLENGLDIRRVITHRFPVADFAEGFAAMRSGASGKVVLDWG

SEQ ID NO: 7897 - protein, 86 aa, Magnaporthe grisea 70-15
MSDANHTYKFNITMTCGGCSGAVDRVLKKLDGVQSYEVSLENQNATVVAGPDLSYEKVLQTITKTGKKVTAGEADGVAQSIEVPSA

SEQ ID NO: 7898 - protein, 425 aa, Mycobacterium leprae TN
MIARLMTTSPELVTGKAFPNVVVTGIAMTTALATDAETTWKLLLDNQSGIRMLDDPFIEEFNLPVRIGGHLLEEFDHQLTRVELRRMGYLQRMSTVLSRRLWENAGSPEVDTNRLMVSIGTGLGSAEELVFSYDDMRARGMKAVSPLAVQKYMPNGAAAAVGLEHHAKAGVMTPVSACASGSEAIAHAWQQIVLGEADSAICGGVETKIEAVPIAGFSQMRIVMSTKNDNPAGACRPFDRDRDGFVFGEAGALMLIETEDSAKARSANILARIMGASITSDGFHMVAPDPNGERAGHAIARAVHLAGLSPSDIDHVNAHATGTQVGDLAEAKAINKALCNNRPAVYAPKSALGHSVGAVGAVESILTVLALRDQVIPPTLNLVNLDPDIDLDVVAGKPRPGDYRYAVNNSFGFGGHNVAIAFGCY

SEQ ID NO: 7899 - protein, 710 aa, Rhodobacter sphaeroides 2.4.1
MAEDKPAARSGSFENLVSDYGAGGEFHQHAGEGDERLTTAQGVTIADNQNSLRSGAPGPTALEDFILREKIFHFDHERIPERVVHARGFGAHGLFECTKAIPEITRAAPFQKEGKITETFVRFSTVAGSKGSVDLARDVRGFAVKFYTDEGNWDLVGNNIPVFFIQDAIKFPDLIHSVKPEPDRGFPQAQSAHDNFWDFISLTPESMHMVMWQMSDRAIPRSFRFMEGFGVHTFRFINAEGQSSFVKFHWKPKLGMQSVLWDEALKINGADPDRHRRDLWEAITAGDFPEWELGLQIFDEEFANRFDFDVLDPTKIIPEELVPLTIVGTLTLDRVVDNFFAETEQVAFCTQNVVPGIDFTDDPLLQGRNFSYLDTQLKRLGSPNFTKLPINAPRGCPVHNFQQDGHMQTSNRKGRVNYEPNGWGKGPRAHPLEGYVSYAVRNEGEKRRLRPESFADHYSQARQFFLSQTPVEQGHIRDALVFELSKCQEIEIRARIVAHLLNIDGALAQAVADGLGLTEMPEPAPAARPTRTDLPPSDALSMLKNPPPNFAGRTVGVLAGNGVEAELLTELRSILQAEGAMMKLVAPRVGGVTDSAGTLHPADEKLGGGPSVIFDAVAVLPGSDAAMLAANPAAQDFLTDAHAHCKFIAHHGAGPLIEACALGAKMDEGWIEIGSSSDIDGFVAACRGMRHWPREATLGGNPPLARTFSP

SEQ ID NO: 7900 - protein, 258 aa, Brassica napus
  misc_feature (9)..(9): Xaa can be any naturally occurring amino acid
  unsure (1)..(258): unsure at all Xaa locations
RSRVDPRVXKIIVVVEGIYSMEGEICQLPEIVSVCKKYKAYVYLDEAHSIGAIGKTGRGVCELLGVDTADVDIMMGTFTKSFGSCGGYIAGSKDLIQYLKYHCPAHLYATSISTLSAQQIISAIKVILGEDGSNRGAQKLARIRENSNFFRAELQKMGFEVLGDNDSPVMPIMLYNPAKIPAFSRECLRENVAVVVVGFPATPLLLARARICISASHSREDLIKALKVISKAGDLTGIKYFPAAPKKQEEEKDRIKLD

SEQ ID NO: 7901 - protein, 375 aa, Clostridium tetani E88
MNIKRNILLNPGPATTTDTVKMAQVVADICPREKEFADLMKQMRMDLVGIVHGNPEKYTCVMFTGSGTLNMDVCLNSLLPANKKVLIINNGAYSSRAVEICEYYGLSHINLKFSYDERPDFDVIEKTLKENLDIALVYTTHNETGTGILNPIKEIGALVHKYNATFVVDTTSTYAMIPIDMDRDNIDFCMASAQKGLSAMTGLSFIIGNREMIIKSKDYPKRSYYCNLYLQYHYFETTGEMHFTPPVQTVYATAQAIKEYFKEGEQAKWKRHLCVFESIHKELEKLGFKDVIKREWQAGLVISVKYPDDPNWNFEKIHDYCYKRGFTIYPGKIENTNTFRLCSLGAIDVSDIKTFFKIFGEALIVNNVSIPVIYK

SEQ ID NO: 7902 - protein, 947 aa, Arabidopsis thaliana
MDGVTGGGTNIGEAVTAPPPRNPHPATLLNANSLPPPFLSKTYDMVEDPATDAIVSWSPTNNSFIVWDPPEFSRDLLPKYFKHNNFSSFVRQLNTYGFRKVDPDRWEFANEGFLRGQKHLLKKISRRKSVQGHGSSSSNPQSQQLSQGQGSMAALSSCVEVGKFGLEEEVEQLKRDKNVLMQELVKLRQQQQTTDNKLQVLVKHLQVMEQRQQQIMSFLAKAVQNPTFLSQFIQKQTDSNMHVTEANKKRRLREDSTAATESNSHSHSLEASDGQIVKYQPLRNDSMMWNMMKTDDKYPFLDGFSSPNQVSGVTLQEVLPITSGQSQAYASVPSGQPLSYLPSTSTSLPDTIMPETSQIPQLTRESINDFPTENFMDTEKNVPEAFISPSPFLDGGSVPIQLEGIPEDPEIDELMSNFEFLEEYMPESPVFGDATTLENNNNNNNNNNNNNNNNNNNNTNGRHMDKLIEELGLLTSETEHYRSNISRSNAANPGVVFVCNRFLCVIERNDQRKLSGKVMMKSSVNFRQNLSVALVRIVSVLLVSSISVVTTDSPPSWGLTEENLLFLEAWRTIDRAYIDKTFNGQSWFRYRETALRNEPMNTREETYMAIKKMVATLDDPFTRFLEPGKFKSLRSGTQGAVTGVGLSIGYPTASDGPPAGLVVISAAPGGPANRAGILPGDVIQGIDNTTTETLTIYDAAQMLQGPEGSAVELAIRSGPETRLLTLTRERVSVNPVKSRLCELPGSGSNSPKIGYIKLTTFNQNASSAVREAIETLRGNNVNAFVLDLRDNSGGSFPEGIEIAKFWLDKGVIVYICDSRGVRDIYDTDGSNAIATSEPLAVLVNKGTASASEILAGALKDNKRALVYGEPTYGKGKIQSVFELSDGSGLAVTVARYETPAHTDIDKVGVTPDHPLPKSFPKDEEAFCGCLKDPTAACYLNQGLLFSR

SEQ ID NO: 7903 - protein, 484 aa, Francisella tularensis subsp. tularensis SCHU S4
MSQKLKRGLHTRHMSMIALGGCIGTGLFVALGGAIADAGPGGTVLAYVIIAIMVYFLMASLGEMAAHSPVSGTFCEYATRYVDPALGFSTGWSYWFNWAITVATEVIAAALIMQYWFPGSSILLWSGFFFVLVFALNIFSVKIYGEVEYWLSFIKVSTVIIFIIVGFLSILGLVGNHQSVGFQNWHIGDAPFHNGWWGFISVFMIAGFSFQGSELIGVTAGEAKDPNTSIPKAIKQTFWRLFIFYILAVVIISFLIPYNNPSLIKAGASNDVSVSPFTIVFENVGLNSAATIMNVIILTAIISACNASMYSATRVLWHLGNIKQAPQFFATTNSKGTPMIALLVTAVIGSSFFFVSFVGSGYIFTWLVNVSSLAGFIAWFTIALSHYRFRRAYIKQGKSLEDLPYVAKFFPWAPIIALTMVSIVIVGQGVTMLTMEGRTWFSVIIEFLSTYIGFFAFVILYFVYKFIKKTKLIRLEDCDLTRES

SEQ ID NO: 7904 - protein, 150 aa, Glycine max
PGPPPPPKEKASFFFFFRQFFFSSPPPLGGGFFFPKKLGFPQGDKLQLINSADKGSSSVTFQFELFHFHFFRKSCNYFLRKKVSKLRKSRETKMAGDGAATCIDILLAIILPPLGVFLKYGCQVEFWICLVLTLFGYIPGIIYAVYAITK

SEQ ID NO: 7905 - protein, 561 aa, Acinetobacter junii
MTTLKITGMTCDSCAAHVKEALEKVPGVQSALVSYPKGTAQLAIEAGTSSDALTTAVAGLGYEATLADAPPTDNRAGLLDKMRGWIGAADKPSGNERPLQVVVIGSGGAAMAAALKAVEQGAHVSLIERGTIGGTCVNVGCVPSKIMIRAAHIAHLRRESPFDGGIAATVPAIDRSKLLAQQQARVEELRHAKYEGILDGNPAITVVHGEARFKDEQSLVVRLNDGGERVVAFDRCLVATGASPAVPPIPGLKDSPYWTSTEALVSDTLPERLAVIGSSVVALELAQAFARLGSQVTILARNTLFFRDDPAIGEAVTAAFRAEGIKVLEHTQASQVAHVDGEFVLTTGYGEIRADQLLVATGRAPNTRSLALEAAGVAANAQGAIVIDKGMRTSTPHIYAAGDCTDQPQFVYVAAAAGTRAAINMTGGDAALDLTAMPAVVFTDPQVATVGYSEAEAHHDGIETDSRTLTLDNVPRALANFDTRGFIKLVIEEGSGRLIGVQAVAPEAGELIQTAVLAIRNRMTVQELADQLFPYLTMVEGLKLAAQTFSKDVKQLSCCAG

SEQ ID NO: 7906 - protein, 473 aa, Azotobacter vinelandii
MSKVGFKSFASVLAGALLLGQSLFVQAQLPEFTSLVEEASPAVVNISTRQKLPDRSTVQGLPDLEGLPPLFREFLERSIPQLPRTPDNGRQREAHSLGSGFIISPDGYVLTNNHVVADADEIIVRLSDRSELEAELVGADPLTRCSFVEGQGFESPHSQTGTYRPIESRGMGSGHRFPFRFRSFRDCGHHQCHGAKPAERELVPFIQTDVAINPGNSGGPLFDLDGRVIGINSQIFTRSGGFMGLSFAIPIEVAMGVADQLKATGKVARGWLGVIIQEVNKDLAESFGLDRPAGALVAQVLEDGPADKGGLQVGDVILSLDGHPIVMSADLPHLVGGLKPGAAANLEVVRDGKRRNIAITVGALPEEGNGVQPSIAGTEQSSNRLGVTVTELTAEQKKSLDLKGGVVIREVLNGPAALIGLRPGDVVTHLNNQPIDSAKTFAEVAGALPKGRSVSMRVLRQGRASFITFKLAE

SEQ ID NO: 7907 - protein, 333 aa, Bacillus cereus ATCC 14579
MAEVKEKRHEELGLSDEQVLEMFRTMLLARKIDERMWLLNRAGKIPFVISCQGQEAAQVGAAFALDREKDYALPYYRDMGVALTFGMTAKELMLSAFAKAGDPNSGGRQMPGHFGQKKNRIVTGSSPVTTQVPHAVGIALAGKMEKKDLVTFVTFGEGSSNQGDFHEGANFAGVHKLPVIFMCENNKYAISIPVEKQLACKNVSDRAIGYGMPGYTIDGNDPLAVYKAVKEAADRGRRGEGPTLIETVSYRLTAHSSDDDDRVYRDKEEVEEAKKKDSIITFAAYLKEAGVLTEESEKQMLDEIMHIVNEATEYAENAPYAAPEDALKHVYAE

SEQ ID NO: 7908 - protein, 187 aa, Yarrowia lipolytica CLIB122
MTASQEPGISPTIKFGPSKLDVITVAGGCFWGIEHMYRKHYTDKGLVDCKVGYSGGSIDNPDYKSVCAGSTGHFESLQVTFDSAQVSYEELADFFFKIHDPTQTDGQGPKNIGTQYLSGLFTHNEDQQARALAVKKKLEDQWFAKPIATVIQPIENFWDAEDYHQNYFVSNEGYHCPTHFLRTTPEK

SEQ ID NO: 7909 - protein, 473 aa, Bacillus cereus ATCC 14579
MAKEYDLVIVGGGTGGYVAAIRASQLGLKTALVEKENLGGTCLHKGCIPSKALLRSAEVYATAKKSEEFGVIASNVELNFAKVQERKEKIVTQLHKGVQHLMKQGKIDVFEGIGRILGPSIFSPMPGTISVELASGEENEMLIPKNVLIATGSRPNSLPGLELDGEYVMSSDHALKMETLPSSIIIVGGGVIGIEWASMLADFGVEVTVLEYAKTILPLEDQDVSKEMQRLFKKKGIKVVTGAKVLPETLVKDNGVTIQAEHNGENKEFKAEKMLVSVGRQANTQNIGLENTDIVVEKGYIQTNEFYQTKESHIYAIGDVIGGLQLAHVASHEGIAAVEHIAGKEVTPIDYSMVSKCVYSSPEVASVGLTEQEAKEKGYKLKVGKFSFRAIGKALVYGESDGFVKLVVDEETNDILGVHMIGPHVTDMISEAGLARVLDATPWEVAHTIHPHPSLSEAIGEAALAVDGRALHA

SEQ ID NO: 7910 - protein, 753 aa, Escherichia coli CFT073
MTILNHTLGFPRVGLRRELKKAQESYWAGNSTREELLAVGRELRARHWDQQKQAGIDLLPVGDFAWYDHVLTTSLLLGNVPPRHQNKDGSVDIDTLFRIGRGRAPTGEPAAAAEMTKWFNTNYHYMVPEFVKGQQFKLTWTQLLEEVDEALALGHKVKPVLLGPITYLWLGKVKGEQFDRLSLLNDILPVYQQVLAELAKRGIEWVQIDEPALVLELPQAWLDAYKPAYDALQGQVKLLLTTYFEGVTPNLDTITALPVQGLHVDLVHGKDDVAELHKRLPSDWLLSAGLINGRNVWRADLTEKYAQIKDIVGKRDLWVASSCSLLHSPIDLSVETRLDAEVKSWFAFALQKCHELALLRDALNSGDTAALAEWSAPIQARRHSTRVHNPAVEKRLAAITAQDSQRANVYEVRAEAQRARFKLPAWPTTTIGSFPQTTEIRTLRLDFKKGNLDANNYRTGIAEHIKQAIVEQERLGLDVLVHGEAERNDMVEYFGEHLDGFVFTQNGWVQSYGSRCVKPPIVIGDVSRPAPITVEWAKYAQSLTDKPVKGMLTGPVTILCWSFPREDVSRETIAKQIALALRDEVADLEAAGIGIIQIDEPALREGLPLRRSDWDAYLQWGVEAFRINAAVAKDDTQIHTHMCYCEFNDIMDSIAALDADVITIETSRSDMELLESFEEFDYPNEIGPGVYDIHSPNVPSVEWIEALLKKAAKRIPAERLWVNPDCGLKTRGWPETRAALANMVQAAQNLRRG

SEQ ID NO: 7911 - protein, 366 aa, Bacillus cereus ATCC 14579
MTLEIFEYLEKYDYEQVVFCQDKESGLKAIIAIHDTTLGPALGGTRMWTYDSEEAAIEDALRLAKGMTYKNAAAGLNLGGAKTVIIGDPRKDKSEAMFRALGRYIQGLNGRYITAEDVGTTVDDMDIIHEETDFVTGISPSFGSSGNPSPVTAYGVYRGMKAAAKEAFGTDNLEGKVIAVQGVGNVAYHLCKHLHAEGAKLIVTDINKEAVQRAVEEFGASAVEPNEIYGVECDIYAPCALGATVNDETIPQLKAKVIAGSANNQLKEDRHGDIIHEMGIVYAPDYVINAGGVINVADELYGYNRERALKRVESIYDTIAKVIEISKRDGIATYVAADRLAEERIASLKNSRSTYLRNGHDIISRR

SEQ ID NO: 7912 - protein, 600 aa, Neocallimastix patriciarum
MLSARSLICKSMIKSGFRRAVAPSVAMAASSMTLTARRNYSSKYKDIIFAQEGRDKLAKGVNVLAKAVSVTLGPKGRNVLIEQEFDPPKITKDGVTVAKSVELEDKFENLGARIVQDVAIKTNDEAGDGTTTATVLARAIFAEGLKNVSAGVNPVELRRGVQKAVDVVVDFLKEQAHPISTFEEIAQVGTISANGDKHIGGLLAEAMKKVGKDGVINIHEGKTLEDELTITEGMKFDNGFLSPHFITDNKGKKCELENPYILITEEKISAVQDIVPALEIAANNRRPLLIIADDVEGDALATCVLNKIRGQVQVCCIKAPGYGDHRKNNLGDIACLTNGTVMSPNVELTLDKVTEELLGSCERITVTRDDTVFLNGAGDKAKIAERCNQIRSIIKTADLSIYEKEKHEERLAKLTGGVAVIKVGGVSEVEVGEKKDRFVDALHATRAAIEEGIVPGGGTALLKASKVLTNLKADTFDQQLGVDLVKKAIQEPCKTIVNNAGGEGAVVVGRLYNSFEVKGVEDKAVSKKDYKPFTYGFDAYKGEYCDMIKAGIIDPVKVVRTAIVDASGVASLLTTSECMIVDGPDDEPPAPPAGMPMGMM

SEQ ID NO: 7913 - protein, 358 aa, Sinningia cardinalis
METVAPLAPATTVCVTGAAGYVGSWLVMKLLERGYIVHATVRDPGNIKKVKHLLELPGAKTNLTLWKADMTVNGSFDEAIQGCQGVFHVATPMDFQCKDPENDVIKPTIEGVLSIIRTCAKAKTVRRLVFTSTAGALNVAEQRKSVYDENNWSDLDFIYSKKMTGWMYFASKVLAEKAAWEAAKEYNIDLVSIIPTLVVGQFNTPTFPPSLITALAPITGNESHYWIIKQGQYVHLDDLCEAHIFLFEEPKAEGRYICSSHDATIYDLANMIRDKWPEYNIPTEFEGIDKDIPLVRFSSKKLVEMGFTFKYTFEDMYRGAIETCREKGMLPYSTQICSNGDQEIDLVPSKGIPMIKTK

SEQ ID NO: 7914 - protein, 99 aa, Ficus carica
DEMDFEFLGNVEGKPWRFQTNLYGNGSTSRGREERYRLWFDPSKEFHRYSILWTPDNIIFYIDEVPIREVVRREEMGGDFPSKPMSLYATIWNGDDWAT

SEQ ID NO: 7915 - protein, 328 aa, Campylobacter coli RM2228
MKILISGGAGYIGSHTLRQFLKTNHEICVLDNLSKGSKIAIDDLQNIREFKFFEQDLSDFEGVKALFEREKFDAVVHFAASIEVFESMQNPLKYYMNNTINTTNLIQTCIQTGVGKFIFSSTAATYGEPTTPVVSENSPLAPINPYGRSKLMSEEVLRDANMAHPEFKYCILRYFNVAGACMDYKLGQRYPKATLLIKVAAECAAGKRDKLFIFGDDYDTKDGTCIRDFIHVDDISSAHLAALDYLENNESNIFNVGYGHGFSVKEVIDAMKRVSGVDFKVELAPRRAGDPSVLISDASKIRNLTSWQPKFDDLDLICKSAFDWEKQC

SEQ ID NO: 7916 - protein, 665 aa, Escherichia coli CFT073
MNSQLLANAIRMLSVDAIQKANSGHPGAPMGMADIAEVVWRRHLRHNPKNPQWFNRDRYVQSNGHGSMLIYALLHLTGYDLSMDDIRDFRQLHSRTPGHPEYGYTPGVETTTGPLGQGVANAVGMAIAEKALAAEFNKPGFNIVDHHTWLFLGDGCLMEGISHEACGLAGTLKLGNLIAIWDDNGISIDGHVEGWFAEDTAARFRAYGWHVIEGVDGHDPEEVDAAVREAKSVTDKPSLLCCKTIIGFGSPNKANSHDCHGSALGADEVALVRERLQWPYAPFEIPGEIYAAWDATEKGAQVQQEWDALFADYAKQWPELAAEFTRRMKGDLPAGWVENMQKYVHDLQSHPAALATRQVSQKCLNHFADMLPELMGGSADLSPSNLTRHQKSVDFTGENPAGNYISYGVREFGMSAIMNGLALHGGFIPYGGTFLMFMEYARNALRMAALMKIRSVFVYTHDTIGLGEDGPTHQPVEQLASLRLTPNMETWRGCDQVEVAVAWQQAIERKDGPTSLVLTRQPLAQQPRTAAQLAEIARGGYVLSDCDGQPEMILISAGSEIELVVSAAKALTEEGRKVRVVSLPCTERFDNQDAAYKESVLPKAVRKRLAVEASIAGFWERYVGLNGKVIGMTSFGESAPANVLFKHFGFTPENVLAQARELLNS

SEQ ID NO: 7917 - protein, 442 aa, Oryza sativa (japonica cultivar-group)
MVQDEGSSSSVTSSPLHNFSNMPLHPAAAASPTPPWMVRELRSDERGLCLIHLLLNCAAAAAAGRLDAANAALEHIASLAAPDGDAMQRVAAAFAEALARRALRAWPGLCRALLLPRASPTPAEVAAARRHFLDLCPFLRLAGAAANQSILEAMESEKIVHVIDLGGADATQWLELLHLLAARPEGPPHLRLTSVHEHKELLTQTAMALTKEAERLDVPFQFNPVVSRLDALDVESLRVKTGEALAICSSLQLHCLLASDDDAAAVAGGDKERRSPESGLSPSTSRADAFLGALWGLSPKVMVVAEQEASHNAAGLTERFVEALNYYAALFDCLEVGAARGSVERARVERWLLGEEIKNIVACDGGERRERHERLERWARRLEGAGFGRVPLSYYALLQARRVAQGLGCDGFKVREEKGNFFLCWQDRALFSVSAWRGRRFD

SEQ ID NO: 7918 - protein, 197 aa, Glycine max
  misc_feature (89)..(89): Xaa can be any naturally occurring amino acid
  misc_feature (95)..(95): Xaa can be any naturally occurring amino acid
  misc_feature (110)..(111): Xaa can be any naturally occurring amino acid
  misc_feature (126)..(127): Xaa can be any naturally occurring amino acid
  misc_feature (142)..(142): Xaa can be any naturally occurring amino acid
  misc_feature (160)..(160): Xaa can be any naturally occurring amino acid
  unsure (1)..(197): unsure at all Xaa locations
TFISVQGISYGLVPPQCFQFLHSPSAITKPQQLLPKPRATARSSNSVSTNLIIIALLSSSLTTFPTHRRHFYERQPLSVAGSALAYTLXKDGRCXHVIERDLREPDRIVXXELLQPGGYLKLFELXXQDCLEQIDAQRVVGXVLFQDGKKTKLPYSLEKXFHAEWAWKEPSNNGPFFRGLEKKPAYLAPLSKGERAL

SEQ ID NO: 7919 - protein, 347 aa, Arabidopsis thaliana
  misc_feature (169)..(169): Xaa can be any naturally occurring amino acid
  unsure (1)..(347): unsure at all Xaa locations
MSSTKDMSTVQNATPFNGVAPSTTVRVTIVQSSTVYNDTPATIDKAEKYIVEAASKGAELVLFPEGFIGVYPRGFRFGLAVGVHNEEGRDEFRKYHASAIHVPGPEVARLADVARKNHVYLVMGAIEKEGYTLYCTVLFFSPQGQFLGKHRKLMPTSLERCIWGQGDGXSTIPVYDTPIGKLGAAICWENRMPLYRTALYAKGIELYCAPTADGSKEWQSSMLHIAIEGGCFVLSACQFCQRKHFPDHPDYLFTDWYDDKEHDSIVSQGGSVIISPLGQVLAGPNFESEGLVTADIDLGDIARAKLYFDSVGHYSRPDVLHLTVNEHPRKSVTFVTKVEKAEDDSNK

SEQ ID NO: 7920 - protein, 452 aa, Fusobacterium nucleatum subsp. nucleatum ATCC 25586
MRGVCIMINNLSELQKKDLKYVFHPCAQMKDFEENPPLVIKKGDGLYLIDENGNKYMDCISSWWVNLFGHCNKRINRIITEQVNNLEHVIFANFTHEPAAELCEELTKVLPKGINKFLFSDNGSSCIEMALKLSFQYHLQTGNPQKTKFISLENAYHGETIGALGVGDVDIFTETYRPLIKEGRKVKVPYIDSKLSNDEFVKLEDECIKELEDLIIKNHNEIACMIVEPMVQGAAGIKIYSAKFLKAARDLTKKYNIHLIDDEIAMGFGRTGKMFACEHAGIEPDMMCIAKGLSSGYYPIAMLCITTDIFNAFYADYKEGKSFLHSHTYSGNPLGCRIALEVLRIFKEENILKTINEKGTYLRNKMKEIFEDKSYIKDIRNIGLIGAIELKDNLLPNVRIGKEIYNFALKKGAFLRPIGNSVYFMPPYVITYEEIDKMLHVCKESIEELLKI

SEQ ID NO: 7921 - protein, 373 aa, Oryza sativa (japonica cultivar-group)
MSTLVDALCAPCSDTALIYDTFNASAAASFLFDNAAAFCDADILGATATGEKEATSSAAAAAAEAAPPRKKRRRRAKSCKSREETETQRMTHIAVERNRRRQMNEYLAILRSLMPEPYVQRGDQASIVGGAIEFVKELEQQLQSLEAQKRTLLPHHKARCDDATPMHNASGSNVGAGGCMEPTTTTSNCSSSVTEDAPSADAPPFAQFFAYPQYVWCHSPRDSTTTTTAASASASASASSSSPATVAAALQSEHRSGLADIEVSLVETHASVRVMSPRRPGQLLKMIAGLQALRLTVLHLNVTTLDSLVLYTLSVKVEEGCSLTTVDDIAAAVHHVLCIVDAEAAASEHLLAAGQLATTATAVAKRELATYMY

SEQ ID NO: 7922 - protein, 473 aa, Uncultured crenarchaeote
NEVGDGTTSSVVFAGALLEKAEELVNKDVHPSVIVDGYTAAAERALELLQKIAIKVDVNDKSVLTNIARTSMYSKLVSDDGPSLAKMVVDAAKLVAESVDDGKKLRVDLDNIKVEKKPGTSIRDSKLVKGIVLDKEVVHAGMPKKIEKAKIALVNSALEIEKTEMSAEIRINDPQQMQMFLEEENRMLKAMVDKVNGVGANVVLCQKGIDDLAQHYLAKEGILAVRRVKESDMSKLSKATGARIVNNLDDFTTKDLGSADLVEERKVETDKWVFIEGCRNPKAVTILVRGGSQRVVDEADRSIHDALMVVKDVLENPFAVAGGGAPEAYVANELRQWSSNMEGRGQLAIQKFADALDTIPLSLAVNAGMDPIDTMTTLRAKQSKGAKWTGIDVLNTVVADMQKQNVIEPLAVKQQIIKSATEAANMILRIDDVIASSKSKMPAGPPGGMGGMGGMGGMGGMGGMGGMGGMDME

SEQ ID NO: 7923 - protein, 122 aa, Brassica napus
MAKSSFQLSNPLETRMNEATRIREKYPDRVPVIVEKAGQSDVPDIDKKKYLVPADLTVGQFVYVVRKRIKLGAEKAIFVFVKDTLPPTAALMSAIYEEHKDEDGFLYMTYSGENTFGSFLVA

SEQ ID NO: 7924 - protein, 453 aa, Pseudomonas putida KT2440
MSVNNPQTREWQTLSGEHHLAPFSDYKQLKEKGPRIITKAQGVHLWDSEGHKILDGMAGLWCVAVGYGREELVQAAEKQMRELPYYNLFFQTAHPPALELAKAITDVAPKGMTHVFFTGSGSEGNDTVLRMVRHYWALKGKPHKQTIIGRINGYHGSTFAGACLGGMSGMHEQGGLPIPGIVHIPQPYWFGEGGDMTPDEFGVWAAEQLEKKILEVGEDNVAAFIAEPIQGAGGVIIPPETYWPKVKEILARYDILFVADEVICGFGRTGEWFGSDYYDLKPDLMTIAKGLTSGYIPMGGVIVRDTVAKVISEGGDFNHGFTYSGHPVAAAVGLENLRILRDEKIVEKARTEAAPYLQKRLRELQDHPLVGEVRGLGMLGAIELVKDKATRSRYEGKGVGMICRTFCFENGLIMRAVGDTMIIAPPLVISHAEIDELVEKARKCLDLTLEAIQ

SEQ ID NO: 7925 - protein, 94 aa, Listeria monocytogenes
MLKPLGDRVVIEVLEAEEKTASGIVLPDSAKEKPQSGKIVAVGSGRVPDNGTKEPLEVAEGDTVIFAKYSGTEVTYEGTDYLILRESDILAITK

SEQ ID NO: 7926 - protein, 467 aa, Idiomarina loihiensis L2TR
MSSNNLHIAVIGSGGSAMAAALKATEGGARVTLIERGTIGGTCVNIGCVPSKIMIRAAHIAQLRRESPFDKGLSTHTLKVNRSTLLEQQQARIEELRESKYQSILRENSAITVINGEARFIDDETLSVSLCDGGEQTVHFDRAFIGTGARPAQPPIPGLAETPYLTSTSALELNDIPKSLLIIGASVVALELAQAFARLGSDVTVLARSRVLSQDEPAIGEAIATVFDREGINVLEHTEASEVRYDGQHFILKTNAGTLKAEQLLVATGRTPNTENLDLKTIGVQTERGAITINDRMQTSNSRVYAAGDCTNQPKFVYVAAAGGSRAAINMTGGDAHLDLSAMPEVIFTDPQVATVGLSEADAKTGGYVTESRTLGLENVPRALVNFDTQGFIKILAESGSGRLLGVQVVAGEAGELIQAAVMAIRAGMTVNELADELFPYLTMVEGLKLCAQTFTKDVKQLSCCAG

SEQ ID NO: 7927 - protein, 190 aa, Arabidopsis thaliana
MGSSPPKKTTLQRYLSQLQQHPLRTKAITAGVLSGVSDVVSQKLSGIQKIQLRRVLLKVIFAGGFLGPAGHFFHTYLDKFFKGKKDTQTVAKKVILEQLTLSPLNHLLFMIYYGVVIERTPWTLVRERIKKTYPTVQLTAWTFFPVVGWINYKYVPLHFRVILHSLVAFFWGIFLTLRARSMTLALAKAK

SEQ ID NO: 7928 - protein, 499 aa, Frankia sp. CcI3
MFRGREFRIRGRRAPGRAATRAAAATDRGRAAADGNPREPSGGLPTVTAVRGFGTQPPAPPPAETGSPRAWSPTSTPYPLPADSDGGGSESGGSDSGGSNAAPFAVPFADVLTGRSAPRGRLVAPGRPIVLGHRVLLASILVAGLLGGGIGALLVSMTERGSDQQASAALPVGTAAPSSDRRSVASIAATALPSVVTIDAGGGGDGDAAGTGSGVIISPEGYILTNNHVVASAVAARTPISVRRYQEFGQVRADLVGRDPKTDIAVLRIPAPQPLPAVTLGQSGSLVVGAPVVAIGAPFGLAGTVTTGVVSALDRNPMVPAESGTDPTVLIGAIQIDAAINPGNSGGPLLDGLGQMVGINTAIAAVPGHESQSQSGSIGVGFAIPIDFARSVAQEIISTGRATHPYLGVSAATVTAGQAKAMGTTSGARVVNLAPGGPAERAGLRVGDIITRVDTRVISGMNDLIVAARLHRVGDRVSVAYERAGATATTQLTLQEQQR

SEQ ID NO: 7929 - protein, 570 aa, Zea mays
PAPSPASFPNLIFSPFARNAHTARSPISDPRSPRRSKMQIFVKTLTGKTITLEVESSDTIDNVKAKIQDKEGIPPDQQRLIFAGKQLEDGRTLADYNIQKESTLHLVLRLRGGMQIFVKTLTGKTITLEVESSDTIDNVKAKIQDKEGIPPDQQRLIFAGKQLEDGRTLADYNIQKESTLHLVLRLRGGMQIFVKTLTGKTITLEVESSDTIDNVKAKIQDKEGIPPDQQRLIFAGKQLEDGRTLADYNIQKESTLHLVLRLRGGMQIFVKTLTGKTITLEVESSDTIDNVKAKIQDKEGIPPDQQRLIFAGKQLEDGRTLADYNIQKESTLHLVLRLRGGMQIFVKTLTGKTITLEVESSDTIDNVKAKIQDKEGIPPDQQRLIFAGKQLEDGRTLADYNIQKESTLHLVLRLRGGMQIFVKTLTGKTITLEVESSDTIDNVKAKIQDKEGIPPDQQRLIFAGKQLEDGRTLADYNIQKESTLHLVLRLRGGMQIFVKTLTGKTITLEVESSDTIDNVKAKIQDKEGIPPDQQRLIFAGKQLEDGRTLADYNIQKESTLHLVLRLRGGQ

SEQ ID NO: 7930 - protein, 321 aa, Arabidopsis thaliana
MALLLLSHCSILSFQPPLSSSSSFHSSHIQSLSKPVFASPSPIRNSISSSVSSSSSSVSSSNSIPQVVVTRERGKNNQIIKALEKNGISSLELPLIQHARGPDFDRLASVLNDKSFDWIIITSPEAGSVFLEAWKTASSPEVQIGVVGAGTARVFEEAMKSADGLLHVAFTPSKATGKVLASELPEKVGKRSSVLYPASLKAGNDIVEGLSKRGFEVIRLNTYTTVPVQSVDTVLLQQALSAPVLSVASPSAVRAWLHLIQNEEQWSNYVACIGETTASAARRLGLKNVYYPEKPGLEGWVESIMEALGAHADSSNPSSRN

SEQ ID NO: 7931 - protein, 166 aa, Rhodobacter sphaeroides 2.4.1
MGEGRHIGLTSNGSGEVRPQCGAICWRLEGGELQVLLITSRDTGRWVIPKGGRIEGLDDADSAAQEAWEEAGIQGEIAPQPLGRFTYQKIARNAASIACEVVVFPLAVEDMSDVFPERGQRKRKWFTPDKAARKVAEPGLREILVRFDPAPEPDPERDDGLPLGDY

SEQ ID NO: 7932 - protein, 227 aa, Lycopersicon esculentum
LSFDLLESWLAQNPDAAGFKRNGESIFRELALFQDYHGLPDFKNALVQFMSEIRGNKVTFNPNKLVLTAGATSANETLMFCLANPGDAFLLPTPYYPGFDRDLKWRTGAEIVPIQCTSSNGFRITQSALEESYKLAKTRNLRVKGILVTNPSNPLGTTLTRNELELLVSFVAEKGIHLISDEIYPGTVFNSPKFVSVMEVLIENNYMYTEVWDRVHIVYSLSKDLGL

SEQ ID NO: 7933 - protein, 176 aa, Rhodobacter sphaeroides 2.4.1
MTVRPHLALAFACLAGPALAAGPPPVTFDSIDGGQIRLDELRTAGPVLVVNTASLCGFTPQYDDLQALWDRYRDAGLTVLAVPSNDFKQELDDAGAVRDFCATNFDLTLPMTTITPVTGAEAHPFYRWLAEEHGVEPRWNFHKVLIDRDGDLVASWSSPVRPTDREIVGRIEALLP

SEQ ID NO: 7934 - protein, 355 aa, Elaeagnus umbellata
MSLLSDLLNLNISESTDRIIAEYIWIGGSGLDLRSKATLPKKVKNPSELPKWNYDGSSTNQAPGDDSEVILYPQAIFRDPFRRGNNILVMCDAYTPAGEPIPTNKRHNAAKIFSHPDVDAEEPWYGIEQEYTLLQKEVNWPLGWPLGGFPGPQGPYYCGVGADKAFGRDIVDSHYKACLYAGVNISGINGEVMPGQWEFQVGPTVGIAAGDQVWVARYILERIAEIAGVVVSFDPKPIKGHWNGAGAHTNYSTKSMRIDGGINVIKKAIEKLGLRHKEHIAAYGEGNERRLTGRHETADINTFSWGVANRGASVRVGRDTEKDGKGYFEDRRPASNMDPYVVTSMIAETTILWKP

SEQ ID NO: 7935 - protein, 369 aa, Rhodobacter sphaeroides 2.4.1
MAFPAAPLYIGSEIYRRSSYGGRHPLRVPRVSTVTDLGRALGWLPAASFRTAPRAKPAALTLWHDPAYVAALAAAEAGLAAPELLAAHGLGTLSNPVFPEMFRRPATGAGGVMLAAELLRGGGAIHVPGGGTHHGMRDRANGFCYLNDPVLGMLVLRRMGLRRIAYVDIDAHHPDGVEAAFAGDPEVLLISVHEEGRWPFTGALEDEGGGTCFNLPVPRGFNDTEMRAVLEELILPRLAAFRPEAVVLQCGADALEEDPLSRLSLSNNAHFEVVAALRPVAPRFLVLGGGGYNPWSVGRCWAGVWATLAGHEIPDRLPEAARAVLAGLDWGGGGRPPPAPPLIETLRDAPREGPVRPEIRERLARLARR

SEQ ID NO: 7936 - protein, 550 aa, Salmonella enterica subsp. enterica serovar Paratyphi A str.
MTIPLWWQNGVIYQIYPKSFQDTTGSGTGDLRGVTQRLDYLQRLGVDAIWLTPFYISPQVDNGYDVANYTAIDPTYGTLDDFDELVAQAKARGIRIILDMVFNHTSTQHTWFREALNKESPYRQFYIWRDGTPDVCPNNWQSKFGGSAWRWHSQSEQYYLHLFAPEQADLNWENPAVRAELKKVCEFWADRGVDGLRLDVVNLIAKDQDFPDDPTGDGRRFYTDGPRAHTFLREMNRDVFTPRNLMTVGEMSSTTLENCQQYAALSGDELSMTFNFHHLKVDYPNGEKWTLAKPDYVALKALFRHWQQGMHNVAWNALFWCNHDQPRIVSRFGDEGEYRVPAAKMLAMALHGMQGTPYIYQGEEIGMTNPHFTRITDYRDVESHNMFAALRAAGRDPDELLAILASKSRDNSRTPMQWDNGKNAGFTQGEPWISLCDNYTEVNVAAALRDENSVFYTYQKLIALRKTQPVLIWGDYQDLLPDSPSVWCYRRQWQGQILLVVANLSNQCQEWHPPHIKGQWQALLHNYGEVASQPAAMTLRPFEAIWWLQR

SEQ ID NO: 7937 - protein, 316 aa, Vibrio vulnificus CMCP6
MSNKLEQLRKLTTVVADTGEIDAIKKYQPEDATTNPSLILKAAQIAEYAPLIDASIEYAKTQSDDKAQQIQDTCDMLAVNIGKEILKTIPGRISTEVDARLSYDMEGSVAKARQLVKMYNDAGITNDRILIKLASTWEGIRAAEILEKEGINCNLTLLFSFAQARACAEAGVFLISPFVGRIMDWYKAKEGRDFEAQEDPGVLSVTKIYNYYKEYGYKTVVMGASFRNIGEILELAGCDRLTIAPALLAELEAAEGEVVEKLVDSKGAAERPAAMTHAEFLWEHNQDPMAVEKLAEGIRNFAVDQGKLEAMIAAKL

SEQ ID NO: 7938 - protein, 663 aa, Vibrio vulnificus CMCP6
MDRKQLANAIRALSMDGVQKANSGHPGAPMGMADIAEVLWRGHLNHNPSNPEWADRDRFVLSNGHGSMLIYSLLHLSGYELSIDDLKNFRQLHSKTPGHPEYGYAPGIETTTGPLGQGITNAVGMAMAEKALAAQFNKEGHDIVDHFTYVFMGDGCLMEGISHEACSLAGTLGLGKLIAFWDDNGISIDGHVEGWFSDDTPKRFEAYGWHVIPAVDGHNAEAINAAIEAAKADPRPTLICTKTIIGFGSPNKSGSHDCHGAPLGAEEIAATRKELGWEHGPFEIPQEVYAEWSAKEAGAAKEAAWNEKFAAYEAAYPELAAEFKRRVNGELPAQWEEKANQIIADLQANPANIASRKASQNALEAFGKMLPEFMGGSADLAPSNLTMWSGSKSLEASDFSGNYIHYGVREFGMTAIMNGIALHGGFVPYGATFLMFMEYARNAMRMAALMKVQNIQVYTHDSIGLGEDGPTHQPVEQIASLRLTPNMSTWRPCDQVESAVAWKLAIERKDGPSALIFSRQNLAQQPRSAEQVADIAKGGYILKDSDGKPELILIATGSEVELAVKAAEQLTAEGKKVRVVSMPATDTFDKQDAAYREAVLPSDVTARIAIEAGIADFWYKYVGFDGRIIGMTTFGESAPADQLFEMFGFTVENVVNTAKELLA

SEQ ID NO: 7939 - protein, 140 aa, Triticum aestivum
MEGLQRSSSTFRRSGSSGLVWDERFLTEGAEAQAAGEGGADDAQPEMRRSRSTGGVGMMLRRGGDDKKQQQQQQKKKEQQGQKKKDEERDPQVFRTKEVAPDVDPPSPRVSGCILCAIFGGSGSGSGSSPAARRGRAKAK

SEQ ID NO: 7940 - protein, 227 aa, Lycopersicon esculentum
MFRPEMPVVPLQRPDEGHGPSISWSQTTSGYEEPCDEQGVPTLISWTLDGKEVAVEGSWDNWKSRMPLQKSGKDFTILKVLPSGVYQYRFIVDGQWRCSPDLPCVQDEAGNTYNLLDMKDYVPEDIESIYGFEPPQSPDSSYNNLHLVSEDYAKEPPVVPPHLQMTLLNVSPSHMEIPPPLSRPQHVVLNHLYMQKDRSTPSVVALGSTNRFLSKYVTVVLYKSIQR

SEQ ID NO: 7941 - protein, 267 aa, Ralstonia eutropha JMP134
MSIPSFGVGTFRLTGQAAVDSVYNALDLGYRAIDTAQIYGNEADVGQAIAESGVKRDELFLTTKIWTEHYAADKLVPSLRESLDKLRTDYVDLTLIHWPAPGNGVPLREFMEALAAAKSLGLTRQIGVSNFNIALTHQAIDVVGKGEIATNQIELSPYLQSRKLTAFLTEQGIAVTSYMTLAYGKVLTDPVLAQIAAKHGATVAQVALAWALQLGYAVIPSSTKRENLASNLLARDLKLDAGDMAQITALERNGREVNPEGLAPEWD

SEQ ID NO: 7942 - protein, 716 aa, Kluyveromyces lactis NRRL Y-1140
MATLFGKTLSQVHPKLRTNGIGIATNHRRISLGFDLVSRDKKNPLLRKYLRKRRHRGLRRGLHPDEQGSYHTLDEDFGSSVREPSVYDDLDEVLEDIDEYDEDGEPLSRTVSLPSRVSEPSNVSQQNLDWLLEEHERRFSSSQNSENDEDEDLENGTSEQADVIAYDDFMHRVRQQLQQDFHDRAYAGGAGGSGAGGPNRRRGSLISVTSRGSVPQVFQDVGSMKEEDLSHAKVTANSELKVLASYSIPLIFTFLLEQMFPVVCSLTVGHLGRTELAAVSLASMTTNITYAIFEGIATSLDTLCPLAYGSGNYYSVGVHMQRCIMFSFTVFIPFGFIWWWSETLLTLVMPHEPELIHMTAKFLRVSILGAPAYIIFESLKRFLQAQGIFDAGIYVLMICAPWNMFVSYTLVWNERIGMGFIGAPIAVVLNFWTMVTLLSLYAIYVDGYKCWGGFNSKSLKHWKALSELAVPGIVMLEAEDLSYEILTLFSSYFGTPYLAAQSAVSTTAALLYMIPFSVGISSSTRIGNFIGCRRPNCAKLSAELGIGSSLFVGLLNCLIINVDKRSIANIYTKDEEVIQLMCQLLPLVGIVEIFDSLNAISGSCLRGLGLQYIGSIVNLVVYHLVAIPLGIFLAWYMDMKLNGLWIGIGVGMLIIGLVQSYYVIFADWNDVMERAEKRRDHDRDADSDTDSLESVSSVEAYSDSESDSESSPLLLR

SEQ ID NO: 7943 - protein, 295 aa, Brassica napus
MAMVDEPLYPIAVLIDELKNDDIQLRLNSIRRLSTIARALGEERTRKELIPFLSENSDDDDEVLLAMAGELGVFIPFVGGVEHAHVLLPPLESLCTVEETCVREKAVDSLCKIGSEMRESDLVDSFVPLVKRLAAGEWFAARVSACGLFHVAYQGCTDVLKTELRSIYNQLCQDDMPMVRRAAATNLGKFATTLESSYLNAEIMTMFDDLTKDEQDSVRLLAVEGCAALGKLLEPQDCVARVLPVIVNFSQDKSWRVRYMVANQLYELCEAVGPDCTKTDLVPAYVRLLQDNEAE

SEQ ID NO: 7944 - protein, 160 aa, Colwellia psychrerythraea 34H
MSNIYQFTVKNNKEETIELNQFTDKVLLIVNTASNCGFTPQYQGLQSLHDSFQTNGFEVLAFPCNQFKQQESGNNEEIQQFCDLHFNIKFPLFDKIDVNGSNAHPLFSFLKQQAPGILGSKSIKWNFTKFLVNRKGEVVKRYAPTTKPEAITADIEKLLV

SEQ ID NO: 7945 - protein, 295 aa, Kluyveromyces lactis NRRL Y-1140
MSSINERPQDPSSALEQATQDVANLKSEFHHIMDEMQVADKTLVSSREQYLREDYVLHKLVKQHGSLTKDPKEGSITETVEKEMKRCGDLQQQKCILANTALYLVTKHLSKIKANIESLEEDGLLAPLDDELSDKKAGSVDLGAGIAGLGNGTAGSGSSSGRKRPASSSSANGKGQKRKQQKKERSRSHQRAGTVSRDVSPNAGIGRDPTFDALAYNDDLFKMNQGGEEDDKQLYCFCQRVSYGEMVACDGPNCKYEWFHYSCVNLTEPPKGQWYCPECRLEIANQKLNKKKKKQ

SEQ ID NO: 7946 - protein, 99 aa, Ficus carica
DEMDFEFLGNLSGDPYTLHTNVFSQGKGNREQQFHLWFDPTKAFHTYSVVWNKQRIIFLVDNIPIRVFNNLESAAGVPYPKSQPMRIYSSLRDATWATR

SEQ ID NO: 7947 - protein, 472 aa, Candida albicans SC5314
MSLSPKLEEIVSSIEKSFEIKDDFLVKATEYFIESMNVGLESPKPSKDVMPMIPTYVTSIPTGKEVGLYLAADLGGTNFRVCSIDLKGDHTFSMKQSKYRIPVDLMKAEKSNDLFGFLAKKVQSFLFENHSEACTAKNTEPLKLGFTFSFPVNQTALNRGTLIRWTKGFDIPDTVDRDVVELLQANLTILEVNVKVVAIANDTVGTLLTAAYSNDSAKTNRNTIIGCIFGTGTNGAYFESKIPKLSSSTSKSQGMVINTEWGSFDNGLKILPSTEFDEIVDSETANPGYHLFEKRISGMFLGEILRVALIHLFKKGLIFQELYKARGGSLPHRIEEPWLLDAEVLSYLQIDDSTDLKTSGLILQNVLRLETNKEEREVIQRLTRAISQRAAHLSAIPIAAIAKKVKDQYKDDDRDFEVGCDGSVIEFYPGFRQAVLESIEKINPLKGTNKKIYLKIAKDGSGVGAALCASTA

SEQ ID NO: 7948 - protein, 342 aa, Staphylococcus aureus subsp. aureus MSSA476
MMNNKVLVTGGTGFVGMRIISRLLEQGYEVQTTIRDLSKADKVIKTMQDNGISTERLMFVEADLSQDEHWDEAMKDCKYVLSVASPVFFGKTDDAEVMAKPAIEGIQRILRAAEHAGVKRVVMTANFGAVGFSNKDKNSITNESHWTNEDEPGLSVYEKSKLLAEKAAWDFVENENTTVEFATINPVAIFGPSLDAHVSGSFHLLENLLNGSMKRVPQIPLNVVDVRDVAELHILAMTNEQANGKRFIATADGQINLLEIAKLIKEKRPEIAQKVSTKKLPDFVLSLGAKFNHQAKEGKLLLDMNRNVSNERAKILLGWEPIATQKEAILAAVDSMAKYHLI

SEQ ID NO: 7949 - protein, 1276 aa, Arabidopsis thaliana
MYSSRGTGYGQQQYGSQSGYSQNLGSGYPGSSVSGGAEGGSQISLSSRHPSITGAPQETDIGGGYRSHLSTAASHYGTQYGSVYGSTSLSSSQPLSTNGLGSSVLDNRSGYVPTLPDSPKFASGSYLSPSSHGYGQKTDDLYSDKLSGYIPVDRRQYGEQSSSYLGRELQNEPTRRYADPSNFARQTDLYDRIDQASLLRGEQLLKMQSLHTSSVDAGVNRQTDYLTERSSTVRHSDQEAMHYGGRLESDPHGLSVRNTSSYASQHTPSLLGAVPRRNLDDYIYPESSSNPGYGVSLPPGRDYGTGKGIHSAASLDLDYPGGMLARGTGAAPRVDDLRKGDRASYLREFDLREEERRREDQRARDKEREREREREHDRERERQRERERQRARDRERERILERREKERQGERERERKRALEIKRDRTPTARATSKDTKERTPVPKSISRDARCCELAETEAYTFYAYCCEDDSFEHDYIEDGGADVKSTSTKPLALKTGGKSVWNAKMVLMSGLSRTALEDLASDKFFEDRIPHICNILKFAVLKKDHSFMAIGGSWDPTDGMDPSVDQSSLIQTMLRHSKDKLHLDLSNCRHWNPFLEIHYDRVGTDGVFSYKEITVLFVPDLSECLPSFDVWRTQWLAHRKALTERDRLLSQEVKKDTVEVTKDAEKKSPGDTSGTPTTGTKKTVKKIIKRVVKRPVNDGKATGMKGEKSDVPEHVAIPETTVPKEESTGTSSNKKIVKKVAETGDTSDPSAKANEQTPAKTIVKKKIIKRVAKRKVAEIDNKMDGDSKKDGDSDEKKVMEVGKKSSDSGSVEMKPTAESLEDVKDENASKTVDVKQETGSPDTKKKEGASSSSKKDTKTGEDKKAEKKNNSETMSEGKKIDRNNTDEKEVKEKVTEKEIKERGGKDESRIQVKDRKKCEEPPRAGFILQTKRNKDSKLRSLSASLDSLLDYTDKDLDESSFEISLFAESLYEMLQYQMGSRIFEFLKKLRVKIVRQRNQRKRHQEELSVKQNEAKSQDKRQKTAEHEDKEASVISESAPGKDDKETSGKETVDGSREIADKEAVAKTKETLGSKEVTVGEAVNMEVENQDEEDDDGDDDPEEDPEEDPEEDPEEDPEEDPEECEEMDVANTEQEEPAEEPQKKEENLEKTSGTVADPITEAETDNRKEERGPNDSKTEIKPKSETEKHGKQDGGTSDAAKREETVDKELLQAFRFFDRNQAGYVRVEDMRVTIHSLGKFLSHREVKELVQSALLESNTGRDDRILYNKLVRLSL

SEQ ID NO: 7950 - protein, 525 aa, Ralstonia eutropha JMP134
MTRLLRLGKILFVILYYGLDELVLSGFQNRKIRFLVRVMTIGRKLDMPRGERLRLALTKLGPIFVKFGQVLSTRRDLMPPDIADELALLQDQVPPFDSAVAVKIIERSLGRTLADLFETFEHQPVASASIAQVHFATLKGGPNHGREVAVKVLRPGMLPVIDSDLALMRDLATWLERFWADGKRLKPREVVAEFDKYLHDELDLMIEAANASQLRRNFADTNLLLVPEVFWDWCSSTVFVMERMHGIPISRTESLKAAGVDMHQLAEEGVEIFFTQVFRDGFFHADMHPGNILVSVQPETFGRYIALDFGIVGALSEFDKNYLAQNFIAFFRRDYHRVALLHVESGWVPPDTRVEELESAVRACCEPYFDKPLKEISLGMVLMRLFQTSRRFNVEIQPQLVLLQKTLLNIEGLGRQLDPDLDLWKTAKPFLERWMHEQVGWKGAWERIKVEAPLWAKMLPDFPRLAHQFLERRALNTNGEQERLLAQLVTEQRRTNRLVGTALLLVGGFVAGIVLTHVLGWIGYW

SEQ ID NO: 7951 - protein, 204 aa, Zea mays
VKSTIERYKKANSDTSNSGTVAEVNAQSLYEVQSHAQTAYILQCSLFILAFYGHDYVVDLKTTPHKHYQQESSKLRQAIDSLQNANSRTIVGDSIHTMGLRELKQMEGKLEKAINKIRARKNELLYAEVEYMQRREMDLQTDNMYLRSKIAENNNETGQPAMNMIGVPSTSEYDHMASFVDSRNFLQMMKLRIFGQQSMHASTQ

SEQ ID NO: 7952 - protein, 354 aa, Nicotiana attenuata
MQSLKNNAQSNGGNQYNNQSSQSIREQKRSEDGYNWRKYGQKQVKGSENPRSYYKCTFPNCPTKKKVERSLDGQITEIVYKGNHNHPKPQSTRRSSSTASSSSAVQPYNTQTNEIPDHQSYGSNATPENSSISFGDDDHEHSSQKSRSRGDDFDEEEEEPDSKRWKRESESESLSAPGSRTVREPRVVVQTTSDIDILDDGYRWRKYGQKVVKGNPNPRSYYKCTSPGCPVRKHVERASQDIRSVITTYEGKHNHDVPAARGSGINRPVAPSITYNNGANAVRPFVTSQIPLQSIRPHQSPFTLEMLQKPSNYNGFSGYANSEDSYENQLQDNNVFSRAKDEPRDDMFMDTLLC

SEQ ID NO: 7953 - protein, 485 aa, Lycopersicon esculentum
MVSISKNNQKQQLLSKIATNDGHGENSPYFDGWKAYANNPFHLTDNPTGVIQMGLAENQLCFDLIQEWVVNNPKASICTVEGAENFQDIAIFQDYHGLPEFRQAVARFMEKVRGDRVTFDPNRIVMSGGATGAHEMLAFCLADPGDAFLVPTPYYPGFDRDLRWRTGVQLFPVVCESCNDFKVTTKALEEAYEKAQQSNIKIKGLLINNPSNPLGTLLDKDTLRDIVTFINSKNIHLVCDEIYAATVFDQPRFISVSEIVEDMIECNKDLIHIVYSLSKDLGFPGFRVGIVYSYNDTVVNIARKMSSFGLVSTQTQHLLASMLSDEVFIDKFIAESSERLGERQGMFTKGLAEVGISTLKSNAGLFFWMDLRRLLKEATFDSELELWRIIINEVKLNVSPGCSFHCSEPGWFRVCFANMDDETMRIALKRISYFVLQPKGLNNIAAIKKQCSRRKLQISLSFRRLDHEFMNSPAHSPMNSPLVRT

SEQ ID NO: 7954 - protein, 483 aa, Lycopersicon esculentum
MVSISKNNQKQQLLSKIATNDGHGENSPYFDGWKAYANNPFHLTDNPTGVIQMGLAENQLCFDLIQEWMVNNPKASICTVEGAENFQDIAIFQDYHGLPEFRQAVARFMEKVRGDRVTFDPNRIVMSGGATGAHEMLAFCLADPGDAFLVPTPYYPGFDRDLRWRTGVQLFPVVCESCNDFKVTTKALEEAYEKAQQSNIKIKGLLINNPSNPLGTLLDKDTLRDIVTFINSKNIHLVCDEIYAATVFDQPRFISVSEMVEEMIECNTDLIHIVYSLSKDLGFPGFRVGIVYSYNDTVVNISRKMSSFGLVSTQTQHMLASMLSDEIFVEKFIAESSERLGKRQGMFTKGLAQVGISTLKSNAGLFFWMDLRRLLKEATFDGELELWRIIINEVKLNVSPGCSFHCSEPGWFRVCFANMDDETMRIALRRIRNFVLQTKGLNNIAAIKKQCSRSKLQISLSFRRLDDFNSPAHSPMNSPLVRT

SEQ ID NO: 7955 - protein, 76 aa, Zea mays
  misc_feature (47)..(47): Xaa can be any naturally occurring amino acid
  unsure (1)..(76): unsure at all Xaa locations
PRVRAATQARSVALERDLCTVDCYNAVLRARHAELAGRLQSLGGVLXVLQMAGADGDMHEMVTDDDMLLLDRRATA

SEQ ID NO: 7956 - protein, 148 aa, Oryza sativa (japonica cultivar-group)
MSSPSRRSSSPESNTSGGGGGTDERKRKRMLSNRESARRSRARKQQRLEELIAEAARLQAENARVEAQIGAYAGELSKVDGENAVLRARHGELAGRLQALGSVLEILQVAGAPVDIPEIPDDPLLRPWQPPFAAQPIVATAMADAFQF

SEQ ID NO: 7957 - protein, 973 aa, Oryza sativa
  misc_feature (915)..(915): Xaa can be any naturally occurring amino acid
  misc_feature (937)..(937): Xaa can be any naturally occurring amino acid
  misc_feature (952)..(952): Xaa can be any naturally occurring amino acid
  unsure (1)..(973): unsure at all Xaa locations
MSAAGGGGGVGKVERLSSIDAQLRQLVPAKLSEDDKLIEYDALLLDRFLDVLHGLHGDDLKDLVQECYEVAAEYETKHDVQKLDELGNMITSLDPGDSIVIAKAFSHMLNLANLAEEVQIAYRRRIKLKKGDFADENSAMTESDIEETLKRLVFDLKKSPAEVFDALKSQTVDLVLTAHPTQSVRRSLLQKHSRIRNCLVQLYSKDITPDDKQELDEALQREIQAAFRTDEIRRTQPTPQDEMRAGMSYFHETIWKGVPKFLRRVDTALKNIGIDERVPYNAPLIQFSSWMGGDRDGNPRVTPEVTRDVCLLARMMAANLYCSQIEDLMFELSMWRCNEELRSRADDLHRSSKKDAKHYIEFWKKVPLNEPYRVILSDVRDKLYNTRERSRELLSSGYCDIPEEATLTNVEQLLEPLELCYRSLCACGDRAIADGSLLDFLRQVSTFGLSLVRLDIRQESDRHTDVLDAITTYLGIGSYREWSEERRQEWLLSELNGKRPLFGPDLPRTDEVADVLDTFHVIAELPADSFGAYVISMATAPSDVLAVELLQRECHVKTPLRVVPLFEKLADLESAPAALTRLFSISWYRQRINGKQEVMIGYSDSGKDAGRLSAAWQMYKAQEQLVKVAKDFGVKLTMFHGRGGTVGRGGGPTHLAILSQPPDTINGSLRVTVQGEVIEQSFGEEHLCFRTLQRFTAATLEHGMHPPSAPKPEWRALLDEMAVVATKEYRSVVFQEPRFVEYFRLATPETEYGRMNIGSRPSKRKPSGGIESLRAIPWIFAWTQTRFHLPVWLGFGAAFKHALQKDIRNLHMLQEMYNEWPFFRVTLDLIEMVFAKGNPGIAALYDKLLVSEDLQPLGEKLRANYVETQKLLLQVAGHRDLLEGDPYLKQRLRLRDAYITTLNVCQAYTLKRIRXDPDYHVTLRPHLSKEVMDGSKXAAELVKLNPGSEYAXGLEDTLILTMKGIAAGLQNTG

SEQ ID NO: 7958 - protein, 459 aa, Chromobacterium violaceum ATCC 12472
MQKQRTTSQWRELDAAHHLHPFTDTASLNQAGARVMTRGEGVYLWDSEGNKIIDGMAGLWCVNVGYGRKDFAEAARRQMEELPFYNTFFKTTHPAVVELSSLLAEVTPAGFDRVFYTNSGSESVDTMIRMVRRYWDVQGKPEKKTLIGRWNGYHGSTIGGASLGGMKYMHEQGDLPIPGMAHIEQPWWYKHGKDMTPDEFGVVAARWLEEKILEIGADKVAAFVGEPIQGAGGVIVPPATYWPEIERICRKYDVLLVADEVICGFGRTGEWFGHQHFGFQPDLFTAAKGLSSGYLPIGAVFVGKRVAEGLIAGGDFNHGFTYSGHPVCAAVAHANVAALRDEGIVQRVKDDIGPYMQKRWRETFSRFEHVDDVRGVGMVQAFTLVKNKAKRELFPDFGEIGTLCRDIFFRNNLIMRACGDHIVSAPPLVMTRAEVDEMLAVAERCLEEFEQTLKARGLA

SEQ ID NO: 7959 - protein, 431 aa, Prochlorococcus marinus str. MIT 9312
MKRVLAIILGGGKGSRLYPLTKMRAKPAVPLAGKYRLIDIPISNCINSGIEKMYVLTQFNSASLNRHIGRTYNLNGPFGQGFVEVLAAQQTPDSPKWFEGTADAVRKYQWLFQEWDVDEYLILSGDQLYRMDYSLFVQHHRDNGADLTVAALPVDEAQAEGFGLMRTDDLGNIKEFSEKPTGEKLKAMAVDTSKFGLTKESAAEKPYLASMGIYVFSRNTLFDLLNKFPNYTDFGKDIIPEALKRGDTLKSYVFDDYWEDIGTIGAFFESNLALTEQPKPPFSFYDEKFPIYTRPRFLPPSKLVDAQITDSIVCEGTILKSCSILHCVLGVRSRIESDSILEDTLVMGADFFESPEERIELRKGGGTPLGVGEGTTVKRAILDKNTRIGDNVVIINKDRVEEADKPELGFYIRNGIVVVVKNATIANGTVI

SEQ ID NO: 7960 - protein, 379 aa, Mesorhizobium loti MAFF303099
MSARPLARYDATLRGLARNDRLRTLSPRAGLDFSSNDYLGLARSQRLANAISAALARGTPVGASGSRLLRGNAPEHEALEANAAAFFRAERALFFGGGYIANFALLTTLPQKGDLLVLDELVHASAHEGARAGRAQIAVAAHNDADAFASVIEEWRQSGGVGHVWIGVESLYSMDGDRAPLKDLMVLADRHDGFLLIDEAHATGVYGPNGRGLAAAFEGRENVVTLHTCGKALGASGALVTGPRTLCDYLVNRCRPFIYATAPSPLMAVAAQEALAVLQEEPDRRDRLADLVSFAAQELMKRCGVAASGSQILPVIVGDNRRTMALAAALQARGFDIRGIRPPTVPEGSSRLRISLTLNVDEAAISAMIEALVEVLAQT

SEQ ID NO: 7961 - protein, 534 aa, Magnaporthe grisea 70-15
MTTKVETQDPQVQVDRRSKYHEADVVVVGAGVFGCAIAYALANQGRSILLLERWMHEPDRIVGELLQPGGVASLKKLGLGHCLEGIDAQPCYGYHVMHKGDEVAIPYPYMDDEGCIVTDMNKKQIPTDDHVNGHTNNHTIDGHANGNGHLYNGGYEKLEPMATKPEGRSFHHGRLITNLRKSCLAHKNITVVETEVTATIRGTHTPQVLGVEARTTDKSTGKKHADCFFGQLTIIADGYASKFRKQYISRAPIVRSKFYALELIDCPLPPYGYGHVVIGEKHLALLYQIGSHETRCLIDVPENLPAASPANGGVRGYLHKVVIPSLPESVRPSALKALSDGKIPRSMPNSWLPPTPQTQHEGILILGDAMNMRHPLTGGGMTVAFNDALLVAELLDPDVVPSLSDTAAVRAAMKTFHWRRKRLTSIVNVLAQALYSLFAASDWRLDALRRGCFEYFQRGITDEPCAMLAGLLESPTTLAYHFFSVAFVALWLHLSGSIGSPAGLWKLPMVLIECVMILWKACVVFLPVMWAEAA

SEQ ID NO: 7962 - protein, 141 aa, Zea mays
RHGERGPEGGGVAAGVLGSKKYYYEQEKKNDTDELESGMEKVTVSEPEKLGHKEEEHEVVSDKKEELIAKLHRTSCSSSSSSDEEEEANDENGQIIKRKRKKMALKEKLKEKPAGHKDGHHTGEPIPAPRARGDPSPTPGG

SEQ ID NO: 7963 - protein, 362 aa, Hordeum vulgare subsp. vulgare
MAEEGKGTGSNGGRGVRACVTGGAGFIGSWLVRKLLEAGYTVHATLRSIGDEGKAGLLRGLVPGGAPPERLVLFEADIYDAASFAPAIAGCHFVFLVANPSAHEPASKYKTSAEAAADAVRVILRLCAESRTVKRVIHTASVTAASPLTKSSSAAAAVYGDFISESCWTLLDVNYPLRSVHFDKYIESKVLSEKELLSYNDGENPAFEVVTLPLGLVGGNTVLGYLPETMESVVAPVTKQEPCFMLPRILQRLLGSVPLVHVDDVCAALIFCMEQPALSGRFLCAAAYPTIHDILDHYGSKYPHLDLLRETDEVARVQPDKNKLGELGFEYKYGLKEILDESIDCAVRLGSLDASKLIVQQG

SEQ ID NO: 7964 - protein, 245 aa, Prochlorococcus marinus str. MIT 9312
MDEMIEKVKNGYNLNIYKDKLELSTAVFKFIESHIIHTLKKKCRFKFCVSGGSTPKSVYQLLSISDLRWDMVDVFLGDERCVDPNSELSNSLMLKKSLLTNFGSKAFFYEIFNDLKADDEATKNQFISKLFEKCGSNPPTFDLTLLGLGDDGHTASLFPYQKNNNADDFVIFNEGKGLKRISLTPKVLSASSKIVFLVSGASKRIALERLLDEKEPSDRTPSKLIKSINQISIFCDQESAKELEI

SEQ ID NO: 7965 - protein, 505 aa, Vitis vinifera
MELAKPSSVFAIQDHQSSSPPTPIWKTVVVASIAAGIQFGWALQLSLLTPYVQLLGIPHKWAAFIWLCGPISGMIVQPVVGYHSDRCTSRFGRRRPFIAAGAVLVAIAVFLIGYAADIGRVSGDPLHNTIKTRAVAVFVVGFWILDVANNMLQGPCRALLADLSGTSARRTRTANALYSFFMAVGNVLGYAAGSFSKLHKMFPFARTQACDLYCANLKSCFFLSIALLLILTIIAFATVHETPLNRADIAVVEAGQPFYSQMMNAFRQLRRPMWVLLLVTCLNWIGWFPFLLFDTDWMGREVYGGTVGEGPRGRLYDLGVRAGSLGLMLNSVVLGLMSLGVEFFGRGVGGVKRLWGGVNFLLALCLALTVLVSKLAASWRHSLGGELHPPPIGIKAGALSLFAVMGVPLAITYSIPFALASIFCHSSGAGQGLSLGVLNLAIVVPQMMVSVASGPWDARFGGGNLPAFVVGAFAAALNGVLALTMLPAPPPDVPNTKDERTQPSS

SEQ ID NO: 7966 - protein, 565 aa, Yarrowia lipolytica CLIB122
MSWWSSTPSIDEQVEKATSESLPSGESDLALNLEICDLIRSKTVPAKDAMRSLKRRLLNRNPNVQLAALQLTDVCIKNGGSHFLVEIASREFVDPLMAIARNDDANPEVRQRVLQLLQQWAVAFAGQLQLQQVENAVTQLKSEGVSFPSASHDNAAVTSTFIDTKAPPEWIDSDVCMESGVAFSFLNRKHHCRNCGGVFTQACCQNYITLPHFGINVPVRVCNGCFKNLKKGKSDAPIHKPVPGATTTAPSSAPPANSAPNDDEDDIQKAIRLSLQEQESYKPPPPAAATSNDDDEDMKAAIAASLRDMENERQTGQTSASAGGLSSASTTVMAPSLTDLTATEESNINLLSLLVERLKGEPQGTILREPKIQELYDTVGNLRPKLARTMGETISKYDSLVDMHAKMTTVIRYYDALLEEKLNQAYTNRQSGGYAPQPHLSHQMTGQPPHLAPHLTGQITGQPHMGYQHTGQAPYLTGQVTGQAPYLSNQPTGHLTNHYTGSAPSAPQYGGPPAQNVYNAPSYQYSGAPEYDYASSPSAPSAPGGPSAPSAPAQPKEESAPLIEL

SEQ ID NO: 7967 - protein, 318 aa, Salmonella enterica subsp. enterica serovar Typhi Ty2
MTPIAVTLLTGFLGAGKTTLLRHILNEQHGFKIAVIENEFGEVSVDDQLIGDRATQIKTLTNGCICCTRSNELEDALLDLLDSRDRGDIAFDRLVIECTGMADPGPIIQTFFYHDVLCERYLLDGVIALVDAVHANEQMNQFTIAQSQIGYADRILLTKTDVAGDSEKLRERLARINARAPVYTVVHGDIDLSQLFNTSGFMLEENVLASQPRFHFIADKQNDVSSIVVELDYPVDISEVSRVMENLLLESADKLLRYKGMLWIDGEPNRLLFQGVQRLYSADWDRPWGDETPHSTLVFIGIQLPEDEIRAAFAGLRK

SEQ ID NO: 7968 - protein, 323 aa, Oryza sativa (japonica cultivar-group)
MEDHTRKLQNKADIASAEVHKSGGWGTDEQAVIGVLAHRDATQRKQIRLTYEENYNENLIQRLQSELSGDLERAMYHWVLDPVERQAVMVNTATKCIHEDYAVIVEIACTNSSSELLAVKRTYHVLYKCSLEEDVAARATGNLRSLLLALVSTYRYDGDEVNDALAKSEAKILHETVTNGDTDHGELIRIVGTRSRAQLNATFSWFRDERGTSITKLHAPRFDHQALQHGADPTGYSHALRTALRCISDANKYFVKVLRNAMHKSGTNEDSLTRVIVLHAEKDLKGIKDAFQKRASVALEKAIGNDTSGDYKSFLMALLGSGI

SEQ ID NO: 7969 - protein, 430 aa, Helicobacter pylori 26695
MELLHSINDFNEAKQVIAGGVNSPVRAFKSVKGTPPFILKGKGAYLYDVDNNHYIDFVQSWGPLIFGHADEEIEENIINALKKGTSFGAPTELETTLAKEIISCYEGLDKVRLVSSGTEATMSAIRLARAYSQKDDLIKFEGCYHGHSDSLLVKAGSGCATFGSPSSLGVPNDFSKHTLVARYNDLNSTEECFKKGNVGCVIIEPIAGNMGLVPAQKEFLLGLKALCEKYQAVLILDEVMSGFRASLSGSQEFYGVVPDLVTFGKVIGAGLPLACFGGRAEIMDLLSPIGSVYQAGTLSGNPLAVCAGLSALYKIKRDKTLYTRLDALAIRLTQGLQKSAQNYNIALETLNMGSMFGFFFNENAVHDFDDALKSDTEMFAKFHQKMLFKGVYLACSSFETGFICEPMTEEMIDLTIAKADESFDEIIKGV

SEQ ID NO: 7970 - protein, 292 aa, Helicobacter pylori 26695
MKTKNPAKRILKTAVIQMQSKPYALNENLQLALNLAKEAHDKGANLIVLPELFDSGYFVNDKDADFGLDFKAIEHSELKSETLRALSDFAKSNKVHLVACSIEKTNQKLYDSAYIIPPKVGIVGKHRKIYLWGDEKSRFRRGKKYEVFTLDFGDFSAKVGLQICYEIGFGVGANLLALQGAEVLIYPSAFGKARAYNWDLLSRARALENGCFVCACNHNGEETNAQLKQTLEFAGDSRIIAPNGKIIAQATKLNEVIIAEMDLNEVALQRQKIPYLQDFDTKLTKKGFGKFT

SEQ ID NO: 7971 - protein, 551 aa, Treponema denticola ATCC 35405
MQTINDLGKYTFSALLRNSVLKFSNRPALSYVSEQPISYKELNEKVESIKTLLHSLGIKPLDKVAIFSTSSPQWAISYFAIVTLGAIAVPLLPDFNESEASSCLKHSGARAIFAGEKLLAKLNNTDDLDIIININDFAVKKGEIKTDTPLPVHECKEEDTASIIYTSGTTGRSKGVVLTHKNLIFTAIAGQHCQRINQYEAALSILPMSHVYEFTIGFLMFMLNGACIYYLEGPPIPRNLLPALQKIRPHFMLSVPIVIEKIYKQKILPAFNASPLIKKIYGTKLGRKLLCRKAGKKLKKTFGGRLKFFGIGGSKTDPVVEQFMVDAKFPYAIGYGLTETSPLVAYSAVYKTVPGVIGGTIPGVEIKIGDKDPQTGIGELLVKGPNVMQGYYNAPDLTKEAFTEDGWFKTGDLCVIDNKGRISLKGRSKNMILGAAGENIYPEDIEFVLNQHPLVSESLVVEGENTSLVAYVRLQDAIGDAVSEISNAIMHKREEVLNEIRFFVNSKVNKFSKIDKIEVVEEFEKTASQKIKRYLYSLRHRKLQTEGVKEK

SEQ ID NO: 7972 - protein, 369 aa, Magnaporthe grisea 70-15
MVRGTVLITGGTGYIGSFTSLALLENDYDVVIVDNLYNSSAVAIDRIELICGKRPAFHNVDITDEAALDKVFDAHPEIDSVIHFAALKAVGESGEIPLEYYRVNVGGSISLLRSMQKHNVCNIVFSSSATVYGDATRVPNMIPIPEHCPIGPTNTYGRTKSTIEDVISDHVNAQRNNLKKADKPFDMWNGALLRYFNPCGAHPSGLMGEDPQGVPFNLLPLLGQVATGQREKLLVFGDDYSSRDGTAIRDYIHVLDLAKGHLAALNYLRDNKPGVKAWNLGSGRGSTVFEMIKAFSSVVGRDLPYEVVPRRQGDVLDLTANPALANKELGWKTELRMEDACQDLWKWVKNNPQGYRQDPPQEFVAALKK

SEQ ID NO: 7973 - protein, 520 aa, Glycine max
MEAAWATILTLILILALICAWKVLIWLWLRPKRLEKLLREQGLQGNPYTLFVGDSKEFLKMRKEALSKPMNLSDDIIPRVSSYEQHSVNKHGKNSFIWLGPIPRVTILDPEQIKDVFNKIYDFPKPNMNPLVKLLATGLAGYEGEKWSKHRRIINPAFNLEKLKIMLPLFFKSCNDLVSKWEGMLSSEGSCEMDAWPFLQNLASDVIARSAFGSSYEEGRRIFQLQREQAELLIKVLLKIQIPGWRFLPTNTHRRMKEIDRDIKASLKDMINKREKALKAGEATKNDLLGILLESNHKEIQEHGNRNNKNVGMSLEEVIEECKLFYFAGQETTSVLLVWTMVLLSRYPDWQARAREEVFQVFGYQKPDFDGLSRLKIVTMILYEVLRLYPPVAGMTRSIEKDVKLGTLTLPAGVHVLLPTILIHHDRKFWGEDAKQFNPERFSEGVLKATNGRVSFFPFGWGPRICIGQNFSLLEAKMALSMILQHFSFELSPAYAHAPTALITIQPQYGAHIILRKVTI

SEQ ID NO: 7974 - protein, 506 aa, Saccharomyces bayanus
MPESRLQRLANLKIGTPQELRRTSIIGTIGPKTNSCEAITALRKAGLNIIRMNFSHGSYEFHQSVIDNALKSEQQFPGRPLAIALDTKGPEIRTGRTPNDQDFHILVDHQMIFTTDAKFEHSSNDKIMYIDYANLTKVIVPGKLIYVDDGILSFKVLQIMDDANIRVQALNSGYISSRKGVNLPNTDVDLPPLSAKDIQDLQFGMRNGIHMVFASFIRAPEDVLTIRKVLGTEGEDIKIISKIENQQGLDNFDEILQVTDGVMIARGDLGIEILAPEVLAIQKKLIAKCNVAGKPVICATQMLESMTYNPRPTRAEVSDVGNAVLDGADCVMLSGETAKGDYPVNAVKIMAATALIAESTIAHLALYDDLRDATSKPTSTTETVAAAATAAILEQNGKAIVVLSTTGNTARLLSKYRPSCPIILVTRHARTARIAHLYRGVFPFVFEPKRLYDWGEDVHRRLKFGVEMARSFGMVESGDTVVSIQGFRGGIGHSNTLRVSTVGEEF

SEQ ID NO: 7975 - protein, 298 aa, Saccharomyces bayanus
  misc_feature (281)..(281): Xaa can be any naturally occurring amino acid
  unsure (1)..(298): unsure at all Xaa locations
MSRLERLTSLNVVAGSDLRRTAIIGTIGPKTNNPETLVALRKAGLNIVRMNFSHGSYEYHKSVVDNARKSEELYPGRPLAIALDTKGPEIRTGTTTNDVDYPIPPNHEMIFSTDDKYAKACDDKVMFVDYKNITKVISAGKIIYVDDGVLSFEVLEVVDDKTLKVKAMNAGKICSHKGVNLPGTDVDLPALSEKDKEDLRFGVRNGVHMVFASFIRTANDVLTIREVLGEQGKDVKIIVKIENQQGVNNFDEILKVTDGVMVARGDLGIEIPAPEVLAVQXKLIAKSNLAGKPVICAT

SEQ ID NO: 7976 - protein, 248 aa, Triticum aestivum
  misc_feature (18)..(18): Xaa can be any naturally occurring amino acid
  misc_feature (24)..(24): Xaa can be any naturally occurring amino acid
  misc_feature (27)..(27): Xaa can be any naturally occurring amino acid
  misc_feature (48)..(48): Xaa can be any naturally occurring amino acid
  misc_feature (55)..(55): Xaa can be any naturally occurring amino acid
  misc_feature (217)..(217): Xaa can be any naturally occurring amino acid
  unsure (1)..(248): unsure at all Xaa locations
KESTLHLVFRLRGRHANXLSKTLXGQXTIPLEGESPRDTMDNVKAKIXQDKEGIXPSQQRLIFAGKQLEDGRTLADYNIQKESTLHLVLRLRGGMQIFVKTLTGKTITLEVESSDTIDNVKAKIQDKEGIPPDQQRLIFAGKQLEDGRTLADYNIQKESTLHLVLRLRGGMQIFVKTLTGKTITLEVESSDTIDNVKAKIQDKEGIPPDQQRLIFAXGKQLEDGRTLADYNIQKESTLHLVLRLRGGQ

SEQ ID NO: 7977 - protein, 509 aa, Oryza sativa
MDPSSAGAGGNSLASASCGDAQKRRVCYFYDPEVGNYYYGQGHPMKPHRVRMTHALLAHYGLLAPAKMQVLRPLPARDRDLCRFHSDDYVAFLRAVTPETQFDQIRSLRRFNVGEDCPVFDGLYAYCQTYAGASVGAAVKLNHGTHDIAINWSGGLHHAKKSEASGFCYVNDIVLAILELLKLHERVLYIDIDIHHGDGVEEAFYTTNRVMTVSFHKFGDYFPGTGDIRDIGYSEGKYYCLNVPLDDGIDDDSYQSIFKPIISKVMEMYRPGAVVLQCGADSLSGDRLGCFNLSGKGHAECVKFMRSFNVPLLLLGGGGYTIRNVARCWCYETGVALGEELREKLPYNEYYEYFGPEYSLYVAASNMENRNTNKQLEEIKCNILDNLSKLQHAPSVQFEERIPETKLPEPDEDQDDPDERHDPDSDMLLDDHKPMGHSARSLIHNIGVKREITETETKDQHGKRLTTEHKVPEPMADDLGSSKQVPTADANSMAINAPGNAKNEPGSSL

SEQ ID NO: 7978 - protein, 584 aa, Haemophilus somnus 129PT
MNMQDKDLSTLQTFKRLWPTIAPFKLGLIASAVALVFNALADAALIQMLKPVLDEGFGKVDNSLLRIMAIVVVLLIFVRGVTNFISTYCLAWVSGKVVMVMRRRLFRHLMYMPVTFFDQNSVGRLLSRIVYDSEQVANSSSGSLVTIVREGAYIIALLTVMFYTSWQLALVLFIIGPIIAVIIRIVSKKFRELGKNLQNSMGDLTSSVEQMLKGHKVVLAFGGQKIEEERFDQVSNNMRRRGMKVMAASAISDPVVQIIASFALAAVLFLATLPEIMTQNLSAGSFTVVFSSMLAMMRPLKSLTNVNAQFQRGMAACQTLFALLDLETEKDTGKHVVDTVKGEVRFENVTFSYSGKEHPALNNISFTIPQGKTVALVGRSGSGKSTIANLVTRFYDVEQGKITLDGVNIQDYTLANLREHCAVVSQQVHLFNDTIANNIAYAVTEKCTREQIIEAAEAAYAMEFIEKLENGLDTVIGENGASLSGGQRQRLAIARALLRDSPVLILDEATSALDTESERAIQAALETLQKDRTVLVIAHRLSTIEKADEILVIEQGEIKERGSHQELLALNGAYKQLHSTQFNH

SEQ ID NO: 7979 - protein, 186 aa, Saccharomyces bayanus
  misc_feature (25)..(25): Xaa can be any naturally occurring amino acid
  misc_feature (57)..(57): Xaa can be any naturally occurring amino acid
  unsure (1)..(186): unsure at all Xaa locations
ISDVGNAILDGADCVMLSGETAKGXYPINAVTTMAETAVIAEQAIAYLPNYDDMRNXTPKPTSTTETVAASAVAAVFEQKAKAIIVLSTSGNTPRLVSKYRPNCPIILVTRCPRAARFSHLYRGVFPFVFEKEPVSDWTEDVEARINFGIQKAKEFGILKDNDTYVSIQGFKAGAGHSNTLQVSTV

SEQ ID NO: 7980 - protein, 200 aa, Haemophilus influenzae R2846
MLDYELFNPYEGLIFDMDGTLIDTMPVHAQAWTMVGKKFGYEFDFQIMYNFGGATVRTIAGEMMKAANMPLDRIEDVLAAKRELSYQLIPTQSKLLPTFEIVKSFHQKKPIALGSGSHRKIIDMLMDKLAIAPYFNAIVSADDVKEHKPHPETFLRCAELIQANPSRCIVFEDADLGVQAGLSAGMDVFDVRTREIISPR

SEQ ID NO: 7981 - protein, 478 aa, Synechocystis sp. PCC 6803
MQATMSQDFDYDLVIIGAGVGGHGAALHAVKCGLKTAIIEAKDMGGTCVNRGCIPSKALLAASGRVREMSDQDHLQQLGIQINGVTFTREAIAAHANDLVSKIQSDLTNSLTRLKVDTIRGWGKVSGPQEVTVIGDNETRILKAKEIMLCPGSVPFVPPGIEIDHKTVFTSDEAVKLETLPQWIAIIGSGYIGLEFSDVYTALGCEVTMIEALPDLMPGFDPEIAKIAERVLIKSRDIETYTGVFATKIKAGSPVEIELTDAKTKEVIDTLEVDACLVATGRIPATKNLGLETVGVETDRRGFIEVNDQMQVIKDGKPVPHLWAVGDATGKMMLAHAASGQGVVAVENICGRKTEVDYRAIPAAAFTHPEISYVGLTEAQAKELGEKEGFVVSTAKTYFKGNSKALAEKETDGIAKVVYRQDTGELLGAHIIGIHASDLIQEAAQAIADRKSVRELAFHVHAHPTLSEVLDEAYKRAV

SEQ ID NO: 7982 - protein, 415 aa, Magnaporthe grisea 70-15
MATHNGLYERFLWPAVDVVRYAPPHMILLGMLALLIPGFLALYFILHLVAPKPRAPLPSEKTYLTSSPKDGRNTTAQLPCWYDRWLAEQRRQRQANEDAPDLGLIEPAEVAMSVVVPAYNEESRILPTLEEMVEYLDARFGRDPPAKSTQTALVSPTTPKRLALKKHQAVPEPLTGYEIIIVNDGSTDCTVQVALDFARDRGLHDIVRVVTLAKNRGKGGGVTHGFRHARGEYVVFADADGASKFSDLGKLVEGCEDVVDGSNRGVAIGSRGHLVGSEAVVKRSALRNFLMKSFHFVLMILTPPATSRIRDTQCGFKLFSRAALPHIIPYMHSEGWIFDIEMLMLAESAPATPVVAADGSVIGMSPGIKVVEVPIDWHEVEGSKMNLIHDSIKMAIGLAVLRASWMMGVYRRRLT

SEQ ID NO: 7983 - protein, 348 aa, Burkholderia fungorum LB400
MSDKSTGKRIVRAAAVQIAPDFERSGGTLEKVCEAIEQAAREGVQLIVFPETFVPYYPYFSFVRPPVASGADHMKLYEEAVVVPGPVTQAVAEQARLHRMVVVLGVNERDHGSLYNTQLIFDVDGQIVLKRRKITPTFHERMIWGQGDAAGLTVARTAVARVGALACWEHYNPLARYALMTQHEEIHCSQFPGSLVGPIFADQIEVTIRHHALESGCFVVNATGWLSEAQIASVTPDTNLQRALRGGCNTAIVSPEGQHLAEPLREGEGMVIADLDMALITKRKRMMDSVGHYARPELLSLAINRRPAETVAPMQAWPAVPGADFNSTEGGCDERQRTAVGREPAIDD

SEQ ID NO: 7984 - protein, 196 aa, Glycine max
  misc_feature (189)..(189): Xaa can be any naturally occurring amino acid
  unsure (1)..(196): unsure at all Xaa locations
PRVRASCRMALLLGLLLLVVASPAIADDDSGIYYQLALMWPGAYCEQTSAGCCKPTTGVSPARDFYITGFTVLNATTDAAVTGCSNKVPYDPNLITGIQGLNQYWSNIRCPSNNGQSSWKNAWKKAGACSGLSEKDYFETALSFRSRINPLVRLKAKGIEPDFGLYGLKAITKVFKSGINATPVIQCSXGPFDKYM

SEQ ID NO: 7985 - protein, 308 aa, Leptospira interrogans serovar Copenhageni str. Fiocruz L1-130
MGHHHSHNHSHDHSHNPHSENAGKSLVIAMIFNLVYAGIEAGIGLTSGSLALLSDAGHNLMDVSSLLLAWIAIKLQEKKPFPGFTYGWKKSTILVSLLNSILIFGTVGLIVYESIEKLSKPSSVPGGMIAAVAFVGVLVNFSSSFLFHKSKDQDINMKGAYLHLLADGLVSLGVIISGLLIQWLGFFWIDPVVGLLVGLVILYGNIPLFRQSLRLSLDSTPETIQSGIVEKELKSIEGVLNIHHIHIWSLSTTENALTAHLVLKNDLTFEHQRIIKSKAREILKGLKIEHVTLETEEERENCEQIDCN

SEQ ID NO: 7986 - protein, 398 aa, Ralstonia eutropha JMP134
MKQLQDAYIVAATRSPIGKAPKGAFKNTRPDDLLATILKAAVAQVPNLDPKLIEDAIVGCAIPEAQQGLNVARIGALLSGLPNTVGGITVNRFCASGVSAVAMAADRIRVGESDVMIAAGVETMSMVPMMGNSPSMSPDIFTRDENVGIAYGMGLTAEKVAQQWNVSREDQDAFSLASHQKAIAAQQAGEFNDEITPIEIVEKFPNLATGEVSVKTRTISLDEGPRPETSLEGLGKLRPVFANKGSVTAGNSSQTSDGAGALILVSEKILKQFNLVPLARFVSFAVRGVPPEIMGIGPKEAIPAVLKAAGLTQDQIDWIELNEAFAAQSLAVMRDLELDPSKVNRMGGAIALGHPLGATGAIRSATVVHALRRHNLKYGMVTMCVGTGMGAAGIFERV

SEQ ID NO: 7987 - protein, 284 aa, Aegiceras corniculatum
MAKDIEVGPGANAPKDYQDPPPAPLIDAEELTKWSLYRAVIAEFIATLLFLYITVLTVIGYSSQTDPDKNPDDCGGVGILGIAWAFGGMIFVLVYCTAGISGGHINPAVTLGLFLAQKVSLVRAMLYMMAQCLGAICGCGLVKAFQKSYYTKYGGGANYLHDGYNKGTGLGAEIIGTFVLVYTVFSATDPKRSARDSHVPVLAPLPIGFAVFMVHLATIPITGTGINPARSLGAAVIYGKKKTWDDQWIFWGGPFIGAPIAAFYHQFILRAGAIKALGSYRSNA

SEQ ID NO: 7988 - protein, 167 aa, Pisum sativum
VVVSKRGFSETESESESESEITTVDLKLNLSPKEGAADPQLKPKEKSLLVSDSGTKPPAKAQVVGWPPVRSFRKNMFAGQKSIGGSEETTKKSSDGSNAISFVKVSMDGAPYLRKIDLKMYKSYPELSDALAKMFNSITNGNCESQGIKDFMKESNKMMDLLNTSDY

SEQ ID NO: 7989 - protein, 396 aa, Thermoplasma acidophilum DSM 1728
MNSEKVYLVDFKRTAFSRSRPNDPERDVFNSIRMDEAMAKLINVVIDETGIKPEEINDVITGCALQMDENWTYGGRHPILLANLPENVPGMALDRACSSSLNAITIGAMEIMTGNSDIVMAGGYEHMTHVPMGNSPFLKPNIKLMVRPEYMHWDMNTGYSMGLTAEKLAALRGITRDEMDRYSLRSHQLASKALDDGYFKGEIVPVEVEINGEEKVIDTDQSIRKNTSLEDMKKLKPAFKDDGVITAGNSSPLNAGASLTLLMSEKKVKEYGLKPMARIVSFGWAGVDPSIMGEGPVPATKNALAKAKMDVSDIDLWEINEAFAVVVLNAMKELGIEEDRVNVHGGAIAIGHPLGATGARIAGTLARIMNEKKKDYGVATLCVGGGQGYSVVFERY

SEQ ID NO: 7990 - protein, 563 aa, Nicotiana attenuata
MASSGGNMNTFMNSFTSNYSFSSFSDLLSDNNNNNNNNNNMRSNNSSMNQEKNSLNWGFSDQRMNQQNKDEVPKFKSFPPCSLPMISSSSPASPSSYLAFPPSLSPSVLLDSPVLFNNSNTLPSPTTGSFGNLNSKEDNSKISDFSFQSRAATSSSMFQSSAPRNSLEDLMTRQQHANQQNEFSTAKTTGVKSEVAQIQSFSQEKMQSYPAPVHYTQPSQYVREQKAEDGYNWRKYGQKQVKGSENPRSYYKCTFPNCPTKKKVERNLDGHITEIVYKGNHNHPKPQSTRRSSSQSIQNLAYSNLDITNQPNAFLDNAQRDSFAGTDNSSASFGDEDVDQGSPISKSGEDDGNEPEAKRWKCDNENEVISSASRTVREPRIVVQTTSDIDILDDGYRWRKYGQKVVKGNPNPRSYYKCTFTGCPVRKHVERASHDLRAVITTYEGKHNHDVPAARGSGSYAMNKPPSGNSNNSMPVVPRPSMLANNSNQGMNFNDTFFNTRVQTTQNQPPITLQMLQSSGSSSYSGFDTSSGSYMDQMQPMNNTKPISKEEPKDDLFFSSFLN

SEQ ID NO: 7991 - protein, 567 aa, Zymomonas mobilis
SYTVGTYLAERLVQIGLKHHFAVAGDYNLVLLDNLLLNKNMEQVYCCNELNCGFSAEGYARAKGAAAAVVTYSVGALSAFDAIGGAYAENLPVILISGAPNNNDHAAGHVLHHALGKTDYHYQLEMAKNITAAAEAIYTPEEAPAKIDHVIKTALREKKPVYLEIACNIASMPCAAPGPASALFNDEASDEASLNAAVEETLKFIANRDKVAVLVGSKLRAAGAEEAAVKFADALGGAVATMAAAKSFFPEENPHYIGTSWGEVSYPGVEKTMKEADAVIALAPVFNDYSTTGWTDIPDPKKLVLAEPRSVVVNGIRFPSVHLKDYLTRLAQKVSKKTGALDFFKSLNAGELKKAAPADPSAPLVNAEIARQVEALLTPNTTVIAETGDSWFNAQRMKLPNGARVEYEMQWGHIGWSVPAAFGYAVGAPERRNILMVGDGSFQLTAQEVAQMVRLKLPVIIFLINNYGYTIEVMIHDGPYNNIKNWDYAGLMEVFNGNGGYDSGAGKGLKAKTGGELAEAIKVALANTDGPTLIECFIGREDCTEELVKWGKRVAAANSRKPVNKLL

SEQ ID NO: 7992 - protein, 321 aa, Helicobacter pylori 26695
MPKIPITLITGFLGSGKTSFLSEYLNQTDHQGVALIINEIGQAALDQRILSVQYCGEKMLYLNAGCVCCNKRLDLVESLKATLNNYEWHGEILRRIIIETTGLANPAPILWTILSDTFLGVHFEIQSVVACVDALNAREHLTNNEAKEQIVFADSVLLTKTDLQNDSAALTKLKERIQALNPSAEIFDKRAIDYESLFSRKNRARNFMPRMPKDSHSQGFETLSINFEGTMEWSAFGIWLSLLLHQYGTQILRIKGIIDIGSGFLVSINGVMHVIYPPKHILKDQNGSNLVFIMRHLEREKILNSLKGFKDFLGIKGFETQ

SEQ ID NO: 7993 - protein, 396 aa, Arabidopsis thaliana
MAMAMDRIVFSPSSYVYRPCQARGSRSSRVSMASTIRSATTEVTNGRKLYIPPREVHVQVKHSMPPQKLDIFKSLEGWADETLLTYLKPVEKSWQPTDFLPEPESEGFYDQVKELRERCKELPDDYFVVLVGDMITEEALPTYQTMLNTLDGVRDETGASPTPWAIWTRAWTAEENRHGDLLNKYLYLSGRVDMRQIEKTIQYLIGSGMDPKTENNPYLGFIYTSFQERATFISHGNTARLAKDRGDLKLAQICGTIAADERRHETAYTKIVEKLFEIDPDGTILGLADMMKKKISMPAHLMYDGQDDNLFEHFSTVAQRLGVYTAKDYADILEFLVERWNVETLTDLSSEGHRAQDFVCGLPARIRKIEERAQGRAKEAAKNIPFSWIFGRNIRA

SEQ ID NO: 7994 - protein, 190 aa, Momordica charantia
FDSFWFVQQWPPAVCSFQKSGSCPGSGLRTFTIHGLWPQQSGTSLTNCPGSPFDITKISHLQSQLNTLWPNVLRANNQQFWSHEWTKHGTCSESTFNQAAYFKLAVDMRNNYDIIGALRPHAAGPNGRTKSRQAIKGFLKAKFGKFPGLRCRTDPQTKVSYLVQVVACFAQDGSTLIDCTRDTCGANFIF

SEQ ID NO: 7995 - protein, 228 aa, Arabidopsis thaliana
MGSVELNLRETELCLGLPGGDTVAPVTGNKRGFSETVDLKLNLNNEPANKEGSTTHDVVTFDSKEKSACPKDPAKPPAKAQVVGWPPVRSYRKNVMVSCQKSSGGPEAAAFVKVSMDGAPYLRKIDLRMYKSYDELSNALSNMFSSFTMGKHGGEEGMIDFMNERKLMDLVNSWDYVPSYEDKDGDWMLVGDVPWPMFVDTCKRLRLMKGSDAIGLAPRAMEKCKSRA

SEQ ID NO: 7996 - protein, 507 aa, Nicotiana tabacum
MENGTKKLNVSSLAVEQPLPKSKLWKIIMVASIAAGVQFGWALQLSLLTPYVQLLGIPHKFASFIWLCGPISGMIVQPVVGYYSDNCSSRFGRRRGFIAAGAALVTIAVFLIGFAADLGHATGDPLGKGSKPRAIAVFVVGFWILDVANNMLQGPCRALLADLSGGKARMRTSNAFFSFFMAVGNVLGYAAGSYSRLCKIFPFSKTPACDIYCANLKSCFFIAVFLLLSLTILALTVVRENELPEKDEHEIDEKAGARKSKVPFFGEIFGALKDLPRPMWILLLVTSLNWIARFPFFLYDTDWMAKEVYGGKVGDGRLYDLGVHAGALGLLLNSVVLGFMSLSVEFLGKKIGGVKRLWGILNFVLAVCMALTVLVTKMAEKSRQYDAHGTLMAPTSGVKIGALTLFAVLGIPLAVTFSVPFALASIFSSNAGSGQGLSLGVLNLAIVVPQMLVSIAGGPWDDLFGGGNLPGFIVGAVAAAASGILALTMLPSPPADAKPATTMGGFH

SEQ ID NO: 7997 - protein, 377 aa, Debaryomyces hansenii CBS767
MNQVGLTNNTFNEYVLDQVVENITLHSDRMVVREYKKIGEGAFGTVVEAVLRKDYKTDSEQDREEPWLGPFAIKRVPAQTEYKSRELEILRVVNHPNIVSLRFFFDKKSSSDGKIYQNLVMECLPSNLQSEIKYYRHSKYTIPYPHMKTYTFQLARAMLYLHGFGISHRDIKPSNILVDPATVTLKICDFGSAKKLEPDQPSVSYICSRYYRAPELIIGCSIYTTKIDIWGLGCVIAEMFLGKPIFQGESPQSQLKEISKLLGPPSKTFFFNNNPKYRGNMYTNKLFSCTVEERFKQIFSNSPPDAIDLLMKILVYEPEKRASPRRVLCHPFFHELKKDDFQVYPRGSSEPIRLNLFNFSNYELELLGPLKDELLSS

SEQ ID NO: 7998 - protein, 479 aa, Saccharomyces bayanus
MSAILSTTSKNFLSRNPARQCQSAQKALFALLSSRHYSSATEQTLKERFAEIIPAKAEEIKKFKKEHGKTVIGEVLLEQAYGGMRGIKGLVWEGSVLDPDEGIRFRGRTIPEIQRELPKAEGSTEPLPEALFWLLLTGEIPTDAQVKALSADLAARSEIPEHVVQLLDSLPKDLHPMAQFSIAVTALESESKFAKAYAQGVSKKEYWSYTFEDSLDLLGKLPVIASKIYRNVFKDGKITTVDPNADYGKNLAQLLGYENKDFVDLMRLYLTIHSDHEGGNVSAHTTHLVGSALSSPYLSLAAGLNGLAGPLHGRANQEVLEWLFKLREEVKGDYSKETIEKYLWETLNSGRVVPGYGHAVLRKTDPRYMAQREFALKHFPDYELFKLVSTIYDVAPGVLTKHGKTKNPWPNVDSHSGVLLQYYGLTEASFYTVLFGVARAIGVLPQLIIDRAVGAPIERPKSFSTEKYKELVKKIESKN

SEQ ID NO: 7999 - protein, 475 aa, Zea mays
  misc_feature (377)..(377): Xaa can be any naturally occurring amino acid
  misc_feature (386)..(386): Xaa can be any naturally occurring amino acid
  unsure (1)..(475): unsure at all Xaa locations
MQFALALDTNSGPHQIRSCEGDGIDRLEKLSIGGRKQEKALRNRCFGGRVAATTQCILTSDACPETLVPVGGCYRLIDIPMSNCFNSGINKIFVMSQFNSTSLNRHIHRTYLEGGINFADGSVQVLAATQMPEEPAGWFQGTADSIRKFIWALEDHYSHKSIDNIAILSGDQLYRMNYMELVQKHVEDDADITISCAPVDESRASKNGLLKIDHTGRVLQFFEKPKGADLNSMRVETNFLSYAIDDAQKYPYLASMGIYVFKKDALLDLLKSKYTLLHDFGSEILPRAVLDHIVQVCIFAGYWEDVGTIKSFFDANLALTEQSNKIDFYDPKTPFFTALRCLPPTQLDKCKMKYAFISDGCLLRECSIEHSVIGVCXRVSSGCESXASVMMGAGIYEFVEEVSKLMLVGKVPVGIGRTTKIRDCIMDMNARLGKHVVIPNSKGIQEADHPEEGYYIRSGIVVILKNATINDGYVI

SEQ ID NO: 8000 - protein, 367 aa, Dendrobium sp. XMW-2002-1
  misc_feature (176)..(176): Xaa can be any naturally occurring amino acid
  unsure (1)..(367): unsure at all Xaa locations
MGRSPCCDKVGLKKGPWTPEEDQKLLAYIEKHGHGSWRALPNKAGLQRCGKSCRLRWTNYLRPDIKRGKFSMQEEQTIIQLHALLGNRWSAIATHLPKRTDNEIKNYWNTHLKKRLAKMGIDPITHKPKSDNLSSADGHSKCTANLNHMAQWESARLEAEARLVRESKLRSSSISXNTTTIFTSKNQPLLPPAVPMTPAASPCLDVLSAWQGAWTKPAANNSQGRGYTIDLESPTSTLSFSDNMMAPTISGMGLAEDSTREDQEWKCLRKTGFSMHTAAPFVSTEASSWLSESSGGDFAAGFTGMLSDKANEQNSEDGCNDSDNAECGSCVDVEESEGEEDENKNYWSSILNLVNSSSPPNSPPPVF

SEQ ID NO: 8001 - protein, 588 aa, Yarrowia lipolytica CLIB122
MTDKWVPGQGQPMYGSQQPHNLMPPPSGLYQQNSNQSNTSLDQQQQFNQQQYNSQQQYQQQQHSQYQQQQQQHQQQQQQQQQQQQQQQQQQQQQQQQHQQHQQQQQQPQQQSVAQQQPSDYVNFTPRPDLLSKTARDRAHNTTQVISTYYKGIVQHAIERHQRRSAAEASVEQATSEERRNRVLTNYGKKETAYLRMRRTRMALEDFVTVKVIGKGAFGEVRLVQKRDNGKIYAMKTMLKKEMDMKEQWAHVKAERDVLADSDSPWIVSLYFSFQDDLYLYLIMEFLPGGDLMTMLIKYDVFSEDITRFYIAECVLAIEAIHKLGFIHRDIKPDNILIDKTGHIKLSDFGLSTGFHKTHSSAYWKKLKDGTSSNPATQMGPPQNTNRQSTYDSIHLTMRQQISTWRKNRRLMAYSTVGTPDYIAPEIFVHQGYGQECDWWSLGAIMFECLVGWPPFCSEQPRETYHKIINWRETLQFPDDVHLSPESEDLIRRLLTSSENRLGRIGGANEIKSHPFFRGVDWSSIREFNAPFVPKLSSITDTSYFPTDELGDVSEYPQQSSRSDRSSDLPFIGYTFSRFDNMTRRNAI

SEQ ID NO: 8002 - protein, 353 aa, Magnetospirillum magnetotacticum MS-1
MKNWDQILVGPTVPILDVIKILDRFAAQIVLVVDSDRRLLGTITDGDIRRGILRGLVLDEPATAIMNPKPLTALPSSSPQERLALIRSRRLRHLPVVDAGGVLVGLETESELLAGEELPNWVILMVGGLGERLRPLTATTPKPLLPVGGRPLLETILLQLAASGFRRVFLAVNYMAEKFEEAFGDGSRLGLDIRYLREDGKLGTAGALGLLPEMPSGPVVVMNGDVLTSVNYRALLDFHAEQAAAATMCVREYDIEVPYGVVEVENSRVRGLKEKPVLTHFINAGIYVLDPVVLGHLETGQPCDMPGLLTKMMAQERPVVAFPIREYWLDIGRLDDFAKANGDYDHVFRGTDG

SEQ ID NO: 8003 - protein, 654 aa, Ustilago maydis 521
MIFARSLSRAVARAPSSSSLVTPSHRVAGFHSTPKASRIIASQPLRAKEAATPLDAAKGYPVIDHEYDAIVVGAGGSGLRAAFGLAEAGLNTACITKLFPTRSHTVAAQGGINAALGNMTEDDWRWHMYDTVKGSDWLGDQDAIHYMCREAPRTVIELEHFGLPFSRTKDGKIYQRAFGGQSLNYGKGGQAYRCAAAADRTGHAMLHTLYGQSLRHNTNFFIEYFALDLIMEDGECVGVTALNMEDGTIHRFRAHKTVLATGGYGRAYFSATSAHTCTGDGMAMVSRAGLPLQDLEFVQFHPTGIYGAGCLITEGSRGEGGYLLNSEGERFMERYAPTAKDLASRDVVSRSMTIEIREGRGVGPEKDHIYLQLSHLPPEVLHERLPGISETAAIFAGVDVTKEPIPVLPTVHYNMGGIPTKYTGEVITKGPNGEDKIVPGLYAAGETACVSVHGANRLGANSLLDIVVFGRACANHIKENLDPGKPHKELKGDAGAKSINDLDWVRNANGTKTTADIRNDMQRVMQSDAAVFRTQKTLDEGVEKIDKVYSTFPDVSIQDRSMIWNSDLVETLELKNLLTCATQTMHSAAARKESRGAHAREDYPDRDDEQWMRHTLSWQHEGTGDKVKLDYRGVISTTLDEAECKPVPPFKRQY

SEQ ID NO: 8004 - protein, 224 aa, Oryza sativa (indica cultivar-group)
MGRRPARCYRQIKNKPYPKSRYCRGVPDPKIRIYDVGMKKKGVDEFPYCVHLVSWEKENVSSEALEAARIACNKYMTKNAGKDAFHLRVRVHPVHVLRINKMLSCAGADRLQTGMRGAFGKPQGTCARVDIGQVLLSVRCKESNAKHAEEALRRAKFKFPGRQKIIHSRKWGFTKFSRVRVLKLKAEGRIMSDGVNAKLLGSHGRLAKRAPGKAFLAETIQRSA

SEQ ID NO: 8005 - protein, 371 aa, Dendrobium sp. XMW-2002-2
MWRHSCCYKQKLRKGLWSPEEDEKLLKHITKYGHGCWSSVPKLAGLQRCGKSCRLRWINYLRPDLKRGTFSQQEENLIIELHGVLGNRWSQIAAQLPGRTDNEIKNLWNSCIKKKLRLRGIDPNTHKPLAETEVQLAEIDSADQPAPEPEKHTVQQTETGVPNNSVRPGNSPAASYFSLPDLTYSPDCGGSIGQIQQFWLNQSGKFFSNNNSNSEFSFNSVSSLVPSVPRSTLSTSKELKPLTSLLMENSPSGFYWETGNSSNSSASSGSNDPLFDGSIFQWTQLIPERDINVQLHGETEDLKWSEYLNGSIPLSTELQSQNPELCNGMKAEEQFGIDGLSIWLQNHQQQQQQQQQASNNYGKDSQRDIIC

SEQ ID NO: 8006 - protein, 124 aa, Brassica napus
  misc_feature (118)..(118): Xaa can be any naturally occurring amino acid
  unsure (1)..(124): unsure at all Xaa locations
MKEIADETFFRYCVLTLIFSGPPTAVALKFLQAPYGKHNRSGWGPTLSPPLAWFLMESPTLWLTLLLFPFGRHSHNPKSLLLFSPYLLHYFHRTVIYPLRLLRSSSSSKNGFPITIAXHGFSPF

SEQ ID NO: 8007 - protein, 218 aa, Oryza sativa (indica cultivar-group)
MGRRPARCNRQIKNKPYPKSRYCRGVPDPKIRIYDVGMKKKGVDEFSHCVHLVSWEKENVTSEALEAGIACNKYMTKSAGKDAFHLRVRVHPFHVLRINKMLSCAGADRLQTGMRGAFGKPQGTCARVDIGQVLLSVRCKPNNAVHASEALRRAKFKFPGRQKIIESRKWGFTKFSRDEYVRLKSEGRIMPDGVNAKLLGCHGRLSARAPGKAFFSAA

SEQ ID NO: 8008 - protein, 406 aa, Ralstonia eutropha JMP134
MLKLDFHPAGRHFLQIPGPSPVPDRILRAISYPTIDHRGPEFGALGLKVLAGIRKIFKTEQPVVIYPASGTGAWEAALSNTLSPGDTVLMFETGHFATLWKKMAEKLGLRPEFLGLPGIEGWRRGVQADMIEARLRQDSDHAIKAVCVVHNETSTGVTSDIAAVRKAIDAAGHPALLMVDTISGLASADYRHDEWGVDVTVSGSQKGLMLPPGISFNAVSPKAIEASRSARLPRSFWDWEEIIAMNRTGYWPYTPSTNLLYGLSEALDMILEEGLDNVFARHHRLAEACRRAVRAWGLEIQCADPSVYSPVLTGVMMHDGIDADSVRRIIYDRFNMSLGAALGKMKGRMFRIGHLGDCNDLTLMATLSGCEMGLKLSGVPVAASGVAAAMDYLAAHANPLPLRAAA

SEQ ID NO: 8009 - protein, 144 aa, Saccharomyces bayanus
VLLDTRARVKITDFGFCARLTDKRSKRATMVGTPYWMAPEVVKQREYDEKIDVWSLGIMTIEMLEGEPPYLNEDPLKALYLIATNGTPKLKYPETLSLEIKRFLSVCLCVDVRYRASTEELLHHGFFNLACDPKDLTSLLEWKE

SEQ ID NO: 8010 - protein, 710 aa, Pichia angusta
MSMRIPKAASVNDEQHQRIIKYGRALVLDIVEQYGGGHPGSAMGAMAIGIALWKYTLKYAPNDPNYFNRDRFVLSNGHVCLFQYIFQHLYGLKSMTMAQLKSYHSNDFHSLCPGHPEIEHDAVEVTTGPLGQGISNSVGLAIATKNLAATYNKPGFDIITNKVYCMVGDACLQEGPALESISLAGHMGLDNLIVLYDNNQVCCDGSVDIANTEDISAKFKACNWNVIEVENASEDVATIVKALEYAQAEKHRPTLINCRTVIGSGAAFENHCAAHGNALGEDGVRELKIKYGMNPAQKFYIPQDVYDFFKEKPAEGDKLVAEWKSLVAKYVKAYPEEGQEFLARMRGELPKNWKSFLPQQEFTGDAPTRAAARELVRALGQNCKSVIAGCADLSVSVNLQWPGVKYFMDPSLSTQCGLSGDYSGRYIEYGIREHAMCAIANGLAAYNKGTFLPITSTFFMFYLYAAPAIRMAGLQELKAIHIGTHDSINEGENGPTHQPVESPALFRAMPNIYYMRPVDSAEVFGLFQKAVELPFSSILSLSRNEVLQYPGKSSAEKAQRGGYILEDAENAEVQIIGVGAEMEFAYKAAKILGRKFRTRVLSIPCTRLFDEQSIGYRRSVLRKDGRQVPTVVVDGHVAFGWERYATASYCMNTYGKSLPPEVIYEYFGYNPATIAKKVEAYVRACQRDPLLLHDFLDLKEKPNHDKVNKL

SEQ ID NO: 8011 - protein, 454 aa, Colwellia psychrerythraea 34H
MSNNEPSSLKQSIKLAWPISLQSILVTMLGMSDIMMVGHLGDTAVASVGLGNRIQFVFLIILAGLASGVGTLSAQHFGAGQIGVIRQIIVKTLVIAAGILLPILLITFLFAGNIMGIATTDPSVINTGTSYLWLTMPSLIFVVVVMIFENALRGLGQVIFPMFISIIAIITNIILNYWLIKGGLGIEPMGVIGAALATLLARALHALLILTYLAKVKHSIFPTTFFCADFYNKQAWTKLLTLVWPMMLSFGVWSLGTFVYQLIYGRIGTQELAVMSLLAPIEGLLVSFFFGFASACAILVGQRLGKNEFSNAWSLAKNYAISAPIITFLLALILLQYQYLVFMPFSNLSSETITLSQEILVLICFGTCLKVFNMTIAMGILRAGGDNKYCMFIDISGMWIISIPLTFMAAFYFMLPLYWVALIAYSEEIIKAVMFIFRMKTRHWLKNLTAESMA

SEQ ID NO: 8012 - protein, 313 aa, Campylobacter coli RM2228
MYEFLLHEPLANKSKHNHEDHSHEHHHADARSVDKKILKISLLMTFSMMLVQFIYSLLSNSLALLSDTLHMFSDVFALTLSFLAIIAIEKWQDHQKTFGYFRLEILVAFINALTIILSAIFIIYEAIEKLINPSSIDAKTMIIVAVLGFLVNAINAFMMFRGANLENVNMKSAFLHMMSDLLGSLVVIIGGIAVYFSGIVYIDTILAIILSLLLLRWAITLLKQSVNILLETSPVDIEEVKQALLLNSKVEEVIDLHITQITNKMLVASMHLRVNIDDLKEFEQLSYDLSHDLLHRFEIGHITIQPLRSKNEI

SEQ ID NO: 8013 - protein, 320 aa, Triticum aestivum
MPQDDASFLLCAEDAFFFVDAAASTCTTAEQDDGWCSSAEEESAASFVAELIGGEADYSPRSDYSDRLRSRSVDPAARADSVAWIVKVQEYYGFLPLTAYLAVNYMDRFLSLHRLPQEDGWAMQLLAVTCLSLAAKMEETLVPSLLDLQIESTRYIFEPRTILRMELLVLTALNWRLRSVTPFTFIDFFACKVDPRGRHMRYLIARATQMILAAIHDIEFLDHCPSSMAAAAVLCAAGETPSLTSLLNPRLAVNWCIGLAEEGVSSCYQLIQRLVGCKRAATAEAAVNLCSDEVLSCDYSSCTTPPPPKRRKRSPPPVIT

SEQ ID NO: 8014 - protein, 357 aa, Glycine max
MSAFVGKYADELIKNAKYIATPGKGILAADESTGTIGKRLSSINVENIEANRQALRELLFTAPDALQYLSGVILFEETLYQKTSDGKPFVEVLQENNVIPGIKVDKGVVELAGTNGETTTQGFDSLGARCQQYYKAGARFAKWRAVLKIGPTEPSELSIQQNAQGLARYAIICQENGLVPIVEPEILTDGAHDIAKCAAVTETVLAAVYKALNEQHVLLEGTLLKPNMVTPGSDSPKVPPEVIAEYTVQALRRTVPAAVPGVVFLSGGQSEEEATLNLNAMNKLEVLKPWTLSFSFGRALQQSTLKTWGGKKENVAKAQEAFLARCKANSDATLGKYVGGSGSGLTSESLYVKNYKY

SEQ ID NO: 8015 - protein, 257 aa, Carboxydothermus hydrogenoformans Z-2901
MNFRFSSMNLPRFPRLGEQEIKELIEKAQKGDVAAREKLINCNLKLVFKVVERFLHRGYEVEDLFQIGTIGLIKAIDKFDLKQQVKFSTYAVPMIVGEIRRFLRDDQAIRISRSTKELGVKILKEKEALTVKLGREPTIAELEETLGYSREAIVEALEAGQSLASLFETVHQDDGDPIYLLDQIKQEGDEEQTLLENISIKEVLSKLEPRERYILINRFFKEKTQMEIARTLGISQVQVSRLERQALLKLKRYLNES

SEQ ID NO: 8016 - protein, 174 aa, Lactuca sativa
MASISSSAIATVNRTTSTQASLAAPFTGLKSNVAFPVTKKANNDFSSLPSNGGRVQCMKVWPPIGLKKYETLSCLPPLSDEALSKEIDYLIRNKWIPCLEFELEHGFVYREHHHSPGYYDGRYWTMWKLPMFGCTDSAQVMKEVGECKKEYAGTEFAKGSLKVKLLKWPRSPLQ

SEQ ID NO: 8017 - protein, 435 aa, Ralstonia eutropha JMP134
MSSAAPTHTAGQKHALPSYLNADNLGPWGIYLQQVDRVTPYLGSLARWVETLKRPKRAMIVDVPIELDNGTIAHYEGYRVQHNLSRGPGKGGVRFHQDVTLSEVMALSAWMSVKNAAVNVPYGGAKGGIRVDPRTLSHAELERLTRRYTSEINIIIGPSKDIPAPDVNTNAQVMAWMMDTYSMNSGSTATGVVTGKPISLGGSLGRHEATGRGVFVVGSEAARNIGLEIKGARVAVQGFGNVGAVAAKLFQEAGAKVVAVQDHRVSLYNPAGLDVPAMMEYASHSGTVDGFQAETISSEQFWQVDCDILIPAALEGQITAKNAPQIKARLVIEGANGPTTPEADDILRERNILVAPDVIANAGGVTVSYFEWVQDFSSFFWTEEEINERLVRIMQEAFRAIWQVAQDNKVTLRTAAFIVACTRILQAREMRGLYP

SEQ ID NO: 8018 - protein, 429 aa, Oryza sativa (japonica cultivar-group)
MAAALARRGGGGLARALARGRGMCSATAAERAAGAALTSEELMRMERERSAHNYHPIPVVFSKGEGSHILDPEGNKYIDFLSAYSAVNQGHCHPKVLRALKEQAERLTLSSRAFYNDKFPIFAEYLTSMFGYEMMLPMNTGAEGVETAIKLVRKWGYEKKKIPKNEALIVSCCGCFHGRTLGVISMSCDNDATRGFGPLVPGHLKVDFGDTDGLEKIFKDHGERICGFLFEPIQGEAGVIIPPDGYLKAVRDLCSRHNILMIADEIQTGIARTGKMLACDWENIRPDVVILGKALGAGVVPVSAVLADKDIMLCIKPGEHGSTFGGNPLASAVAVASLKVVTDEGLVERAAKLGQEFRDQLQKVQQRFPQIIREVRGRGLLNAVDLSNEALSPASAYDICIKLKERGVLAKPTHDTIIRLAPPLSISQS

SEQ ID NO: 8019 - protein, 304 aa, Zea mays
MAFLNMEQQTWAFTFGILGNIVSLMVFLSPLPTFYRVYRNKSTEGFQSTPYVVTLFSCMLWILYALLKPGAELLVTINGVGCVVETVYLAMYLVYAPKAARVLAAKMLLGLNVAVFGLVALVTMLLSDAGLRVHVLGWICVSVSLSVFAAPLSIMRQVIRTKSVEFMPISLSFFLVLSAVVWFAYGALKKDVFVAFPNVLGFVFGLAQMALYMAYRKPAAALVIIPEQSKEEVAEGKASCGGAEVHPIDIAEVHDLQTVVVDVDVEPVTYAAASGMVDGSVGRPRAPEQLVIKPDMVTVIAAEA

SEQ ID NO: 8020 - protein, 360 aa, Prochlorococcus marinus str. MIT 9312
MKTWVIKIGTSILRGTEETSTEEVIETLCRSFTSFLLKGNKLILVTSGAVGLGCQKLNIKTRPNDLSTLQATAAVGQVNLMSLYDKIFNKLGHNIAQILITKADFNSRESFNNASKTLKKLIDLNVIPIVNENDTVANEELKYGDNDTLSALVALAINANKLILLTDIENLYSKDPRKNKDAHPIKEVHNSELKEIKNKNNQNSNNEWGTGGISTKLISAEIATKGGVEVQLVDGTNKKNLIEIFNDNKIGTLFYPLEKPIGNKKSWLSHAIHTVGKITLDDGAFFAINKKGASLLAVGVKNVEGNFTVNQAVKIVNTDNKEVAKGLVSISSDNLRSILNNKDNNNSSIIVVHRDVLALS

SEQ ID NO: 8021 - protein, 137 aa, Onion yellows phytoplasma
MLFSLINQNQDLLENLFEDFKTNSLTNNNNIMKTDIQEQDNQYFITIELPGFKKEDVKVALEEGYLVVEAKNSKKNQIKEANFIRKERFQGFLRRSFYLGDDFLLEDIKGSLEQGLLKLSVPKKEVKPKEKHYIKLN

SEQ ID NO: 8022 - protein, 396 aa, Arabidopsis thaliana
MAMAMDRIVFSPSSYVYLPCQARGSRSSRVSMASTIRSATTEVTNGRKLYIPPREVHVQVKHSMPPQKLEIFKSLEGWADETLLTYLKPVEKSWQPTDFLPEPESEGFYDQVKELRERCKELPDDYFVVLVGDMITEEALPTYQTMLNTLDGVRDETGASPTPWAIWTRAWTAEENRHGDLLNKYLYLSGRVDMRQIEKTIQYLIGSGMDPKTENNPYLGFIYTSFQERATFISHGNTARLAKDRGDLKLAQICGTIAADERRHETAYTKIVEKLFEIDPDGTILGLADMMKKKISMPAHLMYDGQDDNLFEHFSTVAQRLGVYTAKDYADILEFLVERWNVETLTDLSSEGHRAQDFVCGLPARIRKIEERAQGRAKEAAKNIPFSWIFGRNIRA

SEQ ID NO: 8023 - protein, 394 aa, Cytophaga hutchinsonii
MKSQEVYIVAAYRSAVGKAPRGLFRFYRADDLGADVVKHLVASVPALDKDRIDDVIVGNATPEAEQGLNIGRMISLMGLNTVKVPGMTVNRYCSSGLETIAIADAKIRAGYADCIIAGGVETMSPIPFGGWKTVPNYELTKSHADYYWGMGLTAEAVAAQYNVSREDQDLFSYNSHQKAVAAIKNGHLQDGIVPITIKETYLDEKEKKKIKEYQVLVDEGPRADTSIAALAKLRPVFANGGSVTAGNSSQTSDGAAFVLLMSEKMVKELNLKPIARLVSYAVAGVEPRIMGIGPVEAIPKALKLADLKQDDINLIELNEAFAAQSLAVIRTLGLDESKINVNGGAIALGHPLGCTGAKLSVQIFNELKRTNQKYGMVTMCVGSGQGAAGIFEML

SEQ ID NO: 8024 - protein, 318 aa, Triticum aestivum
  misc_feature (252)..(252): Xaa can be any naturally occurring amino acid
  misc_feature (260)..(260): Xaa can be any naturally occurring amino acid
  unsure (1)..(318): unsure at all Xaa locations
MASLSVPPVLTPPRDDAVALHKAFKGFGCDSTTVTNILAHRDSAQRALILHEYKAIYHQDLYHRLATELSGNHKNAMLLWVLDPVGRDATILNQALNSDITDLRAATEVICSRTPSQLQIMKQTYRARFGCYLEHDITERTYGDHQKLLLAYLGVRRNEGPEVDPSAVTDDARELYQAGEKRVGTDERAFIRIFSERSWAHMVSVANAYQHMYARSLEKAVKSETTGNFQFGLLTILRCADTPAKYFAKVLXHKAMKGLXGTSNAALTRVAVTRTEVDMKYIKAEYHNKYKGSLAEAIHSETSGNYRTFLLSLVGWDR

SEQ ID NO: 8025 - protein, 343 aa, Salmonella enterica subsp. enterica serovar Paratyphi A str.
MEVKTQSCVVAGKRAVAVTEQNIEWNNKGTLVQITRGGICGSDLHYYQEGKVGNFTVKAPMILGHEVIGKIVHSDSDLLREGQPVAINPSKPCGHCKYCLQHEENHCTEMRFFGSAMYFPHVDGGFTRFKAVDTAQCIPWPEQADEKAMAFAEPLAVAIHAAHEAGDLQGKRVFISGVGPIGCLIVSAVKTLGAAEVVCADISTRSLSLARQMGADTLVNPQHDSLDGWKAEKGYFDISFEVSGHPSSISTCLEVTRAKGVMVQVGMGGAVPNFPMMMLISKEISLKGSFRFTTEFNTAVSWFANRVINPLPLLSAEYPFTDLEAALIFAGDKTQAAKVQLVF

SEQ ID NO: 8026 - protein, 330 aa, Helicobacter pylori 26695
MALPVYYDKDIDLGVIQSLQVGIIGYGAQGEAQALNLRDSKVKARIGLYQGSLSVSKAKKEGFEVLEVKELVQNSDVIMALLPDELHKEVLEKEVIPFLKEGQIVGFAHGFSVHFNQVVLPKGVGAILVAPKGPGSALREEYLKNRGLYHLIAIEQESSIHNAKAVALSYAKAMGGGRMGVLETSFKEECESDLFGEQAVLCGGLEAIVRMGFETLIKAGYPEELAYFECVHEVKLVADLLHYKGVEGLRKHISNTAEFGAIKAREPMGKLLKKRMQKILKKIQNGSFAKDFLLEKSLNYPRLNTERKALKETKIEQIGEILRAPFNHKK

SEQ ID NO: 8027 - protein, 359 aa, Arabidopsis thaliana
MTFLSYLKQWRGTAKEAFENVSIVAKFLCLLHVTDRYIISTTHVHGPSMLPTLNLTGDVILAEHLSHRFGKIGLGDVVLVRSPRDPKRMVTKRILGLEGDRLTFSADPLVGDASVSVLVPKGHVWIQGDNLYASTDSRHFGPVPYSLIEGKALLRKKSHGPDIVSETRTSISNVKIHIVGIEKAALNTRNFLKAPEKSGSETMSLIPSIFGGRRTNVFDPFSLDVFDPFEGFLTPSGLANAPAMDVAAFTNAKVDWRETPEAHVFKADLPGLRKEEVKVEVEDGNILQISGERSNENEEKNDKWHRVERSSGKFTRRFRLPENAKMEEIKASMENGVLSVTVPKVPEKKPEVKSIDISG

SEQ ID NO: 8028 - protein, 174 aa, Aeropyrum pernix K1
MPLRPARCYTHFSGPPYTRREYIHGVPPPKITRFEMGNREMMEKWEIKGELVMLEAGQIRHNALEAARIAVNKYLATTIGDKNFYFRIRVYPHHVIRENKMMAFAGADRLQDGMRQAFGKPVGTAARVYPGTVVLEVWARKGDEENVKEALRRGASKFPLPSRIVIRTRGAQAS

SEQ ID NO: 8029 - protein, 470 aa, Pseudomonas aeruginosa UCBPP-PA14
MADGKERLQLTRALASRHIFMLSLGGVIGTGLFMGSGVTINQGGPAGAVLAYLVAGVLMYLVMVCLGELSVQMPVSGSFQAHATRFIGPATGFMIGWVYWMSWASTVGLEFTAAGMLMTRWFPEVPVWLWSGFFVVVLFSLNALATRAFGEAEYWFAGIKVAAILVFIVVGGLVIFGGIELKSGAPAPMFSNLVGERLFPNGLSAVFAVMMTVVYAFQGCEIMGVAAGETERPEKSIPRAVRNVVFRVLIFYVLAIVVLSAIIPWQQAGLVESPFVQVFDMVGIPYAADLMNFVILTAILSVGNSGLYASTRILWAMSRTGMAPRGLSKLSARGVPLYALLITLCFALLSLLTSVIAADTLFMVLMAVSGMSGTVTWIVIAYAQYRFRREHMASGGTVAELKYAAPLFPLVPLACIAVCCSLFVFLALDPTQRPSLYWGFGFIAACYLAYYVVRRRQPQGLGDPALGRAG

SEQ ID NO: 8030 - protein, 554 aa, Staphylococcus aureus subsp. aureus COL
MMKFHHRLMLLISSILIISFVTLGIIIHASITYVLSEKHEQALATDARSYIYLVQDNEIDKVKKIVKQQNIDLLITKHDKKVFSSGKLKAIPNSDSYIQKRDVFIFNKKVNGYHVWIKGYNNDITEMHWTLWKYLILTCLVVLICLYFASRSFKRTLIRPIQEVTYATQLLANGYYHIRVPESNVVETKALFVSTNDLARRLQKLNNEQKIQSNRLKTTIENIPSAILMIDRNGKIVVANKAYYEQFNISHNIEQVGYHGYVNTEIEQLILESFKVEKPIYEQLEVAINQVHAKYFDISCVPILTRSQKSLQGILVVMHDITNLKQLENLRREFVANVSHELKTPITSIKGFAETLIDGAKNDAESLDMFLNIILKESNRIESLVTDLLDLSHIEQHTELDTDYMNLSDLTRRIIDNMMTQANQKNISIHTDIEKDVIVKAQESKIAQVITNLLTNAINYSYEDGDINVRVYRDDFRVIFEVQDFGIGIKLEDQQRIFERFYRVDKARSRDSGGTGLGLSITKHIVEAHQGNIEVNSQVGKGSTFKVILKDYKE

SEQ ID NO: 8031 - protein, 154 aa, Oryza sativa
MAPKAEKEPAAKKPAEEEPAAEKAEKAPAGKKPKAEKRLPAGKGEKGGAGEGKKAGRKKGKKSVETYKIYIFKVLKQVHPDIGISSKAMSIMNSFINDIFEKLAAEAAKLARYNKKPTITSREIQTSVRLVLPGELAKHAVSEGTKAVTKFTSA

SEQ ID NO: 8032 - protein, 447 aa, Colwellia psychrerythraea 34H
MSAFDIQQSASMSREELEAYWMPYTANRQFKEKPRMIVGAKGAYYTDADGRKIFDGLSGLWTCGAGHNRPEIAEAVYKQLGQLDYAPAFQYGHKGAFELANRIKELTPDGLDHVFFTGSGSESADTSLKMARAYWRKKGKGTKIKLIGRSKGYHGVNFGGFSVGGIGANRTLYGPAVDCDHLPHTMLPENKFIRGMPETGAEKAEELLELIALHDASNIAAVIVEPLAGSAGVLPPPKGYLKRLREICDQHEILLIFDEVITAFGRMGSNTGAEEFGVVPDILNVAKQLTNGAVPMGAVIVNDDIYQTFMDNGGPEYMMELPHGYTYSGHPVACAAALASLDILKNDQLITRVREMSPVFEHALHSLKGTQYISDIRNYGLAGALTIESAPGEPALRPYQIAQKCWEKGFYVRYGGDTIQLGMPFIVEHQEIDDVINAVGESINELS

SEQ ID NO: 8033 - protein, 235 aa, Bacillus cereus ATCC 14579
MAFPFLFQFEKDGRIMKAIIFDFDGLIVDTETIWFHSFRDAVREYGGELPLEEFAKCIGTTDEVLYTYLNDQLKEKFNKSVLKEKVATLHKEKMRIPEARDGVKEYLEEAKEMGLKIALASSSSREWVIHFLEELQIREYFEVIKTREDVEKVKPDPALYRVAIEELGIKPSEAVVFEDSLNGLRAAVAAGLTCVVVPNDVTRNLPFENHHLRIESMREKSLKEVLQSIKKDRIS

SEQ ID NO: 8034 - protein, 403 aa, Pyrococcus horikoshii
MLGDVERFFSKKALEMRASEVRELLKLVETSDIISLAGGLPNPKTFPKEIIRDILVEIMEKYADKALQYGTTKGFTPLRETLMKWLGKRYGISQDNDIMITSGSQQALDLIGRVFLNPGDIVVVEAPTYLAALQAFNFYEPQYIQIPLDDEGMKVEILEEKLKELKSQGKKVKVVYTVPTFQNPAGVTMNEDRRKYLLELASEYDFIVVEDDPYGELRYSGNPEKKIKALDNEGRVIYLGTFSKILAPGFRIGWMVGDPGIIRKMEIAKQSTDLCTNVFGQVVAWRYVDGGYLEKHIPEIRKFYKPRRDAMLEALEEFMPEGVKWTKPEGGMFIWVTLPDGIDSKKMLERAIKKGVAYVPGEAFYAHRDVKNTMRLNFTYVDEDKIMEGIKRLAETIKEELKA

SEQ ID NO: 8035 - protein, 190 aa, Glycine max
  misc_feature (175)..(175): Xaa can be any naturally occurring amino acid
  unsure (1)..(190): unsure at all Xaa locations
MTCLCLTHSITQTHNHNHNLPHATTTFSSSLHNRNPLFQLFSVSNQFPLLSRALFQSIILRPRIRPFSTNLTASYSSSAFAQIMANFDADSVTYLTQRDAAEIDETLMGPLGFSVDQLMELDVLSVATSISEVYKPCEHSRVLTICGPGNNGGDGLVAARHLHHYGYKPFVCYPXRTPKPLYAELVTQLE

SEQ ID NO: 8036 - protein, 518 aa, Rickettsia typhi str. Wilmington
MVNLKIFFIVIVLMFNNIILAKENSNALKVVDQEVVEQEENEFTSINSVPLKVSEAARYSFADIVEPLIPAVVNISTIEYVNDKSENAEKDLLQENKHLGFMSDILEKFNIPLNLEEVAKIPKSIPLGSGFIITPNGLIVTNYHVIANVEKINIKLADNTEFLAKLIGSDAKTDLALLKIDSEEPLPFVEFGDSNDARVGDWVIAIGNPFGNLGGTVTSGIISSKGRDIDVDTNNIVDNFIQTDAAINNGNSGGPMFNLDQKVIGVNTAIFSPLGTNIGIGFAIPSNTAKQIIERLKKDGKVSRGRLGVTIQDLTEEISEVLGFKGTNGVLVSKVQENGPGYKAGIKKGDIIIKFGDRLVKNTKKLRVIIADTPINQEVKLKILRDAKELELPIKVTADNAEVINDSTEEINKEVIINKQENNLSITKNNITFSNLTEELREKYDIPQDKIGVVIINIDEEESEFKLGDLITNINHDRIDDIRQLEALYDDAKKLEKQNILLLIERGNTSVFVPLSVS

SEQ ID NO: 8037 - protein, 479 aa, Pyrococcus abyssi GE5
MCLIAGGFNVSREDAIKIINLGKHRGPDSFGFWSERQMLKSDNFSDVSEIEGGEIALIQCRLAMTGSKSYTQPFYNEIILVHNGEIYNHESLRKYLIERGVAFETDVDSEVILRLLEYLVFDRKLKVEEAIKLSMKMLRGDYAVAFFFNGKFYLFRDPLGVRPLYYSSRGHFASEKKVLWGLGEDAEPVLPGEIVSISKHGITRVRGFNVFSIRTQGKDYFNGLQNLLIDSVKVRASKKVGVLFSGGVDSSLIALIASRYSDVILYTSGTEDSKDVEWARRVAEELGLKLRESLFSREDIENEIERIMFAIEEPNPMNLAIAIPLYFSTKRAREDGVKVLLSGQGADELFGGYAKYLQNPGLMLKDVEELGERNLARDDKVAMLNGVETRYPYLDLPFAILALNVPLELKIRDGKRKFILREIAKSLGLPEWVAEREKKAAQYGSNAQKILEKIAKSRGVKLKGLADILFSKVFHGIQN

SEQ ID NO: 8038 - protein, 184 aa, Colwellia psychrerythraea 34H
MTDQRNDKAVQTATLAGGCFWCIESALNMVKGIITAKPGYMGGQSTAPTYEEVCTGSSGHAEVVQLEFDSEVISYREILEIFFSLHNPTQLNRQGNDIGTQYRSEVFTHDALQQKIALAIIEEINQEQLFDDSIVTEVSPAVTFYCGEDYHQNYFKNNPENQYCQAVVSPKLAKFRKTFVAKLK

SEQ ID NO: 8039 - protein, 539 aa, Oryza sativa
MDPSSAGAGGNSLASASCGDAQKRRVCYFYDPEVGNYYYGQGHPMKPHRVRMTHALLAHYGLLAPAKMQVLRPLPARDRDLCRFHSDDYVAFLRAVTPETQFDQIRSLRRFNVGEDCPVFDGLYAYCQTYAGASVGAAVKLNHGTHDIAINWSGGLHHAKKSEASGFCYVNDIVLAILELLKLHERVLYIDIDIHHGDGVEEAFYTTNRVMTVSFHKFGDYFPGTGDIRDIGYSEGKYYCLNVPLDDGIDDDSYQSIFKPIISKVMEMYRPGAVVLQCGADSLSGDRLGCFNLSGKGHAECVKFMRSFNVPLLLLGGGGYTIRNVARCWCYETGVALGEELREKLPYNEYYEYFGPEYSLYVAASNMENRNTNKQLEEIKCNILDNLSKLQHAPSVQFEERIPETKLPEPDEDQDDPDERHDPDSDMLLDDHKPMGHSARSLIHNIGVKREITETETKDQHGKRLTTEHKVPEPMADDLGSSKQVPATSSYATDSCMLLVTYSEVLYDCFFCRSLQITTVSFVEEFQSVQAILDVETLV

SEQ ID NO: 8040 - protein, 452 aa, Aeropyrum pernix K1
MAVDAPRIVVEPPGPRAREVLERDERVIMQSFTRWYPLVVKRGYGAVVEDVDGNRYIDFNAGIAVLNVGHNHPRVVEAVKRQLERFLHYSLTDFYYEEAVSAAERLARSVPISGGAKTFFTNSGAESIEASIKVVRAFFRGTRPYIISFLGGFHGRTYGAMSASASKPVHRARFYPLVPGFIHAPYPDPYRCPFPGLEGEACGEAAVSYIEDYIFSKLVDPGEVAAFLFEPIQGEGGYVVPPDSFLPSLQKLARKHGILLIADEVQTGFARTGRMFAVEHWGVEPDVMALAKAMGGGLPLGAAVGRSEVMSLPRGSHANTFGGNPVALAAFNAVMDVIEGERLWERSQRLGEKALKILGEAAEELSIVGHVRGKGLMIGVELVRDENTREPHKEALAWVLDRSFKRGLLVIGAGVSAVRIAPPLTIEEELFDRGLEILVEVLREADRRFSQV

SEQ ID NO: 8041 - protein, 217 aa, Sulfolobus acidocaldarius
  misc_feature (41)..(41): Xaa can be any naturally occurring amino acid
  misc_feature (117)..(117): Xaa can be any naturally occurring amino acid
  misc_feature (174)..(174): Xaa can be any naturally occurring amino acid
  misc_feature (209)..(209): Xaa can be any naturally occurring amino acid
  unsure (1)..(217): unsure at all Xaa locations
MLADKESLIEALKLALSTEYNVKRNFTQSVEIILTFKGIDXKKGDLKLREIVPLPKQPSKAKRVLVVPSSEQLEYAKKASPKVVITREELQKLQGQKRPVKKLARQNEWFLINQESXALAGRILGPALGPRGKFPTPLPNTADISEYINRFKRSVLVKTKDQPQVQVFIGTEDXKPEDLAENAIAVLNAIENKAKVETNLRNIYVKTTXGKAVKVKR

SEQ ID NO: 8042 - protein, 596 aa, Rickettsia typhi str. Wilmington
MTKAYNIIHHKFDVVVVGAGGAGLRSAFGMAKEGLNTACITKIFPTRSHTVAAQGGISAALGNMGEDDWRWHMYDTVKGSDWLGDQDAIEYMCKNAPDAILELEHYGVPFSRTEDGKIYQRPFGGMTTEYGKGKAAQRTCAAADRTGHAILHTLYQQSLKHKVQFFIEYFAIDLLMEDGECRGVVAWNLDDGSLHCFRAHNVVLATGGYGRAYFSATSAHTCTGDGGGMVIRAGLPLQDMEFVQFHPTGIYSAGCLITEGARGEGGYLVNANGERFMERYAPAAKDLASRDVVSRAMTIEIREGRGVGEYKDHVFLHLNHLSPEILHRRLPGISETAKIFAGVDVTKDPIPVLPTVHYNMGGIPTNYHGQVIIKDGKNHNSIVNGIMAIGEAACVSVHGANRLGSNSLLDLVVFGRSSALKAAELIKPVSPHKPLKKEILEKIINRFDKIRHANGNVLVADLRLQMQRTMQSHVSVFRTQELLDEGARMISEIRNRYKDIKINDKSLIWNSDLVEALELDNLLDQALVTVYSAAARKESRGAHAREDYPDRNDIDWIKHTLSSIDDSGQIILDYKPVTLTTLTDEISTIPPVKRIY

SEQ ID NO: 8043 - protein, 472 aa, Arabidopsis thaliana
MAIWFARSKTLVSSLRHNLNLSTILIKRDYSHRPIFYTTSQLSSTAYLSPFGSLRHESTAVETQADHLVQQIDEVDAQELDFPGGKVGYTSEMKFIPESSSRRIPCYRVLDEDGRIIPDSDFIPVSEKLAVRMYEQMATLQVMDHIFYEAQRQGRISFYLTSVGEEAINIASAAALSPDDVVLPQYREPGVLLWRGFTLEEFANQCFGNKADYGKGRQMPIHYGSNRLNYFTISSPIATQLPQAAGVGYSLKMDKKNACTVTFIGDGGTSEGDFHAGLNFAAVMEAPVVFICRNNGWAISTHISEQFRSDGIVVKGQAYGIRSIRVDGNDALAVYSAVRSAREMAVTEQRPVLIEMMTYRVGHHSTSDDSTKYRAADEIQYWKMSRNPVNRFRKWVEDNGWWSEEDESKLRSNARKQLLQAIQAAEKWEKQPLTELFNDVYDVKPKNLEEQELGLKELVKKQPQDYPPGFHV

SEQ ID NO: 8044 - protein, 209 aa, Brassica napus
  misc_feature (193)..(193): Xaa can be any naturally occurring amino acid
  unsure (1)..(209): unsure at all Xaa locations
MTISDQFPCGLRVLVVDDDASCLIILEKMLLRLMYQVTICSQADVALTLLRERKGCFDLVLSDVHMPGMNGYKLLQQVGLEMDLPVIMMSVDGRTATVMTGINHGACDYLIKPIRPEELKNIWQHVVRRKCTINKNSISSSSSSLGSLFSVSGVSEGSLKRRKNKRRVDSEEDDLLDPGNSSKKSRVVWSMEXHQQFVKAINHLGIEKA

SEQ ID NO: 8045 - protein, 395 aa, Idiomarina loihiensis L2TR
MVKDKKHDTEIVTKPKWFDKDSVTIPMLQILKEDGSFHKDADMPEYDKELIVKIHDTMQFIRILDERMIAAQRQGRISFYLASRGEEAESVASAAALDAGDMIMGQYREQGALAYRGFTVEQFMNQLFSNEKDLGKGRQMPVHYGCADLNFMTISSPLGTQIPQATGYAFGQKMDKTEKCTICYFGEGAASEGDFHAALNMASVYKVPVIFFCRNNGYAISTPAQGEQYAGDGIAPRGIGYGMKTIRIDGNDVFAVLKATQEARRLAVEENEPVLIEAMSYRMSGHSTSDDPTGYRTRDEEAGWQAKDPLERLQKWMTDEGWLDKDHVEEHHAEVKAKVLAALKESEKVPVPHIDELINDVYDEPTDMLKEQLDELKEHIRKYPDAYSKTSGRLD

SEQ ID NO: 8046 - protein, 583 aa, Magnetococcus sp. MC-1
MVQDTQLIRRLLRLIWPFRWYVITALLCMGVMAATNGAIAFMVKPLVDDVFMQKDASLVTLIPIVVMGIFIVRAVVFFLQSYLMQSLGFKIVRLLQVRLYKKILHLDMERFNTESTGSFISRMIFDIDQLKRVVSTALADITRELLTVTFLFGVVVYRAAELAWVSVVGVPLAVYLIYLFGRKMRTISRRQQELMEDVTSHLEETIAGVKVVKAYCMEGYEHGVFRRISQRVLKNNLRSAFINAISKPSIDLVAGIAISLVVLTSAHAILDGKTTPGTLFSFLTALMMAYSPLKRITMLYNGLQAGLAAAQRVFERLDQYPAIQNVPEAGKLQPLTKALRFENIGFRYQSSEGPVLRGINLHIGVGEKVALVGQSGCGKSTLANLVPRFYEPQQGAILFDGVDIRSVTMRSLRQQIAMVTQENVLFNDTIRNNVAYGKLRASDEEIWAALEAANAKSFVEQLPEGLDAMIGNKGAKLSGGQRQRIAIARALLKSASVLILDEATSALDSESEQLVQEALDRLMDRYTTLVIAHRLSTIRNADRIVVMHEGAVAEMGTHDSLLAQGGLYAKLCEIQFDTQTAKE

SEQ ID NO: 8047 - protein, 83 aa, Citrus maxima
MSLIPSIFGGRRTNVFDPFSLDVWDPFDGFLSSALTNAPSSARETSQFANARIDWKADLVHVFKADLPGLRKEEVKVEVEECR

SEQ ID NO: 8048 - protein, 587 aa, Cytophaga hutchinsonii
MAVTRLFDLIPQQIAKYPKQDALATKENGTWISYSSVRVQEIIDKVSIGFIKSGLQKDDKVAIISPNRPEWNFIDLGLQQIGAVSVPIYPTLTVEDYRYIFDDAEVKMVFVYDEQLFAKATEAVNGSRTNPVIYTLQDVNGAKSWKDITALADGQPASMLDPYKANVFNDDLLTLIYTSGTTGKPKGVMLTHNNILSNVLAAIPLMPVNHNHKALSFLPLCHVYERMLCYLYLSQGVSIYYAESTDTVGENLKEVQPHMFVTVPRLLEKVYDKIVAKGAELTGIKKFLFYWALELGLKYDMQKNQGFFYNIQLKLANKIIFSKWREALGGNVITVVSGGAALQPRLARVFWAAQIPVMEGYGLTETSPVIAVNRFNPDETRISTVGPLLPGVEVKIAEDGEILTRGPHIMKGYYKRPDLTAEAIDSEGWFHTGDIGQFVENKYLKITDRKKEMFKTSGGKYIAPQLVENKFKESRYIEQIMVIGEGEKFPSAIVVPSFADVKSWCEIKGIPYTTNEEMVCNAQVIEKFQKEFDEMNENFAQYERVKKFILMPRPFTIESGEMTPTLKLKRKIIMQNCQGQIEKMYAR

SEQ ID NO: 8049 - protein, 382 aa, Zea mays
  misc_feature (49)..(49): Xaa can be any naturally occurring amino acid
  misc_feature (70)..(70): Xaa can be any naturally occurring amino acid
  unsure (1)..(382): unsure at all Xaa locations
MQIFVKTLTGKTITLEVESSDTIDNVKAKIQDKEGIPPDQQRLIFAGKXQLEDGRTLADYNIQKESTLHXVLRLRGGMQIFVKTLTGKTITLEVESSDTIDNVKAKIQDKEGIPPDQQRLIFAGKQLEDGRTLADYNIQKESTLHLVLRLRGGMQIFVKTLTGKTITLEVESSDTIDNVKAKIQDKEGIPPDQQRLIFAGKQLEDGRTLADYNIQKESTLHLVLRLRGGMQIFVKTLTGKTITLEVESSDTIDNVKAKIQDKEGIPPDQQRLIFAGKQLEDGRTLADYNIQKESTLHLVLRLRGGMQIFVKTLTGKTITLEVESSDTIDNVKAKIQDKEGIPPDQQRLIFAGKQLEDGRTLADYNIQKESTLHLVLRLRGGY

SEQ ID NO: 8050 - protein, 417 aa, Cytophaga hutchinsonii
MNEITELAAQQAELTHAVDTVWVAICAALIFQMEGGFALLESGFVRSKNAISIIAKVMIDIMFGGIAFYAVGFGIAYGASNGWWAFGFGIPEGDMGLGLTVSNKLFWFIQMGFAIAAISIVSGAVAERIKIWAYAFFVLFFCACMYPLAANWVWNPNGWLAQLGFNDFAGSAAVHAMGGFAGLAAAIVLGPRIGKYNADGSINPIPGHNLTLSAVGAFILWFGWFGFNPGSTLGAVGKWELIGSVATNTFLSSAMGGISTMVYTFLRYKRIDITMVINGVLAGLVAITAGCNVVSANSAIIIGLIAGILIDVAVVAIDKMKVDDPVGAVAVHGVNGFFGTVAVGLFATKGGLFTTGDAHLLGVQTLGVTVIAVCSFAVTYLVFIVLKKTTGIRLGEREELAGTDAVEFGIEAYTTIE

SEQ ID NO: 8051 - protein, 522 aa, Zea mays
NSGGKCDFDLAATFFCSVVYLVVGGDMQFALALDTNSGPHQIRSCEGDGIDRLEKLSIGGRKQEKALRNRCFGGRVAATTQCILTSDACPETLHSQTQSSRKNYADANRVSAIILGGGTGSQLFPLTSTRATPAVPVGGCYRLIDIPMSNCFNSGINKIFVMSQFNSTSLNRHIHRTYLEGGINFADGSVQVLAATQMPEEPAGWFQGTADSIRKFIWVLEDYYSHKSIDNIVILSGDQLYRMNYMELVQKHVEDDADITISCAPVDESRASKNGLVKIDHTGRVLQFFEKPKGADLNSMRVETNFLSYAIDDAQKYPYLASMGIYVFKKDALLDLLKSKYTQLHDFGSEILPRAVLDHSVQACIFTGYWEDVGTIKSFFDANLALTEQPSKFDFYDPKTPFFTAPRCLPPTQLDKCKMKYAFISDGCLLRECNIEHSVIGVCSRVSSGCELKDSVMMGADIYETEEEASKLLLAGKVPIGIGRNTKIRNCIIDMNARIGKNVVITNSKGIQEADHPEEGVI

SEQ ID NO: 8052 - protein, 216 aa, Dendrobium sp. XMW-2002-8
MGRSPCCEKAHTNKGAWTKEEDERLVAYIKVHGEGCWRSLPKAAGLLRCGKSCRLRWINYLRPDLKRGNFTEEEDELIIKLHSLLGNKWSLIAGRLQGRTDNEIKNYWNTHIRRKLLSRGIDPTTHRPLHGQADASFVNEVEKVVSFRRREDENKSSNSSSSNSRSNSEEAKRWRCPDLNLELCISPPLQKQEDSEEDMMREEFGLCFTNGLLEFR

SEQ ID NO: 8053 - protein, 295 aa, Nicotiana tabacum
MGLKGLLFSIVLINLSLLGLCGYPRKPVDVPFWKNYEPSWASHHIKYLNGGSTADLVLDRSSGAGFQSKKSYLFGHFSMKLRLVGGDSAGVVTAFYLSSNNAEHDEIDFEFLGNRTGQPYILQTNVFTGGKGDREQRIYLWFDPTKGYHSYSVLWNTFQIVIFVDDVPIRAFKNSKDLGVKFPFNQPMKIYSSLWDADDWATRGGLEKTDWSNAPFTASYTSFHVDGCEAATPQEVQVCNTKGMRWWDQKAFQDLDALQYRRLRWVRQKYTIYNYCTDRKRYPTLPPECTKDRDI

SEQ ID NO: 8054 - protein, 151 aa, Dendrobium sp. XMW-2002-9
MEEDGILINYIANHGEGVWNNLAKSAGLKRTGKSCRLRWLNYLRPDVRRGNITPEEQLLIMELHARWGNRWSKIARQLPGRTDNEIKNYWRTRIQKKVKNGDAVDYSSQMIIDEACTSHTSSIEEGMAQQNYPVHPNTNPEGYRLQTTRVN

SEQ ID NO: 8055 - protein, 446 aa, Listeria monocytogenes str. 4b H7858
MAKFTYDVVIIGSGASGTTVAFEAQAAGLKVAIVEERSWGGTCVLRGCDPKKVLVGAREARNLSTRLRGKGIKQAATISWTDLMAFKETFVENVPESRLENFQEAGIETFFGAASFQDSHSLQVGDDLIQANKIVIATGATPSTLKVEGQEYIQTSDDFLSLEKLPDSVVFIGGGYISFEFASIALATGREVHIIHHNSEPLKKFDPDFVAALVSNMKEEGIHFHFDTDITKVENKGEKLHIHGKDGFSLQTDLIIGATGRKPNIAHLSLENANIDYTKKGIIVNEKLQTTNNPHIYACGDVAATKGAPLTPVVSMEAAFVAKNVIGGDEKMIYPAIPSVVFTSPKLASIGISAEEAKAHPEKYQIKNHDTTNWYTYKRTNEQIALAKIIEDRESGQIKGAHFLSEEADYMINYVAILMKANLTLADLQSVIFAYPSPASDLTALN

SEQ ID NO: 8056 - protein, 220 aa, Dendrobium sp. XMW-2002-10
MGRSACCEKAHTNKGAWTKEEDERLIAHIRTHGEGCWRSLPKAAGLLRCGKSCRLRWINYLRPDLKRGNFTDEEDELIIKLHSLLGNKWSLIAGRLPGRTDNEIKNYWNTHIRRKLLNRGIDPATHRPVSTATASNLTMSFSSGSSVKDKRTSSSSSSSRVGRISALLPRCPDLNLDLCISPSLEEQMPQDLLVEESNCGGEFLRLGSSFLLDYRSLEMK

SEQ ID NO: 8057 - protein, 212 aa, Pseudomonas syringae pv. syringae B728a
MIKAVIFDMDGVLIDAKEWHYDALNKALNLFGYNISRHEHLTAYDGLPTSRKLDMLSVERDLPVALHAFINEMKQQYTMEIVYAQCKPTFVHQYALSSLKTLGYKLAVASNSIRNTVEVMMNRADLDQYLDLRLSNEDVRHAKPAPDIYTKAISQLGLRPEECLIVEDNENGIKAARDSGAHVLVVAETCDVNLNNILGKVEQINFDKAAVL

SEQ ID NO: 8058 - protein, 258 aa, Glycine max
MAINHETWAFIFGLLGNVISFMVFLAPLPTFYQIYKKKSTDGFQSLPYIVALFSSMLWIYYALVKKDASLLLITINSFGCVIETIYLAIFLIYAPSKTRLWTIKLLLMLNVFGFGGMLLSTLYLTTGSKRLSVIGWICLVLNISVFAAPLCIMKRVIKTKSVEFMPFSLSFFLTINAVMWFFYGLLLKDYYIALPNTLGFLFGIIQMVLYLIYRNAKPQGLEEPTKVQELNGHIIDVVKPNHVTKNGPVPVIETASNV

SEQ ID NO: 8059 - protein, 376 aa, Zea mays
MGRAPCCEKVGLKRGRWTAEEDQLLANYIAEHGEGSWRSLPKNAGLLRCGKSCRLRWINYLRADVKRGNISKEEEDIIIKLHATLGNRWSLIASHLPGRTDNEIKNYWNSHLSRQIHTYRRKYTAGPDDTAIAIDMSKLQSADRRRGGRTPGRPPKASASRTKQADADQPGGEAKGPAAAASSPRHSDVVNPGPNQPNSSSGSTGTAEEEGPSSEDASGPWVLEPIELGDLVWGEADSEMDALMPIGPGGTTRLPSKGLARSAERPRWTTCSTWTGMASRPICGAGRSRTSTARSCGRPPSRWKLLLLLLLRRRPAPRTIASWRRSRLGSCPTRSDGSGHRTDQTDQPRWPGHMVDAASRRCSCVQFFFLFCRFCS

SEQ ID NO: 8060 - protein, 584 aa, Pseudomonas aeruginosa UCBPP-PA14
MGYVKPYIGMFLLSIVGFLIFASTQPMLAGILKYFVDGLSNPDAALFPNVQWPWLRDLHLVYAVPLLIILIAAWQGLGSFLGNFFLAKVSLGLVHDLRVALFNKLLVLPNRYFDTHSSGHLISRITFNVTMVTGAATDAIKVVIREGLTVVFLFLYLLWMNWKLTLVMLAILPVIAVMVTTASRKFRKQSKKIQVAMGDVTHVASETIQGYRVVRSFGGEAYEEKRFHDASQSNTDKQLRMTKTGAVYTPMLQLVIYVAMAILMFLVLWLRGDASAGDLVAYITAAGLLPKPIRQLSEVSSTVQRGVAGAESIFEQLDEAAEEDQGSVEKERVSGRLEVRNLSFRYPGTDKQVLDDISFVAEPGQMIALVGRSGSGKSTLANLVPRFYQHNDGKIMLDGVEVEDYRLRNLRRHIALVTQQVTLFNDSVANNIAYGDLAGAPREEIERAAKAANAKEFIDNLPQGFDTEVGENGVLLSGGQRQRLAIARALLKDAPLLILDEATSALDTESERHIQAALDEVMKGRTTLVIAHRLSTIEKADLILVMDQGQIVERGSHAELLAQNGHYARLHAMGLDEQAPAPVG

SEQ ID NO: 8061 - protein, 292 aa, Zea mays
SCGGLRISLDRTRHEAATRRQSPSGCDDQSERCFSSCGNLGNACGSPFPDDGYGVVGMEADADADADEEMMACGGGGEKKRRLSSEQVRALERSFEVENKLEPERKARLARDLGLQPRQVAVWFQNRRARWKTKQLERDYSALRQSYDALRHDHDALRRDKDALLAEIKELKAKLGDEEAAASFTSVKAEPAASDGPPPVGVGSSESDSSAVLNDADPPVAEAPVPEVRGTLLDAPGAVAANHGGVFFHGSFLKVEEDETGLLDDDEPCGGFFSVEQPPPMAWWTEPTEHWN

SEQ ID NO: 8062 - protein, 870 aa, Clarkia breweri
MQLITNFSSSSSELQFLVDKVKRESLSSSSSNTQNLFLSTSPYDTAWLALIPHPHHHHHHGRPMFEKCLQWILHNQTPQGFWAAAGDNISDTDDDVTLDCLLSTLACLVALKRWQLAPDMIHKGLEFVNRNTERLVMKQKPSDVPRWFTIMFPAMLELAGASSLRVDFSENLNRILVELSQNRDDILTREEVDEKKQYSPLLLFLEALPAQSYDNDVLKQIIDKNLSNDGSLLQSPSATARAYMITGNTRCLSYLHSLTNSCSNGGVPSFYPVDDDLHDLVMVNQLTRSGLTEHLIPEIDHLLLKVQKNYKYKKASPKSLYSIAAELYRDSLAFWLLRVNNHWVSPSIFCWFLDDDEIRDHIETNYEEFAAVLLNVYRATDLMFSGEVQLVEARSFATKNLEKILATGNIHKTNADISSSLHKMIEHELRVPWTARMDHVENRIWIEEIASSALWFGKSSYLRLSCFHKMSLQQLAVKNYTLRQLVYRDELAEVERWSKERGLCDMGFCREKTGYCYYAFAASTCLPWSSDVRLVLTKAAVVITVADDFFDVEGSMVDLEKLTDAVRRWDAEGLGSHSKTIFEALDDLVNEVRLKCFQQNGQDIKNNLQQLWYETFHSWLMEAKWGKGLTSKPSVDVYLGNAMTSIAAHTMVLTASCLLGPGFPVHQLWSQRRHQDITSLLMVLTRLLNDIQSYLKEEDEGKINYVWMYMIENNQASIDDSVRHVQTIINVKKQEFIQRVLSDQHCNLPKSFKQLHFSCLKVFNMFFNSSNIFDTDTDLLLDIHEAFVSPPQVPKFKPHIKPPHQLPATLQPPHQPQQIMVNKKKVEMVYKSYHHPFKVFTLQKKQSSGHGTMNPRASILAGPNIKLCFS

SEQ ID NO: 8063 - protein, 154 aa, Xanthomonas campestris pv. campestris str. ATCC 33913
MSQFDLTPPSPAQRDALIAGLSDEEQRVLLHHGTEAPFCGVFLDNKLDGVYTCRLCGLPLFRSNAKFDSGTGWPSFFAPYDPAHVREIRDTGYGMIRTEIVCARCDSHLGHVFPDGPPPTGERHCLNSVSLAFTEDGQPLPNPLQRAGADTQPA

SEQ ID NO: 8064 - protein, 246 aa, Glycine max
  misc_feature (184)..(184): Xaa can be any naturally occurring amino acid
  misc_feature (199)..(199): Xaa can be any naturally occurring amino acid
  misc_feature (215)..(215): Xaa can be any naturally occurring amino acid
  unsure (1)..(246): unsure at all Xaa locations
MQIFVKTLTGKTITLEVESSDTIDNVKAKIQDKEGIPPDQQRLIFAGKQLEDGRTLADYNIQKESTLHLVLRLRGGMQIFVKTLTGETITLEVESSDTIDNVKAKIQDKEGIPPDQQRLIFAGKQLEDGRTLADYNIQKESTLHLVLRLRGGMQIFVKTLTGKTITLEVESSDTIDNVKAKIQXDKEGIPPDQQKLDLXAGKQLEDGRTLADYNXFQKESTLHYVLTCRGGMQTYFNTLTVKTTTL

SEQ ID NO: 8065 - protein, 175 aa, Triticum aestivum
MAPTVMASSATSVAPFQGLKSTAGLPVSRRSNGASLGSVSNGGRIRCMQVWPIEGIKKVETLSYLPPLSTEALLKQVDYLIRSKWVPCLEFSKVGFIFREHNASPGYYDGRYWTMWNLPMFGCTDATQVINEVEEVKKEYPDAYVRIIGFDNMRQVQCVRFIAFKPPGCEESGKA

SEQ ID NO: 8066 - protein, 138 aa, Glycine max
MEEESKEKKKDTKEEPRYRGVRRRPWGKFAAEIRDPARHGARVWLGTFLTAEEAARAYDRAAYEMRGALAVLNFPNEYPSCSSMNSSSTLAPSSSSSNSMLKSDHGKQVIEFECLDDKLLEDLLDCDDYAYEKDLPKN

SEQ ID NO: 8067 - protein, 343 aa, Vibrio fischeri ES114
MKIKALSKLKPEEGIWLTEVEKPEMGHNDLLIRIKKTAICGTDVHIYNWDEWSQKTIPVPMVVGHEYVGEVVGIGQEVRGFEIGDRVSGEGHITCGHCRNCRGGRTHLCRNTTGVGVNRTGAFSEYLVIPAFNAFKIPAGISDDLASIFDPFGNAVHTALSFDLVGEDVLITGAGPIGIMAAAVAKHVGARHVVITDVNEYRLDLAKKMGVTRAVNVMNEKLEDVMSELGMTEGFDVGLEMSGNPSAFNSMLTNMNHGGKISLLGIPPSDMTVDWNQVIFKGLVIKGIYGREMFETWYKMASLIQSGLDLTPIITHHYKIDDFQAGFDMMRSGMSGKVILDWE

SEQ ID NO: 8068 - protein, 398 aa, Vibrio fischeri ES114
MSSAFYTQIQNQIEEVKNEGLYKSERIITSAQKASVSISTGQEVLNFCANNYLGLANHPALIEAAKDGMDEHGFGMASVRFICGTQDSHKELEQKLSTFLGKEDTILYTSCFDANAGLFETILGAEDAIISDALNHASIIDGVRLCKAMRFRYANNNMTELEEQLIAAKEAGARHTLIVTDGVFSMDGVVANLPAICDLADKYDALVMVDDSHAVGFMGENGAGTHEYHDVIDRIDIITGTLGKAMGGASGGYTSGKKEVIDWLRQRSRPYLFSNSVAPAIVSASIRVLDLLAESGDLRSKLWENSAHFRTRMEAAGFTMGGADHAIIPIMLGDAKIAVEFAERALEKGIYVIAFSFPVVPKGQARIRTQMSAAHTREQLDRAIDAFIEVGKDMEIIK

SEQ ID NO: 8069 - protein, 317 aa, Brassica napus
MATLKVSSHVPSPSEDAEQLKSAFDGWGTNEDLIISILAHRSAEQRKLIRQTYHEACGEDLLKTLDKELTSDFERAILLWTLEPGERDALLANEATKRWTSSNQVLMEVACTRTSTQLLHARQAYHARYKKSIEEDVAHHTTGDFRKLLVSLVSSYRYEGDEVNMTLATQEAKLIHEKIKDKHYSDEDVIRILSTRSKAQINATFNRYQDEHGEEILKSLEEGDEDDKFLGLLRSTIQCLTRPELYFVDVLRSAINKTGTDEGALTRIVTTRAEIDLKVIGEEYQRRNSIPLEKAITKDTRGDYEKMLVALLGEDDA

SEQ ID NO: 8070 - protein, 582 aa, Vibrio fischeri ES114
MTIEKDESTWATFKRLWPHISLYKAGLGVAVVALVINALSDTYMISLLKPLLDEGFGSADSDFLKKMPFIILAMMFIRGLSGFVSGYCMSWVASNVVMRIRRQIFNHFMHMPVSYFDQESTGRLLSRITYDSEQVAAATSKALVNIVRESASIIGLLGLMFWNSWQLSLVLVVIAPVVAFAISNVSKRFRKISKNMQTAMGSLTATSEQMLKGHKVVLSYGGQKVESERFDNISNHMRQQNMKMVVAQGLANPIIQMIASFALVTVLYLASVDSIKETLTPGTFTVVFSAMFGLLRPLKGLTSVTSDFQRGMAACQTLFELMDMDKEKDDGTIEKDTVKGDIKVDNVTFTYPTADGPALRNVSFDLPAGKTIALVGRSGSGKSTIANLFTRFYDVDSGEISLDGDKIEDYRLPNLRKHFALVSQNVHLFNDTVANNIAYASEGKFTRLEIEKAAELAYASDFINKMDDGFDTMIGENGASLSGGQRQRIAIARALLQNAPVLILDEATSALDTESEKAIQSALDELQKDKTVLVIAHRLSTIEDADQILVVDEGEVVERGNHAELIAHDGAYAQLHRIQFGD

SEQ ID NO: 8071 - protein, 368 aa, Oryza sativa
EGDSMGLNGKWRKAMPYMAMVFLQFGFAGLFLISVASLRQGMSHYVLVVYRNAVAAVVMAPFALWFERKTRPKMTLSVFFKIMALGLLEPVLDQNFFYMGAKNTSASFSSALTNILPAVTFVNAIILRMERISIKERRSQAKIAGTLITVGGAMLMILFKGPVINFPWTKNANHNISDSSDHNNGHWLMGIFMILLSCFCWSAFFILQSYTLRGYPAELSLTTLICAMGVAQSGAVALVMERDIKAWLIGFDMRLFTAVYSGIMCSGVAYYVQGMVIKERGPVFVTAFSPLCMIIVTILGSFILCEVVTLGRVIGAIIIVVGLYALIWGKNKDHGNQVDQDDNFEKQKTFELPLSTTNVNEARSPNHI

SEQ ID NO: 8072 - protein, 112 aa, Glycine max
MESQQANREELDEKARQGETVVPGGTGGKSLEAQEHLAEGRSRGGQTRKQQLGSEGYHEMGTKGGQTRKEQMGREGYQEMGRKGGLSTMDKSGGERAEEEGIEIDESKFKIT

SEQ ID NO: 8073 - protein, 599 aa, Haemophilus influenzae 86-028NP
MQTVNVDIAIVGAGGGGLRAAIAAAEANPNLKIALVSKVYPMRSHTVAAEGGAAAVIKEEDSYDKHFQDTVAGGDWLCEQDVVEYFVQHSPVEMTQLERWGCPWSRKADGDVNVRRFGGMKIERTWFAADKTGFHLLHTLFQTSIQYPQIQRFDEHFVLDILVDDDHARGMVAMNMMEGSLVQINANAVVIATGGGCRAFKFNTNGGIVTGDGLSMAYRHGVPLRDMEFVQYHPTGLPNTGILMTEGCRGEGGILVNKDGYRYLQDYGLGPETPIGKPQNKYMELGPRDKVSQAFWQEWKKGNTLKTAKGVDVVHLDLRHLGEKYLHERLPFICELASAYEGVNPVNEPIPVRPVVHYTMGGIEVDFNSETRIKGLFAVGECASSGLHGANRLGSNSLAELVVLGRVAGEYAAQRAVEAQSVNQSAVDAQAKDVVARLEALHKQEGNESWSEIRDEMGTVMEEGCGIYRDQASMQKAVDKIAELKERYKRIRVSDNSSVFNTDVLYTVELGYILDVAQSIANSAIERKESRGAHQRLDYTERDDVNYLKHTLAFYNENGAPRIEYSPVKITKSQPAKRVYGAEAEAQEAAAKAKEQANG

SEQ ID NO: 8074 - protein, 615 aa, Cytophaga hutchinsonii
MCGITGFISIKWGSDELHSMTRRLQHRGPDAEGFYINESVHLGHRRLSILDLSVAANQPFFSKDKRYVMVFNGEVFNYKELAVKYAIPTDTTSDTEVILELFALQGPAAFQEFNGMFAIAIWDTYEKKLTLLRDRFGIKPVCYYDGPDGFGFASEIKSLLELPIPRLINSEALADYLFLEYIPKPNTIFQNIKKLTNGCYLEVTDGVRVAVKAFYDIREKYDPKPLKEKEGLEEFHHLLSDAVKSRMISDVPIGAFLSGGVDSSLVVSKFQENSTLPVETFTIGFDEKQYDESAYAKKVSELLKTNHHEYRLPAEDVFSVLKDAIEFYDEPFAVSSVLPSLLISKVSRQHTTVALTGDGADELFMGYNTYYWYNRIETLKRIGGKASLKLAGNIFKMFGGKPAIKSRLFEGWADKHPYINLWSQEQQMFTQQEIGKLLNYRYTHETTIPYWESLEKISLNNEQAVSFFDIQHYLADDLMYKMDIASMRHGLEVRCPFLDYNLVEFAVNLPLELKINNGTQKYILKKALEKYIPQSLIYRTKWGFSAPSEEWLKRSHTYLIDHYLDPARISAQGIFNAQEIQKLIASFRSGHYYHGKRLWSLVIFQLWYEQYMVAK

SEQ ID NO: 8075 - protein, 338 aa, Saccharophagus degradans 2-40
MQVYYDKDCDLSIIQGKKVAIIGYGSQGHAHACNLKDSGVDVTVGLRTGSSSVAKAEAHGLKVADVATAVAAADVVMILTPDEFQSVLYKEEIEPNIKQGATLAFAHGFAIHYNQVVPRADLDVIMVAPKAPGHTVRSEFVKGGGIPDLIAIFQDASGTAKEVALSYASGVGGGRSGIIETTFKDETETDLFGEQAVLCGGAVELVKMGFETLTEAGYAPEMAYFECLHELKLIVDLMYEGGIANMNYSISNNAEYGEYVTGPKVINEESRKAMRQALKDIQQGEYAKNFILEGQSNYPSMTAWRRNNAAHPIEQVGGKLRAMMPWIESNKIIDKTKN

SEQ ID NO: 8076 - protein, 433 aa, Psychrobacter arcticus 273-4
MAKSSGTRFMKLAGMTASIAGKAAKNSLKHLSSDEEKRLQARSELMQDVGIQIAETLGEMKGAVMKVGQIASQYKDVFPPEVATALEKLQKDAPAMPYAQIRAQVERELKAPINELFTEFEEVPFAAASIGQVHRAILPSGQRVVVKVQYPDVDKNCDSDLKQVRMALKIAGVLNMSKQLQEQLFHEIRQSLHDELDYIKEAHNLRVFGAFHAEDTGLIIPKVISSHSSKRILTLTEESGETLTVAATWDNDIKQKIAVRLFHFTAGQLFGLYRMHCDPHPGNFAFRPDGSVVAYDFGGIRSYSDSEVQLFRRFAKHALKGDVTALEQDLVALDIRREDNKTIPGDFYGKWLEIGLKPLSIKPYQDGTFDFASSQTHHEAIAQMRTSLKYFGQFQPSASTMMLDRTISGQYWNLVHLGVTIDLSPLVHEYIDF

SEQ ID NO: 8077 - protein, 478 aa, Streptococcus pneumoniae
MDDNGYDIADYQAIAAIFGTMEDMDQLIAEAKKRDIRIIMDLVVNHTSDEHAWFVEACENTDSPERDYYIWRDEPNDLDSIFSGSAWEYDEKSGQYYLHFFSKKQPDLNWENEKLRQKIYEMMNFWIDKGIGGFRMDVIDMIGKIPDEKVVNNGPMLHPYLKEMNQATFGDKDLLTVGETWGATPEIAKLYSDPKGQELSMVFQFEHIGLQYQEGQPKWHYQKELNIAKLKEIFNKWQTELGVEDGWNSLFWNNHDLPRIVSIWGNDQEYREKSAKAFAILLHLMRGTPYIYQGEEIGMTNYPFETLDQVEDIESLNYAHEALEKGVPIEEIMDSIRVIGRDNARTPMQWDESKNAGFSTGQPWLAVNPNYEMINVQEALANPDSIFYTYQKLVQIRKENSWLIRADFELLDTADKVFAYIRKDGDRRFLVVANLSNEEQDLTVEGKVKSVLIENTLAQEVFEKQILVPWDAFCVELL

SEQ ID NO: 8078 - protein, 538 aa, Helicobacter pylori 26695
MDRAKFIFVTGGVLSSLGKGISSSSIATLLQHCNYQVSILKIDPYINIDPGTMSPLEHGEVFVTSDGAETDLDIGHYERFLNRNLTRLNNFTTGQIFSSVIENERKGEYLGKTIQIVPHVTDEIKRRIKSAAKGLDFLIVEVGGTVGDMEGMFYLEAIRQLKLELGNEKVINVHVTLIPYIQTTNELKTKPTQHSVQELRRLGVTPQIILARSPKPLDKELKNKIALSCDVEQDSVIVATDTKSIYACPILFLQEGILTPIARRFNLNKLHPKMAAWNTLVEKIIAPKHKVKIGFVGKYLSLKESYKSLIEALIHAGAHLDTQVNIEWLDSENFNEKTDLEGVDAILVPGGFGERGIEGKICAIQRARLEKLPFLGICLGMQLAIVEFCRNVLGLKGANSTEFNQRCEYPVVYLIGDFMDQNHQKQVRTYNSPLGGTMRLGEYECEIMPNSLLEKAYKKPSIKERHRHRYEINPKYRQEWENKGLKVVGFGSNHLIEAIELEDHPFFVGVQFHPEFTSRLQSPNPIILDFIKSALSKS

SEQ ID NO: 8079 - protein, 357 aa, Zea mays
  misc_feature (40)..(40): Xaa can be any naturally occurring amino acid
  misc_feature (214)..(214): Xaa can be any naturally occurring amino acid
  unsure (1)..(357): unsure at all Xaa locations
MPSLSCVREVERRIAGNLNMEYLPMGGSVKMIEESLKLAXGEDSDFIKDKRIATAQVLSGTGACRLFADFQKRFLPDSQIYIPTPTWSNHHNIWRDAQLPQKTFTYYHPESIGLDFSRLMNEIKNAPDGSFFLLHACAHNPTGVDPTEEQWREISHQFKVKKHFPFFDMAYQRLVSGDPQRDAKAIRIFLEHGHQIGCAQSYAKNMGLYGLRAXCLSILRDDEMLAVADKSHLLQIARPMNSNPPDHGALVVSIILSDPELKSLWLKEVKGMADRIIGMRKALKENLEKLGSPLSWDHITNQIGMFCYSGMTPEQVDRLTNESPIYMTRNGRISMVGVTTGNVGYLANAIHEVTKPN

SEQ ID NO: 8080 - protein, 609 aa, Glycine max
  misc_feature (368)..(368): Xaa can be any naturally occurring amino acid
  unsure (1)..(609): unsure at all Xaa locations
MATVTASSYAVSGSACHSHRGASRREAKVNSLAQVSLNYDGLRSLNKLHVRTTRAAKTKTLLSAKSNKSGHDGVLGRIKCGMNMIFVGTEVAPWSKTGGLGDVLGGLPPALAGNGHRVMTVSPRYDQYKDAWDTSVTVEVKIGDRIETVRFFHCYKRGVDRVFVDHPCFLEKVWGKTRSKLYGPSAGVDYEDNQLRFSLLCQAALEAPRVLNLNSNKYFSGPYGDDVIFIANDWHTALLPCYLKSMYQTRGIYQNAKVAFCLHNIAYQGRHAFADFSLLNLPREFKGSFDFTDGHVKPVKGRKLNWMKAAILESDRVLTVSPYYAQELVSGEERGVELDNIIRSCGITGIVNGMDNREWSPKTDKFIXIYTYDATTVTEAKLLLKEALQAEVGLPVDRNIPLIGFIGRLEEQKGSDILVEAIPMFIDQNVQIMILGTGKKVMEKQIEQLEEIYPDKVRGVAKFNGPLAHKIIAGADFIVIPSRFEPCGLVQLHAMPYGTVPIVSSTGGLVDTVQEGYTGFHMGAFNVECEAVDPVDVEKLATTVKRALGTYGTPAMTQMIQNCMAQDFSWKGPAKQWEKVLLSLEVAGSEPGIDGDEIAPLAKENVANP

SEQ ID NO: 8081 - protein, 400 aa, Bordetella pertussis Tohama I
MSTLFASVELAPRDPILGLNEQYNADTRPGKVNLGVGVYYDDEGRIPLLQAVRKAEVARIEAAAARGYLPIEGIAGYNKGAQALLLGADSPLAAEGRVLTAQALGGTGALKIGADFLRQLLPQSKVLISDPSWENHRALFERAGFPVETYAYYDAATHGLNFEAMLAALQAAPEQTIVVLHACCHNPTGVDPTPQQWEQIAAVVKARNLVPFLDIAYQGFGEGLEQDAAVVRMFAALDLTMFISSSFSKSFSLYGERVGALTVVAGSKDEAARVLSQLKRVIRTNYSNPPTHGGTVVSTVLNTPELFALWENELAGMRDRIRLMRKELVEKIKTQGVAQDFSFVLAQRGMFSYSGLTAAQVDRLREEHGIYAVSSGRICVAALNSRNIDAVAAGIAAVLK

SEQ ID NO: 8082 - protein, 588 aa, Ustilago maydis 521
MKQQSMAISATAGPSRVQPSTTRLKTGGKNAGIGGLPGGVVGPEAAGLDPSGPEHFFVTLAAYADALDALPLDLTRSFSDLRELDAVLGSHLNSLTARLNHLTALIEDPDIDQGQRLLALKEVAEEARAYKMGGEDKIRVALNTAETIISHTDYIDALDAQLDRFGEISTLLNPTKHLKLDQYYVPGQLKDRKLISSLETSTSSAGGAADANGVSGSKKKKVAAHVAAVSAAGGKSHKSADAASAMGSAAVPAGSSNSKKRKAISGAAIGGSSSGGSAKVAKTSGAGKGDEDVKSAANGSSSHKKKTDSSSHCTGASGSKASQSNSNTRLPRAAHAHIGYIEDDEDGPSGRKDATSRRAAGDNDESSSRNRNSRAIRASAAAQRSDDEDEDVDDGDVEEEEETHTRSNAKSRGRAGGRAGASNSRARGAAVATAASPHTGSTSASRADSPASNTGGGGDDADEARYCFCNNVSYGDMIGCDDDDCEREWFHLGCVGLTKPPQGTWYCEACLERRAANGRGSKAKKAKSAGGSKSKLVIRSVTGADSRFAPKLGACCGVLLFSEMQGAAGSGSLAGVKSAESQTGLRKS

SEQ ID NO: 8083 - protein, 412 aa, Candida albicans SC5314
MLSPKSTNQEAPATAPLDDINTTKDVSMVDVSKAEGENQQPPRRKSTIILTDEIDLDRMNIDNKESDKSNEQGDKMHIDRSLSNLNQQQHSQSSQSEPSQPEQQQQQQQQQQQQQQQPVAPDANIAVPVDIKWVQGGQKVYVTGSFTGWRKMIGLVKQPDDNFMITLGLPVGTHRFRFVVDNELRFSDFLPTATDQMGNFVNYIEITPENVQQHLLQEKEESNNESQQQELEKQQAKTGDKTSSQQASRRSSVSRSRSNSMWGLTNDDDDMGDGYSRYHDDESNALDEKTYQYIKDIPPIFTDPKVMEQYYVAIDKQSRNNNGQQQAWLHPPQLPPHLESVILNNFNNTENNSGALPIPNHVVLNHLATTSIKHNTLAVASIVRYKRKYLTQVLYAPLQQASSSSTTQEQQS

SEQ ID NO: 8084 - protein, 334 aa, Pyrococcus abyssi GE5
MIGEIYYSRKFLLHKPDNYHPENPGRLWLVLTAIRELGLENHVLEPSPIGEELIYRIHEREYVEKIRELSRRGGGYLDADTYVSPRTWEAAILALGASRLATLSALRYGGMNLALVRPPGHHAGRRGKALGAPTLGFCIFNNSAMAALTSKEETGKALVIDFDAHHGNGTQEIFWDDADVVHIDLHERDIYPGSGDVGEIGGINAKGSKINLPMPHYSEDGDYIYAWEEVVIPIVEEVKPKVVIVSAGFDGFKGDGLTTLKLTEVFYSYAGATLRKYPLAVILEGGYSSGLKKGFPAFIRGYEEDKVRDHAQPSYETLKLVEEVKDILSPWWSL

SEQ ID NO: 8085 - protein, 420 aa, Streptomyces cinnamonensis
MTQRRVAITGIEVLAPGGLGRKEFWQLLSEGRTATRGITFFDPAPFRSKVAAEADFCGLENGLSPQEVRRMDRAAQFAVVTARAVEDSGAELAAHPPHRIGVVVGSAVGATMGLDNEYRVVSDGGRLDLVDHRYAVPHLYNYLVPSSFAAEVAWAVGAEGPSTVVSTGCTSGIDAVGIAVELVREGSVDVMVAGAVDAPISPIPCVLDAIKATTPRHDAPATASRPFDSTRNGFVLGEGAAFFVLEELHSARRRGAHIYAEIAGYATRSNAYHMTGLRDGAEMAEAIRLALDEARLNPEQVDYINAHGSGTKQNDRHETAAFKKALGEHAYRTPVSSIKSMVGHSLGAIGSIEIAASALAMEYDVVPPTANLHTPDPECDLDYVPLTARDQRVDSVLTVGSGFGGFQSAMVLTSAQRSTV

SEQ ID NO: 8086 - protein, 467 aa, Leptospira interrogans serovar lai str. 56601
MSAEFDVVVIGAGPGGYVCAIRCAQLGFKTAIIEKRKTLGGTCLNVGCIPSKALLDSSEEYHKTLHKLEVHGISVGKVDLDLNKLMNRKDQIVKEVTDGVDFLMNKNKIKRYEGFGKVLSAGKVEVAFNDGKKETLSAKHIVVATGSVPIDIPGLTVDGKNIITSDHAIDVRKLPKKMIIIGAGVIGLELGSVWGRLGTSVTVVEFLPGLISNVDRQMGSLLERSLTSQGMEFLFEHKVKGAATTKNGVKVQIEDSKGESKDLEADVVLVAVGRRPFLEGVGLEEAGVAFTQRKRIQVDAHFKTSVPGIYAIGDAIDGPMLAHKAEEEGVALAELLAGQSGHVNYNAVPYVIYTWPEMAWVGKGEEELKAAGIEYKVGKSLFRPNARSKAMNEAEGQVKILADKKTDKLLGAFVFGPRASDMVAELAVAMEFGASAEDIARSFHAHPTLSEVIKEAAMAVDKWAIHA

SEQ ID NO: 8087 - protein, 472 aa, Polaromonas sp. JS666
MPELEPREYALSHFCPGYPKPREKRSSVWALFRSARNSWIDALYARSYSMQMGEVHLPGVDLYMVNDPALVRRMLSGQPDQFPKSPLLADALRPLLGDSILTTNGDQWQRQREMMNPAFAQAKLDVAFPVMRAAADDLVERLTEAAQRGSELNIEVELTHVTADIIYRTIFSEPLSGDDAHKVFDAFARFQALAPKLMLPSMYGVRWLVWPWNVWQSRRAASDIRRLLEKLIRSRHEAWLRGDDLGKNDILSALMTSRDRKTGEPFSFDELVDQVAVLFLAGHETSASALTWAVYLLSAVPEVQERVHQETCRVFGQRTPEQRDMKALVLTRNVFRETLRLFPPVGFMARESAQTCPMRDKMVPKGASVMISPWLIHRHRERWSDPDAFNPDRFDDDASRESIRQSYLPFGMGPRVCLGAAFALQEATLILASLIRAFRLETVTGHTPMPVGRLTIRSDNGVRLRIFKREDQ

SEQ ID NO: 8088 - protein, 176 aa, Synechocystis sp. PCC 6803
MKRRYLLEVGTASLGAFWLAQYVNSTNQSQPQLKSELEPQIMPKTNEVFEVTKTDAEWQQQLSPEAYKVLRKHGTERAGTSPLDKNYDLGTYECAGCELPLFSSETKFNSGTGWPSFYAPLENAVAYTVDKSFFMTRTEVHCARCGGHLGHVFDDGPQPTGKRYCMNGVSLKFVGA

SEQ ID NO: 8089 - protein, 357 aa, Glycine max
MLCLRLPLLRPKSTFPPSDFCYNYYQYKHIVGMARFSLDEISDTGAFVRSASTFRNWISRDPNSLFPPESGRYHLYVSYACPWASRCLAYLNIKGLDKAISFSAVKPIFERTRESDEYKGWIFPESETEVPGAEPDRFNGAKTIRELYEIASENYAGKYTVPVLWDKKLKTIVNNESSEIIRMFNTEFNNIAENPTLDLYPTDLKAQIDDTNEWIYDSINNGVYKCGFAKKQEPYNEAARQLYGALDKCEDILSKQRYICGNTLTEADIRLFVTLIRFDEVYAVHFKCNKKLLREYPNLFNYTKDIFQIPGISSTVNMEHIKLHYYGSHPSINPFGIVPVGPNIDYSAPHDRERFSA

SEQ ID NO: 8090 - protein, 531 aa, Zea mays
MDPYKHRPSSAFNAPYWTTNSGAPVWNNDSSLTVGARGPILLEDYHLVEKLANFDRERIPERVVHARGASAKGFFEVTHDITHLTCADFLRAPGVQTPVIVRFSTVIHERGSPETLRDPRGFAVKFYTREGNWDLVGNNFPVFFIRDGIKFPDMVHALKPNPRTHIQDNWRILDFFSHHPESLHMFSFLFDDVGIPADYRHMDGSGVHTYTLVSRAGTVTYVKFHWRPTCGVRSLMDDEAVAVGGANHSHATKDLTDAIAAGNFPEWTLYIQTMDPEMEDRLDDLDPLDVTKTWPEDAFPLQPVGRLVLNRNIDNFFAENEQLAFCPGLIVPGIYYSDDKLLQTRIFSYSDTQRHRLGPNYLLLPANAPKCAHHNNHYDGSMNFMHRHEEVDYFPSRYDAVRNAPRYPIPTAHIAGRREKTVISKENNFKQPGERYRAMDPARQERFITRWVDALSDPRLTHEIRTIWLSNWSQADRSLGQKLASRLSAKPSITLVEDRTRPKQHRHCIHGYCAEAELLVSVECLAGFPSE

SEQ ID NO: 8091 - protein, 478 aa, Vibrio sp. Ex25
MMQQIKNETLKSVFKQWSSEEGIVVINPATEQELVRLKPSSLEELDTLIGQCKTEQVRWAKLSAKERSRRLKKWYQLLLDNAEDIATIITLEQGKPLTESKGEVMYGASFVEWFSEEAKRAYGEVIPAPTTDRRLSAIRQPVGVCAAITPWNFPIAMITRKAAPALAAGCGMLIKPSELTPLTAIAVVELAYQAGIPKELLPVVVSEQAAEFGQVLSTDPRIKKVSFTGSTRVGKILMKQASDSVKAVSMELGGNAPFIVFDDADLDAAAEGLVASKFRNAGQTCVCTNRLYVHEDVKQAFIEKVLSKLNKLQLGNGLEKGVTLGPVITMASKHRLEAVIDQAVQEGASIANSPQRRSGRFMEPVLLDSVKQYMSIVQQELFGPVLPIITFENDEQVLGMANDTEYGLACYFYTNNFKRIVAFSEGLEYGMVGVNEGIISTEVAPFGGVKESGVGREGAKQGLDEYLETKYICLGGLS

SEQ ID NO: 8092 - protein, 582 aa, Zea mays; identical to SEQ ID NO: 880

SEQ ID NO: 8093 - protein, 203 aa, Brassica napus
MSYKKLPVDVQPGHTILCADGSISLAVLSCDPKSGTVRCRCENTAMLGERKNVNLPGVVVDLPTLTEKDVEDILKWGVPNKIDMIALSFVRKGSDLVNVRKVLGSHSKSIMLMSKVENQEGVLNFDEILRETDAFMVARGDLGMEIPIEKIFLAQKMMIYKCNLAGKPVVTATQMLESMIKSPRPTRAEATDVANAVLDGTDC

SEQ ID NO: 8094 - protein, 127 aa, Glycine max
  misc_feature (114)..(114): Xaa can be any naturally occurring amino acid
  unsure (1)..(127): unsure at all Xaa locations
SLSGHSSGIDSVSFDSSEVLVAAGAASGTIKLWDLEEAKIVRTLTGHRSNCTSVDFHPFGEFFASGSLDTNLKIWDIRKKGCIHTYKGHTRGVNAIRFTPDGRWGCSCGEDKYXKVWDLTAGKLLHD

SEQ ID NO: 8095 - protein, 380 aa, Clostridium perfringens str. 13
MNCNKTIYTPGPTNLRENVRRARALKTTNPDVDLNFVEFYKETCDRFGEIINTKNDCYILSGEGILGLEAACASLTEKGDKVLVLDNGLYGRWFDGFVTMYGGEVTYFSGDYTKEIDVEALSKFLEKNNDFKYATVVHCDTPTGVLNPVDKICPLLKSYGILTVVDSVSAMVGEEFKVDKWQIDIALGGSQKAFSAEPGLTMVSISDDARKVMENRETPIIGFYCNLNIWKNYYKDKWFPYTMPISDIISLRIAIDNILEEGKEKVIERHRKIGEATRKAVKEYGLDLFLKNGYSNTVTAVEIPEEIGALNLRNHLNKEYNVLMSTSLDKYEDKLLRIGHMGENANIEDITYVLNTIDKALKDLGFSSEKHLDKLFIENI

SEQ ID NO: 8096 - protein, 214 aa, Triticum aestivum
  misc_feature (8)..(10): Xaa can be any naturally occurring amino acid
  misc_feature (14)..(14): Xaa can be any naturally occurring amino acid
  misc_feature (21)..(21): Xaa can be any naturally occurring amino acid
  misc_feature (24)..(24): Xaa can be any naturally occurring amino acid
  misc_feature (36)..(37): Xaa can be any naturally occurring amino acid
  misc_feature (39)..(39): Xaa can be any naturally occurring amino acid
  misc_feature (42)..(42): Xaa can be any naturally occurring amino acid
  misc_feature (52)..(53): Xaa can be any naturally occurring amino acid
  misc_feature (66)..(66): Xaa can be any naturally occurring amino acid
  misc_feature (68)..(68): Xaa can be any naturally occurring amino acid
  misc_feature (77)..(77): Xaa can be any naturally occurring amino acid
  misc_feature (82)..(83): Xaa can be any naturally occurring amino acid
  misc_feature (91)..(91): Xaa can be any naturally occurring amino acid
  misc_feature (122)..(122): Xaa can be any naturally occurring amino acid
  misc_feature (135)..(136): Xaa can be any naturally occurring amino acid
  misc_feature (140)..(140): Xaa can be any naturally occurring amino acid
  misc_feature (157)..(158): Xaa can be any naturally occurring amino acid
  misc_feature (163)..(163): Xaa can be any naturally occurring amino acid
  misc_feature (167)..(167): Xaa can be any naturally occurring amino acid
  unsure (1)..(214): unsure at all Xaa locations
MAPTVMAXXXTSVXPFQGLKXTAXLPVSRRSNGASXXSXSNXGRIRCMQVWXXEGIKKFETLSYLXPXNTEALLKQXDYLIXXKWVPCLEXSKVGFIFREHNASPGYYYGRYWTMWKLPMFXCTDATQVINEVEXXKKEXPDAYVRIIGFDNMRQVXXVSLIXFKPXGCEERGLKQNSPGQHIKVFAGFFDFWGCFLSHLFLVPKKNIGKGPFG

SEQ ID NO: 8097 - protein, 572 aa, Debaryomyces hansenii CBS767
MLRSVRPSLKKTTISLARNLSHKELKFGVEGRAALLKGVNTLADAVSVTLGPKGRNVLIEQQFGSPKITKDGVTVAKSITLQDKFEDMGAKLLQEVASKTNESAGDGTTSATVLGRSIFTESVKNVAAGCNPMDLRRGSQAAVEAVVSFLQNNKKEITTSEEIAQVATISANGDKHIGDLLASAMEKVGKEGVITVKEGKTLEDELEVTEGMRFDRGFISPYFITNTKSGKVEFENPLILLSEKKISSIQDILPSLELSNQQRRPLLIIAEDIDGEALAACILNKLRGQVQVCAVKAPGFGDNRKNTLGDIAILSGGTVFTEELDLKPENATIDLLGSCGSITITKEDTVVLNGEGSKENIQARCEQIRTSVDDIQTTEYEKEKLQERLAKLSGGVAVVRVGGTSEIEVSEKKDRYDDALNATRAAVQEGILPGGGTALIKASRVLDDIKATAANFDQKLGVDIIKSAITKPARRIIENAGEEGAVIVGKIYDEPNFNHGYDSSKGEFTDMIAAGIIDPFKVVKNGLVDASGVASLLATTECAIVEAPEPKGSPAPPAGGMPGMGGMPGMGF

SEQ ID NO: 8098 - protein, 1022 aa, Clostridium perfringens str. 13
MLFQINERKNIVNGLCEKLEKAIYNVVAPLEIDMYITKEPVSYENRLTGEHKKGVIGESWGELWDCGWFNFKGEVPKSYEGEKIVLLIDISGEAFVVDKNGNPMRGLTTLNSEFDLSLGMPGKREVPMFERAEGGEVINIWADCACNDLFGKYRDNGIIKDAYIATCNEEVKALYYDVEVLHELMNQLPGDSARYHTILNALYEASKVLSIKTGMSGCDFLKDGVVTQQEVTILNEEEVKKAREILKKELDKKGGDPSLSVSAIGHAHIDLAWLWPIRETIRKGARTYSTVLANMEKYSEYVFGASQPQLYQWMKEYYPDLYGRIKEKIEEGRWEAQGGMWVEPDTNVPSGESLVRQLLYGKRYFREEFKKEMDTLWLPDVFGYSAALPQILKKSGVDYFMTIKLSWNNHNQFPHHTFVWEGLDGSRVLSHMPPEGTYNSSAAPRAVAKSEKAFLDKGLSDECLMLFGIGDGGGGPGEEHLERLRRERNINGIAPVKQEPSSNFFKRIEKDIDKYSVWSGELYLEKHQGTYTTHGKNKKYNRKMEIALKNLELAAMQAKVLGKGEYPQEEIEKVWKEVLLYQFHDILPGSSIGRVYDESVEAYEKMLANVEGMTEKLYRDILESADSKEEGAILVNSLSWSREQWIKLYDRWTKVNLNSLSGEIIKKEEIEPYCEISTLKVSENNLENGLVKVEFNENGTIARIFDKELNKEVLRDEKGNELRVYEDNGDAWDFSGVYEDRPSEIFELVKSEVIVDGPKATIKQNYKYGDSTLVQEISILEGSKRIDFKTKVDWKENGKMLRTSFNTNVYTREADCEIQFGTIKRPTHGNTSWDMAKGEICAQRWIDLSQRDYGVALINDSKYGHNVSETKIDLNLLRSPGYPDPNADRGEHEFTYCLFPHRGDYIEGNVVHEAHEVNAPIQVIYSENLGENLVKEAMASIDCENVIIDTIKKAEDGDQMIIRLYECHGEDAKAKVNINVPYEKVEMVNLIEDSIDGKELNKETMHLTFKPFEVHTLKVTLK

SEQ ID NO: 8099 - protein, 459 aa, Photobacterium profundum SS9
MTRQHSDIEIPRNSDLIYRLEDRPPLPQTLFAATQHLLAMFVAVITPSLIICQALGLPASDTNTIVSMSLFASGIASFIQIRTFGPIGSGLLSIQGTSFNFLGPIIGAGLALKAGGADVPTMMAAIFGTILVASLTEVFISRVLQHAQRVITPLVSGIVVTLIGLTLIQIGLTSVGGGYAAINDGSFGSLENLMLAGTVLGFIVLLNRFKNPYLRVSSIVLAMAAGTVLAWFTGMLNAPQETQHAFMAIPMPMQYGLGFDWGLLIPLVIVFAITSLEAIGDITATSETSEQPVAGPLYLKRIKGGVLADGINSAMASVLNSFPNSTFSQNNGIIQLTGVASRYIGYFVAGMLVLLGLFPGVANLVQLIPEPVLGGATIVMFGTIAASGIRIISRCDLDRRAILIMALSFSMGLGIAQKPEILQFMPDWVKGILSSGMAAGGITAIILNLVLPEEKKNTD

SEQ ID NO: 8100 - protein, 344 aa, Helicobacter pylori 26695
MALLFTGACGYIGSHTARAFLEKTKENIIIVDDLSTGFLEHLKALEHYYPNRVVFIQANLNETHKLDAFLNKQQLKDPIEAILHFGAKISVEESTHLPLEYYTNNTLNTLELVKLCLKHAIKRFIFSSTAVVYGESSSSLNEESPLNPINPYGASKMMSERILLDTSKIADFKCVILRYFNVAGACMHNDYTTPYTLGQRTLNATHLIKIACECAVGKRKKMGIFGTNYPTRDGTCIRDYIHVDDLANAHLASYQTLLEKNKSEIYNVGYNQGHSVKEVIEKVKEISNNDFLVEILDKRQGDPASLIANNAKILQNTSFKPLYNNLDTIIKSALDWEEHLLRFQ

SEQ ID NO: 8101 - protein, 611 aa, Pyrococcus abyssi GE5
MCGINGFSWGDEELVKRMNDAIRHRGPDDEGVYVDDNVSLGHVRLAIIDLSPKGHQPMKYEKDGKEVWIVYNGEIYNFMEIRKELEEKGYTFTSNTDTEVILAAYLEWGFDCVERFNGMWAFVIYDKSKNILFLSRDRFGIKPLYYYYDGKNIIFSSEIKGILQHNIPRKPNDAVIFDFLYYNLLDHTEDTFFEGIKRLMPGYNAVFDLNTRKFEAWKYYDLRERIEKRKEISDPQGFKDLFLRAVKMRLVADVPVGSCLSGGLDSSSIVCAMRHLLPDGEIKVFSLVFPGKEIDESKYQRIVVDECRVSWYRTTFNVEDVLADIIDLIRTQEEPFSTLSIYGQYRVMKLARENGMKVLLDGQGSDEILAGYHYFFGYYFVELLRKFKWGKLLREILAYKRIHGSLVPLKNMVLYILPVWVTKRLWRRRFPYLREEFIEKFKKRPSKELIWKIKTLNEALLLAETYYSLPHLLRFEDKNAMRWSIESRVPFCDHELVEYVLSLPPESKVSAGITKVLLRKGLKGILPDEIRNRASKVGFATPDKDILKTNEGQKFALAVIDSESFKKRPYWDYRKVLRMFEEHVSGKKNWSQELWKVIIMELWLREWMDNG

SEQ ID NO: 8102 - protein, 136 aa, Bordetella pertussis Tohama I
MAYSSKVLDHYENPRNVGSFDKGDDSVGTGMVGAPACGDVMKLQIKVNEAGVIEDARFKTYGCGSAIASSSLVTEWVKGKTLDEAMNIRNTQIAEELALPPVKIHCSILAEDAIKAAVQDYKTKHGAETPEAVAAN

SEQ ID NO: 8103 - protein, 269 aa, Arabidopsis thaliana
MELWTEARALKASLRGESTISLKHHQVIVSEDLSQTSSLPEDFSVECFLDFSEGQKEEEEEVVSVSSSQEQEEQEHDCVFSSQPCIFDQLPSLPDEDVEELEWVSRVVDDCSSPEVSLLLTQTHKTKPSFSRIPVKPRTKRSRNSLTGSRVWPLVSTNHQHAATEQLRKKKQETVLVFQRRCSHCGTNNTPQWRTGPVGPKTLCNACGVRFKSGRLCPEYRPADSPTFSNEIHSNLHRKVLELRKSKELGEETGEASTKSDPVKFGSKW

SEQ ID NO: 8104 - protein, 458 aa, Aeropyrum pernix K1
MRGPVKIVATVGPSSSSASILAQMLSLGVDVARINASHGGVEQWNSMLESLRRAEEAVGKRVGVAVDLEGPRVRTGNSEPVKLEKGDLVTLGFMEGDVPVDARQFFETIDEGDIVLLDDGKIILQVESVEGFRVKARVLEGGVLGPRKGVVVRGKEPDLPPLSAKDRRALEFFADKGVSHVYVSFARSAEHVEKVRTVVRRLGLRQARIFAKIEGPSGVSRIGEIAEASDGVIIARGDLGMHYSLEELPEIQELIVWEARKRYKTVVLATEFLSSMIEKPVPTRSEVVDIYQAVLQTADALMLTGETAIGKYPVKSVQWMAKISSRAYKKLATSPPERPRPTSTPYKLALGLVELAESLDSPLVVYSKTGRFAERLASFKPLKTFYVGVPSREVERVVRHLWGAEPIVVGDYPYEAGLAKTYEKLRRENIIHGDETVVEAAWSSERGIYIIRVRNLEF

SEQ ID NO: 8105 - protein, 98 aa, Arachis hypogaea
MAAVGAPREVAGNENSLEIDSLARFAVDEHNKKQNGLLEFKRVISAKQQVVAGTLHHITLEAASGDSKNVYEAKVWEKPWMNFKEVQEFKLAGDGSNA

SEQ ID NO: 8106 - protein, 186 aa, Oryza sativa
MKRLTFGAEPEMVDSASIAQEVMLLLARSGGGGAGYVVGHGGEAPRVFECKTCRRRFPSFQALGGHRASHKRPRGGGGGGAAAAVAAAAGEGEAGVALSLAAGTPAVKASRAHGCAVCGVEFALGQALGGHMRRHRIAGAEADEAVSARGGEPAPERNPREARGVVGLDLNAAPADDTGLLLVDCL

SEQ ID NO: 8107 - protein, 355 aa, Arabidopsis thaliana
MVRASSSKKGGSKGGDKDDAESKQRKRLKTLALDNQLLSDSPAKSHSSLKPTKQVLKHHGTDIIRKSQRKNRFLFSFPGLLAPISAATIGDLDRLSTKNPVLYLNFPQGRMKLFGTILYPKNRYLTLQFSRGGKNVLCDDYFDNMIVFSESWWIGTKEENPEEARLDFPKELAQAENTEFDFQGGAGGAASVKKLASPEIGSQPTETDSPEVDNEDVLSEDGEFLDDKIQVTPPVQLTPPVQVTPVRQSQRNSGKKFNFAETSSEASSGESEGNTSDEDEKPLLEPESSTRSREESQDGNGITASASKLPEELPAKREKLKSKDSKLVQATLSNLFKKAEEKTAGTSKAKSSSKA

SEQ ID NO: 8108 - protein, 551 aa, Haemophilus influenzae R2846
MAAKDVKFGNDARVKMLKGVNVLADAVKVTLGPKGRNVILDKSFGAPTITKDGVSVAREIELEDKFENMGAQMVKEVASKANDAAGDGTTTATVLAQAIVNEGLKAVAAGMNPMDLKRGIDKAVSAVVSELKNLSKPCETAKEIEQVGTISANSDSIVGQLISQAMEKVGKEGVITVEDGTGLEDELDVVEGMQFDRGYLSPYFINKPETATVELDNPYLLLVDKKISNIRELLPVLEGVAKAGKPLLIIAEDVEGEALATLVVNTMRGIVKVAAVKAPGFGDRRKAMLQDIAILTAGTVISEEIGMELEKATLEDLGQAKRVVINKDNTTIIDGIGDEAQIKGRVAQIRQQIEESTSDYDKEKLQERVAKLAGGVAVIKVGAATEVEMKEKKDRVDDALHATRAAVEEGIVAGGGVALVRAAAKVAASLKGDNEEQNVGIKLALRAMEAPLRQIVTNAGEEASVVASAVKNGEGNFGYNAGTEQYGDMIEMGILDPTKVTRSALQFAASVAGLMITTECMVTDLPKDDKADLGAAGMGGMGGMGGMGGMM

SEQ ID NO: 8109 - protein, 754 aa, Campylobacter coli RM2228
MKNSIISYPRIGANRELKFAIEKYFKAQSSKEELLETAKNLRARHWKDIQNAGIDFIPSNDFSLYDNVLDAAVLFNITPKRYKDLNLDPLDEYFAQSRGYQGKNGDTIALAMKKWFNTNYHYLVPECDDASIIALSGDKIFKEYLEAKELGIETKPVLVGIFTLFKLIAFKDENTKQLAKDKLLQAYIELLKKLNSLGVAWLELDEPYLVYDLNQEDIALFEEFYKELLKHKGEVKILLQSYFGDLRDIYTKLLESDFDALGLDFVEGKESLNLIQKHGFANDKILFAGIVNGKNIYANDYAKSLKLIKELQKYTQNIVINTSCSLLHVPYSTEFETKLDSSYLKLFSFAKEKLKELQDLKAIINSNEENPLFKANQELFKNIPNRLDEKVKARLQTLKKEDFVRKPEFKERIQIQKEFLELPVLPTTTIGSFPQSADVRSNRLAFKQEKISAQNYTEFNQQKIKECIQIQEEIGLDVLVHGEFERNDMVEYFGENLKGFLFTQNGWVQSYGTRCVKPPVIWGDVSRTKPITLAWSKFAQSLSKKIVKGMLTGPVTILNWSFPREDISLKESTEQIALALRDEVLDLENAGIKIIQIDEAALREKLPLRKSDWHSEYLDWAIPAFNLVHSGVKTKTQIHTHMCYSEFSDILKEIDAMDADVISFEASRSNLNLLDTLKAVNFQTEVGPGVYDIHSPRVPSVEEISSTIEKILNKLPKEQIWINPDCGLKTRGYEEVVAALKNLVIATQKIREKL

SEQ ID NO: 8110 - protein, 600 aa, Dunaliella salina
  misc_feature (276)..(276): Xaa can be any naturally occurring amino acid
  unsure (1)..(600): unsure at all Xaa locations
MLRCAQPKYAPLKRQAFNQKLNRLVAAARTPSKSSSTSRMASTSSGQQGRSILWFRKGLRLHDNPALRDACTGSAAVFPIFIIDPYFLQKSNNKVGVNRYQFLLESLSDLNSSLTSLGSQLLVLRGTPEEVIPRVLRDWSIKKLCYEIDTEPYAKARDARVDDMAREAGVEVKKHWSHTLYDTDMLVRENKGKAPLTMQAFEKLVDRVGHPLTALPAPTARLPPVDVSLPGIKDAEVGVPTWQEMGFKEAPTAIFKGGETEALKRLEHYMKDTKWXASFEKPSTDPSAFTEPSTTALSPYLKFGCLSARFFHQRLLDVYRLHPKHSQPPMSLRGQLLWREFFYTLGSHTPNFDRIAGNPICRQITWDTNPALLKAWRDGATGYPWIDAAMTQLREWGWMHHLARHSVACFLTRGDLYLSWESGKEVFEELLLDADYFINAANWMWLSASAFFAQYFRVYSPVVFGKKYDKEGAYIRKFLPVLKDMPAKYIYEPWTAPKEVQQRANCIIGRDYPAPIVDHAVASKECIARMGAAYKATNTGGSAGKASPAKAASSGDAGTSASAGAPSSSKKTTGKRAASADQGGKRQKTLEESMTKKRCQ

SEQ ID NO: 8111 - protein, 74 aa, Arabidopsis thaliana
  misc_feature (5)..(5): Xaa can be any naturally occurring amino acid
  misc_feature (48)..(48): Xaa can be any naturally occurring amino acid
  unsure (1)..(74): unsure at all Xaa locations
QPDYXKLANALCTDHTIKLLTLPTATTLVQWPGPCQIDYEANATRLLXCSSLVIKITFRTQRALNIVKNHLHST

SEQ ID NO: 8112 - protein, 410 aa, Trichodesmium erythraeum IMS101
MITTSEIYPYTEDTLQSNNLQNECSEHLGQTINELTIEDKKVDSSQINTNYSGRDSVRSYLQEIGRVDLLQRDQEVSTAQKVQRYVHLLELRNKAAEQEQEIQRYVEMIKIRDRLAARLGHKPSFERWLKAGNLSMAELKEIIAVGKLRWAKLTGLNVKELEQIQTEGIEARHQMISTNLRLVVSIAKKYQNRGVELLDLIQEGTLGLERAVEKFDPQRGYRFSTYAYWWIRQGITRAIATQSRTIRLPIHVSEKLNKIKKVQQKIFQEKGYTAKVEEIARELKITAAQVREVLVKIPHSVSLETKVGRDRDTELGELLETKDASPEEMLIRESLVQALKELLLDLTQRERYVITMRYGLEDGRACSLSEIASALKLSRERVRQIEVKALHKLRQPKFRNQIQDYLESLN

SEQ ID NO: 8113 - protein, 500 aa, Arabidopsis thaliana
MLYFILLPLLFLVISYKFLYSKTQRFNLPPGPPSRPFVGHLHLMKPPIHRLLQRYSNQYGPIFSLRFGSRRVVVITSPSLAQESFTGQNDIVLSSRPLQLTAKYVAYNHTTVGTAPYGDHWRNLRRICSQEILSSHRLINFQHIRKDEILRMLTRLSRYTQTSNESNDFTHIELEPLLSDLTFNNIVRMVTGKRYYGDDVNNKEEAELFKKLVYDIAMYSGANHSADYLPILKLFGNKFEKEVKAIGKSMDDILQRLLDECRRDKEGSTMVNHLFSVQQQQREYYTDVIIKGLMMSMMLAGTETSAVTLEWAMANLLRNPEVLEKARSEIDEKIGKDRLIDESDIAVLPYLQNVVSETFRLFPVAPFLIPRSPTDDMKIGGYDVPRDTIVMVNAWAIHRDPEIWEEPEKFNPDRYNDGCGSDYYVYKLMPFGNGRRTCPGAGLGQRIVTLALGSLIQCFEWENVKGEEMDMSESTGLGMRKMDPLRAMCRPRPIMSKLLL

SEQ ID NO: 8114 - protein, 428 aa, Saccharomyces cerevisiae
MKDANESKSYTIVIKLGSSSLVDEKTKEPKLAIMSLIVETVVKLRRMGHKVIIVSSGGIAVGLRTMRMNKRPKHLAEVQAIAAIGQGRLIGRWDLLFSQFDQRIAQILLTRNDILDWTQYKNAQNTINELLNMGVIPIVNENDTLSVREIKFGDNDTLSAITSALIHADYLFLLTDVDCLYTDNPRTNPDAMPILVVPDLSKGLPGVNTAGGSGSDVGTGGMETKLVAADLATNAGVHTLIMKSDTPANIGRIVEYMQTLELDDENKVKQAYNGDLTDLQKREFEKLKALNVPLHTKFIANDNKHHLKNREFWILHGLVSKGAVVIDQGAYAALTRKNKAGLLPAGVIDVQGTFHELECVDIKVGKKLPDGTLDPDFPLQTVGKARCNYTSSELTKIKGLHSDQIEEELGYNDSEYVAHRENLAFPPR

SEQ ID NO: 8115 - protein, 539 aa, Triticum aestivum
  misc_feature (234)..(234): Xaa can be any naturally occurring amino acid
  misc_feature (243)..(244): Xaa can be any naturally occurring amino acid
  misc_feature (248)..(248): Xaa can be any naturally occurring amino acid
  misc_feature (338)..(338): Xaa can be any naturally occurring amino acid
  misc_feature (455)..(455): Xaa can be any naturally occurring amino acid
  unsure (1)..(539): unsure at all Xaa locations
DLKCHGSRHITSPGPRLAMDKAYIAILTIAFLFLIHYVLGNGRRGGKGAAQLPPSPPAIPFLGHLHLLEKPFHAALRRLAARLGPVFSLRLGSRRAVVVSSAECARECFTEHDVTFANRPRFPSQLLVSFDGAALVTSSYGPHWRNLRRVAAVQLLSAHRVACMSGVIAGEVRAMARRLFRAAAGVPPAAMAPARVQLKAEAPPSFSLKVLMETIAQTPGTRAEGPNADRAGAXSSSRKGWWXXAHPXHLGAANTWDYLPVLRWFDVFGVRNKILAAVSRRDAFLHRLIDNERRRLDHAGTEGDKKSMIAVLLNLQKTEPEVYTDTMITALCANLFGXAGTETTSTTTEWAMSLLLNHPAALRKAQAEIDAAVGTSRLVTADDVPRLAYLQCIVSETLRLYPAAPMLLPHQSSADCKVGGYNVPSGTMLMVNAYAIHRDPAVWERPLEFVPERFXENGKAEGRFMIPFGMGRRRCPGETLALRTIGMVLATLVQCFDWERVDGAEVDMTEGGGLTIPKVVPLEAVCRPRPAMRDVLQSL

SEQ ID NO: 8116 - protein, 248 aa, Campylobacter coli RM2228
MLARLIVLPELYDSAYCVEDQDEKFSLNLHQAHPNLDALQKLAKNYQAYIVACSIEKDTQLYDSAYIISHKGLLGVYRKIYLWGNEKERFARGDKYPIFELEFENFKLKLGLQICYEIGFSEGSRFLALQGAEIICFPSAFGKARTYVWDLASRSRALENGVFVLAANRSGSEISKINNETLTFAGKSKIINPKGEIIKEILEEEGFIIAELDLEEVQIQRKNLPYLKDLNLKLNQEILTNIHLNTKE

SEQ ID NO: 8117 - protein, 452 aa, Synechocystis sp. PCC 6803
MENTDEKKGNILLVDDLPNNLQLLSDLLINLGYTVRSVTSGKMALRTLQVKRPDLILLDIKMPDMDGYQVCEMIKKEEELQDIPIIFISALGDTFDKVKAFECGGVDYITKPFQIEEVVARIEGQFTIQRQRIALKREVRKRREAEEVLYQSRALLSSVLNSALDGIAAMQAVRNPQTGDIEDFRCLVINPILSKAFNRSREDLIGRVLLKRFLQRLDPQLFDQFVNLVETGTFLTQDIYFPIANSDWYHFVAVKLGDGFAVTVRDITDRKRMELELQAANQQLQLLANIDGLTHIANRRRFDEYLAQEWQRHCREQKPLSLILVDIDYFKAYNDLYGHQKGDDCLQKVANTLVDIAKRITDLVARYGGEEFVIVLPNTNRQDALAMAENMLQAIAALAIPHEGSSVSKYVTISIGVSSIIPMPEDTIERIISEADQALYSAKSQGRNRAIA

SEQ ID NO: 8118 - protein, 834 aa, Synechocystis sp. PCC 6803
MQINNHVFKGLADFRSVSWQRQIIVAIAIYGTIYISQLFITYAGTASSPIWIPTGMAVGFLSIWGYQVWPGMVGGLLLGEIMALHGLESAANFILTVAITGVVSLVNLFSVYLSDILTANNYLFSKIKNIIRFIVFVCFGSRLPAAIICPFLLYLFEKISFGLYSEIAYTWLLSDAFALLIVTPFIIACNHNFKVFIKLLQEQWLEAASIIFFILLIVKIIANGYPIEYLLIPFLLWSAFRFTEVGSSLLTIVVSALLVLILALDQEKAAIKDQLLLLQSILACISMTTLVLNAVLSENERSKNQLFTTNQILIEQNQKLQELYQQRELERAQREKILIEYNESLQKQVDLVRAKEIAESEAKAKSTFVANMSHELRSPLNAIIGFSQLMLRTKNLPMEQYENAGIIQRSGEYLLNLINNILDFSKIEAGKTHLNRHNFDLYLLLDDLEDMLHLKAANEGIELIFIRDHDLPRYVYGDEIKLRQILLNLLSNAIKFTTEGEVVLTSNFRNAEQQEVINPETSTEPKNKYWLDFTIKDTGKGISEVELSHLFEAFSQTESGRNAQEGTGLGLAITRQFIKLMGGDINVSSVVDQGTTFSFSILVDLGEITLSREPNSAKKVLALTPGQPVYKILVVDDKSVNRQLLIKLLAPFGFEIEEASNGQEAIALWESWEPHLIFMDMRMPVMDGYEATKYIKGQVKGNATAVVALTASVLEEEKAIVLSAGCDDFLRKPFRENTIFDSLTKHLGVTYVYESAPNKNDNHEDTALKPESFLIMSQDWLTQLSHYLLEADTEQVMKLIAEIPASESELEQNLTKLVRRFEFEKILDLIEPLS

SEQ ID NO: 8119 - protein, 212 aa, Sulfolobus solfataricus P2
MYRAIFVDFGNTLVGFKPAFYEKLQTILREHGYDVDIRRVFRAYVKAMAVNNYSQPTDIKEFLYNLNIPPSDRLISHIRGSDIRDGEAFIYDDVMEFLETIRSTNTKLILLSNSSPRTKKLLEELGLVKYFDDLVLSHEIGIVKPNPKIFAIAILKGGYPALHIGDIYEIDYVGARRSYVDAILLDRYDFYPEIKEKVRNLREIIPMVTKNL

SEQ ID NO: 8120 - protein, 402 aa, Azoarcus sp. EbN1
MLDAYIYAGLRSPIGRHAGKLAAVRPDDLVATVIREVLARSPFQGADVEDVILGCAAQGGEDSRNVARHAALLAGLPVTVAGQTINRLCGSGLAAVLDSARAVTCGEGDLYVAGGVESMSRAPFVVAKAESAYSRDFKVFDTTIGARFPNPRLVEEYGNDSMPETGDNVAAEFGITRDAADRFAAASQAKYAAAKEAGFYAGEILPISVPTGRKTPPLVVAEDEHPRPGSTYESLAKLKPLFADGVVTAGNASGINDGAAALIVGSRAAGERAGAAPMARILGGAVAGVEPRIMGVGPAYAIPKALARAGLTLKDMDVIELNEAFASQVLSCLKLLDVAFDDPRVNPNGGAIAIGHPLGASGARIALSAARELERRGGRYAVVSLCIGVGHGIALVIERVPT

SEQ ID NO: 8121 - protein, 474 aa, Clostridium perfringens str. 13
MYIDFYKNIFLVRGLIMIITRDKRFYRLLFSIALPIAVQNLITFMVSMVDTLMVGDLGEIQLSAVSIANNLFFVLTILMFGLAGGSNIMISQYWGKGNVKTIHKILAIMYRVCLLITGIFIFIALFLPKYFMGIFTTDKAVIDFGASYLRIVCIGYLFYSITNCTIMMLRSVKTVSISIIVYTASLVVNSILNWIFIFGNLGAPELGIRGAAIATVCARITEFSIVLVFMFIYERKIGLKIEHLLKLDKEILKDYVGLCTPVLCNELLWAIGASMISVIVGRMGTEVVAANSINGVAHQFVTVFIFGMSNATAVIIGNTIGEGKKEKAKEYAYSIGIFSVVMGCISGLMILLIKPFVVNFYNVSYSTKLIAMEIMTVTSGIIVFQSLASNFMMGVLRGGGDAKFVLINDLIFMWLVAIPGGFFVAFVLELPVALVFLVIKCDEILKSLTSVYRVISGKWVNDVTKDYEFEEVKC

SEQ ID NO: 8122 - protein, 95 aa, Zea mays
  misc_feature (3)..(3): Xaa can be any naturally occurring amino acid
  misc_feature (8)..(8): Xaa can be any naturally occurring amino acid
  misc_feature (10)..(10): Xaa can be any naturally occurring amino acid
  misc_feature (14)..(14): Xaa can be any naturally occurring amino acid
  misc_feature (37)..(37): Xaa can be any naturally occurring amino acid
  misc_feature (39)..(39): Xaa can be any naturally occurring amino acid
  misc_feature (45)..(45): Xaa can be any naturally occurring amino acid
  misc_feature (52)..(52): Xaa can be any naturally occurring amino acid
  misc_feature (57)..(57): Xaa can be any naturally occurring amino acid
  misc_feature (63)..(63): Xaa can be any naturally occurring amino acid
  misc_feature (66)..(66): Xaa can be any naturally occurring amino acid
  misc_feature (68)..(68): Xaa can be any naturally occurring amino acid
  misc_feature (72)..(72): Xaa can be any naturally occurring amino acid
  misc_feature (84)..(85): Xaa can be any naturally occurring amino acid
  misc_feature (91)..(91): Xaa can be any naturally occurring amino acid
  misc_feature (93)..(94): Xaa can be any naturally occurring amino acid
  unsure (1)..(95): unsure at all Xaa locations
FFXNGCLXKXCNIXHSLIGVCSRLSSGCKLKDSVMMXAXIYKTKXEASKLLXAGKVXVGIGRXTKXRXCFIXMIARFGKTVVFXXRKGIHXAXXP

SEQ ID NO: 8123 - protein, 456 aa, Clarkia breweri
MAHDQSLSFEVCRRKPELIRPAKQTPHEFKKLSDVEDQEGLRFQIPVIQFYKHNNESMQERDPVQVIREGIARALVYYYPFAGRLREVDGRKLVVECTGEGVMFIEADADVTLEQFGDALQPPFPCFDQLLFDVPGSGGILDSPLLLIQVTRLKCGSFIFALRLNHTMADAAGIVLFMKAVGEMARGAATPSTLPVWDRHILNARVPPQVTFNHREYEEVKGTIFTPFDDLAHRSFFFGSTEISAMRKQIPPHLRSCSTTIEVLTACLWRCRTLAIKPNPDEEVRMICIVNARSKFNPPLPDGYYGNAFAIPAAVTTAGKLCNNPLGFALELIRKAKREVTEEYMHSVADLMVATGRPHFTVVNTYLVSDVTRAGFGEVDFGWGEAVYGGPAKGGVGVIPGVTSFYIPLRNRQGEKGIVLPICLPSAAMEIFAEALNNTLNGKEIEIAKHFTQSSL

SEQ ID NO: 8124 - protein, 217 aa, Thermoplasma acidophilum DSM 1728
MNINDVKRAVSEIKEKSPQRKFEESVEIAVNLKDVDMSNPKNRINEEILLPNGRGKDVKIAVFGSDELKSKARGVADFVFGAEDISKFAEDKKAFKKIVNQAYFFIAEATLMANIGKSLGQVLGPRGKMPRPIPPGQDPAPLIKNLKNTVKARSRNALTFHVPVGTRSMDADKISENIMTVINRITGKLERGASNIRSIYVKTTMGNAVEIKAGDEK

SEQ ID NO: 8125 - protein, 745 aa, Legionella pneumophila str. Lens
MLDRASLVDEQFLKRVLQGDFPQLRSSMSPDTAELDKKTAIEFFDSQIKSRLLDIIARQLKEKGLSFYTIGSSGHEGNAVLGQVFRASDMAFLHYRSGAFFLQRAKQLPGIDGVKDILLSLVAAASDPISGGRHKVFGSVPLNIPPQTSTIASHLPKALGAALSITRARELGLPSKLTPDSVILCSFGDASTNHATSQATLNACSWITQQNYPLPIVFICEDNGIGISVPTPSSWIKSSVSSRPGIHYIECDGLNIADVFAKAQEADYLARVKKQPVFLHMRCVRLLGHAGSDIESQYNTQEEIEQREANDPLLHTAGILYREGWMSLQAMVELYQDNRALIEAKALEAIREPRMSSAEEIMASIVPRIDKKQKYSLPDDNRRAQVFAGAYNQLTLKRNLCQQINFALTDLMMQYPNMLIFGEDVGKKGGVYRVTADLQARFGQRRVFDTLLDETTIIGTAIGLAHNGFIPVPEIQFLAYLHNAEDQLRGEASTLSFFSSGQYQNPMVLRIASLAYQKGFGGHFHNDNSIAVLRDLPGVIVACPSNGPDAAKMLRTCMRLAYEEGRVVVFLEPIALYMTKDLYRPGDNGWLFEYPSPDGMISQGEVGVYGEGDTVILTYANGYYLSRQAEKVLRQAHNISVKIIDLRWLSPLPKDAILKEIAKAKRILIVDEGRQSGSISEGLMTLLMEEASPRLKIKRITGKDCFIPLGTAWQYLLPSQESIIDAVIALQSDKREKESGRLVVS

SEQ ID NO: 8126 - protein, 76 aa, Brassica napus
  misc_feature (11)..(11): Xaa can be any naturally occurring amino acid
  unsure (1)..(76): unsure at all Xaa locations
VTNSRDTREVXLGQGLKIVKIFKEHTSKTCILDDFSFYEVRQKTILEKKAKQHQTQKQVSEEKTTTDGEKGRPATG

SEQ ID NO: 8127 - protein, 505 aa, Escherichia coli K12
MCLDSFINVNGCFLLWRAKGETLMSAIDSQLPSSSGQDRPTDEVDRILSPGKLIILGLQHVLVMYAGAVAVPLMIGDRLGLSKEAIAMLISSDLFCCGIVTLLQCIGIGRFMGIRLPVIMSVTFAAVTPMIAIGMNPDIGLLGIFGATIAAGFITTLLAPLIGRLMPLFPPLVTGVVITSIGLSIIQVGIDWAAGGKGNPQYGNPVYLGISFAVLIFILLITRYAKGFMSNVAVLLGIVFGFLLSWMMNEVNLSGLHDASWFAIVTPMSFGMPIFDPVSILTMTAVLIIVFIESMGMFLALGEIVGRKLSSHDIIRGLRVDGVGTMIGGTFNSFPHTSFSQNVGLVSVTRVHSRWVCISSGIILILFGMVPKMAVLVASIPQFVLGGAGLVMFGMVLATGIRILSRCNYTTNRYNLYIVAISLGVGMTPTLSHDFFSKLPAVLQPLLHSGIMLATLSAVVLNVFFNGYQHHADLVKESVSDKDLKVRTVRMWLLMRKLKKNEHGE

SEQ ID NO: 8128 - protein, 174 aa, Pyrococcus abyssi GE5
MEGFTIWLTGPSGAGKTTLAVKLAKKLREMGYKVEILDGDTIRKTLYPNLGFSKEAREMHNRIVIYMAKLLTRNGVIAIVSLISPYKRIREYARKEIGRFMEVYVYAPLEVRIKRDPKGLYAKAIRGEIRGLTGYDGVYEEPENPEVKVDSSRMTPDEEAELVIRKAKELGYLP

SEQ ID NO: 8129 - protein, 1023 aa, Schizosaccharomyces pombe 972h-
MNAQPFHNNTSDVQSFQDIISNSYQKPLSLVDSTDRALPDSSLSSLSRSTFQFHKHHLSGNENPQPSSESPYFTNNERLNSSSFPQIHDNQLSPSFNTSYQAIPSSSSNRSRGGPYTPSIRDDSLLALLSFSSNHRLHSMPSQLQPFNNASSYTTPMAPFTASFSNKVSHSAYPTRRLPSQAKKTSAIERVPVNLNFLQSDNLVVQSSPQTNFENFEFPKKIPSKEDLETREVLLLPPQTSKLSNKNLDTKSFTDVNKISQQGFVEISSNSSKVTPNTSLHQSFGIASSSSNNYMQTSSELTSSTEKMNGSHPLQLSNKSLLSIHLMQSKNQGHVSMTGSDKLSSHVQSETENAPVSKPSKPNTLTEDEKPLQSTKLPGNSLTVGELYQEPKSIQLPELSVSRTTYSAQSSSVKNCNERIPSAKALKKQKHLVPENKSKLQYVWQKKESLPYANLTSASNTHFFLSENQNDTSERLTRTLRKSTKNYTFGSYILGRTIGTGEFGKVKLGWPLPKANSTIHRSTPQVVIKIVLSTKQNCQTSRLMREVAILKGLGNNHPHIVKYLDFVKTKHHFGIVLDYVNGGELFDYILARRRLEDSVACRLFAQLISGVAYLHSRGVVHRDLKLENILLDTNRNIVIADFGFATTFGHFNTLSEHSLPTEKPDLFSTSCGSPCYAAPELVNCKSGMYAGTQADIWSCGVILYAMLAGYLPFDDDPHNPNGENVPRLYRYICSTPLIFPEFFKSKARDILKKILVPDPAKRVRMSAIMNHAYLRSHVSLFETYNDDEATSLRPSPIRLLSQKSLASVSSVSSISTYSSSIELTPQITKTSLNREKPALHGSINLKHSTRPVVPIADGIYASTTLHPIDNAKNRLVSLLRRPKHKVKHAKVETRESPMKNKPTKKQHKRAFSMFERPTSQKAPLSPVESKINLMVAPKRVLNCASDSLRALLAGKTDKSFWGSRIPFLFNKLKSKQKAVSSSFNTENSFLILQAVSPLTFGGCFKEENAYGQKKQHMRHATVF

SEQ ID NO: 8130 - protein, 431 aa, Streptomyces venezuelae
MTTSRRELLKLMTAAGAALTASGLLISRTSLSDTRAGGPAGASPFAAQPVAAQALAPIVTPFRTAMPIPPVARPVSVTSTTDTYSIPVTQTTAEIIPGVRTPVLTYGGSFPGPTIKARSGRRVVVKQPNRITTGTSMHLHGAVVDPANDGGPMDLITPGGQRTYTYPNPQVAATLWYHDHAHHMEAEHVYRGMSGFYLISDDNEDALPLPRGTYDVPIVVRDIGLNPDGTLFFDHNFTPGRRSWSTGKPQPYFQVAARKYRLRILNGSNQRPFEFRLSDGGEFTQIASDRGLLPAPYTTTTLPLSPAERADIVVDFSRYPVGSSVVLENAYFPEPSNKEILRFDVVRSAYDPSSVPARLATLPPTAAPTQTRNYTLDFDVQTGAGSISGKTWDEQRVDTTVRQGDTEVWEIKNTHPFIPHNFHIHLVDFRI

SEQ ID NO: 8131 - protein, 314 aa, Campylobacter coli RM2228
MAKIPVHVVTGFLGSGKTTFLKEILTNQALNDIALVINELGEVSLDHKLVQTDFIEEQTLFLNAGCACCNKREDLQKKFKELLDNFENKGKKPQRVILETSGLANPAPIIFTFQSDVFLANHFELANIITCIDAFEGLNHLQNEEACNQILSSDFLILTKKDLNPHTQSLEEKINTLYPNIQIISKENFNFDMLSSHHKIQREIKNIEIKSHKDDISSITLIFDKAINWNIFSIWLSMLLHEHGSKILRVKGLINTEESYLTNINGVGHLIYHPTHTKISSLNHPSQLVFIAKNLKLDKIKESLENFLRLEQLN

SEQ ID NO: 8132 - protein, 319 aa, Zea mays
MPAFKAPAPGFAVRFSPFHENRLLAATSQHFGLVGNGHLIVLDLAGGGPGAAPTPVFSFPTSDALFDCAWSESHDSLCAAASGDGSVRLFDAALPPAQNPVRLLREHAREVHGLDWNPVRRDAFISASWDDTLKLWSPDRPASVRTFRGHEYCVYAAAWSARHPDVFASASGDRTARVWDVRDPAPTLILPAHDHEVLSLDWDKYDPSILATASVDKSIRVWDVRAPRAPIAQLAGHGYAVKRVRFSPHRQGMLMSCSYDMTVCMWDYRAEDALLARYNHHTEFVAGIDMSVLVDGLLASTGWDEMVYIWPFGTDPRAM

SEQ ID NO: 8133 - protein, 520 aa, Bacillus megaterium
MKGKKWTALALTLPLAASLSTGVDAETVHKGKAPTADKNGVFYEVYVNSFYDANKDGHGDLKGLTQKLDYLNDGNSHTKNDLQVNGIWMMPVNPSPSYHKYDVTDYYNIDPQYGNLQDFRKLMKEADKRDVKVIMDLVVNHTSSEHPWFQAALKDKNSKYRDYYIWADKNTDLNEKGSWGQQVWHKAPNGEYFYGTFWEGMPDLNYDNPEVRKEMINVGKFWLKQGVDGFRLDAALHIFKGQTPEGAKKNILWWNEFRDAMKKENPNVYLTGEVWDQPEVVAPYYQSLDSLFNFDLAGKIVSSVKAGNDQGIATAAAATDELFKSYNPNKIDGIFLTNHDQNRVMSELSGDVNKAKSAASILLTLPGNPYIYYGEEIGMTGEKPDELIREPFRWYEGNGIGQTSWETPVYNKGGNGVSVEAQTKQKDSLLNHYREMIRVRQQHEELVKGTLQSISVDSKEVVAYSRTYKGKSISVYHNISNQPVKVSVAAKGNLIFASEKGAKKVKNQLVIPANRTVLIK

SEQ ID NO: 8134 - protein, 189 aa, Glycine max
MSEVAAMAGQAYMRQLSKHPLRTKAITSGVLAGCSDAVAQKISGVKKLQLRRLLLIMLYGFAYAGPFGHFFHKLMDKIFKGQKKGKETTAKKVIVEQLTVSPWNNMMFMMYYGLVVEGRPFGQVKSKVKKDFANIQLTAWKFWPIVSWINYEYMPLQLRVLFASSIASCWAVFLNLKAARSIAGASKNA

SEQ ID NO: 8135 - protein, 66 aa, Oryza sativa
  misc_feature (22)..(22): Xaa can be any naturally occurring amino acid
  misc_feature (39)..(39): Xaa can be any naturally occurring amino acid
  unsure (1)..(66): unsure at all Xaa locations
YACGVCTALYLILEECLQNVIXRHKRLGTGTRLTVKAWXLTNCTQKEEWFTYTVTGVVVPPDIDRA

SEQ ID NO: 8136 - protein, 291 aa, Streptococcus pyogenes SSI-1
MPASKKVTIIFILNLSFSLIEFIFGTLFFSGAILADAVHDFGDAIAIGISAILERKAVKKESPNFSLGYKRFSLLGALTTNLILISGSLLVMIETIPKLWHPTIVNYDGMFVLAIFAIIINGFASFIIHSNQTKNEEILSLHFLEDILGWLAIIILSLILKWKPWYILDPLLSIAIASFILSKALPKLVATANIFLDGVPDSIDYCALHHELSQLPHIVSVNQLNVWSMDGIDHRATIHCCLRKSTTEKHCKKSIRLICQRYNINSVTVEIDTSLNEHQHHCSSLSSIEVN

SEQ ID NO: 8137 - protein, 275 aa, Brassica napus
MGGGFRVLHLVRPFLAFLPEVQSADRKVPFREKVIYTVISLFIFLVCSQLPLYGIHSTTGADPFYWMRVILASNRGTVMELGITPIVTSGLVMQLLAGSKIIEVDNNVREDRALLNGAQKLLGILIAIGEAVAYVLSGMYGPVGQLGVGNAILIILQLFFAGIIVICLDELLQKGYGLGSGISLFIATNICESIIWKAFSPTTINTGRGAEFEGAVIALFHMLITKSNKVAALRQAFYRQNLPNVTNLLATVLIFLIVIYFQGFRVVLPVRSKNA

SEQ ID NO: 8138 - protein, 436 aa, Prochlorococcus marinus str. MIT 9313
MTVESPIEKAIRPSVGLLGWYSVCASKLLKENELYHLSMFNEPLVIYRDKNNKPRCIKDSCPHRSASFRGGENENGEIVCPYHGGRFTTSCNQDGSDRITCKHIIDSHYDNFANHLHLRQYPCVEQGDYIYIYYTGEAQPSPNDFQIKSHLENSLPEAYGFDLKDYEYEEVFIDFKCDWSRIIENHLDILHIFWLHGNTLPGNDVNRKTIKSFNQSINKDQYHLRSVYHEKENNKEEFISQIFIPPGRVIIFKGATEQARYVQVLDHIPLSHNRARIIVRHYRKFLRNKLLCKLLLFKQRQQKVFYKIFSEDYLVLQTQTFNEQMGYLNQGQTKLLAEDKMINLFWDWHQHSLEKEHPWDIHPTTAHTNTIHQDMLMLYPPANPQLSHDIKRIIDRKVAVRLFSIILIILALIFAPDLVQQIKSGNVSMPMVGTQE

SEQ ID NO: 8139 - protein, 285 aa, Brassica napus
  misc_feature (272)..(272): Xaa can be any naturally occurring amino acid
  misc_feature (279)..(279): Xaa can be any naturally occurring amino acid
  unsure (1)..(285): unsure at all Xaa locations
MGNANGKEDDAVSGVEADATSSSTARSNGGDPSVHSRQRRPPSTDSMSSSPPGSPARSPSPFLFAPQVPVAPLQRANAPPSPNKIQWNQSQRVFDHLEEPGIPIIITWNQGGNDVAVEGSWDSWRSRKKLQKSGKDHSILLVLPSGIYHYKVIVDGECKHIPDLPFVSDEMGNVCNILDVHNFVPENPESIVEFEAPPSPDHSYGQALPTAEDYTKDPLAVPPQLHLTLLGKSEETAVAKKPQHVVLNHVFIEQGWTPQSIVALGLTHRFEXKYITVVXYKPLTR

SEQ ID NO: 8140 - protein, 473 aa, Debaryomyces hansenii CBS767
MLNLKLQTAVDDIVNQFTVTEEFLHDATKEFTKSMDTGLQNTASKREYMPMIPTYVTGIPTGKEKGLFLAADLGGTNFRVCSVNLHGDHTHELKQSKYSIPLDLMKNSTADSLFSFLAKKVETFLKDNHDDLEADEQLKLGFTFSFPINQTALNRGTLIRWTKGFDLPDCVDKDVVELLQSNIDLLGCKVNVVALANDTVGTLLSRAYSNNPEKTNANTIVGAIFGTGTNGAYFETLDNIPKLKSTNIPEGAKGMVINTEWGSFDNTLKILPKTKYDEIVDSETANKGFHLFEKRISGMFMGEILRVCLIDLFQRDLIFVDLYKSRGGSLPHRLSEEWLLSSEVLSYLQIDDSTDLKMSELILENELRLPTTKEERIVIQKLTQAIAHRAAYLSAIPVAAILNRVKGQFSNDNRDFEFGCDGSVVEFYPGFQASILEALEIINPLEGEKKKVHLKIAKDGSGVGAALCASTAK

SEQ ID NO: 8141 - protein, 213 aa, Wolbachia endosymbiont of Drosophila melanogaster
MEIFLDSVDLNEIKGLKEFIDGITTNPSLIAKSGRKDKYEDLVREICSIIKGPVSVEVVADSHEEMITEGLNLAKIADNVVIKLPLTHEGLISCKKLWTEHKIPVNITLCFSPGQALLAAKVGACFISPFVGRLDDISYDGLSLIEDICTIYSNYGFDTKVLVASVRSPAHVIEAARLGADSITVPAKVLRQLVNHPLTDQGLAIFEKDWGVK

SEQ ID NO: 8142 - protein, 369 aa, Oryza sativa
MDAQYNPRTVEEVFRDFKGRRAGLVRALTADVEDFFRQCDPEKENLCLYGFPNEHWEVNLPAEEVPPELPEPALGINFARDGMQEKDWLSMVAVHSDAWLLSVAFYFGARFGFDKNDRKRLFGMINDLPTIFEVVSGKSKAKPPSANNHSNSKSKSSNKTKSSEPRAKQPKPQPQPPVKNEGREEEGGPDDEEGGGGGGGGGREEEHGETLCGACGESYGADEFWICCDICEKWFHGKCVKITPAKAEHIKQYKCPSCSGGNGGGGGVSGNGKQLKICSTKREAIISQYLVRDERSKNTSTHARSPLISDNPYEVISDIRIMLAEQYTTNAREDDFDAKPNDKDNQGEGNVAWGGINKELYSLQVTIQN

SEQ ID NO: 8143 - protein, 190 aa, Oryza sativa
MPHLAASPTSAAAAAPASARVAFLRPGRVPRPPLQTARGLRPDLGTLRTAEQPTLYDLLGISSEGTLDEVRAAYRRMARKYHPDVSPPDAAAENTRRFIEVQEAYETLSDPSRRATYDRALARGVCRLAFSSSRRVAPYYYQDQEDKSGWRRTWGDQIEELKRRSMTKDSEENLSWGARMRRRTETSSSE

SEQ ID NO: 8144 - protein, 336 aa, Zea mays
  misc_feature (138)..(138): Xaa can be any naturally occurring amino acid
  unsure (1)..(336): unsure at all Xaa locations
MDMDRDSVECLSLPDAAMDVDNVDGHPHHGHLGLPLHPAHLPSSGAGRAFPKVNAGGGGAGPAVAGAAGAAGAGGGPPATSVHELLECPVCTNSMFPPIHQVYWAGWECQNGHTLCSTCKARVHNRCPTCRQELGDIXGCPEIFPYYSKIKHEAQCSFRPYNCPYAGSECAVAGDIPFLVAHLRDDHKVDMHSGCTFNHRYVKSNPREVENATWMLTVFHCFGQYFCLHFEAFQLGMAPVYMAFLRFMGDENEARNYTYSLEVGGNGRKMVWEGTPRSIRDSHRKVRDSHDGLIIQRNMALFFSGGDRKELKLRVTGRIWKEQTNPDGACIPNLCS

SEQ ID NO: 8145 - protein, 356 aa, Camellia sinensis
MSLLSDLCNLNLSESTEKIIAEYIWIGGSGMDLRSKARTLNAPVSDPSKLPQWNYDGSSTGQAPGEDSEVILYPQAIYKDPFRRGNNILVMCDAYTPGGEPIPTNKRFDAAKIFSHPDVVAEEPWYGIEQEYTLLQKEVKWPIGWPVGGYPGPQGPYYCGIGADKAFGRDIVDAHYKACLYAGINISGINGEVMPGQWEFQVGPSVGISSGDQLWMARYILERITEIAGVVVSFDPKPIEGDWNGAGAHTNYSTKSMRSDGGFEVIKKAIEKLGLKHKEHIAAYGEGNERRLTGKHETADINTFLWGVANRGASIRVGRDTEKAGKGYFEDRRPASNMDPYVVTSMIANTTILWKP

SEQ ID NO: 8146 - protein, 365 aa, Colwellia psychrerythraea 34H
MNFNRAVIKVGSALVAPTSDGCSGQYILAIAQFITKCQQQGKEIILVSSGGVAAGRTIIQHGSPKLSLSTKKAMASVGQMQMMANWQRFFDIPCSQILITQNDLADRERFISIQETIKIQLANGVLPIVNENDTVTTKALAIGDNDNIAALVAQACEADSLFILSDIDGVFTKDPNIHDDAVLIPNIDKITDEIYAMAGTSRNPLASGGMKTKIQAAEKAVEHGINTYIVNGSKSEVFSSLLAKVNPGTRFAADKDIITAKKHWLKHTLKSRGKIKLDPGAVNAVVNKGASLLPSGIKSVTNRFKAGDAIDLVDASNNAVIAKGITLYSHYDLKRIMGKHSNDITDILGHDQGDVVVHRDDMVIL

SEQ ID NO: 8147 - protein, 51 aa, Kluyveromyces marxianus
MAAKKSFIIKQKLAKAKNQNRPLPQWFRLKTNNTIRYNAKRRHWRRTKLVC

SEQ ID NO: 8148 - protein, 233 aa, Leptospira interrogans serovar Copenhageni str. Fiocruz L1-130
MKNQSGNPGQKVLVVDDEEDIAELIRFHLEENGYQVDTCQNGLEVLPKLEKNTPDLIILDLMLPGIGGMDLCKKIKEKYSMPIIMVTAKSGETEAVLGLELGADDYVRKPFSTRELIARVRSVLRRIKDEEEDEFEGNITIGNIFLNLKAHKAFINNSEVDLTLIEYKILNLFMTNPGVAFTRDKLLDRVWGKDIYVTDRAVDVNIKRLRDKLGDEKERLETIRGIGYRFNEA

SEQ ID NO: 8149 - protein, 463 aa, Leptospira interrogans serovar Copenhageni str. Fiocruz L1-130
MRRSLFSKLLLSNWLLLLVLLVVAGIALFVEKFVHSDFKILLFSFYVLFAMFGTFYMSYSIAKSVVEPLDRIEKKTGEINAGDFGSELTLSDIRELADLASSINLMSTRLKNQFVDLTIEKEKFDSVLQNLKEGVFAIDPENASILFQNKSVPGSLIEPNSRSRKLTDATRDLRLLEFVLNHLKGSGDSKMELDLGQNFYAIKMYPLKTNGKTLMYIGVIRNITEEKQSHIIREQFVQNASHELKTPITSIKGYTETLLDRLRLSPESHEKRFLDAISRNTDRMVRIVEDMLTITRIENQTKISSEEEFSLKSLVENLSYTVEGVVSSKGQKFVVEMPNPLMISADWILLEHMLLNLISNASSYSSEGKTITLKILPIKSDQVQFQVIDQGIGIQDEDKIRIFERFFRVDKNRSRKEGGTGLGLSIVKHIVRLHHGSVKVFDNPEGGTIFSVTIPTRYQTETS

SEQ ID NO: 8150 - protein, 281 aa, Solanum demissum
MVGKISSDLPPGFRFHPTDEELIMYYLRYQATSRPCPVSIIPEIDVYKFDPWELPEKAEFGENEWYFFTPRDRKYPNGVRPNRAAVSGYWKATGTDKAIYSANKYVGIKKALVFYKGKPPKGVKTDWIMHEYRLSDSKSQTYSKQSGSMRLDDWVLCRIYKKKNLGKTIEMMKVEEEELEAQNVSINNAIEVGGPQTMKLPRICSLSHLLELDYFGSIPQLLSDNLLYDDQSYTMNNVSNTSNVDQVSSQQQNTNNITSNNCNIFFNYQQPLFVNPTFQSQ

SEQ ID NO: 8151 - protein, 163 aa, Solanum demissum
MVGKISSDLPPGFRFHPTDEELIMYYLRYQATSRPCPVSIIPEIDVYKFDPWELPEKAEFGENEWYFFTPRDRKYPNGVRPNRAAVSGYWKATGTDKAIYSANKYVGIKKALVFYKGKPPKGVKTDWIMHEYRLSDSKSQTYSKQSGSMRVRTSLICRLIASN

SEQ ID NO: 8152 - protein, 420 aa, Sulfolobus solfataricus P2
MMEEVLSSSLYTQQVKKLYKVGELLGLDNETLETLSQPERIIQVKIQIRGSDGKLKTFMGWRSQHNSALGPYKGGIRYHPNVTQDEVEALSMIMTWKNSLLLLPYGGGKGGIRVDPKKLTKEELEQLSRKFIQAIYKYLGSELDIPAPDVNTDSQTMAWYLDEYIKITGNVDFAVFTGKPVELGGIGVRLYSTGLGVATIAKEAANKFIGGIEEARVIIQGFGNVGYYAAKFLSDMGAKIVGISDSKGGVINENGIDVGKAMEIKEKTGSVTNYPEGRKVTNEELLISDCNILVPAALENVINKFNAPKIKAKLIVEGANGPLTADADEIMRQRGIVVVPDILANAGGVVGSYVEWANNKMGQIISDEEAKKLIVDRMNNAFNTLYDYHQKKLEDHDLRTAAMALAVDRVVRAMKARGLL

SEQ ID NO: 8153 - protein, 356 aa, Rickettsia sp.
GFMSTASCRSTITYIDGDQGILRHRGYDIKDLAEKSDFLEVAYLLIYGELPNSKQYNDFTKKVAHHALVNERLHYLFQTFCSSSHPMAIMLAAVGSLSAFYPDLLNFFKEADYELTAIRMIAKIPTIAAMSYKYSIGQPFVYPDNSLDFTENFLHMMFATPCEKYKVNPVVKNALNKIFILHADHEQNASTSTVRIAGSSGANPFACVSTGIASLWGPAHGGANEAVINMLKDIGSVENIPKYIAKAKDKNDNFRLMGFGHRVYKNYDPRAAVLKETCKEVLKELGQLDNNPLLQIAIELEAIALKDEYFIERKLYPNVDFYSGIIYKAMGIPPQMFTVLFATARTVGWMAQWKEM

SEQ ID NO: 8154 - protein, 141 aa, Haemophilus influenzae 86-028NP
MMTERTFSIIKSDAVKRNLIGAILTRFEQNGFKIIASKMVRLTREQAEGFYAEHQGKEFFAPLVEYMMSSPIVVSVLEKENAVKDYRTLIGTTNPETAEEGTIRKDFALSQRENSVHGSDSIENANREIAYFFTDCEIFER

SEQ ID NO: 8155 - protein, 671 aa, Listeria monocytogenes EGD-e
MKKTLDRQAVDTIRSLSIDMIEKANSGHPGMPMGAAPMAYMLFAKHLVFNPANPEWFNRDRFVLSAGHGSALLYSMLHLFGYDVKMEDLKQFRQLDSLTPGHPEFGWTAGVDATSGPLGQGIGMAAGMALAESHLAAEYNQPNYPIVDHYTYAICGDGDLMEGVASETASLAGHLGLGKLIVLYDSNDICLDGDLSATFSENAADRFRAYGWQVLRVEDGNNLAAIQEKIVQAKLETSKPTLIEVKTVIGYGAPTKAGSSASHGAPLGEKEANGAKEHYEWAEEPFTVPAEVRDYLRNYKARGEKLEGAWNTMLANYKKEFPELARQLDRVLAGEVAADWNANLPTFEAGTNVATRSASGKMINAIAAELPELFGGSADLGCSNKTFIDASPAYSIQDPAGKNIWFGVREFAMGAMLNGMALHSGLRVFGSTFFVFSDYVRPAMRMAALMQLPVTYVFTHDSIAVGEDGPTHEPIEQLASLRAMPGLTVIRPADAKETRAAWEIAATNTNGPIALVLSRQDLPVLENDQEEVDAGIEKGAYIVAPANSSKPDAIIIATGSEVSLAIEAKAELAKKDIDVSVVSLSSWERFEKTTDAYKESILPKEVTARFAIEAGATFGWKEFIGSEGDMLGIDHFGASAPAKDLFNAYGFTPENVADRVEAVIAKAGVRV

SEQ ID NO: 8156 - protein, 504 aa, Oryza sativa
  misc_feature (235)..(235): Xaa can be any naturally occurring amino acid
  misc_feature (276)..(276): Xaa can be any naturally occurring amino acid
  unsure (1)..(504): unsure at all Xaa locations
EGGIFVSSSLGMLAPNRLMSQRRGRRRRRHRRPQIRARSGFIASTGKRKISPCEHDGDGHSQAGKMMRNSIPYLPEDILSRIHSFMSMREAARAACVSRAFLRSWRCHPNLIFNKDTIGLKRNAFGENFHGKIGCILRNHSGISLKTFKLDYSGMCGFDGTSYLDSWLQIALKPGIEELTLFLFDTNKQYNFPCSLLSDGVRDSLRYIKLRFCALHPTPELAPLRSLTSLSLWLXATWAELECLLSNSLALEHLELTQCTKITCLKIPFALQQPSXSVVETLQMKKLDMGCAIHDARANLPSIMPNLETLVIESVNEVVDAPMLPTKFIYLKHLTIRMITGSTISRPYDYFSLVSFINASPSLETFNGHVTLRMVNESIFTDSQLRHIPEHHHGHLKSVKITGFSSAKSLVELTCYILNNAVSLECLTLDTIYGPRCDQDKYRRCFPMIDGVLTEAPRGLAAIRTYIEDKVPSTVNLTVLEPCSRCHVRRRVQTSSQSDNAVSI

SEQ ID NO: 8157 - protein, 337 aa, Pyrus communis
MQIKSHTTNRAALLSFFLITPQSVSLSLPLLLCAGEKMASCKQWTVFLSLLCLVSATMAAPLKKPVAVPFGRNYMPTWAFDHIKYFNGGKEIQLHLDKYTGTGFQSKGNYLFGHFHMQIKMVPGDSAGTVTAYYLSSQNNEHDEIDFEFLGNRTGQPYILQTNVFTGGKGDREQRIFLWFDPTAAYHSYAVLWNLYQIVFLVDDIPIRVFKNSKDLGVKFPFNQPMKLYSSLWNADDWATRGGLEKTDWSKAPFIASYRGFHIDGCEASVEAKFCATQGKRWWDQKEFQDLDAQQWRRLRWVRRKFTIYNYCMTESDTLLCHRSARGTETYNTKSKL

SEQ ID NO: 8158 - protein, 250 aa, Corchorus capsularis
MATNGEEQQSQAGRHQEVEHKSVLQSDALYQYILETSVYPREPEPMKELRELTAKHPWNLMTTSADEWQFLNMLLKLINAKNTMEIGVYTGYSLLATALALPDDAKILAMDINRENYELGLPVIQKAGVAHKIEFKEGPALPVLDKLVEDEKNHESYDFIFVDADKDNYINYINYHKRLIDLVKVGGLIGYDNTLWNGSVVAPPDAPMRKYVRYYRDFVLEINKALAADPRIEICMLPVEDGITVCRRIQ

SEQ ID NO: 8159 - protein, 988 aa, Schizosaccharomyces pombe 972h-
MVQLDDALQDAYKKVEREESLILGAKAMVASTKNPEVKRRLESNIAVSENNIKYLRERIDALKVESGSERESQSDKDSSKKYSDSAKSTNSDDHLLSYNRSAFDLFNSEKPLSPEKISTMLQHLQMRLSIEQQCVSGIEKIMSLYSKEQKDKTDVIIKLKEGKQKVNLLKRSLKRYNELHIPFDISTPSSEEKQQASGLNFRGLAKPISGTLKVTIHSLRNIEHTSFLQTHSFTMPSYAVLYVDDAQVAKSRISQTDTWDETFIFDVHRAKEFQIIIYEKKKDFDIPIALILIPTTIIAEELRRKRNIQEMSETSWKPSIAESASRSDEKGSKSDPINAPNSSSSISTNSPLAPTAYYKLLSKSWLSLEPVGQICISLSFSKRTTKRQFPETGLGRQGAIRQKKEDVVASQVGHQFVQRQFYQIMRCAVCAELFSYSPGLQCENCSFVCHKKCVTKVLASCIAQSNSEKSDFGGLRYRIPHRFEPFNSLGAQWCAHCGFFLPLRRKDCFKCVECGITCHGQCAHLIPDYCGMSNDLKHQLLTELEVSKRPKKPELPNQENKTTNEKVYRKPLSSQNTFDTLPTISQGLLAATQPVTSVLNTSPLPKTPEKDRSLNVTPSSSTPTPASVLAPPSSASLSSSKDANRSVPESPRREKKNRVTLDDFTFLAVLGKGNFGKVMLAEYKVNKKFYAIKVLKKEAILKNEELESLKTEKHVFEVANKEKHPFLLNLFASFQTSTRVYFVMEYILGGDLMVHIQRQQFSVKRARFYGAEVCLALKYFHENGIAYRDLKLDNILLCPDGHIRIADYGLCKENMLLGNTTSTFCGTPEFMAPEILLEQQYSKDVDWWAFGVLMYQMLLGQSPFKGEDEEEIFDAILSDEPLFPINMPADAVSLLRGLLTRDPNQRLGSGPKDANEVMAHPFFASIVWDDLYNKLYEPSYKPLINDPRDLNNFDEEFTSACPTLTPVNTVLTRQQQECFRGFSSFATE

SEQ ID NO: 8160 - protein, 286 aa, Zea mays
EEVLSAKRRVKLANRWWSVPGHLGLPEQPSGGPNPKTEPPAMKDPEPSSPAVGAPGDHGADETNESGGAVVAAPSRRPRGRPPGSKNKPKPPIFVTRDSPNALRSHVMEVAGGADVADAIAQFSRRRQRGVCVLSGAGTVANVALRQPSAPTAVVALRGRFEILSLTGTFLPGPAPPGSTGLTVYLAGGQGQVVGGSVVGTLIAAGPVMVIASTFANATYERLPLEEEDEGPAPPMASGGGADPLMGGGLGIADPSALPMFNLPPSNGQLGGGDGFPSWAHPRPPY

SEQ ID NO: 8161 - protein, 44 aa, Zea mays
SSDNPNWFQDTVDAVRQYLWLNQEHNVMEFLIIDGEHLYRMDYE

SEQ ID NO: 8162 - protein, 185 aa, Glycine max
MGSLAKKGLNNYVKQLQQHPLRTKVITAGVLSAISDVVSQKLTGIQKIQLKRLLFKVIFGAAYLGPFGHFFHLILDKIFKGKRDSKTVAKKVLIEQLTSNPWNNLLFMIYYGLVVEGQPWVNVKAKVKKDYLSVQYTSWTVWPVVGWINHKFMPLHFRVVFQSLVAFFWGVFLNLRARSMALIKA

SEQ ID NO: 8163 - protein, 84 aa, Arabidopsis thaliana
PRVRADPLLSSFGLGFPTSDAEQASKSTVSIPDDATTVKKAPAQARKLSIDSSLTSKKRELKRKQARVRATFVQDLLLSTLFGD

SEQ ID NO: 8164 - protein, 354 aa, Zea mays
MGRAPCCEKVGLKKGRWTKEEDEVLARYIKEHGEGSWRSLPKNAGGLRLVLLAGLLRCGKSCRLRWINYLRAGLKRGNISEEEEDMIIKLHATLGNRWSLIAGHLPGRTDNEIKNYWNSHLSRRAADFRDGVVVDIDLSKLPGGGKRRGGRASRGAVVAAAKEKKAKEKDDRGNSKVAEAEQQLRDTEDDDGGSVSTPRPQSDDCGTAQSEEEQAQASASGLTSDGHGPEEEEEEDPLALSEEMVSALLAPESPKLEVGPDGSCMDSYSGPPSGESGCGSSGPSGDVAQDLDLDDDKAIMDWDLMGLDISTAGDMWDQLVWDYDETLVTEPEGGEEGHQQQDDVMSDLFFLDNL

SEQ ID NO: 8165 - protein, 175 aa, Trichodesmium erythraeum IMS101
MEKGFILWFTGLSGAGKTTISKIVAEKLKQRGRKVEILDGDIVRENLSKGLTFSKADRDINIRRIGFVAHLLSRNGVVAITAAISPYKAVRNEIREMDENFIEVYINAPLEVCEQRDVKGLYGKARAGEIKNFTGIDDPYEPPNNPEITCCTDKESLDESVANVISSLEKLGYLV

SEQ ID NO: 8166 - protein, 469 aa, Glycine max
MQALHSPTLRTSPLDPLRGPNNAAAKRRASSAKRVFFVSATVAPKVSAPQRQKDSKKRVVITGMGLASVFGNDVEGYYEKLLAGESGITPIDRFDASKFPTRFGGQIRGFSAEGYIDGKNDRRLDDCLRYCIVAGKKALENADLAPDNHSKIDKERAGVLVGSGMGGLTVFSDGVQALIEKGHRKITPFFIPYAITNMGSALLGIDLGFMGPNYSISTACATSNYCFYAAANHIRRGEADLMIAGGTEAAIIPIGLGGFVACRALSQRNDDPKTASRPWDKDRDGFVMGEGAGVLVMESLEHAMKRGAPIIAEYLGGAVNCDAYHMTDPRSDGLGVSTCIQSSLEDAGVSPEEVNYINAHATSTLAGDLAEINAIKKVFKDTSGIKINATKSMIGHCLGAAGGLEAIATVKAITTGWLHPTINQFNPEPAVDFDTVANVKQQHEINVAISNSFGFGGHNSVVAFSAFRP

SEQ ID NO: 8167 - protein, 333 aa, Heliobacillus mobilis
MTADQVDDVYEQLGNMGIDVVSEPAEAESMEKAEEPIIRESEEEEEEIEVDLSVPEGVGIDDPVRMYLKEIGRVPLLSAEEEIELAKRMEDGDEEAKRRLAEANLRLVVSIAKRYVGRGMLFLDLIQEGNLGLIKAVEKFDYTKGYKFSTYATWWIRQAITRAIADQARTIRIPVHMVETINKLIRVSRQLLQEFGREPNPEEIAKEMDIPVDRVREIMKIAQEPVSLETPIGEEEDSHLGDFIEDQDAPAPAEAASFILLKEQLEEVLETLTAREMKVLRLRFGLDDGRSRTLEEVGQEFGVTRERIRQIEAKALRKLRHPSRSKKLKDYVD

SEQ ID NO: 8168 - protein, 629 aa, GIBBERELLA ZEAE PH-1
MLDNSPPDRQWWKEAVVYQIYPASFLDSNADGLGDLPGIISKLDYIRSVGATAIWLSPIFKSPQHDMGYDISDYRDIHRPYGSIQDVEALIKGCHERDIKILLDLVVNHTSHEHEWFRESRSSKTSPKRDWYFWRDPKFDADGNHKPPNNWSSIFGGSAWTYDEPTGQYYLSLFLPEQPDLNWANEDMRQATYADMKFWLDKGADGFRIDSMNLMSKHPDLPDAPITRPDSEFQPGDKYFASGPRMHEYIREIREEVIDKYDCMTVGELGFTKDEASVASYVAKERHELNMLFTGDIVDMDFGANHKYERDDFRLSKLKTITSRWQGAMPKFDGWNTIYMDNHDSGRSLSRYGSDLPQFRKEAAKMLAIYLSTLSGTLFLLQGQEIGMANVPESWKIEDYIDVEGLNYYNSQLEKRGLGADMSDIMREMRLKARDNGRLPMQWTADKNAGFSKGEKPWMRVNDDFKEWNVAQQENDGDSVLAFWRQVLELREKERDVFVYGRFTNLPDYEDSEDIFAYTMTSFDGRSALVLLNFSDKEQKVEVKNGSWGKKLIGKNANEFGKEGVLLQAYEVVTTVVKMIVKVYLKPFVAELSSATSSIHLPFAYKSKKILTLTTDSAHEILWSMFLMP

SEQ ID NO: 8169 - protein, 666 aa, Rhodobacter sphaeroides
MAVKDTDDGKPEDQDAETSLDMSQAAVKRMIAEAERGYITYDQLNTVLPQDQVSSEQIEDVMAMLSEMGINVIENEEAEEGEPAGELVEQGSGSREIAVAGTQGETLDRTDDPVRMYLREMGSVELLSREGEIAIAKRIEAGRNTMIAGLCESPLTFQAITIWRDELLSEDILLRDVIDLEATFGRSLDGDGDDEIDGPEIDEVEVAAARAAPRRSTSSEPELDADGNPISRAEEEDEDDEASAMSLAAMEAALKPRVLETLELIARDYGKLAEMQNRRMSATLNDHIRFTTEDEAAYQKLRSEIVLLVNELHLHNNRIEALIDQLYGINRKIMSINSAMVKLADAARINRREFIDEYQGYELDPMWAERMAAKVGRGWQTLMEKSRDRVEDLRGEMAQVGQYVGVDISEFRRIVNQVQKGEKEARQAKKEMVEANLRLVISIAKKYTNRGLQFLDLIQEGNIGLMKAVDKFEYRRGYKFSTYATWWIRQAITRSIADQARTIRIPVHMIETINKLVRTGRQMLHEIGREPTPEELAEKLQMPLEKVRKVMKIAKEPISLETPIGDEEDSQLGDFIEDKNAILPLDSAIQENLKETTTRVLASLTPREERVLRMRFGIGMNTDHTLEEVGQQFSVTRERLRQIEAKALRKLKHPSRSRKLRSFLDQ

SEQ ID NO: 8170 - protein, 492 aa, Helianthus annuus
MDPYKYRPSSAYNAPFWTTNYGAPVYNNDSSLTVGTRGPILLEDYHFVEKLANFDRERIPERVVHARGASAKGFFEVTHDISALTCADFLRAPGVQTPVIVRFSTVIHERGSPETLRDPRGFAVKFYTREGNFDLVGNNFPVFFVRDGMKFPDMVHSLKPNPKSHIQEDWRILDFFSHHPESLHMFTFLQDDVGVPQDYRHMDGSGVNTYTLINKTGKTHYVKFHWRPTCGVKCLLEDEAIKVGGMNHSHATKDLYDSIADGNYPEWKLFIQTMDPDHEDRFDFDPLDVTKTWPEDILPLQPVGRMVLNKNIDNFFAENEQLAFCPAIIVPGIYYSDDKLLQTRIFSYADTQRHRLGPNYLQLPANAPKCAHHNNHHDGFMNFMHRDEEVIYFPSRYDPVRHAEQSPIPPVMLSGKRNKCVIEKENNFKQPGERFRSWDPDRQERFIRRIVGALSDPRVTHEVCTIWVSYWSQADKSLGQKIASRLNVKPSY

SEQ ID NO: 8171 - protein, 283 aa, Solanum demissum
MSSFVVVFFILSMLLNTGVGVNFTDVFESSWAPDHIAVVGDQVTLSLDSASGCGFESKFKYLFGKASAQIKLVEGDSAGTVIAFYMSSEGANHDELDFEFLGNVSGEAYLVQTNVYVNGTGDREQRHGLWFDPTVDFHTYSFFWNHHSIIFSVDDIPIRVFKNKEKKGVPYPKNQGMGIYGSLWNADDWATQGGRVKTNWSHSPFVTTFRSFEIDACDLSGEDTIAAGAKCGKLAQFLWDKPAKKGLEKTKKRQFKMVQNKYLVYDYCKDTARFTQMPKECLY

SEQ ID NO: 8172 - protein, 393 aa, Glycine max
  misc_feature (180)..(180): Xaa can be any naturally occurring amino acid
  unsure (1)..(393): unsure at all Xaa locations
MYVVESKVGAIGCMLVSLFFLGTWPAVMTLLERRGRLPQHTYLDYTLTNLMAAVIIAFTFGQIGNAQPNFLSQLSQDNWPSVLFAMGGGVVLSVGNLSTQYAWAFVGLSVVEVITSSITVVIGTTLNYFLDDKINKAEILFPGVGCFLIAVCLGSAVHSSNTVDNKAKLSDYKDAAKSTXTFKETSEVESKDLVDGTHKPKAGTAAFLIELEKKRSIKVLGKSTFIGLAITFFAGVCFSLFSPAFNLATNDQWHTLKKGVHHLSVYTAFFYFSVSCFVIAIILNITFLYHPVLNLPKSSLKAYLSDWDGRGWAFLAGLLCGFGNGLQFMGGQAAGYAAADAVQALPLVSTFWGIVLFGEYRKSSRRTYVLLGSMLLMFVAAVAVLMASSGHRK

SEQ ID NO: 8173 - protein, 162 aa, Nitrosomonas europaea ATCC 19718
MERIKQFFKSFLLVEMLKGMKVTGRYLFAPKITVHYPEEKTPQSPRFRGLHALRRYPNGEERCIACKLCEAVCPAMAITIESEQRDDSTRRTTRYDIDMIKCIFCGFCEEACPVDAIVETRVLEYHGEVRGDLTYTKEMLLAVGDRYEEQIARDRAADAPYR

SEQ ID NO: 8174 - protein, 492 aa, Helianthus annuus
MDPYKQRPSSAYNAPFWTTNAGLPVYNNTASLTVGNRGPILLEDYHLIEKLANFTRERIPERIVHARGASAKGFFEVTHDITHLTCADFLRAPGVQTPTIVRFSTVIHERGSPETIRDPRGFATKFYTREGNFDIVGNNFPVFFTRDAMAFPDVIHAFKPNPKSHIQEDWRILDFLSHHPESLNTMTFWLDDVGIPTDYRHMEGSSVNTLTLVNKEGKIHYVKFTWKPTCGVKCLMDDEAIKIGGANHSHATQDLYDSIQAGNFPEWKLYLQVIDPDHEDRLDFDPLDGTMTWPEDIIPLQPVGRMVLNKNIDNFFAENEQLAFNPGLVVPGIYYSDDKMLQGRIFAYSDTQRHRLGPNYLQLPVNAPKCAHHNNHYDGNMNFMHRDEEVDYFPSRYDRVQHAKQYPINSRQVTGTRDRTVIPKYNDFKQPGDRYRSWDPARQERFIVRMCKMLSDPRVTHELRSIWISYWTQADQSLGQKIASRLNVRPNY

SEQ ID NO: 8175 - protein, 1721 aa, Oryza sativa
MATAAGRYEDSGVSVSFRRKAAYTAASLLVFLVAGQLPLYGVKKYNGDKDVPDPLYWMNCMFASSNNTLMTLGIIPLLLSEMAVRIFSALIITRWPPFHHVRLLNFITNDFGKISLLDSDSNQSGRDQVPAPFGIPNSAEAYSKIISPESASNHSDEIQSTPPRPDEDGGEVGVILQPLGTVSTEELDGYLNSPGVSSRPTEILDYDDFGYHYDQGDLDNFDDSYEDNYTPLFFGERERLQREQQDRERIAKEAEDRRQRALESGRRPRELIGQQDVDGTTVFRTPQQNAIAAITLLDTLLKEDALNQTDHVVNILNQTKTMIAASVPANSASTRTPTGSRVPHLRSQDYHQPSLSIAGVGSSRRSRGHDERSVRSPPERYRKRRVERPHSPHRRRPIDLRDTINQRRAARGHHSPDRYDDDVDGVAAFTSDLRRVDWPTGFKPTRIEKYDGTTNPESWLTVYSLAIHAAGGDSKAMANYLPVALADSARSWLHGLPRGTIGSWAELHDHFIANFQGTFERPGTHFDLYNIIQKSGESLRDYIRRFSEQRNKISDITDDVIIAAFTKGIRHEDLVGKFGRKPPKTVKQMFEKVYEYAKAEDAITAFKQSGITWKPKKDTPTAGGSGSNNHKDRKRKPEELVATTSPSSRQRSRVNTFDKIMNSQCPHHPNSNHVAKDCFVYKQFAEQYVKNARKPSDGDQGTSKKKDDEDDAPTGFQDHRKELNHIFGGPLTYESKRKQKLTKREINAVQPNTPQYLRWSEIAIKFDRSDHPDRVVHPGRYPLVLDLVVRNVKLRRTLIDGGSALNILFAKTLDDMQIPRTELKPSNAPFHGVIPGLKTPKPSSNDSADLAQDMKDAIKEELTKLLAAGFIKEVLHPDWLANLVLVRKKTGQWRMCVDYTDLNKSCPKNPFGLPRIDQVVDSTAGCELLNFLDCYSGYHQIRLRESDCLKTSFITPFGAYCYITMPFGLKNAGATYQRMIQRCFSTQIGRNVEAYVDDVVVKTKQKDDLIVDLEETFASIRAFRMKLNPEKCIFGANPEKINAILNMKPPSSQKDVQKLTGCMAALSRKLSHYFQSHSVTVVTSFPLGDILHNREANGRIAKWVLELMSLDISFKPRTPIKSQALADFLAEWNECQEDMPDEKMEHWTMHFDGSKRLTGTGAGVVLISPIGERLSYVLWIHFSASHNVAEYEALLHGLRIAISLCIRRLIVRGDSQLVVNQVMKEWSCLDDNMTAYRQEVRKLENKFDRLELTHVLRHNNEAADRLANFGSKREAAPSDVFVEHLYEPTVPRKETIEAMDTQGVSMIETDWREPLIKFLTKQELPQDKNEAERISRRSRLYIIHEAELYKKSPSGILQRCVFLEEGRQLLKDIHSGICGNHAAARTIVGKAYRQGFFWPTAVSDADKIVRTCEGCQFFARQIHLPAQELQTIPLSWPFAVWGLDMVGPFKRAVGGYTHLFVAIDKFSKWIDAKPVITITADKARDFFINIVHRFGVPTGIITDNGTQFTGGAFKNFCEDFGIKICYASMAHPMSNGQVERANGMILQGIKARVFDRLRPYASKWVDQLSSLLWSLRTTPSRATGQSPFFLVYGAEAMLPSEVEFESLRFRNFNEEGYEEGRVDDINRLEEAREAALIQSTRYLQGLRRYHNRNVRSRAFLVGDLVLRKIQTTQDRHKLSPLWEGPFIIDEVTRPGSYRLKREDDTLINNSWNIEHIHRFYA

SEQ ID NO: 8176 - protein, 416 aa, Anabaena sp.
MPATSFYADAAYNTQKSRQALDPDIAIDDSDLSVDEIQELEIAAADPATFGRSANRRSTDLVRLYLQEIGRVRLLGRDEEVSEAQKVQRYLKLRIVLANAVKQGDEVATPYLHLIEVQERLASELGHRPSLERWAATAGINLCDLKPILSEGKRRWAEIAKMTVEELEKMQSQGLQSKEHMIKANLRLVVSVAKKYQNRGLELLDLVQEGTLGLERAVEKFDPTKGYRFSTYAYWWIRQGITRAIATSSRTIRLPVHITEKLNKIKKAQRKIAQEKGRTPTLEDLAIELDMTPTQVREVLLRVPRSVSLETKVGKDKDTELGELLETDGVTPEEMLMRESLQRDLQHLLADLTSRERDVILMRFGLADGHPYSLAEIGRALDLSRERVRQIESKALQKLRQPKRRNLIRDYLESLS

SEQ ID NO: 8177 - protein, 805 aa, Nostoc sp. PCC 7120
MHELFHPIFANGEEKAALQQLIIALDASGKRYFLRNEILHTFSQYCQQAQKPTYFYYSSSVGKLIQYTHEIVLAEDGTWFVVRPRIASQEVWRLTSDLAKFDSMSIDAFLDVSDRLVNAYEPNILEIDLNSFYEASPSISDPRNIGQGLAFLNRYLCSQIATDPQYWVELVYLALRGLQYDGINLMIGDAIPSGIHLAKQIHAAIKFLSALPPEEPYEKFYIELQKLGFEPGWGNTAQRILETITLLDKLIDSPQPAVLEAFVARVPAVFRVVLVSIHGWVAQEDVMGRDETLGQVIYVLEQARSLENKLQQEIKLAGLEVLGIQPHVIILTRLIPNCEGTYCNLRLEKLHNTENAWILRVPFGEFNPEITNNWISKFEIWPYLETFALDAEKQLLAQFQGKPNLIIGNYSDGNLVAFLLARRLKVTHCNIAHSLEKPKNLFSNLYWQDSEEKYHFSVQFTADLITMNAADFIITSSYQEIFGTPESIGQYESYKFFTMPHLYHVVDGIDLFNPKFNMVPPGVNEQVFFPYSQTADRDPNVSKHVHDLLFHRQDSQIFGYLDQPQKPPIFAVAPITSIKNLTGLAECFGRSQELQAHSNLILLTSKLNIDESTNPEEAREIEKLHNIINQYQLHGHIRWLGLRLPNQEVGEAYRLVADYRGIYIHFARFEAFGRSILEAMISGLPTFATKFGGSLEIMEDQNNGFRINPTDLEGTAEKILAFFQECDTHPEHWQEVSQWMSQRIHQKYNWQLHTSQLLALTKIYSFWNFIRPESSEARVRYMESLFHLIYKPRAEQILAKHMSCH

SEQ ID NO: 8178 - protein, 492 aa, Helianthus annuus
MDPYKQRPSSAYDTPFWTTNAGAPVYNNTASLTVGNRGPILLEDYHLIEKLANFTRERIPERIVHARGASAKGFFEVTHDITHLTCADFLRAPGVQTPVIVRFSTVIHERGSPETIRDPRGFATKFYTREGNFDIVGNNFPVFFTRDAMAFPDVIHAFKPNPKSHIQEDWRILDFLSHHPESLNTMTFWLDDVGIPTDYRHMEGSSVNTLTLVNKEGKIHYVKFTWKPTCGVKCLMDDEAIKIGGANHSHATQDLYDSIQAGNFPEWKLFLQVIDPDHEDRLDFDPLDGTMTWPEDVIPLQPVGRMVLNKNIDNFFAENEQLAFNPGLVVPGIYYSDDKMLQGRIFAYSDTQRHRLGPNYLQLPVNAPKCAHHNNHYDGHMNFMHRDEEVDYFPSRYDRVQHAQKYPINPARVTGTRDRTVIPKYNDFKQPGERYRSWDPARQERFIVRMCKMLSDPRVTHELRSIWISYWTQADKSLGQKIASRLNVRPNY

SEQ ID NO: 8179 - protein, 240 aa, Vibrio fischeri ES114
MINHKIFETPQDVVTTLADELKQLGEQGKPVHISLSGGSTPKMLFSLLASEAYAKNIQWNNLHFWWGDERCVTPTDPESNYGEANELLFSRIDIPLENIHRIEGENEPLEEVNRFSNEMRELIPLEDGIPVFDWILLGVGADGHTASLFPNKTDYNDTNLAVIATHPESGQQRVSKTAKVLEAAKRISYLVLGSGKAEIVQEIHTKPANELPYPAAKIHSTLGETEWFLDIDAAARIINK

SEQ ID NO: 8180 - protein, 230 aa, Glycine max
MAVTLYDLSSSSGLKKLDEYLLPRSYITGYQATKDDLTVYAALPTAPSDEYGNVSRWYKHIDALLRISGVTGEGSGVIVEGSLVAEPVATPPAADTKAAVAEDDDDDDVDLFGEETEEEKKAAEERAAAVKASTKKKESGKSSVLLDVKPWDDETDMKKLEEAVRSVQMEGLLWGASKLVPVGYGIKKLQIMLTIVDDLVSVDTLIEEHLTVEPINEYVQSCDIVAFNKI

SEQ ID NO: 8181 - protein, 163 aa, Nostoc sp. PCC 7120
MELKIGSTEAPMEKATFGAGCFWGVEAAFRKVKGVVSTSVGYMGGHFPNPCYLDVLSRITGHAEVVQIEYDPQLVSYEDLLAVFWDIHDPTTLNRQGPDKGEQYRSVIFFHNEQQAEAAQQSKAKVQVSGRFELDIVTEIKHKSEYYLATEEHQQYFEKQAKR

SEQ ID NO: 8182 - protein, 431 aa, Prochlorococcus marinus subsp. marinus str. CCMP1375
MKRVLAIILGGGKGSRLYPLTKMRAKPAVPLAGKYRLIDIPISNCINSNITKMYVLTQFNSASLNRHLAQTYNLSSPFAQGFVEVLAAQQTPESPSWFEGTADAVRKYQWLFQEWDVDEYLILSGDQLYRMDYSLFVEHHRETGADLTVAALPVDGAQAEGFGLMRTDNDGNIREFKEKPSGEALKAMAVDTSRFGLSPDSAKERPYLASMGIYVFSRSTLFDLLNKYPSYKDFGKEVIPEALSRGDALKSYVFDAYWEDIGTIGAFYESNLALTQQPTPPFSFYDEKFPIYTRARYLPPSKLVDAQITDSIVGEGSILKSCSIHHCVLGVRSRIESDVVLEDSLVMGSDFYESAEERIALRKGGGIPLGVGQGTTVKRAILDKNTRIGENVTIINKDRIEEADRADQGFYIRNGIVVVVKNASILDGTII

SEQ ID NO: 8183 - protein, 237 aa, Prochlorococcus marinus subsp. marinus str. CCMP1375
MTVFNIHRAKDQVTLAQLTSEYVSKTIIAELKTKERFQIALSGGSTPCMAYSLLREENLPWNLVDVVLGDERWVSHQDESSNALMLRRTLMASGPGAKACFHPIPTTELNTPEDSVSEFSKVINHLCEGDPPRFDLILLGLGEDGHTASLFPNSQSLYVKGAYATIGQGKGQQRISLTAEVLCSAAKVIFLVSGESKQIALKRLLDPLESFERTPARLVKPDSEVIIFTDEAAAKLI

SEQ ID NO: 8184 - protein, 575 aa, Schizosaccharomyces pombe 972h-
MSISSKDFQNVTSAGFADDTFAADTFAADKKSPFESSVFENKTQVLPVDSVSRLSNGARSRSNSNISLSEPHALNDTVEDQPVSKWVWVLAFAAGIGGLLFGYDTGVISGALVVIGTSLGGHELTNGGKEFITSATSLGALLGGIIAGALADFFGRKPVIAIASIIIIVGSIVQVTAHHLWHMIVGRFVIGWGVGIASLIIPLYLSEIAPSKIRGRLVIIYVLLITAGQVIAYGIDTAFEHVHNGWRWMVGLAMVPAAFQLFILIWLPESPRLLVKKERSQEAYNTLARIYPTAHPYEIKTKLYLIQEGVRDPFSGSRWQKIVKTFKELYFNPSNFRALILACGLQAMQQLSGFNSLMYFSSTIFEVVGFNNPTATGLIIAATNFVFTIVAFGVIDFFGRRILLLLTVWGMIAALIVCAVAFHFLPKDENGNYTSGQSNAWAIVVLISMIVYVASYASGLGNLPWQQSELFPMSVRGLGTGMSTAVNWAGNLGIGASFLTLMSEITPTGTFALYGGLCFLGWLGALFCYPDLTDYTIEEIGELLKHGFGVRESMRHLKRVRQERAWSREDKEQNN

SEQ ID NO: 8185 - protein, 518 aa, Volvariella volvacea
MQSLLNTLTAMVTVVGWGANFAAAALSSHTLTLTNGFASPDGHSREVVLVNGGLFQAVIAGNKGDDFEIEVDNQLTVEILRKSTSIHWHGLFQRGSAWADGPAFVTQCPIAPGNTFTYEFTPTDEVGTFWYHSHLDAQYCDGLRGPFVIYDPNDPHLALYDVDDEDTIITLADWYHTAAELLTGVVIPDSALINGLGRTSTTTTSPLAVINVVQGTKYRMRLISISCDPNNYIFSIEDHEMTVIEADGISVDPVTVTSLQIFVGQRYSFILHANQPVDNYWIRANPNLGPTGFSGGINSAILRYQGAPVADPTGPGLQDALNRLAETDLHPIVNPGAPDPVDIDLVINIGFSAGLFNIDGTSYVSPDVPSLLQILNGVPVSSLLPSGSYIELPPNKVVQLSFPVIAGQGSAIGAPHPIHLHGHAFDVIRSAGSSTYNLVDPVRRDVVSIGTPGDNVTIRFVTDNAGPWYLHCHIEWHLRAGLGVIFAEDAAGSLLQPAPPTAWGDLCDIYDLLPPEDQ

SEQ ID NO: 8186 - protein, 489 aa, Mycobacterium bovis AF2122/97
MSAASQRVDAFGEEAGYHKGLKPRQLQMIGIGGAIGTGLFLGASGRLAKAGPGLFLVYGVCGVFVFLILRALGELVLHRPSSGSFVSYAREFFGEKAAYAVGWMYFLHWAMTSIVDTTAIATYLQRWTIFTVVPQWILALIALTVVLSMNLISVEWFGELEFWAALIKVLALMAFLVVGTVFLAGRYPVDGHSTGLSLWNNHGGLFPTSWLPLLIVTSGVVFAYSAVELVGTAAGETAEPEKIMPRAINSVVARIAIFYVGSVALLALLLPYTAYKAGESPFVTFFSKIGFHGAGDLMNIVVLTAALSSLNAGLYSTGRVMHSIAMSGSAPRFTARMSKSGVPYGGIVLTAVITLFGVALNAFKPGEAFEIVLNMSALGIIAGWATIVLCQLRLHKLANAGIMQRPRFRMPFSPYSGYLTLLFLLVVLVTMASDKPIGTWTVATLIIVIPALTAGWYLVRKRVMAVARERLGHTGPFPAVANPPVRSRD

SEQ ID NO: 8187 - protein, 145 aa, Capsicum annuum
MAPKAAAGKKPAEKKPVEEKKAEEVPAEKKPKAGKKLPKDAGRPDKKKKRAKKSIETYKIYIFKVLKQVHPDIGISSKSMGIMNSFINDIFEKLAQESSRLARYNKKPTITSREIQTAVRLVLPGELAKHAVSEGTKAVTKFTSS

SEQ ID NO: 8188 - protein, 369 aa, Trichodesmium erythraeum IMS101
MNTIVIKIGTSSLTNSETGNLALSTISSLIETIINLRQQGYQVVLVSSGAVGVGCDILGLTKKPRNISMKQAIAAVGQGQIMRVYNDLFSSLQQTVAQILLTKSDLSRRSSYVNAYNTFQQLFRLGVVPIVNENDTTAVEELNFGDNDTLSALVASLVEADWLFILTDVDRLYSADPRKNPDALPITLVGEIEQLKELKVQVGESVSGRGTGGMVTKIEAAKIATSAGVRTVITDGKVPTNIQKILNGESIGTQFEPQPEQVNGRKHWIANVLVPAGQLYLDQGAVKAISEYGKSLLAAGIIQVEGEFNSSDAVKLCNEKGQEIARGLVNYSSIELQKILGCRSENISDILGYVGAETVVHRNNLLLTN

SEQ ID NO: 8189 - protein, 161 aa, Glycine max
TRPPTRPAAAAATKPSIDSSSSPSLLTNNHPPPSKMDAAVDRLKDGFAKFKTEFYDKKPELFEPLKAGQAPKYMVFSCADSRVCPSVTMGLEPGEAFTVRNIANMVPAYCKIKHAGVGSAIEYAVCALKVELIVVIGHSRCGGIKALLSLKDGAPDSFHFL

SEQ ID NO: 8190 - protein, 550 aa, Candida albicans
MPYTPIDIQKEEADFQKEVAEIKKWWSEPRWRKTKRIYSAEDIAKKRGTLKINHPSSQQADKLFKLLETHDADKTVSFTFGALDPIHVAQMAKYLDSIYVSGWQCSSTASTSNEPSPDLADYPMDTVPNKVEHLWFAQLFHDRKQREERLTLSKEERAKTPYIDFLRPIIADADTGHGGITAIIKLTKMFIERGAAGIHIEDQAPGTKKCGHMAGKVLVPVQEHINRLVAIRASADIFGSNLLAVARTDSEAATLITSTIDHRDHYFIIGATNPEAGDLAALMAEAESKGIYGNELAAIESEWTKKAGLKLFHEAVIDEIKNGNYSNKDALIKKFTDKVNPLSHTSHKEAKKLAKELTGKDIYFNWDVARAREGYYRYQGGTQCAVMRGRAFAPYADLIWMESALPDYAQAKEFADGVKAAVPDQWLAYNLSPSFNWNKAMPADEQETYIKRLGKLGYVWQFITLAGLHTTALAVDDFSNQYSQIGMKAYGQTVQQPEIEKGVEVVKHQKWSGATYIDGLLKMVSGGVTSTAAMGQGVTEDQFKESKAKA

SEQ ID NO: 8191 - protein, 675 aa, Xanthomonas campestris pv. campestris str. ATCC 33913
MRLTARSEPSSAPFPSGTGRQIGADCNGPSACQALQFTPFCPSRDNEMSDWSLDQARKTYSIPHWADGYFDVNDAGHVVVRPTADGPAVSLPEVVDAARAAGAKLPLLVRFPDILGQRLGKLQAAFAQAQADWDYAGGYTAVYPIKVNQHRGVAGTLASHHGEGFGLEAGSKPELMAVLALSRPGGLIVCNGYKDREYIRLALIGRKLGLQTFIVIEKPSELNLVLEEARALDVKPGLGVRMRLASLGAGKWQNSGGDKAKFGLSPRQVLDLWKSLRDTEYADSLNLLHFHMGSQISNVRDIANGMREATRYFVELSRLGAKISHVDVGGGLGIDYEGTRSRSYCSINYGLHSYASNIVQPLASACEEHGLPPPRIVTECGRAMTAHHAVLIANVSEVEQAPEGRVPDAHDDEPAAIRHLREIHDELDVRPAVELFQEAQHFHAEGLSAYALGQIDLTHRARIDDLFYAIAHGVRARLSFDEKSHRPVLDELNERLVDKYFVNFSVFESIPDVWAIDQVFPIVPIERLNEAPQRRGIIADMTCDSDGMVKTYVENESLDSSLPLHGLNPGESYRIGFFLVGAYQEILGDIHNLFGDTDAVEVAVDGTGYRIAQQRRGDTTDVMLDYVGYQLDTLRATYAERIAAAQLPPERAQELHDALEAGLTGYTYLSDEPLG

SEQ ID NO: 8192 - protein, 299 aa, Chlorobaculum tepidum
MRQLKISKQITNRESLSLDRYLQEIGKYDLLTARRRGEAHEGHKEGYDMPVDTVEYKRAKRALDKLIKGNLRFVVSVAKQYQNQGLTLGDLINEGNLGLIKAAKRFDETRGFKFISYAVWWIRQSILQALAEQSRIVRLPLNRVGTLNKISKAYSQLEQEYERDPNTKELADLLDMDSQDVADTLKIAGRHVSVDAPFAQGDDNRLLDVLQNDGHMPDYTLNRDSLSLEVERSLSVLAPREADVIRSYFGIGMDNPLTLEEIGEKFKLTRERVRQIKEKAIRRLRQSAYNKVLKEYIGS

SEQ ID NO: 8193 - protein, 224 aa, Candida albicans
MSGFRVLDLVKPFSPFLPEVIAPERKVQFQQRVMWTIITLLIFLVMSEIPLYGIASSDSSDPLFWLRMMLASNRGTLMELGISPIVSSGMLFQLLQGTKIIHVDMQNKNDRETFQTAQKLLAILLAVGQATVYVLTGMYGPPSSLGVGVCSLLILQLVFASTIVILLDELLQKGYGLGSGVSLFTATNTCEQVFWKAFAPTTSTSAKGTEFDGAVVAMFHLLGS

SEQ ID NO: 8194 - protein, 1032 aa, Arabidopsis thaliana
MEGGRGGGDGNFLPNSNFGVFSDSAMDMDFMDELLFDGCWLETTDGKSLKQTMGQQVSDSTTMNDNNNNSYLYGYQYAENLSQDHISNEETGRKFPPIPPGFLKIEDLSNQVPFDQSAVMSSAQAEKFLLEESEGGRRYWIAPRTSQGPSSSVKERLVQAIEGLNEEVQDKDFLIQIWLPIQQEGKNFLTTSEQPHFFNPKYSSLKRYRDVSVAYNFLADEDSKESVGLPGRVFLKKLPEWTPDVRFFRSEEYPRIKEAEQCDVRGSLALPVFERGSGTCLGVVEIVTTTQKMNYRPELDNICKALESVNLRSSRSLNPPSREVCKNGLLNQTLTSSIHRNNEFWLLNVICPFCFSFCRVYDLPLALTWAPCARQGKVGSRHSDENFSECVSTVDDACIVPDHQSRHFLEACSEHHLLQGEGIVGKAFNATKLFFVPEVTTFSKTNYPLAHHAKISGLHAALAVPLKNKFNSSVEFVLEFFFPKACLDTEAQQDMLKSLSATLQQDFRSLNLFIDKELELEVVFPVREEVVFAENPLINAGTGEDMKPLPLEEISQEDSSWISHMIKANEKGKGVSLSWEYQKEEPKEEFMLTSGWDNNQIGSGHNNFLSEAEQFQKVTNSGLRIDMDPSFESASFGVGQTLLGSRRPGEKRRTKTEKTIGLEVLRQYFAGSLKDAAKSIGESDDSFTQFHFHVAVCPTTLKRICRQHGITRWPSRKIKKVGHSLKKLQLVIDSVQGVQGSIQLDSFYTSFPELSSPHMSGTGTSFKNPNAQTENGVSAQGTAAAPKSPPSSSCSHSSGSSTCCSTGANQSTNTGTTSNTVTTLMAENASAILKRARSEVRLHTMNQDETKSLSRTLSHKTFSEHPLFENPPRLPENSSRKLKAGGASKVKATFGEAKHEIARRFNIDNIAPFDLKYLDDDKEWVLLTCEADLEECIDIYRSSQSRTIKISVHEASQVKLGAGICVQEREPPSGVIFQVPNQSISVKSSNQYLLKKQVSLQTKGSRFGLFLFLSDSVSDTKEDIDPEPIIAT

SEQ ID NO: 8195 - protein, 376 aa, Burkholderia fungorum LB400
MASRQEIKRYKANLSDELHSAALYETLADAEKDDTRKQVYGDLARSERDHAQVWADKLRANGLEPKGAGHAVKTRLMKALVRLFGASFVLPTLAAAEYADRNKYEGQPDAGRMSADEQHHAAIVRTLAHGGGDTDLSQGARIAAAEQWHKGVGAGNDLRAAVLGANDGLVSNFCLIMGVAGAGTGNKAILLTGLAGLIAGACSMALGEWLSVTNARELARTQIAKEAQEIKETPEAEEHELTLIYRAKGLDANEAKRVASQMMRDPDKALDTLTREELGLDPAELGGNPWSAAGVSFCLFSLGAIFPVMPFLWTRDYNAIVQCVVLSMLALASIGVFTSLFNGRSAGFSALRQIVIGLIAAAFTFGVGRLFGVSVS

SEQ ID NO: 8196 - protein, 394 aa, Nostoc sp. PCC 7120
MVSNNVLNEFKTCTQLQYNGQLIISSPKGQQWTFYYRLGRIVWATGGTHPFRRWRRLMAQHCPQIDVDKMQLRSQDISMSYWDYRLLEILYKKQKIQREQIHIIVDNTINELLFELAQQSNFVTISCERNQKVVLETPMSFTSADVSMKQMLESWKNWSEAGLVNICPDLAPIICRPEQLQQQVSPSVYKNFVTLINGKSTLRDLAAKMRQNVLPVSRSLLPYVLKGIIELVELPDLPLAVVETLDKSTSAQPTKSKVPVIACVDDSPQVCKLLEDIITANGMKFIKIQDAVQALPLLIQEKPDLIFLDLIMPVASGYEICTQLRRISTFANTPVIILTGNDGLLDRVRAKVVGSTDFITKPVAADRVMSVVRKYLPMQPISTAKTGSRLEFCQ

SEQ ID NO: 8197 - protein, 543 aa, Solanum demissum
MEVNLRGLSNSFSFSFSRAPWDAIDGKLMVVKVHRAYRNGGENIEWRKPVPWVFLVALYFILIEFTLDYILMKYAFFTIPQNQVEGAQQGASSMISSKLETVATQGKAPTCLANENVLKVNIPPMNVFQARKPYTITKQREKWTEEEHQRFLEALKLYGRAWRQIEEYVGSKTAIQIRSHAQKFFAKIARDSGNDGDESLNAIDIPPPRPKKKPLHPYPRKIADSSVANKAVSSQPERSPSPNASGRDSCSPDSVLPAIGLGAAEYSAAEQQNSRFSPVSCTTDAHTANVISAENDGESMSSNSNTVEEIHVALKPVAASTCPITNSEFMECDIVHMENSCNGEKLAVEPPSASIKLFGKTVFVPDANNLAPPALYNTEKEIEISNEDVLHAFQANQANSPFILAMVPGNMIPPASWLSQNMLENNPESTAAFPAATISWWSWYQDLIYRSISSCGQTAVGTAAHCQGPKDEEPQREGSSTGSSIGSASEVDDGNRSSETVESKCTTKSKGFVPYKRCLAERDGKSSGAVLEERESRRVRVCS

SEQ ID NO: 8198 - protein, 368 aa, Haemophilus influenzae 86-028NP
MNKKTIVVKFGTSTLTQGSPKLNSPHMMEIVRQIAQLHNDGFRIVIVTSGAIAAGRHYLNHPQLPPTIASKQLLAAVGQSQLIQAWEKLFAIYDIHIGQLLLTRADIEDRERFLNARDTLHALLDNHIIPVINENDAVATAEIKVGDNDNLSALVAILVQAEQLYLLTDQQGLFDSDPRKNPEAKLIPVVEQITDHIRSIAGGSGTNLGTGGMMTKIIAADVATRSGIETIIAPGNRPNVIADLAYEQNIGTKFIAHQSDRLESRKQWLFAAPSAGIITIDDGAKNAILEQNKSLLPAGIINVEGRFSRGEVVKICTQSGKDIVLGMPRYNSDALQLIKGRKSADIENVLGYEYGAVAMHRDDMIILS

SEQ ID NO: 8199 - protein, 288 aa, Debaryomyces hansenii CBS767
MGSFDTNTSAKPRISTNDGERPRSNVKLPSIHELTSNSSIDGRGHSSISPRVSHGNIHHQGMGNDTLDRYRYPINPSIPGYYTGSESRGSIGPSPIETHINPINKILPTPATSYSDKPPQTQYRYYQSPPALSYPHHIVYPPQQAVYYPQYAPPVPTVSGSNPFVAPEVINKTNNVCQRCGTTETPEWRRGPGGVKTLCNACGLFHAKLVKRKGAALAAEEVLNNKVCKGKNGRRISIKKNFIDDDRLNSGLFPSPAAPANTTKNTTKHVGELPPPATSLVSPALIRH

SEQ ID NO: 8200 - protein, 535 aa, Triticum aestivum
MGLADLIIAMKKRRQQIQAGSSKPANPIPGISIPSGSKRTRPSCEQDDYSQGTKTMRFSGPALPEDIWCHIHALLPLPDAARAACVSHEFLRSWRCRPNLTFSQETLGVNLTYCERTLRTGEEKLALKFTKIVDEIMKKHTGIGVKTFKLQYCGSRIYTSRLKSWFKIAVNPGLEELVLSLPVVVYDPKYYNFPCSLLFNGSGKSISYLNLKGCAFHPVAGLGCLRKLHLSRVHITGDELWCLLSNSLVLKELNLSQCNKITRLKIPCLLNQFNHLTVFGCKTLELIENKAPNLCTIHIDTTLLRLLSGDSLQVKNLEMLWPLEYNLVYYARAELPRIMPNLETLIISSAGEVLNTPIVRAKFLHLKLLEICLSVAEGAFSPAYDYLSLAFFLDACPVLETFELSVYQTRMKHDSVSGDYSLLRKMPERHHVSIKNVKIDGFCSAKSMIELTCHILDSATSLENLTLDTIYGADYEHVDRLAVHEIGGCSSPIGKRMIRDAHKAVLAIEKYIVGKVPSNVQLNIKKPCSQCHSVK

SEQ ID NO: 8201 - protein, 386 aa, Pseudomonas fluorescens Pf-5
MLFRPAVYFTQRPDSMLAIPLFEVSQMSVSTSPDRHLLVIGGYGVVGTAVVELMHRTPGWQLTTAARRRPPTSLLDGSPAPAHISADLLDVAGTARAFAGLGSVTDLVFCAYSERESMAATVAPNLAMLEHSLKALRQAGARLRQVVLIGGGKSYGEHLGSYKTPAKESDPRFMGPIFYNDQEDLLWHEAEREGFAWTVLRPDGVMGPSLNSPMNILTGIASFAAISQALNLPLRFPGSLQAWSALHQATDSRVLAQAVLWALTSPNAQQQVFNVTNGDHFRWQHLWPQIAGFFGLASAAPQPMNLGVQMADKAPLWARIVQEQQLRPTPWEQIAAWPFVDGWLNTGYDMVQSTIKIRQAGFTGCIDSHQSVLEQLQRLRDYRLIP

SEQ ID NO: 8202 - protein, 764 aa, Chenopodium rubrum
MGVVLLPDLGTEILIPVCAVIGIVFSLIQWYVVSQVKLSPDSGRSNNNKNGFSENLIEEEEGINDQSVVAKCAEIQNAISEGSTSFLYTMYQYVGIFMIAFAVLIFVFLGSVEGFSTKSQECTYDKSKTCKPALATAIFSTVSFLLGAVTSLASGFLGMKIATYANARTTLEARKGVGKAFIVAFRSGAVMGFLLAANGLLVLYITILLFKLYYGDDWEGLFEAITGYGLGGSSMALFGRVGGGIYTKAADVGADLVGKIERNIPEDDPRNPAVIADNVGDNVGDIAGMGSDLFGSYAESSCAALVVASISSFGINHELTAILYPLLISSVGIVICLITTLFATDFFEIKAVKEIEPALKKQLVISTALMTVAVAVISWVALPSSFTIFDFGSQREVKNWQLFLCVAVGLWAGLIIGFVTEYYTSNAYSPVQDVADSCRTGAATNVIFGLALGYKSVIIPIFAIAVSIFVSFSFAAMYGIAVAALGMLSTIATGLAIDAYGPISDNAGGIAEMAGMSHRIRERTDALDAAGNTTAAIGKGFAIGSAALVSLALFGAFVSRAAISTVDVLTPKVFIGLLVGAMLPYWFSAMTMKSVGSAALKMVEEVRRQFNEIPGLMEGTAKPDYANCVKISTDASIKEMIPPGALVMLTPLIVGTLFGVETLSGVLAGSLVSGVQIAISASNTGGAWDNAKKYIEAGASEHARQLGPKGSDAHKAAVIGDTIGDPLKDTSGPSLNILIKLMAVESLVFAPFFATHGGLLFKIF

SEQ ID NO: 8203 - protein, 250 aa, Brassica juncea
MTKNYPTVSEVYQKVYEKCKRKLRGLIAEKNCAPIMVRLAWHSAGTFDCASRTGVPFGTMRFDGELAHGANSGLHIALRLLEPIREQFPTISFADFHQLAGVVAVEVTGGPDIPFHPGREDKPQPPPEGRLPDATKGCDHLRQVLLKQMVLTDQDIVALSGAHTLGRYRAAPSGFEGAWTSNPLIFDNSYFKELLTGEKEGLLQLVSDKALLDDPVFRPLVEKYAADEEAFFADYAEAHLKLSELGFADA

SEQ ID NO: 8204 - protein, 249 aa, Nitrosomonas europaea ATCC 19718
MKKLVLLRHGESIWNQENRFTGWTDVDLTPKGLKEAEEAGRLLRENGFSFDIAYTSLLKRAIRTLWIALDEMDQMWTPIELNWRLNERHYGALQGLNKAETAKQYGDEQVLVWRRSYDIRPPSITINDERYPGFDLRYRNMSSGDIPLAESLKDTVARFLPYWNQSIAPQIKAEKKVIIAAHGNSLRALIKHLDNISDQDILNCNIPTGIPLVYELDDDLKPLNSYYLGDAGQIGEAISAVANQGKSGA

SEQ ID NO: 8205 - protein, 329 aa, Coffea canephora
MCGGAILEGLIPPRNNNDGTRRLSSADLWPSAADFWPNSHLAKPSRSNPTDAPHKATHETCHDPHDEAGGKQQVLPKGAKRQRKNLYRGIRQRPWGKWAAEIRDPRKGVRVWLGTFNTAEEAARAYDKEARKIRGKKAKVNFPNEDSTSYPTCIPSQTQYQQVHIPSPPTFCGPSSSNCKFNQLRVGSSDCSASDCYHANSIDDCARFTNMMGFRNPSEEVSGSGSSDNECFLGHLKQVAKAAAEEEAASVITENDTKDNNKAAESEEYQVEKLSEELLAYESFMKFYQIPYIDGQSAAASANPAQELATSIQLWSFDDVSPANRPMPL

SEQ ID NO: 8206 - protein, 686 aa, Carboxydothermus hydrogenoformans Z-2901
MENGMTLAYYGLGAGILAILFALYLFSSVLKEDMGNEKMREISQAIFEGAMAYLNRQYKTLIPFALVVFVLLVVGFGYKEGDFGYGLKVGVSFLVGAIASALAGYAGMTSTTKANARTTQAARKSLNAALNVAFRAGGVMGMSVAGLGLLGVSALYIIFKDVHVIDSFAFGASAIAFFARVGGGIYTKAADVGADLVGKVEAGIPEDDPRNPAVIADNVGDNVGDTAGMGADLFESYGATTMAAMLLGLTFAKNHGFSEVLGATFPLLLGAAGIVAAIISTFFVRTSEDGNPQMALNIGLWSTNFITAIFTYIIAQYVFGSEWAPKIFIAVVSGLVVNVAIGSLTEYYTSNLKPPAQKIAEASTTGPATNIISGIAVGMRSTYLPIIVIVAAIMVGYWAAGFYGIALAAMGMLATAAMVVAVDSFGPVADNAGGIAEMAELGPEIRNKTDKLDAVGNTTAAVAKGFAIGSAALTALALFSAYTDLAKTNPNLQKYLVNGKFDLNITDPWVLVGLFLGGTVAFLVAALTMESVGKAAFDMIEEVRRQFREIPGLMEGKARPDYARCVSISTAAAIRQMIAPGLLAVGAPLAIGFILGFKALTGYLAGVTATGVLLAIYMANAGGAWDNAKKYIEAGNLGGKGSDTHKAAVVGDTVGDPFKDTSGPAMNPLMKVAGTFALIIVPLLLF

SEQ ID NO: 8207 - protein, 372 aa, Carboxydothermus hydrogenoformans Z-2901
MREILKNVRRLVVKIGSSSLTHPETGKINLAAMERFVRECADLKNAGFEVIIVSSGAIAAGMGRLALPEKPKNLPEKQACAAVGQGVLMHLYEKFFSEYQVIAAQVLLTGEDLAVRKRFLNAKHTFSALLNYGVVPVVNENDTVAVEEIRFGDNDTLSARVAVLVEADLLVLLSDIDGLYTADPRKNSNARFLPEVLEINEEIEQLAGGSGTAVGTGGMETKIEAAKIAVNAGIPMVIARADYGNLRRILRGEEVGTFFYPKKKKQWKKQWLLSGARVQGSIIVDLGAEEALCSGGKSLLPSGVLGVEGEFPTGAIVAVKNLKGRVIAKGLTNYAAQDILKIKGLHSWEIADVLGHKDYDEIIHRDNLVLVD

SEQ ID NO: 8208 - protein, 364 aa, Populus balsamifera subsp. trichocarpa x Populus deltoides
MGSTGETQMTPTQVSDEEAHLFAMQLASASVLPMILKTAIELDLLEIMAKAGPGAFLSTSEIASHLPTKNPDAPVMLDRILRLLASYSILTCSLKDHPDGKVERLYGLAPVCKFLTKNEDGVSVSPLCLMNQDKVLMESWYYLKDAILDGGIPFNKAYGMTAFEYHGTDPRFNKVFNKGMSDHSTITMKKILETYKGFEGLTSLVDVGGGTGAVVNTIVSKYPSIKGINFDLPHVIEDAPSYPGVEHVGGDMFVSVPKADAVFMKWICHDWSDAHCLKFLKNCYDALPENGKVILVECILPVAPDTSLATKGVVHIDVIMLAHNPGGKERTEKEFEGLAKGAGFQGFEVMCCAFNTHVIELRKN

SEQ ID NO: 8209 - protein, 281 aa, Spinacia oleracea
MSKEVSEEAQAHQHGKDYVDPPPAPFFDLGELKLWSFWRAAIAEFIATLLFLYITVATVIGHSKETVVCGSVGLLGIAWAFGGMIFVLVYCTAGISGGHINPAVTFGLFLARKVSLLRALVYMIAQCLGAICGVGLVKAFMKGPYNQFGGGANSVALGYNKGTALGAEIIGTFVLVYTVFSATDPKRSARDSHVPILAPLPIGFAVFMVHLATIPITGTGINPARSFGAAVIFNSNKVWDDQWIFWVGPFIGAAVAAAYHQYVLRAAAIKALGSFRSNPTN

SEQ ID NO: 8210 - protein, 908 aa, Serratia plymuthica
MTKYSLRARMMILILAPTLLIGLLLSTFFVVHRYNELQEQLVDAGASIIEPLAVASEYGMTFRSRESVRQLVSLLHRRHSDIVRSITVFDAQNNLFVTSNYHHNFAQLQLPKGVPMPTDLMLTRRGNSLILRTPILSESQYPDQNATDPVPQDNNLGYVAIELDLQSVRLRQYKEVFISTLLLLLCMCIAILFAYRLMRDVTGPIRNMVNTVDRIRRGQLDSRVEGFMLGELHMLKNGINSMAMSLTAYLEEMQQNIDQATSDLRETLEQMEIQNVELDLAKKRAQEAARIKSEFLASMSHELRTPLNGVIGFTRQMLKTEMSVTQTDYLQTIERSANNLLTIINDVLDFSKLEAGKLVLEHIPFSLRETLDEVIVLLAPSAHEKGLELTLDVHNDVPEQVIGDSLRLQQIITNLLGNAIKFTETGNIDIRVELRGQQDHQVELEVQIHDTGIGISERQQSQLFQAFRQADASISRRHGGTGLGLVITQKLVKEMGGDICFHSQLNRGSTFWFHITLELHEGMLSLPSSLPDLRGKTLGYIEANPMAAEATLNMLSVTSLVITHSPTLAQLPKKNYDFLLVGVPIPFRDNLAQHESKLKAALNIAGRVILALPCQSQINAEQLKQQGAIGCLIKPITSNRLFPLLRMEPPQRLLAAPERKRLPLTVMAVDDNPANLKLIGTLLAEQVEKTLLCESGEEALALARDNVLDLILMDIQMPNIDGIRTGELIRQLPHHNSTPIVAVTAHAVSGEREHLLQAGMDDYLAKPIDEAMLTRVLARYYSGEPAAEPLLSLDWPLALRQAANKEDLARDLLQMLLDFLPQVSERVQAVLDGTPDDSILDLIHKLHGSCSYSGVPRLKQLCFYLEQQLRKGVGNEELEPEWLELLDEIELVSQAARSHLESDRPTTS

SEQ ID NO: 8211 - protein, 158 aa, Clostridium perfringens str. 13
MEIYDISVKDINGENVSLERYRGKVLLIVNTASKCGFTKQFDGLEELYEKYKDEGFEVLGFPCNQFKEQDPGSNSEIMNFCKLNFGVTFPMFEKIDVNGENESLLYSYLKEQKSGMFGSKIKWNFTKFLVDREGNVIKRFSPQTTPKSIEKDIEELLA

SEQ ID NO: 8212 - protein, 481 aa, Vibrio fischeri ES114
MSNRLRRTKIVTTLGPATDRDNNLEKIIAAGANVVRMNFSHGSPEDHIERTRKVREIAAKLGTHVAILGDLQGPKIRVSTFKEGKIQLAIGDKFTLDSDLPKGEGNQDSVGLDYKELPQDVTTGDVLLLDDGRVQLRVTAVEGNKVHTEVTVAGPLSNNKGINKQGGGLSADALTEKDKADIITAAAMKVDYLAVSFPRNGEDMNYARRLARDAGLEAQLVAKVERAETVASEEALDDIILASDVVMVARGDLGVEIGDPELVGVQKQLIRRARSLNRTVITATQMMESMISSPMPTRAEVMDVANAVLDGTDAVMLSAETAAGDFPVETVTSMAGVCMGAEKVPTVNVSNHRLDRRFTTPEETIAMSTMYAANHMEGITAMITLTESGRTPLMMSRLSSGLPIFALSRNEGTLNRAALYRGVTPVFFDEKADSGLPSTYAAINTLKSKGLLSTGDQVIITQGDVMDIVGSTNCMRIITVE

SEQ ID NO: 8213 - protein, 59 aa, Brassica napus
  misc_feature (40)..(40): Xaa can be any naturally occurring amino acid
  misc_feature (48)..(48): Xaa can be any naturally occurring amino acid
  unsure (1)..(59): unsure at all Xaa locations
MEQPQSPGTKSVEIGETMEPLLRFTLRSHLDETVQSLDLXLPRDLCFXLLEEDDTDQLK

SEQ ID NO: 8214 - protein, 82 aa, Picea abies
MSCCGGNCGCGSSCSCGSGCKGCKRTLDLSFSEKTVEAPLFAATASDMGHFDGSSTVAGESGCCSEGCKCGANCTCDPCNCK

SEQ ID NO: 8215 - protein, 347 aa, Schizosaccharomyces pombe
MKGSHPNAGSLLEPLHKLNPFSENSTSGHRKNASDHSADGETRPIAIEMKDSKGNTVPVGNSRPSKASNWLAGLMEDKNQRWRRSMEDTHICLYDFGGNQDDGFVAVYDGHAGIQASDYCQKNLHKVLLEKVRNEPDRLVTDLMDETFVEVNSKIAKATHNDICGCTAAVAFFRYEKNRTRRVLYTANAGDARIVLCRDGKAIRLSYDHKGSDANESRRVTQLGGLMVQNRINGVLAVTRALGDTYLKELVSAHPFTTETRIWNGHDEFFIIACDGLWDVVSDQEAVDFVRNFVSPREAAVRLVEFALKRLSTDNITCIVVNLTRNPGDLDDSGLTADNDSYSNDYY

SEQ ID NO: 8216 - protein, 243 aa, Ralstonia metallidurans CH34
MDAMTTLQRWTRPTALKLASLAVLMVAAAMWELPAISAEAAVKIPAPAVDEKAGTSHTETAVFAGGCFWGVQGVFQHVRGVTRVTSGYSGGSASNAQYEMVGTGMTGHAESVEIRYDPTQISYGKLLQIFFSVAHNPTQLNYQGPDHGTQYRSAIFPRSPVQRSIAEAYITQLDTSKAYRAPIVTRVEDYKGFFPAENYHQDFLVKNPSYPYIVINDLPKIGNLKTMFPDVYRNDAVLVSKGG

SEQ ID NO: 8217 - protein, 245 aa, Zea mays; identical to SEQ ID NO: 867

SEQ ID NO: 8218 - protein, 377 aa, Bifidobacterium longum NCC2705
MSTPSQAEVRRMIAAAGTIVVKVGSSSLTQPSGHLDPDKLDALAAALAQVRLMGGRVVLVSSGAIAAGFGPLGFDSRPVDVATQQATAAVGQGLLMARYETAFGRFGIRVGQILITAEDTIRATQYRNVERTLDRLLDLGVVPIINENDSLASNEIRFGDNDRLSALVANLVRAEALVLLTDVDALYTAPPSQPGSRRVEYVPNVIDALGDIQVSGSGSKVGTGGMVTKLEAARVAAVSGIPTVLTCASNAGPAMMGDPVGTVFAPVKARGSSRRLWIGFAADPRGTIVVDAGAGQAIRGGRASLLAAGALEVHGDFSAGDPVWIDAESGEHLARGLAGFDSEEIPQMLGRNTAQLKRFLGPQYAHPLVHRDNLVLV

SEQ ID NO: 8219 - protein, 156 aa, Ralstonia metallidurans CH34
MRITRRFLLSGGSLTATLAAVGGWRLLAAGNANAAGSGAQSFEVTLSDEAWRQKLTPAQYTVLRHEGTERPFSSPLNDEHRKGVFSCAGCQLDLFSSSTKFDSGTGWPSFWAPLANAVGTTEDRTFGMVRTAVHCRRCGGHLGHVFDDGPNRLLKY

SEQ ID NO: 8220 - protein, 446 aa, Candida albicans SC5314
MSSSSSLSSSTTTTATTTSARIRLPSISELTSRSTISGGSNNGNGSALKSQISPRLSDTSRILPSILKNTSGSSTPTSSSTPFKCPPIKSTIGGTLSSGNTQSNYVLGNTKINNLPRLSSPTLPAKVQPQQQPHLPPASSLSPVTRVINTPPQQPQSVSASTSPNTQYQYYQYQQQSSPIQQQQQQQQATPAATPTVMQMAQNQPSHPAPLQYATQQYYPQPVYYQSPAGVPPPPPSVTHQGHIIAVHQHPGHLPQVGVNGMPPNVGYTIVQPEIVNKSTNRCHRCGTTETPEWRRGPKGVRTLCNACGLFHAKLVKRKGAALAAEEVLNNKVTKGKNGRRISMKKHLLNESLKQQQQINGVGIPINGFNHQILPPSFKPQQGGIATLPPLMHGQYPNNVNNLVIHQPPPPQQQQQQQPHPQQQQQHMLAGGIPVAYPTQIPLIRH

SEQ ID NO: 8221 - protein, 253 aa, Bacillus megaterium
MDVEVKKNKNEPYLKDHEVKDLIKRSQQGDQIARDTIVQKNMRLVWSVVQRFINRGYEPDDLFQIGCIGLLKSVDKFDLSYDVKFSTYAVPMIIGEIQRFIRDDGTVKVSRSLKEMSNKIRKAKDELSKLLGRVPTVAEVAEHLDLTPEEVVLAQEANRAPSSIHETVYENDGDPITLLDQIADHTEAKWFDKIALKEAIEELDEREKLIVYLRYYKDQTQSEVAARLGISQVQVSRLEKKILKQMKLHMNDT

SEQ ID NO: 8222 - protein, 424 aa, Phaseolus vulgaris
MGNSEEGKSVKTGSPSSPATTTNQTNQPNFHVYPDWAAMQYYGPRVNIPPYFNSAVASGHAPHPYMWGPPQPMMPPYGPPYAAFYSPGGVYTHPAVAIGPHSHGQGVPSPPAAGTPSSVDSPTKLSGNTDQGLMKKLKGFDGLAMSIGNCNAESAELGAENRLSQSVDTEGSSDGSDGNTAGANQTKMKRSREETSTTDGEGKTETQDGPVSKETTSSKMVMSATPASVAGKLVGPVISSGMTTALELRKPLTVHSKENPTSAPQPCAAVPPEAWLQNERELKRERRKQSNRESARRSRLRKQAETEELARKVEMLTAENVSLKSEITQLTEGSEQMRMENSALREKLRNTQLGQREEIILDSIDSKRSTPVSTENLLSRVNNSSSNDRSAENESDFCENKPNSGAKLHQLLDTNPRADAVAAG

SEQ ID NO: 8223 - protein, 255 aa, Zea mays
  misc_feature (56)..(56): Xaa can be any naturally occurring amino acid
  unsure (1)..(255): unsure at all Xaa locations
MEPSSQPQPAMGVAAGGSQVYPASAYPPAATVAPPAVASAGLQSVQPFPANPAHMXAQHQIVYQQAQQFHQQLQQQQQQQLQQFWVERMTEIEATADFRNHNLPLARIKKIMKADEDVRMISAEAPVVFAKACEIFILELTLRSWMHTEENKRRTLQKNDIAAAITRTDIYDFLVDIVPRDEMKDDGIGLPRPGLPPMGAPADAYPYYYMPQQQVPGPGMVYGAQQGHPVTYLWQDPQEQQEQAPEEQQSLHERD

SEQ ID NO: 8224 - protein, 318 aa, Escherichia coli O157:H7
MNPIAVTLLTGFLGAGKTTLLRHILNEQHGYKIAVIENEFGEVSVDDQLIGDRATQIKTLTNGCICCSRSNELEDALLDLLDNLDKGNIQFDRLVIECTGMADPGPIIQTFFSHEILCQRYLLDGVIALVDAVHADEQMNQFTIAQSQVGYADRILLTKTDVAGEAEKLRERLARINARAPVYTVTHGDIDLGLLFNTNGFMLEENVVSTKPRFHFIADKQNDISSIVVELDYPVDISEVSRVMENLLLESADKLLRYKGMLWIDGEPNRLLFQGVQRLYSADWDRPWGDEKPHSTMVFIGIQLPEEEIRAAFAGLRK

SEQ ID NO: 8225 - protein, 644 aa, Nitrosomonas europaea ATCC 19718
MCGITGVFDTRSTSEIDRNLLHRMNETLTHRGPDEGEVYVESGLGLGHRRLSIMDVSSGQQPLFNEDGSVVVVFNGEIYNFQKLVGELTALGHRFRTHCDTEVIVHAWEEWGERCVERFSGMFAFGVWDRNRQTLFMARDRLGIKPFYYTLLDNGLFLFASELKALLVHPDFDKTFDHRAIEDYFAYGYIPEPKTIFKNAFKLNPGHLLSLQRGQQTVQSREYWDIPFTPHGSLSEEEAAEELILRLRNAVDSHLMSEVPLGAFLSGGVDSSAVVAMMGGLMKEPVNTCSIAFSDPAFDESDYARLVAERYQTRHFTEQVQQDDFDLIDRLAALYDEPFADSSAIPTYRVCELARKRVTVALSGDGGDENFAGYRRYRWHMIEERLRSKLPLGLRKPLFGLLGSVYPKADWAPKFLRAKTTFESLARDSVEGYFHSVSILDNKLRMQLFTRDFYRDLQGYRAVEVLRDYADKSPTKDALSLIQYLDMKTYLVGDILTKVDRASMAHSLEVRVPLLDHELVEWVSGLPASMKLRQQEGKYILKRSLEPYLPNEVLYRNKMGFSVPLASWFRGPLRERVRTALLGNTLAGTGIFDMGFIKKMLDQHQSGRRDYSAPIWTLLMFEAFLRNILSMGNMSYTGQDKKVA

SEQ ID NO: 8226 - protein, 612 aa, Serratia plymuthica
MEQNPQSQLKLLVQRGKEQGYLTYAEVNDHLPEDIVDSDQIEDIIQMINDMGIQVMEEAPDADDLLLAENSNSTDEDAEEAAAQVLSSVESEIGRTTDPVRMYMREMGTVELLTREGEIDIAKRIEDGINQVQCSVAEYPEAITYLLEQYDRVEAGEARLSDLITGFVDPNAEEDIAPTATHVGSELSTEEQNDDEEDEEDDDDAEDDNSIDPELARQKFTDLRDQYEATRLVIKKNGRSHASAAEEILKLSEVFKQFRLVPKQFDFLVNSMRIMMDRVRTQERIIMKLCVEQCKMPKKNFVTLFAGNETSDSWFEAALAMAKPWSEKLKDVTDDVQRSLQKLRQIEEETGLTIEQVKDINRRMSIGEAKARRAKKEMVEANLRLVISIAKKYTNRGLQFLDLIRKGNIGLMKAVDKFEYRRGYKFSTYATWWIRQAITRSIADQARTIRIPVHMIETINKLNRISRQMLQEMGREPTPEELAERMLMPEDKIRKVLKIAKEPISMETPIGDDEDSHLGDFIEDTTLELPLDSATSESLRSATHDVLAGLTAREAKVLRMRFGIDMNTDHTLEEVGKQFDVIRERIRQIEAKALRKLRHPSRSEVLRSFLDD

SEQ ID NO: 8227 - protein, 447 aa, Trichophyton rubrum
MREIVHLQTGQCGNQIGAAFWQTIAGEHGLDGSGHYTGSSDLQLERMNVYFNEASSKKYVPRAVLVDLEPAALDAVRAGPFGQLFRPDNVVFGQSGAGNNWAKGHYTEGANLVDQVIDVVRREAEGCDCLQGFQITHSLGGGTGAGMGTLLISKIREEFPAGMMATFSVVPSPMVSDTVVEPYNATLSIHQLVEHSDETFCIDNEALYNICMRTLKLTNPSYGDLNHLVSAVMSGVSTSLRFPGQLNSDLRKLAVNMVPFPRLHFFMVGFAPLTSRNAYSFRAVSVPELTQQMFDPKNMMAATDFRSGRYLTCSAIFRGKVSMKEVEDQMRNIQNKNSAYFVEWIPNNVQTALCSIPPRGLQMSSTFVGNSTSIQELFKRVGDQFTAMFRKKAFLFWYTGEGMDEMEFTEAENNMNDLVSEYQQYQDASVSDGEEEYLEDEQLEGEE

SEQ ID NO: 8228 - protein, 518 aa, Oryza sativa (japonica cultivar-group)
MVKAYIAIFSIAVLLLIHFLFRRRGRSNGMPLPPSPPAIPFFGHLHLIDKPFHAALSRLAERHGPVFSLRLGSRNAVVVSSPECARECFTDNDVCFANRPRFPSQMLATFNGTSLGSANYGPHWRNLRRIATVHLLSSHRVSGMSGIISGQARHMVRRMYRAATASAAGVARVQLNRRLFELSLSVLMEAIAQSKTTRREAPDADTDMSMEAQELRHVLDELNPLIGAANLWDYLPALRWFDVFGVKRKIVAAVNRRNAFMRRLIDAERQRMDNNDVDGGDDGEKKSMISVLLTLQKTQPEVYTDTLIMTLCAPLFGAGTETTSTTIEWAMSLLLNHPEILKKAQAEIDMSVGNSRLISVVDVHRLGYLQCIINETLRMYPAAPLLLPHESSADCKVGGYHIPSGAMLLVNVAAIQRDPVIWKEPSEFKPERFENGRFEGLFMIPFGMGRRRCPGEMLALQTIGLVLGTMIQCFDWGRVDDAMVDMTQSNGLTSLKVIPLEAMCKPREAMCDVLRKFM

SEQ ID NO: 8229 - protein, 331 aa, Serratia plymuthica
MNQNTLKVNELQDDADFDENATEAESFDEKALVEEEASESDLAEELLSQGVTQRVLDATQLYLGEIGYSPLLTAEEEVYFARRALRGDVPSRRRMIESNLRLVVKIARRYSNRGLALLDLIEEGNLGLIRAVEKFDPERGFRFSTYATWWIRQTIERAIMNQTRTIRLPIHIVKELNVYLRTARELSHKLDHEPSAEEIAEQLDKPVDDVSRMLRLNERITSVDTPLGGDSEKALLDILADEKDNGPEDTTQDDDMKQSIVKWLFELNAKQREVLARRFGLLGYEAATLEDVGREIGLTRERVRQIQVEGLRRLREILQLQGLSIEALFRE

SEQ ID NO: 8230 - protein, 396 aa, Lycopersicon esculentum
MDGSVPQTDTMMSDVAAPPAQQPPPPSQPLAGMDNIPATLSHGGRFIQYNIFGNIFEVTAKYKPPIMPIGKGAYGIVCSALNSETNESVAIKKIANAFDNKIDAKRTLREIKLLRHMDHENIVAIRDIIPPPQREAFNDVYIAYELMDTDLHQIIRSNQGLSEEHCQYFLYQILRGLKYIHSANVLHRDLKPSNLLLNANCDLKICDFGLARVTSETDFMTEYVVTRWYRGPELLLNSSDYTAAIDVWSVGCIFMELMDRKPLFPGRDHVHQLRLIMELIGTPSEAEMEFLNENAKRYIRQLPLYRRQSFTEKFPHVNPAAIDLVEKMLTFDPRRRITVEDALAHPYLTSLHDISDEPICMTPFSFDFEQHALTEEQMKELIYRESIAFNPEYQRM

SEQ ID NO: 8231 - protein, 93 aa, Streptococcus suis 89/1591
MLKPLGDRIVVKIEEKEQTVGGFVLAGASQEKTKEASVLAIGQGIRTLNGDLVAPAVAVGDTVLIDAHAGLEVKDGEQTVHIIREADILAIVE

SEQ ID NO: 8232 - protein, 420 aa, Bacteroides fragilis NCTC 9343
MELKRVVVTGLGAITPVGNNVPEFWENLVNGVSGAGPITHFDASQFKTQFACEVKGFDATQYIDRKEARKMDLYTQYAVAVAKEAVADSGLDIENEDLNRIGVIFGAGIGGIRTFEEETSNYALHKENGPKYNPFFIPKMISDIAAGQISIMYGFHGPNYATCSACATSTNAIADAFNLIRLGKANVIVSGGSEAAIAAAGVGGFNAMHALSTRNDEPQSASRPFSASRDGFVMGEGGGCLILEELEHAKARGAKIYAEVAGVGMSADAHHLTASHPEGLGAKLVMKNALEDAEMSPEEVDYINVHGTSTPVGDISEAKAIKEVFGEHAFELNISSTKSMTGHLLGAAGAVESIASILAIKNGIVPPTINHAEGDNDENIDYNLNFTFNKAQKREINVALSNTFGFGGHNACVIFKKYAE

SEQ ID NO: 8233 - protein, 239 aa, Carica papaya
PDTGGQVVYILDQVRALETEMLQRIKQQGLNITPRILIITRLLPDAVGTTCGQRMEKVYGTEYSDILRVPFRTEKGIVRQWISRFEVWPYLETSTEDVATEISKELQGKPDLIIGNYSDGNIVASLLAHKLGVTQCTIAHALEKTKYPDSDIYWKKLEDKYHFSCQFTADLIAMNHTDFIITSTYQEIAGSKDTVGQYESHSAFTLPGLYRVVHGIDVFDPKFNIVSPGADMSIYFPYT

SEQ ID NO: 8234 - protein, 284 aa, Photobacterium profundum SS9
MMTNSKQHTLLGECIAEFIGTGLLIFFGVGCVAALVLTGAEFGQWEISIMWGLGVAIAIYCTAGVSGAHINPAVTIALALFHGFDKRKVAPYIVAQMLGAFCSAALIYALYANLFTDYEAAQQIVRGSEASLATAGIFSTYPHPALSFGGAFAVEFVITAVLMFAILAIGDEKNGAPRGAMGPLLIGILIAVIGGSLGPLTGFAMNPARDFGPKFFAFLAGWGDMALTGGKDIPYMIVPLLAPICGAAFGGWLYPKAIALYLPGNKCTIPNQCEGTDEQDTAKA

SEQ ID NO: 8235 - protein, 521 aa, Symbiobacterium thermophilum IAM 14863
MVGITGLVLAVLFIALSLDFAYQQRQADADLLIKASLVAKQQQATRSFFSRSSGEYVHGGEARPLEPSEVGEGVSDIFADLSKSQVKQTNLHPRIPENAPDDFERAALEYFIKDPQNNEFWQRVTLSDGTPAFRYVMALRAEESCLRCHGQPKGELDPTGYPKEGLELGDVAGAISVVLPMRETLASARTESLRLAALVVFIALLCFGLIWLILYRQVATPLAELADVATHIGTGNFVIEPERLQSLKANQETAVVAQAFEQMSDRLQELYAGLEQKVAERTRELEEANRELERASRYKSEFLTMISHELRTPLTSIIAFTELLLNDPRLAPEQRESLSEVLESSQKLLGMITNLLDYSRLEAGKVKLFREVLDLRDLIRDGVRTIQPLAAKKRIMLSMDCAPEVPLVHADPLRISQVLLNLLSNAVKFTPEGGRVAVECRADQREVRVTVRDTGPGVPEEEQELIFQPFRQGREKGRPEGWGLGLALSASLVRAHDGRIWVESEPGHGAAFTFTLPIWFE

SEQ ID NO: 8236 - protein, 234 aa, Symbiobacterium thermophilum IAM 14863
MAMATGKKRILVVDDDPKILKALDQALQQEGYEVYRAEDGLQALEMARKVKPDLMILDIMLPKMDGFEVLAQLQSTGGVPTLILSARGEEMDKVVGFNVGADDYLVKPFRLSELLLRVRAILRRTAGAGAPVDEDRPLKFRDIEINRSSRTVIVRGQPVDLTPKEFDLLWLLASHPGHVFSREALLQRVWHSEYSGDEAALTVCVRRLREKIERDPGHPELIKTIWGIGYKFDG

SEQ ID NO: 8237 - protein, 607 aa, Mycoplasma pulmonis UAB CTIP
MYKKIFIFLTPLLLLTQTITISCINKNEKNWGDKNFKKNIEKENLNNLTYVDKSLEAKNEAPFIEKQKSNVIYQLTVYSFADGNNDGIGDFIGLKNNIDYFVKLGINTLYLSPIHPASSYHGYDVIDYLDVAPELGGMEAFKEFLKVSHANGIKVVMDLVFNHSSFEHPWFQEALNGNTKYQNYYYFLDENISKDTQGLGIDSQDLRNQFKNLKNKQASNKKYVAHFWPGMPDLNLNNSDLIKELKAIQRYWSKIGVDGFRYDAFYHFFDSNNQHKPRENGNQKINSIFQKLRSTNKEAINDNTQRSSKEPFLFGEWWKSPFEANDYLDIKNQGLDSVIDGRNWKDNINVSINAKEQRALLEFLNKNNSTWMPFLDNHDVERWINKVRRQINKNVASVDKLSELEISLMKYALVSLLSRAGSPILYNGNELNLHGGPKQAGDHFVREAFPWKDRTKQVDFYELRSGKENSRIFLNLSKNEEKIEDAIKNENSTFNLVKQLNEIRNKYQYVVSQDPNTIADLEEILSESEIRKYQNNLNLRKNNQGEYLLYIFGWGNNDISFKIKNNFKIDQILLQKNININTQTREISSSGIGTYAVLKINKKSEAI

SEQ ID NO: 8238 - protein, 317 aa, Mesorhizobium sp. BNC1
MKTYMDTDSFGHDHVFLGESHRRNERRVWLVIALTAAMMLIEIAAGVMFGSMALLADGFHMSTHAAAMLIAAGAYYYARKHAHNPRFTFGTGKFGDLAGFASAVILALIALFIGYESVMRLTDPIPISFGQAIAVAVVGLVVNLVSAWVLGGDQSHSHGPAHHGHHHHHGHEKHGTDHNIRAAYLHVLADALTSALAIIALTLGSLYGWIWLDPIMGVVGALVIARWSWGLIRQAGAVLLDYLPEEEELPQEIREAIEAEGDRISDLHVWQIGPGHHAAIVSVVTEEPRSLSFYRQKLAHIHELSHLTVEVERLQPA

SEQ ID NO: 8239 - protein, 234 aa, Clostridium perfringens str. 13
MASLLAELIGTMLLIILGDGVVANVVLKKTKGNSSGWIVITTGWALAVAIPAAIFTSVSGALFNPALTIALAIVGQFTWSQVIPYIIAQLLGAFLGAVVVYITYYNHFEETEDQNSKLGVFCTIPEIEDHKINFLTEFIGTFVLTFAVLGIGAQNIDYGVKVIIIGCLIWAIGLSLGGPTGYAINPARDFGPRLAHFLLPIPRKGSSKWEYAWIPIVAPIIGAICGALVYVNIF

SEQ ID NO: 8240 - protein, 544 aa, Mycoplasma pulmonis UAB CTIP
MKTKISKWNEKIIYQIFPRSFYDSNNDGNGDLKGIINKLKYLKLLGINAIWLCPIYETDFVDAGYDVSNYKEVWKKFGTINDFKELVKEAKKYDIDIIMDIVLNHTSTNHVWFKKAIESENNPEHNYYIWTKNPKNEESIFGGSAWEYVPNLNKYYFHLFSKEQADLNWESNETISAMVDVVNYWYNLGVKGFRLDAIQHVHKELKDEQFSHSFSSKMVAFLQKFLNQVKKDKDDIFFIAEASGITPEKVLKYSKDEEKIADNFFNFSTWYVGWGKQTGRNGYDPNWTVDNLVNDNFIEYQNNDKIENLMITNFLSSHDTSRAISRWGNENLFWKESAKSLALFQFMQKGLQCILYGEEIGMLNSVFKTRDDFRDIDVYNSYQLFVDKNKVYTEEEMTRFHNINSRDHSRLPMIWNNKTNYGFNDGFKPWIQFGKYFKNASVEEQIEDQNSIFYFYKNLIEARNKYKNILVYGKSFFEFEKDKKLIKITRQDKDNNYIISLINLTPREIEINDQDLGEILLTTYTDKKEFKNILRPYESIMFLR

SEQ ID NO: 8241 - protein, 336 aa, Triticum aestivum
MADFSSSNGVPPGFRFHPTDEELLLYYLKKKIGFEKFDLEVIREVDLNKIEPWDLQERCRIGSAPQNEWYFFSHKDRKYPTGSRTNRATTAGFWKATGRDKCIRTSYRKIGMRKTLVFYRGRAPHGQKSDWIMHEYRLEEIDEAQGGTSEDGWVVCRVFKKKCFFKIAGGGEGSSSQSADAGGGHMAVSSPLGGHDHADRAAMASHYMHGMHPQYHPQHASSFYYSQMQPPEAAYSHHVQVQDLLTNHRPAADAAGGGYDFSSLPVEHPGLDVGSSDGVAADGLAEGRDQTNGAADQQWQPMDGFSNGGGAAAVQQMSAMNSGQRGGEMDLWGYGR

SEQ ID NO: 8242 - protein, 247 aa, Spinacia oleracea
MAIAFGRFDDSFSWASIKAYIAEFISTLLFVFAGVGSCIAFAKLTEDAALSPSGLVAVAVCHAFALFVAVSVGANISGGHVNPAVTFGLALGGQITILTGILYWIAQCAGSVAACLLLKASTGGLATPIHSVAAGVGSIEAVVMEIIITFALVYTVYATAVDPKKGSIGTIAPIAIGFIVGANILAAGPFSGGSMNPARSFGPAVASLDFSDHWVYWVGPLVGGGLAGLIYGNVFMQDDHAPLSNEY

SEQ ID NO: 8243 - protein, 477 aa, Shigella flexneri 2a str. 301
MQVLHVCSEMFPLLKTGGLADVIGALPAAQIADGVDARVLLPAFPDIRRGVTDAQVVSRRDTFAGHITLLFGHYNGVGIYLIDAPHLYDRPGSPYHDTNLFAYTDNVLRFALLGWVGAEMASGLDPFWRPDVVHVHDWHAGLAPAYLAARGRPAKSVFTVHNLAYQGMFYAHHMNDIQLPWSFFNIHGLEFNGQISFLKAGLYYADHITAVSPTYAREITEPQFAYGMEGLLQQRHREGRLSGVLNGVDEKIWSPETDLLLASRYTRDTLEDKAENKSQLQIAMGLKVDDKVPLFAVVSRLTSQKGLDLVLEALPGLLEQGGQLALLGAGDPVLQEGFLAAAAEYPGQVGVQIGYHEAFSHRIMGGADVILVPSRFEPCGLTQLYGLKYGTLPLVRRTGGLADTVSDCSLENLADGVASGFVFEDSNAWSLLRAIRRAFVLWSRPSLWRFVQRQAMAMDFSWQVAAKSYRELYYRLK

SEQ ID NO: 8244 - protein, 225 aa, Mycoplasma pulmonis UAB CTIP
MFLRLILIKAIIFDLDGVIVETASLHFLAWKHEVAKLGINFTKEQNTSLKGLNRIDTLKAILKLHNYKLSDEKIEEIAQSKNQYYQRLLDQELNSSTILPNIKNFLDQAKKNNLKLALASSSHNAKFILKKVELLSYFDFIVNPSEIKNGKPNPEIFLKALEGLNLKASEAIGIEDALAGIYGLRQAKIFAIAISNGENENWSEANLVLNTTKELDLDKILKSFS

SEQ ID NO: 8245 - protein, 164 aa, Glycine max
  misc_feature (145)..(145): Xaa can be any naturally occurring amino acid
  unsure (1)..(164): unsure at all Xaa locations
MEDERSTQSYQGGEAAEQVEVTDRGLLGNLLGKKKAEEDKEKEEELVTGMEKVSVEEPEVKKEEHEDGEKKETLFSKLHRSSSSSSSSSDEEEEEVIDDNGEVIKRKKKKGLKEKLQEKLPGHKDTDGEHVTVLPAPAAPASVQXHHDTDLDVEHIDEDVKTEA

SEQ ID NO: 8246 - protein, 228 aa, Glycine max
  misc_feature (86)..(86): Xaa can be any naturally occurring amino acid
  misc_feature (186)..(186): Xaa can be any naturally occurring amino acid
  unsure (1)..(228): unsure at all Xaa locations
MGNSEEEKSTKTEKPSSPVTVDQANQTNQTNIHVYPDWAAMQAYYGPRVTMPPYYNSAVASGHAPHPYMWGPPQPMMPPYGPPYAXAIYPHGGVYTHPAVPIGPHTHSQGVPSSPAAGTPLSIETPPKSSGNTDQGLMKKLKEFDGLAMSIGNGHAESAERGGENRLSQSVDTEGSSDGSDGNTSXDGEGKTEIQGSPISKETAASNKMLGVVPASVAGTIVGHVVSS

SEQ ID NO: 8247 - protein, 275 aa, Bifidobacterium longum NCC2705
MAIQSTIMLNNGTVIPQVGLGVFQTPDGDTTVNAVQTALENGYRHIDTAMIYHNEASVGEGIRRAGVPRSDFFLTTKLWNDDIRARRGKDAFQESLDRLGVDYVDLYLIHWPADGWQQAWDDLQEIYASGRAKAIGVSNFQKHHIDELLTHSDVVPAVDQVESSPQFTNQELIGQLRAKGIHTEAWSPLGGTGGNLLSNPVLAGIGAKYGRSAAQVVIRWHIQRGIVVLPKSTHAERIKQNFEVFDFNLSVDDMTAISAINTGKRNGADPDNFNF

SEQ ID NO: 8248 - protein, 229 aa, Mesorhizobium sp. BNC1
MPKPDLVIFDCDGVLVDSEIVAARVEAEMLREAGYDITADEIAERYSGLTFKDIMIHIEKEAQMLLQASMIKQAEAKVDERLRAEVKAIPGVAEAAASLSVKKCVCSNSSEERIAIMLQRTNLARFFEGVIFSSLATPTKRPKPAPDVFLYAAEQMGAEPAGTIVIEDSVHGIMGARTAGMRVIGFTGASHSHPRHASMLMEAGAETTISRMADLKSTIAALSEWSEEG

SEQ ID NO: 8249 - protein, 172 aa, Glycine max
KMACLVSRSGRELQRYNNMGGRQVVGCIPYRYKEDIDGKMSNELEVLVVSSQKGRGLMFPKGGWELDESVEEAACRESLEEAGVLGIIESELGQWNFISKRYGIYYEGHMFPMFVKEQLDTWPEKNLRRRIWMTVAEAREVCQHWWMKEALDILVQRIVSSQQRKEDLYSIG

SEQ ID NO: 8250 - protein, 214 aa, Pseudomonas fluorescens Pf-5
MNELQDLIDNNERWAEAIKQEDPDFFSKLARQQTPEYLWIGCSDARVPANEIVGMLPGDLFVHRNVANVVLHTDLNCLSVIQYAVDVLKVKHILVTGHYGCGGVRASMQDRQLGLIDGWLRSIRDLYYEHREALGQLPTEEERVDRLCELNVIQQVANVGHTSIVQNAWHRGQSLSIHGCIYGIKDGRWKSLNATISGFEQLPPQYRLRPVGAV

SEQ ID NO: 8251 - protein, 264 aa, Festuca arundinacea
MSRKKKVRRRSTGPDSVAEIIKKWKEQNQKLQEENGSRKAPAKGSKKGCMAGKGGPENSNCKYRGVRQRTWGKWVAEIREPNRGNRLWLGSFPTAVEAAHAYDEAARAMYGATARVNFSERSPDANSGCTSAPPVLMSNGPTAVSYPSDEKDESESPPSLMSDAPTATLHRSDAKDEPESAGTLVHEVKTEVSNDSRSIREERKTVEVFQPEGKALHKEEKVSYDYFNVEEVLDMIIVELSADRKMEVHEEYQDGDDGFSLFSY

SEQ ID NO: 8252 - protein, 254 aa, Festuca arundinacea
MSRKKKVRRRSTGPDSVSEIIKKWKEQNQKLQEENGSRKAPAKGSKKGCMAGKGGPENSNCEYRGVRQRTWGKWVAEIREPNRGNRLWLGSFPTAVEAAHAYDEAARAMYGATARVNFSERSPDANSGCTSAPPALMSNGPTAVSHPADGKDKSESPPSLTSDAKDEPESAGTVVHEVKTEASNDSTSVREERKTVEVFQPEGKALRKEEKVSYDYFNVEEVLDMIIVELSADRKMEVHEEYQDGDDGFSLFSY

SEQ ID NO: 8253 - protein, 540 aa, Xanthomonas campestris pv. campestris str. ATCC 33913
MNDSGYGEPRAPLIGESQTLPVSKHRSDIFFAAVETTRMPMTVTDPYLPDNPIVFANRAFLEMTGYAADEIIGNNCRFLQGPETDRQAVADVREAIDNRREFATEVLNYRKDGSTFWNALFVSPVFDDTGKLVYFFGSQLDVSRRRDAEDALRQAQKMEALGQLTGGIAHDFNNLLQVMSGHLEFIQMMVSNGNGSPDRIAVSAEHAAAAAAKAATLTQQLLAFSRKQKLRGRVVNLNGLVSGMNNMAERALGGGITLRQALEERLWNCQIDTTQAEVALLNVLINARDAMANAERKEVMVQTQNVEITSHDLSMYHQLAPGRYVSIAVTDSGSGMPPEVVSRVMEPFFTTKEEGQGTGLGLSMVYGFVKQSGGTVRIYSEVGEGTTVRLYFPASSDYENALPSTKNRALDKGGNETILIVEDKEDVAVVAKMFLEGAGYRALSASSGREAIEVLEQHPEVDALFTDLIMPGGMNGVVLAREARRMLPKIKVLLTTGYADASIQRTDVGGAEFDVVNKPYTQKELLKRIRMLLDGPTGVG

SEQ ID NO: 8254 - protein, 98 aa, Bradyrhizobium japonicum USDA 110
MAKSKFRPLHDRVVVKRIDAEEKTKGGIIIPDTAKEKPSQGEVVAVGPGGRDETGKLIPIDLKVGDRVLFGKWSGTEVKIDNEELLIMKESDIMGVMA

SEQ ID NO: 8255 - protein, 453 aa, Persea americana
MDNKGGILMQRFELGRLLGQGTFAKVYHARNLKSSQSVAIKVIDKEKVLKVGMIDQIKREISTMRLASHPNVVQLYEVMATKTKIYFVLEYVKGGELFNKVAKGKLKEDVAWKYFQQLVSAVDFCHSRGVYHRDLKPENLLVDENENLKVTDFGLGALAESKRQDGLLHTTCGTPAYVAPEVISRKGYDGAKADIWSCGVILFVLLAGYLPFHDSNLMELYRKVGKAEYKCPNWFPPEVRRLLARILDPNPNTRISIAKIKDNSWFKRGFEAKFAKGETKSKELAPLDTDAAFASSDTGVAARKPELVKPQHLNAFDIISLSAGFDLSGLFEDTNCRKEARFASKQPASAIISKLEDIAKRLRLKVKKKDEGILKLEGSKEGRKGVLSIDAEIFVVNPSFHLVEVKKSSGDTLEYQKLWNQDMRPALTDIVWAWQGDQQQQQESLVCSLGQSL

SEQ ID NO: 8256 - protein, 543 aa, Bradyrhizobium japonicum USDA 110
MAAKDVKFSGDARERMLRGVDILANAVKVTLGPKGRNVVIEKSFGAPRITKDGVTVAKEIELEDKFENMGAQMVREVASKTNDLAGDGTTTATVLAQAIVREGAKAVAAGMNPMDLKRGIDIAVAAVIKDIEKRAKPVASSSEVAQVGTISANGDAAIGKMIAQAMQKVGNEGVITVEENKSLDTEVDIVEGMKFDRGYLSPYFVTNAEKMTAELEDAYILLHEKKLSGLQAMLPVLEAVVQSGKPLVIIAEDVEGEALATLVVNRLRGGLKVAAVKAPGFGDRRKAMLEDLAILTGGQLISEELGIKLENVTVKMLGRAKKVVIDKENTTIVNGAGKKPDIEARVGQIKAQIEETTSDYDREKLQERLAKLAGGVAVIRVGGATEIEVKEKKDRVEDALNATRAAVQEGIVPGGGVALLRAKKAVGRLTNANDDVQAGINIVLKALEAPIRQISENAGVEGSIVVGKILENKSETFGFDAQNEDYVDMVEKGIIDPAKVVRTALQDASSVAGLLVTTEAMVAEAPKKDAPPAMPAGGGMGGF

SEQ ID NO: 8257 - protein, 325 aa, Glycine max
  misc_feature (151)..(151): Xaa can be any naturally occurring amino acid
  unsure (1)..(325): unsure at all Xaa locations
MALEAVVFPQDPFTYGCDKDYLYSLVEHNYGNFQAAEEEKVLLGIINNNIEHNFHANWDSSSTSMLQNVKEQQWDSHSSPEACTVDQSMPAAPFPPPPPSSSVEATVTATSRRKRRRTKSAKNTEEIENQRRTHIAVERNRRKQMNEYLAXVLRSLMPSSYVQRGDQASIIGGAINFVKELEQLLQSMEGQKRTNQAQENVVGLNGSTTTPFAEFFTFPQYTTRGRTMAQEQKQWAVADIEVTMVDSHANLKVLSKKQPGQLMKIVVGLQSLMLSILHLNVSTLDDMVLYSISVKVEDGCRLNTVDEIAAAVNQLLRTIQEVTFS

SEQ ID NO: 8258 - protein, 546 aa, Azotobacter vinelandii
MAAKEVKFGDSARKKMLVGVNVLADAVKATLGPKGRNVVLDKSFGAPTITKDGVSVAKEIELKDKFENMGAQLVKDVASKANDEAGDGTTTATVLAQAIVNEGLKAVAAGMNPMDLKRGIDKATIAIVAELKSLAKPCSDSKAIAQVGTISANSDESIGNIIAEAMNKVGKEGVITVEEGSGLENELSVVEGMQFDRGYLSPYFINKPDTMVAELDNPLLLLVDKKISNIRELLPVLEAVAKSGRPLLIVAEDVEGEALATLVVNNMRGIVKVAAVKAPGFNDRRKAMLQVIAILTGATVISEKVGLSLESATLEHLGKPKALVLNKENTTIMHGAGAQADIEAAVAQIRKQIEETSSDYDREKLQERLAKLAGGVAVIKVGAATEVEMKEKKARVEAALHATRAAVEEGVVPGGGVALVRALQAIEGLKGDNEDQNVGIALLRRAVEAPLRQIVANAGDEPSVVVDKVKQGSGNFGFNAASGVYGDMIEMGILDPAKVTRSALQAASSIGGLMITTEAMVADIVEDKAAPAMPDMGGMGGMGGMM

SEQ ID NO: 8259 - protein, 182 aa, Glycine max
MDSLSLHSNLHSVNNKRRQITHQNSFALTPSWTSLTEQRLYSSKLLHSLRRNSNPTAALEVRASADRVLAATAKGRTRWSRAILSNPICRWKQRHHKKVKKYSANKFMKKTTPEIRRSLPAVQKKARVLGKLIPGCRKVSFPKLLEEAGDYISALEMQVRAMKALADLLATGAPPPAPIGLS

SEQ ID NO: 8260 - protein, 611 aa, Bacteroides fragilis NCTC 9343
MKEFFQLMRRFVSPYKKFLGWAVFLNLLSAVFNIFSFTLLIPILQILFKMDNKVYEFIPWDAAGEGLKDIAVNNFYYYVTRMIEINGPSLTLLFLGLFLAFMTLLKTSCYFASSAVMIPLRTGVVRDIRIMVYSKVMSLPLGFFSEERKGDIIARMSGDVGEVENSITSSLDMLIKNPILIVMYFGTLIITSWQLTLFTLLVVPGMGWIMGKVGKKLKRQSLEAQAKWSDTMSQLEETLGGLRIIKAFIAEQKMINRFTECSNEFRDATNRVAMRQALAHPMSEFLGTLLIVVVLWFGGSLILGNHSSIDAPTFIFYMVILYSVINPLKEFSKAGYNIPKGLASMERVDKILKAENKIVEIPNPKPLNGLEEQVEFKDISFSYDGKKEVLQHINLTVPKGKTVALVGQSGSGKSTLVDLLPRYHDVQEGTITIDGVNIKDVRISDLRSLIGNVNQEAILFNDTFFNNIAFGVENATMEQVIEAAKIANAHDFIMEKEDGYHTNIGDRGSKLSGGQRQRISIARAILKNPPILILDEATSALDTESERLVQEALERLMKTRTTIAIAHRLSTIKNADEICVLYEGEIVERGKHEELLAKNGYYKRLNDMQSL

SEQ ID NO: 8261 - protein, 450 aa, Tropheryma whipplei TW08/27
MDYDLIVLGAGSAGYATAIRATQLGMKVALAEGDKVGGTCLHRGCIPTKSLVQCAKAAHIAKNASKFGVINSFSGVDINAVNVFKNGIVESKYRGLQSLLRSYGIHVYPNFATLSSQNSVRIGTEDITGKNIVIATGSRPKGIPGLSGGCIFDSDSILEIDHLPSSLAIIGGGVIGVEFASIFNYLGVDVSILEAQETLIPSEERGVSKQLERVFRRRGIKLYLGHKIMDVSQTDGVVVSLDSNEKVNADLLLVAIGRAPATDAIGKVGIEIDGGAISVDEKLRTTVPNVFAAGDVVGGLQLAHRGYQQGIYLAEQIAGLDPSAVADINIPRVIYTSPEVASVGYTEAGAAEIYGVNEIVTYEYNLAGNAKSSIMGAAGSIKVVQHKNKDVLGVHMVGDGVSELVSEAQLIVNWEANPSDVASLIHPHPTQAEAIGEAMLALAGKPLHGI

SEQ ID NO: 8262 - protein, 322 aa, Vibrio fischeri ES114
MKKIPTNIITGFLGVGKTTTILQLLKNKPENESWAVLVNEFGEVGIDGAFLAEGGAMVKEVPGGCMCCTAGLPMSVGINALLRQKPDRLIIEPTGLGHPKKIIAILQSENYEKYIDLKATIGLVDPRNLSDEKYVSNQNFNDQLGISDVVVATKMDMVSDYDECLFDSWTKELSTQPKTTKINHGDLPQSWLDEDRTIELTIEEHHHHHAEQDIVEMALEPGQKFCRKENKGQGYVSCGWFFGAESVFDFEELFSMLSDLNAERIKAVMNTDKGCYAFNVANRVVSVNQLSIEGMESKLEVIDTQLLPWDQLETILLSLIIE

SEQ ID NO: 8263 - protein, 399 aa, Arabidopsis thaliana
MANCFAPQLTFPSFSPRHFSPRMSHQSPKPSTSTTTSIFTSATKLLWGPSLPPGLLISTARTAWTTVWQLMMTQLAPSDSSGSYTRPTSKFRLDPTQFTSAASSELHLYVGLPCPWAHRTLIVRALKGLNDAAPVSIASPGQDGSWEFKNNNIPIKDKDKLIPSLDKANRCRNLKEVYKSRSGGYDGRCTVPMLWDLRKKDVVCNESYDIIEFFNSGLNKLARNDNLDLSPPELKEMIQGWNQIVYPKVNNGVYRCGFAQSQEAYDGAVNELFSTLDEIEDHLGSNRYLCGERLTLADVCLFTTLIRFDSVYNVLFKCTKKKLVEYPNLYGYLREIYQIPGVAATCDISAIMDGYYKTLFPLNASGIQPAISSSGDQDSLWRPHNRDLVGKAIEAQLSV

SEQ ID NO: 8264 - protein, 982 aa, Geobacter sulfurreducens PCA
MHEAAKVDARAQFEKDIVYRRWNAGHGGVYVPVTERAQPNPWLAGLKDRDVETTTGKRLTLINPAYMTRQVHELNFESSGIRGHITSLRPIRQANAPDNWETRALESFERGQQEYSSVELMDGVPHLRLMRPLMVEQSCLRCHPGPSYSVGDVRGGISVSVPLAPYSALARNKMAATGAGHLTFWAAGLGGIILAARRITRDDRSLLLQQARLAESEERNRLLSEVALEGIVIHDRGIVQDMNARFAKLFGYPREELEGINVISLLFHPDDIGSMIDKMSRAHSEPYQVRGVKKDGTVFDVEIEGYNLQHGDKSVRVVSVRDITERRRAEEALRQSEALFRNLFEHHAAVKLIIDPVSGAIVDANNAAVSFYGWSREQLRAMNIRDINMLSPEELVSELENTKNMERIHFFFRHRRADDSVRDVEVFSSRIEVKGREYLHSIVHDVTERKRAEEELLLAKEQAESANRAKSEFLANMSHEIRTPMNGVIGMTGLLLETGLADEQRRYAEIVRTSAASLLQVIDDILDFSKIEAGRLEMETIGFDLRTLLDDLAESLAFKANEKGLTFTCLLRPEVPRFLMGDPVRLKQVLVNLAGNALKFTHQGEISVEVGSLTKTGDSVKLRFAVRDTGIGIPPEKTELLFEKFTQADASITRKYGGTGLGLAICKRLVQMMGGEIGVTSRPGVGSEFWFTASFGTQNLRDSSPEPDGGDGPLQLLSDLGHDDVRILLVEDNATNRQVALGIIKRLGLRGDAAANGAEALDLLATTPYDLVLMDVQMPVMDGFEATRHIRDVRSPVLNHEIPVIALTAHAMKGDRRKCLDAGMNDYLAKPIFPDALAEMLVKWLPRRCRISNDGDGERANAVPAVPDGTPVFDRPGLEARLMGDESLVTEVVAAFLADMPDLIERLRAAVADGEPATVAHWAHTIKGGAASVGGERLRAAAAALEYAAVAGGMGGVACCMNMLEIEFGRLCEIMRQDYVKE

SEQ ID NO: 8265 - protein, 428 aa, Saccharomyces cerevisiae
MKDANESKSYTIVIKLGSSSLVDEKTKEPKLAIMSLIVETVVKLRRMGHKVIIVSSGGIAVGLRTMRMNKRPKHLAEVQAIAAIGQGRLIGRWDLLFSQFDQRIAQILLTRNDILDWTQYKNAQNTINELLNMGVIPIVNENDTLSVREIKFGDNDTLSAITSALIHADYLFLLTDVDCLYTDNPRTNPDAMPILVVPDLSKGLPGVNTAGGSGSDVGTGGMETKLVAADLATNAGVHTLIMKSDTPANIGRIVEYMQTLELDDENKVKQAYNGDLTDLQKREFEKLKALNVPLHTKFIANDNKHHLKNREFWILHGLVSKGAVVIDQGAYRALTRKNKAGLLPAGVIDVQGTFHELECVDIKVGKKLPDGTLDPDFPLQTVGKARCNYTSSELTKIKGLHSDQIEEELGYNDSEYVAHRENLAFPPR

SEQ ID NO: 8266 - protein, 892 aa, Photobacterium profundum SS9
MYMDEFDVTKLRDGCDMNEKYSALRSNVSMLGHMLGNTIKDAHGEPLFDKVETIRKLSKSARAGNDSDRAKLIDELQNLPDDQLLPVARAFSQFLNLTNIAEQYHTISRHCEEQICSPDSIDSLFGKLNANSISQLDSIQAVRDLNIELVLTAHPTEIARRTMIHKLVQINKCLSNLELSELSHSERQRVEQRLEQLIAQAWHSDVIRKQRPTPLDEAKWGFAVVENSLWHAVPEFLRQFDEKLMRHLGEKLPLDASPVKFTSWMGGDRDGNPFVTSEVTREVMLLSRWKAADLFLGDIQELVSELSMVKCNDQVRELAGEEHEPYRAILKDLRTKLTNTRDVLAAKINKQDAPNLATIDDVDQLWTPLHACYQSLRECGMGIIADGLLLDVLRRIKCFGIHLVRLDIRQESTRHSDVISELTRYLGLGDYEQWNEQDKVAFLVRELASKRPLLPLAWQPSAEVQEVLDTCKAVAEQSREALGAYVISMARTASDVLAVHLLLKEAGCPFRLDVCPLFETLDDLNNGASVIKELMSIDWYRGFIQNHQMVMIGYSDSAKDAGVMAAGWAQYRAMEELVEVCEDASVELTLFHGRGGSIGRGGAPAHAALLSQPPRSLKGGLRVTEQGEMIRFKLGLPDVAVNSLSLYASATLEANLLPPPAPKKEWCDLMDVLSEVSCESYRNVVRGSEEFVPYFRAATPELELGKLPLGSRPAKRNPNGGVESLRAIPWIFAWSQNRLLLPAWLGAGEAIQYSIDKGHAQLLEDMCREWPFFSTRLGMLEMVYTKTNVGIAEYYDQRLTDKSLWPLGQKLRDQLQQDIKAVLNVENNAHLMEQNPWGAEAIRLRNIYVEPLNMLQAELLYRTRQQDEPSPILEEALMVSIAGIATGMRNTG

SEQ ID NO: 8267 - protein, 700 aa, Arabidopsis thaliana
MVGMVEEGLGVSMYLRLWAVAGSDYMLLTTGMIKEYCKLCIKIWMRSDFQACSLVIGDSARRENYMKLWSYMLIQIFAEKETSKGGKEAFMGPHWMIVAKYIVVKTWYWMETVEAGHDDVIGWFEHVSENACKVQSETLRRILELNSGVEYLRKWLGTVDVEKMDDYTLETLFTSLVPIVSHADLDPYIQRIADGETSPLLTQEPITVLSLSSGTTEGRQKYVPFTRHSAQTTLQIFRLSAAYRSRFYPIREGGRILEFIYAGKEFKTLGGLTVGTATTHYYASEEFKTKQETTKSFTCSPQEVISGGDFGQCTYCHLLLGLHYSSQVEFVASAFSYTIVQAFSFFEEIWREICADIKEGNLSSRITLPKMRKAVLALIRPNPSLASHIEEICLELETNLGWFGLISKLWPNAKFISSIMTGSMLPYLNKLRHYAGGLPLVSADYGSTESWIGVNVDPHLPPEDVSFAVIPTFSYFEFIPLYRRQNQSDICIDGDFVEDKPVPLSQVKLGQEYELVLTTFTGLYRYRLGDVVEVTSFHKGTPKLSFIYRRKLILTINIDKNTEKDLQRVVDKASQLLSRSTRAEVVDFTSHADVIARPGHYVIYWEIRGEADDKALEECCREMDTAFVDYGYVVSRRMNSIGPLELRVVERGTFGKVAERCVGKCGGLNQFKTPRCTTNSVMLDILNDSTIKRFRSSAYD

SEQ ID NO: 8268 - protein, 82 aa, Picea abies
MSCCGGNCGCGSSCSCGSGCKGCKRTLDLSFSEKTVEAPLFAATASDMGHFDGSSTVAGESGCCSEGCKCGSNCTCDPCNCK

SEQ ID NO: 8269 - protein, 622 aa, Zea mays
MDSTPAPEAAPGASSSSPAAAAAELAGGVAAMTLDERFEMLRGIGEECIQEDELRRLLENKPVPICYDGFEPGRMHIAQGVVKTINVNKMVNAGCKVKIWIADWFAQLNNKMGDLKKIQTVGRYMIEIWKAAGMNLDGVEFLWSSEEINKRAHEYWPIVMDIARKNNVKRIMRCCQIMGRSDQDDLTAAQIFYPCMQCADIFFLKASIYDAIAFHCLKADICQLGMDQRKKAMRKCQRVIHPRLFLWKMISLLENINETNAKSLYASMLAQEWFEFNAILLGSVEMVACSVRIIVCLITTLFATDFFEVKAVKEIEPALKKQLIISTTLMTVGIAVISWLALLAKFTIFNFGTQKDVSNWGLFFCVAIGPWAGLIIGFVTEYYTSNAYKFKAYNPVQDVADSCRTGAVTNVILGLALGYKSVIIPIFAIAVIIYVSFSIAAMYDIAVAALVTMLVVLLRTDAVDAAGNTTAAIGKGFAIGSAALVSLALFGAFVSKAGVKVVDVLSPKVFIGLIVGAMLPYWFSAMTMKSVGSAALKMVEEVRRQFNTIPGLMEGTAKPDYATYWKISTDASIKEMIPPGALVMLTPLIVGTLFGVETLYGVLAGALVSGVQPSFSLNRKEL

SEQ ID NO: 8270 - protein, 288 aa, Bacillus subtilis
MLFEKLKEAEGLLTSGTSGPSINRELLEHAPKLKVVSNQSVGYDNFDIEAMKERGVVGTHTPYTLDDTVADLAFSLILSSARRVAELDRFVRAGKWGTVEEEALFGIDVHHQTLGIIGMGRIGEQAARRAKFGFDMEVLYHNRHRKQETEDSIGVKYAELDTLLEQSDFILLITPLTDETYHMIGEREFKLMKNSAIFVNISRGKTVDEKALIRALQEGWIRGAGLDVYEKEPVTQDNPLLQLDNVTLLPHIGSATAKVRFNMCKQAAENMLAAIQGQTPKNLTREFQ

SEQ ID NO: 8271 - protein, 656 aa, Thiobacillus denitrificans ATCC 25259
MIFSGAVHSVTENISGEKPVAVRGRKPGGGAKKPEALLPLKELTPVEAEARRTQLKNLIILGKERGFLTYAEINDHLPDEVLDADQIEGVISMINDMGIQVYDEAPDAETLLMQEAAPAVADEDVVAEAEQALTTVDSEFGRTTDPVRMYMREMGSVDLLTREGEIEIAKRIEEGLRHMVQAISSCPLTIQQILDMAAQVEKDELRIDELIDGFVEAETEAAAEEETAAGDDETDEDDEDASAAVAAANLAQLKAEALAQFDYIRKAYKKAQNAHVKYGLGSAQHMKAQAEVTELLMAIRFSVRQVDNLCEQIRSAVEEVRSHERKIMEFCVNRSGMPRAHFIKAFPGNETNLAWLDREIAAKKAYCSTLSKVQYEVKAHQEALIAMQDRVGLPIKNLKDINKQMSTGEAKARRAKREMIEANLRLVISIAKKYTNRGLQFLDLIQEGNIGLMKAVDKFEYRRGYKFSTYATWWIRQAITRSIADQARTIRIPVHMIETINKMNRISRQILQETGIEPDPATLAIKMEMPEDKIRKIMKIAKEPISMETPIGDDEDSHLGDFIEDASTLSPDDSAIYANLRDATREVLDSLTSREAKVLRMRFGIEMNTDHTLEEVGKQFDVTRERIRQIEAKALRKLRHPTRSEKLKSFVGSGEQ

SEQ ID NO: 8272 - protein, 494 aa, Bradyrhizobium japonicum USDA 110
MNRRGRPVNLVVVSNRVARGKPNEPMTGGLAAALLPVVEHSGAIWVGSSGRVRDGHQKEPFAEIEALGSGAIATLDLPAAHYGGYYEGFANSALWPALHSRSDLIRVSREDYVSYREVNAFMARALMRFRKPRTAFWVQDYHFLALGAELRDLGVDDPIGFFLHTPWPVAAVTQGVPNHRELITAMLAYDLIGFQTEEDRQNFLGYVAGELGLVIDDGVVLSQHGRTRCEVFPIGIDAEKFAQYAAKSASHPDVSRLRRSLNGERLAIGVDRLDYSKGLVNRISAFDRLWTEQPQFLRSISLLQIANPSRGAIEAYGNLQNEVARLVTDVNGRHGEVDWTPIRYLNKGFSQAVLAGLYRTAQIGVVTPLHDGMNLVAKEYVAAQNPADPGVLVLSKFAGAANELDTALLVNPHDIDAMARAIAIAAAMPLTERKMRWDAMMKKLRGHTIQQWSADFVAELEKCRIEKAAVAPLAAQPPQALRWLKSAISGVRLI

SEQ ID NO: 8273 - protein, 505 aa, GIBBERELLA ZEAE PH-1
MAHELPFKIPTLQVKQQAPSQVQPLTSSVILPSNSLTTLTTPDPGTNKPWAKVKDNSADDVDHTVQVAYDAFQTFKKTSPRLRAQWLLKWDALIREHKADLATLLVYETGKPYAEAIGEMDYSLTFTSWFAGEAERIQGTCFMPSAPNRRVFTIKQPLGVAVALVPWNFPVAMVLRKAAAALAAGCTMVVKPSPETPVTAMALAKLASEAGFPNGVLNILPTSLDNTPSLSEALCKHDLVKKVTFTGSTRVGTLVANLCSLGLKKVVLELGGNCPCLIFNDADIEAALRELVGLKWRHAGQACVTVNRFLVQSAVYDKFLQRFAEETAKYVVGHGASEGTTLGPVTKPESLDRAERLIKDAVSKGARIVTGGNRLSPKDGEGGYFFEPTILADMTHDTLISCEECFAPIAAFYKFETEEEAVRVANDTPMGLASYAFTKDADRIWRLFENLEAGMIALNTGNSSAAESPFGGIKMSGYGKEAGKDVAVNEYMIQKTGTITVDGLV

SEQ ID NO: 8274 - protein, 387 aa, Tropheryma whipplei TW08/27
MPVKIKTQSRGSDKEAFAGAPSTSGASGAVLDEDLSTDPASHISAQATASDTDVASQGSEGDFEAIVLADTKDDESTPASPVISGATADPVKDYLKQIGKVSLLTADEEVSLAKRIEAGLFAEEKLSESGDLAPKLKRELRWVVRDGQRAKDHLLAANLRLVVSLAKRYTGRGMQFLDLIQEGNLGLIRAVEKFDYVKGFKFSTYATWWIRQAITRAMADQARTIRIPVHMVEVINKLSRVQRQLLQDLGREPTPDELGRELDMPPERVVEVQKYGREPISLHTPLGDEGDSEFGDLIEDVDAVAPDDAVGFSMLQQQLRLLLDSLSEREAGVIRMRFGLDYDMPKTLDYVGEYFDVTRERIRQIEAKTMAKLRHPSRSQCLRDYLG

SEQ ID NO: 8275 - protein, 391 aa, Goniomonas truncata
ELFCLEHGIQPDGQMPSDKTIGGGDDAFNTFFSETGAGKYVPRCVFVDLEPTVIDEVRTGTYRQLFHPEQLISGKEDAANNFARGHYTIGKEIVDLVLDRIRKLADNCTGLQGFMIFHAVGGGTGSGLGALLCERLSVDYGKKSKIGFCTWPSPQVSNAVVEPYNMVLSTHTLLEHMDVAIMLDNEAIYDLCRRSLDIERPTYTNLNRLIAQVISSLTASLRFDGALNVDLTEFQTNLVPYPRIHFMLSSFAPVISAEKAYHEQLSVAEITNAVFEPASMMVKCDPRHGKYMACCLMYRGDVVPKDVNASVATIKTKRTIQFVDWCPTGFKCGINYQPPTVVPGGDLAKVQRAVCMISNSTAIAEVFSRQDHKFDLMYSKRAFVHWYVGEG

SEQ ID NO: 8276 - protein, 401 aa, Arabidopsis thaliana
  misc_feature (298)..(298): Xaa can be any naturally occurring amino acid
  misc_feature (301)..(301): Xaa can be any naturally occurring amino acid
  unsure (1)..(401): unsure at all Xaa locations
MYVVESKAGAIGCMILSLCCLGSWPAILTLLERRGRLPQHTFLDFATANLLAAIVIAFSLGEIGKSTFLKPDFTTQLPQDNWPSVLLAVAGGVLLSIGNLATQYAFAFVGLSVTEVITASITVVIGTTLNYFLDNKINKAEILFPGVGCFLIAVFLGAAVHASNAADVKEKLKSLPSEDLYSSIENGEDKPEIEKTDVESQEKLAEKAKAGTAGFYVELENKRAIKVFGKSIMIGLFITLFAGISLSLFSPAFNLATNDQWSTLPKGVPKLVVYTAFFYFSIAGFLISLILNLIFLYXPMXGLARSSLKKYIYDSKGRGWAVFAGFLCGFGNGLQFMGGQAAGYAAADSVQALPLVSTFWGIVLFGEYRKSSKRTYALLVSMLAMFVAAVAILMASSGHRK

SEQ ID NO: 8277 - protein, 387 aa, Goniomonas truncata
IGSKFWEVICGEHGIQPTGHYDGDSDTLLDRINVYFTEGSGGRFVPRAVLLDLEPGTLDSIRASPYGEIFRPENFIFGQTGAGNNWAKGHYTDGAELIDLVMDTIRKEAEACDCLQGFQLAHSLGGGTGSGLGTLLMSKIREEYPDRIMCTFSVIPSSKVSDTVVEPYNATFSVHQLVEFANEVFCLDNEALYDICFKTLKLTAPAFGDLNHLISAVMSGITCSLRFPGQLNADLRKLAVNLVPFPRLHFFMVGFAPLTSRAAMNYRTLSVPELTHQMFEPKNMMCSANPSHGRYLTAAVLFRGKMATKEVDEEILNVQSKNSSYFVEWIPNHIIASICDVPPRSLKMSATFIGNSTAIQEMFKRVSEQFVGMFRRKAFVHWYTGEG

SEQ ID NO: 8278 - protein, 630 aa, Bacteroides fragilis NCTC 9343
MRKWRIEDSEELYNITGWGTSYFGINDKGHVVVTPRKDGVAVDLKELVDELQLRDVAAPMLVRFPDILDNRIEKTAYCFKQASEEYGYKAQNFIIYPIKVNQMRPVVEEIISHGKKFNLGLEAGSKPELHAVIAVNTDSDSLIICNGYKDESYIELALLAQKMGKRIFLVVEKMNELKLIARMAKQLNVQPNIGIRIKLASSGSGKWEESGGDASKFGLTSSELLEALDFLESKGMKDCLKLIHFHIGSQVTKIRRIKTALREASQFYVQLHAMGFNVEFVDIGGGLGVDYDGTRSSSSESSVNYSIQEYVNDSISTLVDASDKNGIPHPNIITESGRALTAHHSVLIFEVLETATLPQWDDEEEIAPDAHELVQELYGIWDTLNQNKMLEAWHDAQQIREEALDLFSHGIVDLKTRAQIERLYWSITREINQIAGGLKHAPDEFRGLSKLLADKYFCNFSLFQSLPDSWAIDQIFPIMPIQRLDEKPDRSATLQDITCDSDGKIANFISTRNVAHYMPVHSLKQKEPYYVAVFLVGAYQEILGDMHNLFGDTNAVHVSVNEKGYNIEQIIDGETVAEVLDYVQYSPKKLVRTLETWVTKSVKEGKISVEEGKEFLSNYRSGLYGYTYLE

SEQ ID NO: 8279 - protein, 199 aa, Saccharomyces cerevisiae
MAKHIVAALQIGSCPGSTKDTLKKILSYEKEIKESGAKLVVIPEATLGGYPKGSNFGVYLGYRLQEGREEYAKYLAEAIEIGNGEKYPEISQLCALSKATDASLCAGCIERDGTTLYCTMVYIDPKDGYVGKHRKLMPTAGERLIWGQGDGSTLPVVDTAAGKIGGAICWENMMPLLRYAMYKKGVEIWCAPTVDARPI

SEQ ID NO: 8280 - protein, 384 aa, Guillardia theta
LFCLEHGIQPDGQMPSDKTIGGGDDAFNTFFSETGAGKYVPRCVFVDLEPTVIDEVRTGTYRQLFHPEQLISGKEDAANNFARGHYTVGKEIVDLVLDRIRKLADNCTGLQGFMIFHAIGGGTGSGLAALLCERLSVDYGKKSKLGFTIIPSPQISTAVVEPYNSILSCHTLLEHMDVNASLDNEAIYDICRRNLDIERPTYTNLNRLVAQCISSLTASLRFDGALNVDITEFQTNLVPYPRIHFMLTSYAPIISAEKAYHEQLSVAEITNAVFEPASMMTKCDPRHGKYMAACLMYRGDVVPKDVNAAVATIKTKRTIQFVDWCPTGFKCGINYQPPTVVPGGDLAKVQRAVCMVSNSTAVAEVFSRLDHKFDLMYAKRAFVH

SEQ ID NO: 8281 - protein, 387 aa, Guillardia theta
IGAKFWEVISDEHGVDPTGTYHGDSDLQLERINVYFNEATGGRYVPRAVLMDLEPGTMDSVRAGPYGQIFRPDNFVFGQTGAGNNWAKGHYTEGAELIDSVLDVVRKEAESCDCLQGFQISHSLGGGTGAGMGTLLISKIREEYPDRIMLTFSIVPSPKVSDTVVEPYNATLSVHQLVENADECFCIDNEALYDICFRTLKLTTPTFGDLNHLVSAVMSGVTCSLRFPGQLNSDLRKLAVNIVPFPRLHFFMVGFAPLTSRGSQQYRALTVPELTQQMFDAKNMMCAADPRHGRYLTAAAMFRGRMSTKEVDEQMLNVQNKNSSYFVEWIPNNIKASVCDIPPKGLKMAVNFIGNSTAIQEMFKRVSEQFTGMFRRKAFLHWYTGEG

SEQ ID NO: 8282 - protein, 102 aa, Oryza sativa
  misc_feature (19)..(19): Xaa can be any naturally occurring amino acid
  unsure (1)..(102): unsure at all Xaa locations
MALVEGNNSMSGGAGTFSXEQEALALKSWAIMKKDTDNIGLRFFLKIFKVAPSASQMFSFLRISNLPLQMNPKLKTHTMSVFVMTCEADAHLQKARNVTVRD

SEQ ID NO: 8283 - protein, 408 aa, Zea mays
MAEQGGAAGEAAGSDPPAPAPATAPAPAPALAADAAGQRSLPTPFLTKTYQLVDDPAVDDVISWNEDGSTFVVWRPAEFARDLLPKYFKHNNFSSFVRQLNTYVRYLMLARLIFLRPGFRKMVPDRWEFANDFFRRGEKRLLCDIHRRKVAPAPAAGLATAAAAAASGAVTVAAAPIPMALPVRPASPSLSTDEHVLSSNSGSAEDHPQAAASGSVSASASGDTGEENERLRRENARLTRELGQMKKLCNNILLLMTKYASSQQLDASAALSSVVNCSGESSEAVPAPPPLPPAILELMPACPGLATAAAGLVAEADPDQASRLFGVSIGMKRMRDDDDTGEEQADHGAAADVKTEASDPQHRMEPSPESPDQHPWPIYRPTPVYHSMRPCNGPDQGAGSDQDGSNSR

SEQ ID NO: 8284 - protein, 877 aa, Arabidopsis thaliana
MKSSYGSSSNDLHAFVNEIKGEIQLSNINLDPYSFVSPSAYDTAWLSMIEEDINVDDNELKPMFQGCLDWIMCNQNAREGFWMNSTSYTTVADGRDEDGEKDMCILTSTLACVVALQKWNIGCFHLHKGTRYIERNTEMIIGKYINEEGSYPRWFAIKFTGILELAQKLGLHFVFSSRCIEMIKGMFYQRQEIIQREKLVHDCNYKPLLAYLEVLPSKLYVTNQEDIIVKSLDSMDGSLFQSPSATASAFMLTRNTKCLAYLQNLVQKCPNGVPQKYPLNEDLIKLSMVNLIESTGLGEFFGIEIEHVLEQVYSRYEEKDFERMPMSYLADQLHKDSLAFRMLRMHGRDVSPRSFCWFLNDQETRNHLERNIDSFLLVILSVYRATDLMFPGEHDLQEAREYTRNLLEKRRSIKEKMIMHELSTPWIARLKHLDHRMWIEDKNSNVLSMEKASFLRLHSSYSDKLTHLAARNFEFQQAKYCRELEELTMWVKKWGLSDIGFGREKTTYCYFATVTSLPYEYAIKFGKLAAKTAILITIADDFFDEKGSFNDLEGLTKAVLRWEGEELKSYGNIIFRALDDIVRETANTCRTHHKTDIIVHLRNIWGETFESWLREAEWSKKGHTSSMDEYIRNGMISIAAHTIALSISCLMEPCFPHNKLKPGNYDSITTLLMIIPRLLNDLQSYQKEQEQGKMNSVLLHMKNHPGLEIEDSIAHIEKIIDSKRKEFLEHVLVDGLSDLPKPCKEIHMSCCKVFEMFFNKKNRYDSNTEMLHDIKKALYDPINVYELSEMEPMPLMAHGDEYMILPLLLNSLPNILEFKRKDGYGAMKTSMCFGRSYRVNKRVMASQLDDQHKPLKIVASQRKPVPMMQSIFAPCFY

SEQ ID NO: 8285 - protein, 528 aa, Odontella sinensis
MAKKILYQDNARRALERGMEIMVEAVSVTLGPKGRNVVLEKPYGSPQIVNDGVTIAKEINLEDHIENTGVALIRQAASKTNDVAGDGTTTATVLAYAMVKEGLKNVTAGANPISIKLGMEKATQYLVTQINEFAQPVEDIQSIEQVASISAGNDNLIGSLIADALSKVGKEGVISLEEGKGIITELEITEGMKLEKGFISPYFITNTEKMEVSYENPFILLTDKRITLVQQDLLPILEQITKTKRPLLLIAEDVEKEALATLILNKLRGIVNVVAVRAPGFGELRKQMLEDIAVLTGGTVITQDAGLSLENIQVNLLGQARRIIVNKDSTTIVGDGLEIEQIKARCEQLRKQVNIADTGYEKEKLQDRIAKLSGGIAVIRVGAVTETEMKDKKLRLEDAINATRAAVEEGIVPGGGATLAHLAENLLTWAKINLKEDELIGAMIISRAIVAPLKRIAENAGINGPVIIEKVQQQEFEIGYNAAKNVFGNMYDEGIVDPAKVTRSGLQNATSIASMILTTECIIVDETD

SEQ ID NO: 8286 - protein, 359 aa, Streptomyces coelicolor A3(2)
MPHMTAFARNQWYVAAYSHEVGRELLGRTVLGEPLVLYRAEEDGGPVVLHDRCVHRRYPLSEAPTRLDGDRIVCGYHGFTYDTTGTCVYVPGQKRVPRTARVASYPVAERDSLVWVWIGDPALADPEAVPRARHLDAPGWVTVRGMEPIDADYGLLVDNLLDLSHETYLHGGHIGTPEVAETPITTEVDEGAGIVRVSRHMDDAECPPFYARSTGIVGRIDRWQDIEYHAPCLYVLHSRVAPTGTVPAPDGGDPEGFHTEITYAITPSGDGKVYDFWAVSRDWATDDAEVTEFLYKSNRTVVMQDVDALNLLQRTLGGERAGYQELSINIDTGGLAARRILARLVEEGEGAGTGPRVAR

SEQ ID NO: 8287 - protein, 329 aa, Mesorhizobium sp. BNC1
MTVLVTGGAGYIGSHMVWELLDHGEEVVVLDRLSTGFDWAVPEAAELVVGDIGDQALLEETIKRRNVDAVIHFAGSIIVPESVADPLGYYLNNTVKSRALIESAVRCGVKHFIFSSTAAVYGTPRKNPVTEDEPLLPESPYGTSKLMTEIMLRDTAAAHDFAYTALRYFNVSGADPKRRTGQSTKGATHLIKVACETATGKRASMEVFGTDYPTPDGTCVRDYIHVSDLVNAHYLALQRLRSGGGSLVANCGYGRGYSVLEVIDAVKQVSGKDFKVVESGRRPGDAVAIVASAERCFAELGWRPEHDDLREIVSDALRWEEILAKRNRV

SEQ ID NO: 8288 - protein, 148 aa, Brassica napus
  misc_feature (140)..(140): Xaa can be any naturally occurring amino acid
  unsure (1)..(148): unsure at all Xaa locations
NIVRFKEVILTPTHLAIVMEYAAGGELFERICNAGRFSEDEARFFFQQLISGVSYCHAMQVCHRDLKLENTLLDGSPAPRLKICDFGYSKSSVLHSQPKSTVGTPAYIAPEVLLKKEYDGKLADVWSCGVTLYVMLVGAXPFEDPDEP

SEQ ID NO: 8289 - protein, 460 aa, Mesorhizobium sp. BNC1
MAKYDLDLFVIGGGSGGVRAGRVAASMGKRVAIAEEYRFGGTCVIRGCVPKKLFVYASQFPEHFEDAAGYGWAVGESRFDWATLIANKDKEIARLEGLYRKGLENAGARLIDGRAVLVDSHTVRVGGETFTAEHILVATGGRPNPHVALPGREHCITSNEAFHLEELPASIAIEGGGYIAVEFANIFHGLGVKTTLIYRGREILSRFDGDLRKGLHEAMEAKGIRILCQDIIEQVEKQPDGRLAAHLMSGGVETFDKIMLAIGRVPNTEGLGLEAAGVETGVRGEILVDGYSRTNVENIWAIGDVTDRVQLTPVAIHEAMCFIETAFKDNPTTVDHRDIATAVFSQPEIGTVGLAEEEAGKHFEELEIYRASFRPMRHTLAGRQDKMIMKLVVDAASKRVVGAHILGPDAGEMAQLLGIAIKGRLTKDVFDRTMAVHPTAAEELVTMYQPSYRVRNGERV

SEQ ID NO: 8290 - protein, 592 aa, Ralstonia metallidurans CH34
MSVIEVKVPDIGDFDAVEVIEVLVKAGDTVEEEQSLIVLESDKASMEVPSSAAGKVVDVKVKVGDKVAKGTLICTVEGGAAAAPAPAPAAAPKPAAAPAPAPAAAPAAATHAGGADIQCEMLVLGAGPGGYSAAFRSADLGMNTVLVERYGTLGGVCLNVGCIPSKALLHNAAVIDEAKALAAHGILFGEAKIDLDGLRHYKESVVGKLTGGLSGMAKARKVQVVRGIGTFLDPHHLEVQETEGDSKATNGKKTVIRFEKAIIAAGSQAVKLPFVPEDPRIFDSTGALELRDIPNKMLVIGGGIIGLEMATVYSTLGARLDVVEMLDGLMQGADRDLVKVWDKVNKHRFDNVMLKTKTVGVEAKPDGIYVKFEGESAPAEPQRYDAVLVSVGRSPNGKKIGAEKAGVAVTDRGFIDVDKQMRTNVPHIYAIGDIVGQPMLAHKAVHEAHVAAEAAHGEKAYFDAKQIPSVAFTDPEVAWAGKTEDQCKAEGIKYSKGVFPWAASGRAIANGRDEGFTKLIFDEETHRIIGGGIVGTHAGDLISEVCLAIEMGADAVDIGKTIHPHPTLGESIGMAAEIYEGVCTDVPPPRKR

SEQ ID NO: 8291 - protein, 256 aa, Oryza sativa
MKIQCDACESAAAAVVCCADEAALCAACDVEVHAANKLAGKHQRLPLEALSARLPRCDVCQEKAAFIFCVEDRALFCRDCDEPIHVPGTLSGNHQRYLATGIRVGFASASPCDGGSDAHDSDHHAPPMGSSEHHHHHQQPAPTVAVDTPSPQFLPQGWALQKESSPPLGFQELEWFADIDLFHNQAPKGGAAAGRTTAEVPELFASQAANDVAYYRPPTRTAAAAFTAATGFRQSKKARVELPDDEEDYLIVPDLG

SEQ ID NO: 8292 - protein, 297 aa, Acinetobacter sp. ADP1
MIEPKLKIETAQTNPMSIEKNIPDLILHDGHSIPALGFGTYTLKGQQGVDTMLRALGHGYRMLDSAFNYENEGAVGAAVRQSGLLRDEIFITSKLPGRHHAYDKAMETIEESLYRMQFDYLDLYLIHWPNPQQGLYIEAWQALIDAQKKGYIRSIGVSNFLPKHIETLRRETGVIPVINQVELHPYFNQAEQRAYDESQQIITMAWSPLGRAKAILDDAVLKQIAQETSRTVVQVVLRWQVQMGVIPIPKAASDQNQMANQAIFDFSLSDDQVQRINALTCADGRIRNQDPAVYEEF

SEQ ID NO: 8293 - protein, 120 aa, Tropheryma whipplei str. Twist
MFSRGFLPSIDLEVLVHGRGSAVSFAIKPLGDRVVIRPADAEQVTASGLVIPDTAQERPQEGEVVAVGPGSLNDDGNRVPLDVSVGDRVIYARYGGTEVKLGDDEYTILASRDVLAVVHR

SEQ ID NO: 8294 - protein, 395 aa, Frankia sp. EAN1pec
MRNTTAPPELASRVGSVQTSPVREILALTERPEVISFAGGLPAPEFFDAEGIRAAYDRVLSEDPRRVLQYSSTEGSPLLRETIAARLAGRGLPTHSDDLLITTGSQQALTLLITALLEPGDAVVVEDPTYLAVLQSFGYAGARVYPVTTDEHGIVPDALAEVAAREKPKMIYLVPNFQNPTGRTVPAERRSAIARVAAECGFWIIEDDPYGELRFEGAAVPWIASIEDAADRTILLGSFSKTMAPGMRLGWLRAPEVLRRACVIAKQAADLHTSTIDQAAAARYLIDSDLDAHIARVCAAYRPRRDALLAGLPRGLPAGSTWNRPEGGMFVWARLPDGYDATALLSAAVRRQVAYVPGAPFYAGPADAATLRLSFTTHSPAEIAEGVTRLAKALR

SEQ ID NO: 8295 - protein, 447 aa, Oryza sativa
MGKEKTHINIVVIGHVDSGKSTTTGHLIYKLGGIDKRVIERFEKEAAEMNKRSFKYAWVLDKLKAERERGITIDIALWKFETTKYYCTVIDAPGHRDFIKNMITGTSQADCAVLIIDSTTGGFEAGISKDGQTREHALLAFTLGVKQMICCCNKMDATTPKYSKARYDEIVKEVSSYLKKVGYNPDKIPFVPISGFEGDNMIERSTNLDWYKGPTLLEALDQINEPKRPSDKPLRLPLQDVYKIGGIGTVPVGRVETGVLKPGMVVTFGPSGLTTEVKSVEMHHEALQEALPGDNVGFNVKNVAVKDLKRGYVASNSKDDPAKEAASFTSQVIIMNHPGQIGNGYAPVLDCHTSHIAVKFAELVTKIDRRSGKELEKEPKFLKNGDAGMVKMIPTKPMVVETFSEYPPLGRFAVRDMRQTVAVGVIKNVEKKDPTGAKVTKAAAKKK

SEQ ID NO: 8296 - protein, 225 aa, Thiomicrospira crunogena XCL-2
MQTLPENWTVFESAELVAQALAETLLELAEKAIAARGKFLLVTAGGTTPQRCYEILSTREADWQNWHIYMGDERCLPAEDKDRNSVSLKQAWLFFGKIPSDHIHLIPTELGPELAADAYQKLLANVTRFDVVLLGMGEDGHTASLFPGHAYSGGKAVVIERDSPKPPAERVSLSFQALSQSRYVFKLITGKNKRDAVHQWLSGESLPIQKITGEHTMVWLDESAL

SEQ ID NO: 8297 - protein, 485 aa, Agrobacterium tumefaciens
MQNKVQFITYVDRLTRGGFRQLKELVDGKFAGLFGGVHVLPFFNPIDGADAGFDPTDHTIVDPRLGDWEDVRALSGSVEIMADLIVNHVSSQSGAFTDFIAKGSASEFADMFMTFDKVFPDPATEEDLLRIYRPRPGLPFSKVTLADGTQRMLWTTFTPEQIDIDVHSAKGTTYLETILDRFSEANVTAIRLDAAGYAIKKAGSSCFMIDDTYAFLEEVAGKARNRGMEVLVEIHSYHRDQIEIAKKVDRVYDFALPPLILHALFTGDATPLAKWLAISPRNAITVLDTHDGIGVIDVGAHSDGRAGLLEPQAIDNLVGEIHRRSDGQSRQATGAAASNLDLYQVNCTYYDALGRNDNDYLIARAIQFFAPGIPQVYYVGLLGGVNDMDLLAKTGVGRDINRHYYGNDEIGTALETPLFHRLSNLIRFRNTHPAFGGALKATIADAGALVLSWQHGDAFAELKISFADRKASIAASGQSEMQIVE

SEQ ID NO: 8298 - protein, 341 aa, Haemophilus ducreyi 35000HP
MLKKIIRAAILGLFCAFLILYVAPIVNNNVDVLPQSSKKIASFHDAVNLASPAVVNVYNRSLDEKTSAFEVKNLGSGVVMTEDGYILTNKHVIEDAEQIIVAFQTGEISDAKLVGADTLTDLAVLKVHAQYLQTIPQNDERPIRIGDIVLAIGNPFNLGQSISQGIISATGRNALTDGGRQNFIQTDASINRGNSGGALINSVGELIGINTLSLGKTNDELAEGLNFAIPINLAKQIMAKIIKDGRVIRGYFGVNSTLYSNAENSDNGVLITGVAVNGPADEAGIKKNDRILKVGNIRAVSPTQMMDVLANMKPGTQVNVQVLRDNHIFDVDVIIGEFPAL

SEQ ID NO: 8299 - protein, 567 aa, Cryptococcus neoformans var. grubii
MDPPHASSIPSSSSSMPTPGSASTSANKPKKFKLDPMSMLLPHERPGYRGSPAACRSMPPIHNQFQLQPQPGSPAYFAMLQSQQVQQDSATQRIGIPTRTAASMGEQGGKRGESSGSQIPTQAPVGSQHPAQGVPLSPPASMSSTPQSGSWEDSASQWSSMEGVVDGKPASGQRSQPSRHYAPRMTQGNMRLEDWEIVETLGTGTFGRVLLVRQRPSYRPTPYHPIFPHLYRSRHPLSPSPSTTQKSDDHLPHFAMKVLRKSEIVRLKQVEHINSERIILERVRHPFIVELHATYQDQINVYMLLFYIPGGELFSHLRRAGRFSADVTRFYLASIVLAIEYLHSRNIIYRDLKPENLLLDRHGYLRIADFGFAKVVQDRTFTLCGTPEYLAPEIVLSQGHGKAVDWWALGILGFEMLAGYPPFFDDHPLGIYEKILRGDIAFPSHIDPFAKDLIRGLLTADRSKRLGNLRGGAKDVMGHPWFAGVDWRSLERKEIGAPIVPRVASMGDSQNFQRYPPPRPQDLPGVFGQTYNTSSDPCGELFTDFSFPRGESERGSASGSAEVLGRQ

SEQ ID NO: 8300 - protein, 387 aa, Guillardia theta
IGAKFWEVISDEHGVDPTGTYHGDSDLQLERINVYYNEATGGRYVPRAVLMDLEPGTMDSVRAGPYGQIFRPDNFVFGQTGAGNNWAKGHYTEGAELIDSVLDVVRKEAESCDCLQGFQISHSLGGGTGAGMGTLLISKIREEYPDRIMLTFSVVPSPKVSDTVVEPYNATLSVHQLVENADECFCIDNEALYDICFRTLKLTTPTFGDLNHLVSAVMSGVTCSLRFPGQLNSDLRKLAVNIVPFPRLHFFMVGFAPLTSRGSQQYRALTVPELTQQMFDAKNMMCAADPRHGRYLTCAAMFRGRMSTKEVDEQMLNVQNKNSSYFVEWIPNNVKASVCDIPPKGLKMAVNFIGNSTAIQEMFKRVSEQFTGMFRRKAFLHWYTGEG

SEQ ID NO: 8301 - protein, 390 aa, Guillardia theta
LYCLEHGINPDGSIIQDFNKKKNDDAFSTFFSETSTGKRVPRCVFLDLESGVIDEVKNGRYKNLYHPEQLICGNEDAANNYARGHYTIGKEIIEIALDRIRKLVENCSGLQGFLIFNSVGGGTGSGLGSLLLERLSLDYGKKSKLGFTVYPSPQVSTAVVEPYNSVLATHSLLEHTDVAVVLDNEAIYEICQRSLNIERPTYTNLNRLIAQVISSITASLRFDGALNVDITEFQTNLVPYPRIHFMLSSLAPVISLEMANHEQYSTAEITNAAFEPNSMMAKCDPRRGKYMACCLMFRGDVAPKDVNGSVAAIKTKKTIQFVDWCPTGFKCGINYQPPTVVPDGDLAKVDRAVCMISNSTAISEVFSRINKKFDLMYSKRAFVHWYVGEG

SEQ ID NO: 8302 - protein, 412 aa, Kluyveromyces lactis NRRL Y-1140
MLSLKAQSSVVGKSSSLRLVRNFSKNVRALSQVADETKPGDDDLVQIDLPETSFEGYLLDVPELSYQTTKSNLLQMYKDMIIVRRMEMACDALYKAKKIRGFCHSSVGQEAIAVGIENAITKRDTVITSYRCHGFTYMRGAAVQAVLAELMGRRTGVSFGKGGSMHLYAPGFYGGNGIVGAQVPLGAGLAFAHQYKHEDACSFALYGDGASNQGQVFESFNMAKLWNLPAVFCCENNKYGMGTAAARSSAMTEYFKRGQYIPGLKVNGMDILAVYQASKFAKDWTVSGNGPIVLEYETYRYGGHSMSDPGTTYRTRDEIQHMRSKNDPIAGLKMHLLELGIATEDEIKAYDKAARKYVDEQVELADAAPAPEAKMSILFEDVYVPGSETPTLRGRLQEDTWDFAKKSFAFRD

SEQ ID NO: 8303 - protein, 387 aa, Guillardia theta
IGAKFWEVISHEHGVDTNGTYFGNKDNQIEKIDVYYNEVSGNRFVPRAVLVDLEPGTMDSVRASNYGRLFRPDNFVFGQSGAGNNWAKGHYTEGAELIESAMDIIRKESEQCECLQGFQIAHSLGGGTGSGMGTLLISKIREEYPDRMMCTYSVVPSPKVSDTVVEPYNCTLSIHQLVENADEVFCIDNEALYDICFRTLKLVTPSYGDLNHLVSAVMSGITCSLRFPGQLNADLRKLAVNLVPFPRLHFFMVGFAPLGSRGSQQYRSMTVNDLTQQMFDSKNMMAACDPKNGRYLTAAAYFRGKISTKEVDDQMIEIQNKQSEHFVEWIPHNIKSSVCDIPPKGMKMSAAFIGNSTSIQELFKRVGEQFQAMFRRKAFLHWYTGEG

SEQ ID NO: 8304 - protein, 485 aa, Taxus x media
MDALKQLEVSPSILFVTLAVMAGIILFFRSKRHSSVKLPPGNLGFPLVGETLQFVRSLGSSTPQQFIEERMSKFGDVFKTSIIGHPTVALCGPAGNRLVLSNENKLVQMSWPSSMMKLIGEDCLGGKTGEQHRIVRAALTRFLGPQALQNHFAKMSSGIQRHINEKWKGKDEATVLPLVKDLVFSVASRLFFGITEEHLQEQLHNLLEVILVGSFSVPLNIPGFSYHKAIQARATLADIMTSLIEKRRNELRAGTASENQDLLSVLLTFTDERGNSLADKEILDNFSMLLHGSYDSTNSPLTMLIKVLASHPESYEKVAQEQFGILSTKMEGEEIAWKDLKEMKYSWQVVQETLRMYPPIFGTFRKAITDIHYNGYTIPKGWKLLWTTYSTQTKEEYFKDADQFKPSRFEEEGKHVTPYTYLPFGGGMRVCPGWEFAKMETLLFLHHFVKAFSGLKAIDPNEKLSGKPLPPLPVNGLPIKLYSRS

SEQ ID NO: 8305 - protein, 361 aa, Kluyveromyces lactis NRRL Y-1140
MSKKFASEDGSFKRQVSSFRETISSTHPIYKPEKGRYWLYVSLACPWAHRTLITRVLKGLTSVIGISVVHWHMDEKGWRFLPYNESNKTDGKESYKPSAGLKCEKDLCVSADVDNHSIKYGIDGTIDHNYHFQRISELYFKSEPEYAARFTVPVLWDLKTQTIVNNESSEIIRIFNSGVFNEVADSHPDIDLVPKELESQIDEINSWVYDSINNGVYKTGFAEKQDIYEKEVLNVFKHLDKVEGILKKRYETLKSTHSSEEEIVKKLYLLGDQLTEADLRLYPTIVRFDPVYVQHFKTNLNTIRSGYPYIHLWLRNLYWNYEAFQETTNFNHIKWHYTRSHTKINPLSITPLGPSPNILPL

SEQ ID NO: 8306 - protein, 589 aa, Cyanidium caldarium
MDWKMMIAAVGIKEGQKESFHLVRAGLLKLATSETDELLIEVANEFIRADPEKRFFLVEALESILKNKKMEEEQLSSVSKSEHRVVKFRKRRQVVKSSRKQRRRYDWRSIDSPYLWEDNSKKTDSSTRNARDNNNNSDHSNECQQVVLSILHNVLQQLSSSPPTRLPLYDWWMEWEYFCKERMQQKQLGRVRETNRHIREQRVVQVLERIQGEEDEVTIDEIEIAAKTVARIMDYSDSYWSDHGNKKNRRRRSTNSDSFSTYLTEIGKVHRLSLEEEKEICQEIAFFTHLEAVREDLRRRIGRLPREHEWAMETNMSVSELRGKLIKGRRAKNRMVAANLRLVICFAKRFRNRGVAFQDLVQEGSIGLIRGVEKYDANRGFRFSTYASWWIRQGIHKALLECSKMFRLPVHVNEMIKEIRRCSYELMNILGREPTKLEIAMKVGMPEEKVIFLLQRAQTALSLEMPLRGSDSSLESRTLGDVVSSTASPSPEDSAFGTSLRYDLERALSQLDFREREVIRMRFGLDDGRTKSLGEVGSLFCVTRERVRQIETRALRKLRDPRCNIFLKEYMEWISDERPGMKKPMAVVD

SEQ ID NO: 8307 - protein, 133 aa, Lupinus albus
VHRSDSSSSSSSDEEEIGEDGEKKKKKKEKKGLKEKIKEKITHDDDKEEKKHEDTTVPVEKIEVDPEHQKGFLEKIKDKLPGQHKKTDEVAVPPASSTVYGDAHTETDAAVAHEGEAKEKKGLLEKIKEKLPG

SEQ ID NO: 8308 - protein, 95 aa, Xylella fastidiosa Temecula1
MSIKPLHDRIVVKPIEADEVSPGGIVIPDSAKEKSTKGEVIAVGAGKPLDNGNVRTPCVKVGEKVIYGQYAGSTYKAEGVEYKVLREDDILAIIG

SEQ ID NO: 8309 - protein, 547 aa, Xylella fastidiosa Temecula1
MAAKEIIFSEKARSRMVHGVNLLANAVKATLGPKGRHVVLDKSFGSPIITKDGVSVAKEIELADKFENMGAQMLKEVASKTNDHAGDGTTTATVLAQALIREGCKAVAAGMNPMDLKRGIDKAVIAAVTELKKISKPTSDDKAIAQVATISANSDESIGNIIAEAMKKVGKEGVITIEEGTTLENELDVVEGMQFDRGYSSPYFINNQQSQIVELDNPYILLHDKKISSVRDLLTVLDAVAKESKPLLIVAEEVEGEALATLVVNNIRGIIKVCAVKAPGFGDRRKAMLEDMAVLTGGTVISEEVGLSLEKATTSHLGKAKKVRVSKENTTIIDGMGDNDAINGRVKQIKTQIEETTSDYDREKLQERVAKLAGGVAVIKVGAATEVEMKEKKARVDDALLATRAAVEEGVIPGGGVALIRAITAISNLKGANEDQTHGIQIALRAMEAPLREIVANAGEEPSVILNKVKEGKDNFGYNAATGEFGDMVNLGILDPTKVTRSALQNAASIAGLMITTEAMVAEAPKKDEPTPPAAGGGMGGMGGMDF

SEQ ID NO: 8310 - protein, 250 aa, Geobacter sulfurreducens PCA
MIYLFSHAGLRDLRDFIDRSTLFAFDLDGTLAPIVSDPAGIMIPPDVHERLVRLNGTASVAVVTGRARVDAARHLGFAPRFLVGNHGAEGLPGADAAEREFIGLCRGWMTQLGELLPEGEGTGIVMEDKSATLSLHYRNAPDRENAHQRILAAVSRLLPAPRRVSGKLVENLVPAAAPHKGDALRCIMRHLGCARALFVGDDVTDEDVFRLGDEAIFGIRVGNSGGSAARYFIRGQDEMAPLLDEILAVL

SEQ ID NO: 8311 - protein, 486 aa, Geobacter sulfurreducens PCA
MGERILVVSNREPYIHIRTGDTVEVHRPASGLVTAVEPVMRACSGTWIAHGSGSADRETVDSHDRVRVPPHKPEYNLRRIWLTKEEEEGYYYGFANEGLWPLCHIAHVRPVFRTSDWQQYVRINQRFADAVVKEADSDDPVVLVQDYHFALLPAMIRKALPKATIITFWHIPWPNPESFGICPWREELLKGMLGSTILGFHTPYHCKNFLETVDRYLETRIEHESSTISRRGQLTMVESYPISIQWPPAWQGTLPPVDVTRSEILGELGLPLDHLIGVGVDRMDYTKGIPERFMAVERLFELHPELVGRFTFVQIAAPSRSALEEYQAFEARVHSHAERINGRFSRDGRPAIILKAEHHEPEQVNRYYRAADVCMVTSLHDGMNLVAKEYVAARDDERGALVLSQFTGAAHELHEALIVNPYHVEQTAEALHRALTMPDYEQRERMRSMRMLVRDFNVYRWAGRMLLDAARVRQREKLAARIGGES

SEQ ID NO: 8312 - protein, 539 aa, Mycoplasma pulmonis UAB CTIP
MTLRSKMTKYIFVTGGVVSGLGKGVSAASIGNLLKHRGFKIFVLKLDPYLNIDPGVMSPYEHGEVYVTADGGETDLDLGHYERFIDVELSKDSNYTSGKIFSNLFTQERNGNFLGKTVQLIPHFTNEILNTIEKIATKHKPDFMIVEIGGTIGDIESNSFIYAMAELALAKPDRFFLVHVTYVIFLEASNEFKSKPTQVSINSLRSFGISPNLVLLRNSKMVPDNIVEKIAKKSVLNKDYVISVPDMKNIYEAPLYFESQNIAQIILSHFKIKDIEPDLSKWNKLVDSIKKPKAYKAKILMVGKYVEFLDAYKSIIEAFKVSSYEENIDLKMDWVDSSKLELTNLDEFLKGYDGVVILPGFGIRGWEQKVRIAQYTRENKIPTFGICLGFQAMSVAHARMKGIKNANSREFANDKNDETYILDLIQGKAKDKNLGGTLRLGNYTTTIKENTLAKKIYQKDQVIERHRHRYEINSKYIDLLEDEEFVFSGIWNEGKLAEICEVKNHPFYLGVQYHPEFTSRPLKPNPLFTSFLRVLIKNN

SEQ ID NO: 8313 - protein, 309 aa, Desulfotalea psychrophila LSv54
MKNMKKIAVIGSNMVDLVTYTDRMPVAGETLEAPDFDLGFGGKGANQAIAAAKLGGEVLMLSKVGDDVFGPNTRANFVANGIDARYVETAAGISSGVAPIFVDAKGQNSILIVKGANKHLSPVDVDRAIDDIRACDLIVMQLEISLETVYYVIELGLREHIPVLLNPAPAVAGLDMEKICQLDMLVPNETELEILTGMPVQTLEQIQAAAKFLIDAGIKKVIVTMGSKGALLVTEKEMTSVPCPQVKAKDTSGAGDAFIGCFAKHYVEGGELIPAMEEAVIYASLSTTRPGTQKSYADIDQFEAYKRFL

SEQ ID NO: 8314 - protein, 600 aa, Streptomyces coelicolor A3(2)
MHPDRESAWTAPADAVEQPRQVRRILKLFRPYRGRLAVVGLLVGAASLVSVATPFLLKEILDVAIPEGRTGLLSLLALGMIFGAVLTSVFGVLQTLISTTVGQRVMHDLRTAVYGRLQQMSLAFFTRTRTGEVQSRIANDIGGMQATVTSTATSLVSNLTSVVATIVAMVVLDWRLTVVSLLLLPVFVWISRRVGRERRKITTRRQKQMAAMAATVTESLSVSGILLGRTMGRSDSLTRAFADESESLVDLEVRSNMAGRWRMAVITIVMAAMPAVIYWTAGIALQLGGPDVSLGTIVAFVSLQQGLFRPTVSLLSTGVQIQSSLALFQRIFEYLDLPIDITERKDAVHLDHIKGEVRFEGVGFGYGGKGGPVLDGIDVTVPAGSSLAVVGPTGAGKSTLGHLVPRLYDVTDGRVTLDGVDVRDLDFDTLARAVGVVSQETYLFHASVAENLRFAKPDATDAELEAAARAAQIHDHIAALPDGYDTVVGERGHRFSGGEKQRLAIARTILRDPPVLVLDEATSALDTRTEAAVQGAIDALSANRTTITIAHRLSTVRDADRIVVLDSGRLAEQGTHEALLAQDGRYAALVRRDARLEPTR

SEQ ID NO: 8315 - protein, 179 aa, Dendrobium grex Madame Thong-IN
LTLTKCCMQRGSHFRSRSGSQEARSGSSMSRCNSMDTKFCYYNNYNVNQPRHFCKNCQRYWTAGGSMRNVPVGAGRRKNKHTGSVYRHTVITPDSLASLQVDGPDLVDHKPLSPFKVNGTILKFGPDAPLCESMASILNLGEQNLSSQLDFTAGAENREETSCSSACKPVKKKDITQHN

SEQ ID NO: 8316 - protein, 508 aa, Mycobacterium bovis AF2122/97
MGAVTVPIYETSSAEQVRWVLQDSEAVVLFAETDSHATMVAELSGSVPALREVLQIAGSGPNALDRLTEAGASVDPAELTARLAALRSTDPATLIYTSGTTGRPKGCQLTQSNLVHEIKGARAYHPTLLRKGERLLVFLPLAHVLARAISMAAFHSKVTVGFTSDIKNLLPMLAVFKPTVVVSVPRVFEKVYNTAEQNAANAGKGRIFAIAAQTAVDWSEACDRGGPGLLLRAKHAVFDRLVYRKLRAALGGNCRAAVSGGAPLGARLGHFYRGAGLTIYEGYGLSETSGGVAISQFNDLKIGTVGKPVPGNSLRIADDGELLVRGGVVFSGYWRNEQATTEAFTDGWFKTGDLGAVDEDGFLTITGRKKEIIVTAGGKNVAPAVLEDQLRAHPLISQAVVVGDAKPFIGALITIDPEAFEGWKQRNSKTAGASVGDLATDPDLIAEIDAAVKQANLAVSHAESIRKFRILPVDFTEDTGELTPTMKVKRKVVAEKFASDIEAIYNKE

SEQ ID NO: 8317 - protein, 1039 aa, Bifidobacterium longum NCC2705
MFLKPEQQLERCRRIVRQRVDPHIHPSIAQLTVESYDIPGEPMPSDEFFAKLDRGDIDFKPFMLGSEWGTTWGTVWFRLTGTVPAGYPKGKPLELILDLGWYPHSCGGHIEGLVYRADGTAIKAVHPLNYWVPFMDAEGNAQVPVAEDGSFTLYLEAASNPLLLGVPPFIETELGDHATGKPDEPYVFKSADLAEFDERYENYSVDLDVVSSLMEFADKQSPRYWQLAKALQRSLNAYDERNPESVEAARAVLAGVLAKPANASAMNVSAIGHAHIDSAWLWPVRETRRKVARTVSNALALMDADPDFKYAMSSAQQYAWLEEDHPDIFKRMKRRIEEGRFIPVGGMWVEADGMLPAGESLIRQIAYGRKYFKEHLGVEPKGVWLPDSFGYTGAWPQIARRAGYEWFLTQKISWNDTTKFPHHSFMWEGIDGSRIFTHFPPADTYAAWCKVQELDYAEKNFQDKDLSDRSLLLFGFGDGGGGPTRNMMEHLHRYENLEGVSKVSIEEPNDFFDKAHQQLAENAGPEMPVWKGELYLELHRGTLTSQQDMKRGCRQEESLLRTVEYLGAAAVLSDPEYVYPREELDRIWKTLLLNQFHDILPGSAIAWVHREAREDYRRDLKRLAEIAQDMCAVLRKANPQADLLAEARISQFRNDGASWHANRINEPTDALSVLTQTLDNGRVLLANGVLSVTIEADGTISSLLDEEHGRELVPAGTRLGQYELLRDEPAVWDAWEIERESLLMANAVTGSIESVNTENGAAQVHVHTADGDTVITTTITLRPGSHTLDFHADIDWHERERFLKVDLPLGIVADQATYDCQYGLIRRPIVKNTASDEAKYESSTNRFAIIGDAGYAAAVINGSVYGSDASPIAGNAAEGRDSGTMFRLSLLSAPTFPDPRTDIGSHEFDWSVVADATVDRALDAAGVLNAPVLHDVPDITPLASIESVNGTVVLDWMKLADDGSGDLIVRAYEAAGGQADAMLHVCPALAGASVHETNVLEGDDLAADLPVALQDGRQNAEGATLHFGPFQLATLRITR

SEQ ID NO: 8318 - protein, 1046 aa, Bifidobacterium longum NCC2705
MFLLPNQQLERCDRVMQQRVKPHIHTTLAACTLRSFHNPGEPVPSSEFLAKVRNGQVPFEPFRVPGVWGTTWGTTWFEVNGHIDMAAVKGRKVELMVDLGWLDHRGPGFQSEGLVYRADGTAIKSANPRNHWIPLVYADGSSTVELDEHGDFTVYIEAAANPFVEGPTPFSPTELGEEATGTCDFPYTLSRMDITIFNEDVFAYDMDLETVSSLIRELKDDDPRYWQLAKALQRSLNIYDERDLETVPAARAALAGVLAEPAASSAINHIAIGHAHIDSAWLWPVRETRRKVARTVSNVLALMDEDPDFTYAMSSAQQYAWLEEEHPDLFARMKRRIEEGRFIPVGGMWVESDNMIPSGESLVRQITFGRRYFKEHLGVTPRGIWLPDSFGYAGSWPQIARRAGFDWFLTQKISWNDTTKFPHHSFMWEGIDGTRILTHFPPSDTYCSSMSMRELMYSQRNFLDKDLSRNAILLYGFGDGGGGPTREMTARIRRDHDLAGAPKIDFGTPDQLFDRVRKDIVDDARGETPVFHGELYLELHRGTLTAQQDMKRGCRQEESMLRVVEYLCAVASIKNPGYVYPREELDRIWKTLLLNQFHDILPGSAIAWVHRQAREEYARDIAHLRDIAAAAGQAVKEAEPGIATVKHAVIAPYASNPQYSWAVRDGGGTAVEESVIPVSVERGGNAIILDNGRLRVRIEADGTVSSLIDLALRRELVPSGVRMGRYELLKDEPFHWDAWDIQRDAFLAADTLTDAMVEHVEDMPDGSAAIHVVTRARGVEIHTVITLRPGSGSLDFTADVNWHAVEKFLKVDMPVTVQAVNAQYECQYGLVERPINKNTRSDDAKFESCTHRFVRIADADYAAAVVNASTYGSDVSPIHAAAAHGAGRGTMVRLSLLSAPLYPDPRTDQGEHFFAWSLVAGAGMESVLAEASRLNAPIMGELPAVRPLATLTDVAGTPVLDWVKLADDGSGDLIVRLYEAAGGDAKATLRLDDTFAGCTVEEVNLMEEPVLADDLPRALVAGGPVPAEGASVSFTPFQIVTLRIRR
